(19) United States
(12) Patent Application Publication
(10) Pub. No.: US 2005/0228172 A9
(43) Pub. Date: Oct. 13, 2005

(54) Identification and mapping of single nucleotide polymorphisms in the human genome

(76) Inventor: David G. Wang, Kildeer, IL (US)

Correspondence Address: WILMER CUTLER PICKERING HALE AND DORR LLP, 60 STATE STREET, BOSTON, MA, 02109, US

(21) Appl. No.: 09/925,065

(22) Filed: Aug. 8, 2001

Related U.S. Application Data
(60) Provisional application No. 60/243,096, filed on Oct. 24, 2000.
(60) Provisional application No. 60/252,147, filed on Nov. 20, 2000.
(60) Provisional application No. 60/250,092, filed on Nov. 30, 2000.
(60) Provisional application No. 60/261,766, filed on Jan. 16, 2001.
(60) Provisional application No. 60/289,846, filed on May 9, 2001.

(51) Int. Cl. C12Q 1/68; C07H 21/04

(52) U.S. Cl. 536/24.3

(57) ABSTRACT

The invention relates to the role of genes in human diseases. More particularly, the invention relates to compositions and methods for identifying genes that are involved in human disease conditions. The invention provides identification and mapping of a very large number of SNPs throughout the entire human genome. This contribution allows scientists to isolate and identify genes that are relevant to the prevention, causation, or treatment of human disease conditions.

### BACKGROUND OF THE INVENTION

[0001] 1. Field of the Invention

[0002] The invention relates to the role of genes in human diseases. More particularly, the invention relates to compositions and methods for identifying genes that are involved in human disease conditions.

[0003] 2. Summary of the Related Art

[0004] During the past two decades, remarkable developments in molecular biology and genetics have produced a revolutionary growth in understanding of the implication of genes in human disease. Genes have been shown to be directly causative of certain disease states. For example, it has long been known that sickle cell anemia is caused by a single mutation in the human beta globin gene. In many other cases, genes play a role together with environmental factors and/or other genes to either cause disease or increase susceptibility to disease. Prominent examples of such conditions include the role of DNA sequence variation in ApoE in Alzheimer's disease, CKR5 in susceptibility to infection by HIV; Factor V in risk of deep venous thrombosis; MTHFR in cardiovascular disease and neural tube defects; p53 in HPV infection; various cytochrome p450s in drug metabolism; and HLA in autoimmune disease.

[0005] Surprisingly, the genetic variations that lead to gene involvement in human disease are relatively small. Approximately 1% of the DNA bases which comprise the human genome contain polymorphisms that vary at least 1% of the time in the human population. The genomes of all organisms, including humans, undergo spontaneous mutation in the course of their continuing evolution. The majority of such mutations create polymorphisms, thus the mutated sequence and the initial sequence co-exist in the species population. However, the majority of DNA base differences are functionally inconsequential in that they neither affect the amino acid sequence of encoded proteins nor the expression levels of the encoded proteins. Some polymorphisms that lie within genes or their promoters do have a phenotypic effect and it is this small proportion of the genome's variation that accounts for the genetic component of all difference between individuals, e.g., physical appearance, disease susceptibility, disease resistance, and responsiveness to drug treatments.

[0006] The relation between human genetic variability and human phenotype is a central theme in modern human genetic studies. The human genome comprises approximately 4 billion bases of DNA. The Human Genome Project is uncovering more and more of the of the consensus sequence of this genome. However, there remains a need to identify the nature and location of genetic variations that are implicated in human disease conditions.

[0007] Sequence variation in the human genome consists primarily of single nucleotide polymorphisms (“SNPs”) with the remainder of the sequence variations being short tandem repeats (including microsatellites), long tandem repeats (minisatellite) and other insertions and deletions. A SNP is a position at which two alternative bases occur at appreciable frequency (i.e. >1%) in the human population. A SNP is said to be “allelic” in that due to the existence of the polymorphism, some members of a species may have the unmutated sequence (i.e., the original “allele”) whereas other members may have a mutated sequence (i.e., the variant or mutant allele). In the simplest case, only one mutated sequence may exist, and the polymorphism is said to be diallelic. The occurrence of alternative mutations can give rise to triallelic polymorphisms, etc. SNPs are widespread throughout the genome and SNPs that alter the function of a gene may be direct contributors to phenotypic variation. Due to their prevalence and widespread nature, SNPs have potential to be important tools for locating genes that are involved in human disease conditions. Wang et al., Science 280: 1077-1082 (1998), discloses a pilot study in which 2,227 SNPs were mapped over a 2.3 megabase region of DNA.

[0008] To be useful for locating and identifying genetic variations linked to human disease, however, it is necessary to identify and map a much larger number of SNPs, and to do so throughout the human genome. There is therefore a need for the identification and mapping of a very large number of SNPs throughout the entire human genome.

### BRIEF SUMMARY OF THE INVENTION

[0009] The invention provides identification and mapping of a very large number of SNPs throughout the entire human genome.

[0010] In a first aspect, the invention provides SNP probes which are useful in classifying people according to their genetic variation. The SNP probes according to the invention are oligonucleotides which can discriminate between alleles of a SNP nucleic acid in conventional allelic discrimination assays.

[0011] In a second aspect, the invention provides methods for using a large-scale map of SNPs throughout the human genome to isolate and identify genes that are relevant to the prevention, causation, or treatment of human disease conditions. Preferred embodiments of this aspect of the invention include linkage studies in families, linkage disequilibrium in isolated populations, association analysis of patients and controls and loss-of-heterozygosity studies in tumors.

### BRIEF DESCRIPTION OF THE DRAWINGS

[0012] FIG. 1 depicts the number of human restriction fragments with sizes in a 200 bp range centered on a given point for a typical six-cutter restriction enzyme.

[0013] FIG. 2 depicts for each SEQ ID NO., the polymorphism within the consensus sequence, the position of the polymorphism in the consensus sequence along with the identity of the polymorphism and frequency of the alleles, and the map location of the identified sequence. For example, for a polymorphism in which “a” is identified 4 times and “t” is identified 2 times within a consensus sequence at position 35 from the 5′ end, the text identifying the sequence will read “SEQ ID NO. ###; polymorphism=w; position=35; alleles=a(4)t(2).” In some cases, the polymorphism consists of a single base deletion. In this case, the deleted base is indicated as a hyphen (-). The map location of the listed sequence is described by each of the various means which were used to identify the location, including the following:
[0014] 1) base location relative to GenBank hit is listed as “sequence=ACC/Off” where “Acc” is the accession number of the matching GenBank entry and “Off” is the offset of the polymorphism from the start of the GenBank entry, for example, “sequence=M39218/98112” indicates that the polymorphism is 98,112 base pairs offset from the start of GenBank entry M39218.
[0015] 2) chromosome number is listed as chromosome=N, where N is the chromosome number, for example “chromosome=12”.
[0016] 3) cytogenetic position is listed as cytogenetic=I, where I is the cytogenetic position, for example “cytogenetic=1q12.3”.
[0017] 4) radiation hybrid (“rh”) position relative to a GenBank entry is listed as rh=Acc/Offset (P), where “Acc” is the accession number of the relative GenBank entry, “Offset” is the centiray distance from the relative Genbank entry, and “(P)” is the radiation hybrid panel used. For example “rh=M39128/21.2 (TNG)” indicates that the sequence is located 21.2 centiray from GenBank entry M39128 using the TNG radiation hybrid panel. Multiple map coordinates may be provided for any SEQ ID NO. and each coordinate is separated by a space, for example “map location=[chromosome=12 rh=M39128/21.2(TNG) cytogenetic-12q18.1].” When the map position is unknown, the map fields are blank.

### DETAILED DESCRIPTION OF THE PREFERRED EMBODIMENTS

[0018] The invention relates to the role of genes in human diseases. More particularly, the invention relates to compositions and methods for identifying genes that are involved in human disease conditions. Any patents and publications cited herein reflect the knowledge in this field and are hereby incorporated by reference in entirety. Any conflict between any reference cited herein and the specific teachings of this specification shall be resolved in favor of the latter.

[0019] The invention provides identification and mapping of a very large number of SNPs throughout the entire human genome. This contribution allows scientists to isolate and identify genes that are relevant to the prevention, causation, or treatment of human disease conditions.

[0020] In a first aspect, the invention provides SNP probes which are useful in classifying people according to their genetic variation. The SNP probes according to the invention are oligonucleotides which can discriminate between alleles of a SNP nucleic acid in conventional allelic discrimination assays. As used herein, a “SNP nucleic acid” is a nucleic acid sequence which comprises a nucleotide which is variable within an otherwise identical nucleotide sequence between individuals or groups of individuals, thus existing as alleles. Such SNP nucleic acids are preferably from about 15 to about 500 nucleotides in length. The SNP nucleic acids may be part of a chromosome, or they may be an exact copy of a part of a chromosome, e.g., by amplification of such a part of a chromosome through PCR or through cloning.

[0021] The SNP probes according to the invention are oligonucleotides that are complementary to a SNP nucleic acid. The term “complementary” means exactly complementary throughout the length of the oligonucleotide in the Watson and Crick sense of the word. In certain preferred embodiments, the oligonucleotides according to this aspect of the invention are complementary to one allele of the SNP nucleic acid, but not to any other allele of the SNP nucleic acid. Oligonucleotides according to this embodiment of the invention can discriminate between alleles of the SNP nucleic acid in various ways. For example, under stringent hybridization conditions, an oligonucleotide of appropriate length will hybridize to one allele of the SNP nucleic acid, but not to any other allele of the SNP nucleic acid. (See e.g., Saiki et al., Proc. Natl. Acad. Sci. USA 86: 6230-6234 (1989)). For this application, preferred oligonucleotide lengths are from about 15 nucleotides to about 25 nucleotides. Preferred final hybridization conditions for this application are 2×PBS at room temperature. Preferably, the oligonucleotide is labeled, most preferably by a radiolabel, an enzymatic label, or a fluorescent label. Alternatively, an oligonucleotide of appropriate length can be used as a primer for PCR, wherein the 3′ terminal nucleotide is complementary to one allele of the SNP nucleic acid, but not to any other allele. In this embodiment, the presence or absence of amplification by PCR determines the haplotype of the SNP nucleic acid.

[0022] To identify the SNP nucleic acids (sometimes referred to hereafter simply as “SNPs”) present in the human genome, a whole genome approach was taken to identify SNPs on a large scale. The method described in the following examples, termed the “Reduced-Representation Shotgun” or “RRS”, was utilized as it allows the random sequencing of a specific subset (e.g., 1%) of the genome from a collection of individuals.

[0023] Our intent was to sequence each fraction of the genomic DNA to a depth of 2.5-5× coverage. This level of coverage was determined through a calculation of Poisson sampling for different levels of SNP allele frequency. Briefly, the proportion of SNPs identified increases with the depth of coverage of the sequencing (the sequencing of a fragment from one individual provides 1× of coverage and the sequencing of the same fragment from each additional individual provides and additional 1× of coverage), and more common SNPs are more rapidly detected than less common SNPs. The efficiency of detection, or number of SNPs detected per additional 1× depth of coverage, however, peaks at about 2.5× coverage and diminishes significantly when greater than 5× coverage is obtained (calculation not shown).

[0024] The distribution of restriction sites tends to be uniform across the human genome (with the exception of restriction sites containing the CpG dinucleotide). Thus, the proportion of the genome present in any size fraction can be varied by the size and extent of the fraction taken. For example, in a survey of available genomic sequence data on chromosomes 22 and X, the frequency and distribution of restriction fragments was examined, see Table 1.

TABLE 1
Distribution of Restriction Fragments in Genomic Sequence.

| Enzyme | EcoRI | EcoRV | BamHI | HindIII | HindIII |
|---|---|---|---|---|---|
| Chromosome | 22 | 22 | 22 | 22 | X |
| Size Range (kb) | | | | | |
| 1-2 | 40.9 | 13.7 | 29.7 | 44.6 | 67.6 |
| 2-3 | 33 | 12.6 | 24.8 | 32.7 | 46.6 |
| 3-4 | 27 | 9.4 | 18.5 | 26.2 | 34.5 |
| 4-5 | 17.3 | 9.5 | 15 | 20.9 | 23.8 |
| 5-7 | 28.3 | 15 | 22.1 | 25.8 | 29.3 |
| 7-9 | 16.2 | 8.7 | 15.4 | 16 | 15.6 |
| 9-11 | 10 | 9.1 | 11.9 | 8.5 | 8.6 |

(Values are given as number of fragments per Mb, calculated from analysis if 14 Mb or 22 Mb of genornic sequence on chromosomes 22 or X, respectively)

[0025] Chromosome-specific variation of restriction site distribution is illustrated by a comparison of the HindIII analysis for chromosomes 22 and X. For this reason, RRS plasmid libraries made using different restriction enzymes are quite useful. The results of restriction fragment distribution shown in Table I above indicate that for the approximately 50 Mb of chromosome 22, about 850 distinct fragments will theoretically be present in a 2-2.5 kb fraction of HindIII or EcoRI fragments, and a 5× coverage of the sequence of both ends of these fragments requires approximately 11,000 reads. In practice about 25% more reads were taken as each fraction contains some spillover of fragments from adjacent size fractions.

[0026] The number of restriction sites in the entire human genome for a typical six-cutter restriction enzyme can be calculated and plotted as shown in FIG. 1. As shown in FIG. 1, there are roughly 33,000 fragments in the range of 400-600 bp, and about 22,000 fragments in the range 1.9-2.1 kb. Each 400-600 bp fragment could be sequenced in a single sequencing reaction, and each 1.9-20.1 kb fragment could be sequenced in two sequencing reactions, one from each end. Thus it is apparent that approximately 33,000 reads of fragment in the range 400-600 bp or 44,000 sequencing reads would each provide 1× coverage of the SNPs present in the selected fraction of the human genome.

[0027] The oligonucleotides according to this aspect of the invention are useful for identifying people according to their haplotype for a panel of SNP nucleic acids. This can be acheived by obtaining a nucleic acid sample from an individual and using the oligonucleotides according to the invention to assay for which allele the individual has for a particular set of SNP nucleic acids disclosed herein, as discussed above. If a sufficiently large number of SNP nucleic acids are assayed, a unique haplotype can be established as a reference for that individual. Subsequently, if a biological sample which may be from that individual needs to be identified, e.g., for forensic purposes, the oligonucleotides according to the invention can be used in identical assays on the biological sample, and the results can be compared to the reference haplotype to determine whether the biological sample is from the same individual. The oligonucleotides according to the invention are also useful in studies to determine the relevance of various genes to the prevention, causation or treatment of various human disease conditions, as further discussed below.

[0028] Thus, in a second aspect, the invention provides methods for using a large-scale map of SNPs throughout the human genome to isolate and identify genes that are relevant to the prevention, causation, or treatment of human disease conditions. Preferred embodiments of this aspect of the invention include linkage studies in families, linkage disequilibrium in isolated population, association analysis of patients and controls and loss-of-heterozygosity studies in tumors.

[0029] The SNP map and its methods of use according to this aspect of the invention transform the search for susceptibility genes through the use of association studies and through the use of linkage disequilibrium studies. Linkage disequilibrium studies are indirect studies in which an investigator seeks to identify the presence of common ancestral chromosomes among susceptible individuals. Association studies are direct studies in which an investigator tests whether a genetic variant increases disease risk by comparing allele frequencies in affecteds and controls. Association studies make possible the identification of genes with relatively common variants that confer a modest or small effect on disease risk, which is precisely the type of gene expected in the most complex disorders. Association studies are logistically simpler to organize and are potentially more powerful than family-based linkage studies, but they have previously had the practical limitation that one can only test a few guesses rather than being able to systematically scan the entire genome. In the method according to the invention, association studies can be extended to include a systematic search through the entire list of common variants in the human genome to reveal the identity of the gene or genes underlying any phenotype not due to a rare allele. The SNP map of the human genome provided by the invention will make it possible to test disease susceptibility against every common variant simultaneously, for example, by genotyping a well-characterized clinical population with a comprehensive DNA array.

[0030] The SNP map used in this aspect of the invention can be prepared using a variety of methods. One traditional method of mapping the locus of a SNP is to create a PCR assay to amplify the locus and then to perform genetic mapping or whole-genome radiation hybrid (“RH”) mapping. Another method for mapping the locus of a SNP is “in silico mapping” in which the SNP and its flanking sequence is “BLASTed” against the publicly available sequence, such as the sequence managed by NCBI or GenBank, in order to identify the genomic overlaps that will positionally map the SNPs. We utilized both RH mapping and in silico mapping to map the locus of the SNPs.

[0031] The location of the identified SNPs was mapped by RH mapping onto the existing Stanford TNG panel through developing each SNP as an STS. The TNG panel was chosen for mapping as it has been shown to order new STS's with greater than 95% confidence at 100 kb resolution. The Stanford TNG panel consists of 90 independent hybrids with an average human marker retention per hybrid of 19%. This panel was constructed with 50,000 rad of irradiation, resulting in human chromosomal fragments 300 kb average size. The practical resolution of the TNG panel is 21 kb. One can think of the TNG panel as a “clone library”, representing a 17-fold redundancy of the human genome, with a human insert size of 300 kb and 333,000 detectable ends.

[0032] This map can be used for conventional linkage studies in families, linkage disequilibrium studies in isolated population, association analysis of patients and controls and loss-of-heterozygosity studies in tumors. For example, the linkage disequilibrium method of Hastbacka et al., Nature Genetics 2: 204-211 (1992), can be used, substituting SNPs according to the invention for the RFLPs used in that report. Briefly, linkage disequilibrium mapping is based on the observation that chromosomes having a gene associated with disease which are descended from a common ancestral mutation should show a distinctive haplotype in the immediate vicinity of the gene, reflecting the haplotype of the ancestral chromosome. For example, the method is particularly useful when there is a single disease-causing allele with a high frequency, so that the excess of an ancestral haplotype can be detected easily, and when the allele was introduced into the population sufficiently long ago that recombination has made the region of strongest linkage relatively small. Population genetics are then used to determine how much recombination should be expected between the gene and one or more nearby SNPs of known map location, thus locating the gene with respect to the SNP map.

[0033] The following examples are intended to further illustrate certain preferred embodiments of the invention, and are not intended to be limiting in nature.

### EXAMPLE 1

### Cloning and Identification of SNP Nucleic Acids

[0034] Genomic DNA was isolated from a plurality of unrelated human individuals and approximately equal amounts from each individual was pooled. The combined genomic DNA was then cut to completion with one of the following restriction enzymes: HindIII, EcoRI, EcoRV, and BamHI. Other restriction enzymes are also useful. The digested genomic DNA was then run on a preparative agarose gel along with size markers. The agarose gel containing the electrophoresed DNA was cut into size fractions such that a size range of about 200 base pairs was present in each slice (e.g., 500-700 base pairs, 1000-1200 base pairs, 2200-2400 base pairs). The DNA was extracted from the gel. Eluted size fractionated DNA fragments were ligated into a phosphatased vector which had been cut using the same restriction enzyme as was used for the digestion of the genomic DNA. Plasmid libraries were prepared by transforming E. coli with the ligated vectors according to well known methods of transformation. The plasmid libraries were tested to confirm that they contained a high proportion of inserts in the selected size fractionation range.

[0035] Random colonies of the transformed bacteria were picked for sequencing from one or both ends of the genomic DNA insert. Any available method of DNA sequencing could be utilized, and dye terminator chemistry was preferred for its optimum resolution of the heterozygotes. As the genomic DNA libraries were made from a pool of individuals and the DNA was size fractionated prior to preparation of the DNA library, each fragment in the library was sampled multiple times, but in almost every case each sequencing read from a given fragment is derived from a different DNA sample thus providing a depth of coverage of the DNA genomic sequences which otherwise would be unattainable.

[0036] After sequencing of the fragments, the sequences were clustered after masking all known repeats. The sequences can be clustered using readily available sequence assembly programs, e.g. Phrap. The sequences of each cluster were compared and inspected for base differences, and candidate SNPs were identified at positions where each base was represented by a Phred quality score of >20. All sequence variants other than SNPs, an estimated 20-25% of the total, were also noted. All SNPs, and other variants, which occurred in repetitive sequences were discarded and the remainder were entered into a candidate SNP database.

[0037] A subset of the candidate SNPs were verified to confirm that the majority of the candidate SNPs identified by sequence analysis were informative. The verification was done using a PCR assay to amplify DNA from several individuals, plus a few pools of genomic DNA from distinct ethnic groups and the PCR products were sequenced using dye terminator chemistry for optimum detection of heterozygotes. The results, not shown, of the small-scale verification indicated that the identified SNPs were informative.

[0038] In this manner we were able to identify the SNPs contained within the specific subset of DNA which was sequenced. Through reiterative use of the RRS method, we were able to identify the majority of the SNPs present in the human genome. The identified SNPs are listed in FIG. 2.

### EXAMPLE 2

### Generation of SNP Maps

[0039] Each SNP was developed into an STS and mapped using the TNG panel by using the method of Stewart et al. (1997) Genome Research, vol. 7, pp. 422-433. Briefly, oligonucleotides for PCR amplification of the fragments containing the SNPs were chosen using PRIMER 3.0, a software package written at the Whitehead Genome Center. The oligonucleotide primers were chosen according to parameters that generate PCR products of 100-400 base pairs in length and that allow the use of a single set of PCR conditions for all STSs. PCR products are assayed by ethidium bromide staining following agarose gel electrophoresis. An STS containing an identified SNP is judged successful when the primers produce a distinct PCR product of the expected size from total human DNA, but fails to produce a distinct PCR product of this size from hamster genomic DNA. In addition, each successful STS is PCR amplified on a set of approximately 90 rodent-human somatic cell hybrids to assure that the STS maps to a unique human chromosome. Ethidium stained gel images were captured using a CCD camera system and captured data was automatically entered into our mapping database.

[0040] The map location for each identified SNP is listed with the SNP sequence in FIG. 2.

### EXAMPLE 3

### SNP Profiling to Identify an Individual

[0041] Oligonucleotides that recognize one allele of a SNP nucleic acid are immobilized on a filter. Preferably, the oligonucleotides comprise oligonucleotides complementary to at least 10 different SNP nucleic acids and are present on the filter in a pre-arranged array. Each filter with bound oligonucleotides is placed in 4 ml hybridization solution containing 5×SSPE, 0.5% NaDodSO₄ and 400 ng of streptavidin-horseradish peroxidase conjugate (SeeQuence; Eastman Kodak). PCR-amplified DNA made with biotinylated primers (20 microliters) from a sample of blood from an individual is denatured by addition of an equal volume of 400 mM NaOH/10 mM EDTA and added immediately to the hybridization solution, which is then incubated at 55° C. for 30 minutes. The filters are briefly rinsed twice in 2×SSPE, 0.1% NaDodSO₄ at room temperature, washed once in 2×SSPE, 0.5% NaDodSO₄ at 55° C. and then briefly rinsed twice in 2×PBS (1×PBS is 137 mM NaCl/2.7 mM KCl/8 mM Na₂HPO₄/1.5 mM KH₂PO₄, pH 7.4) at room temperature. Color development is performed by incubating the filters in 25-50 ml red leuco dye (Eastman Kodak) at room temperature for 5-10 minutes. The result is photographically recorded and the pattern can subsequently be compared with another biological sample to determine whether the individual can be excluded as the source of the biological sample.

### EXAMPLE 4

### Analysis of Clipped Reads

[0042] All RRS reads were clipped of sequencing vector and low quality ends, which set a usable read length for each read. The clipped reads were screened for repetitive sequence with RepeatMasker, using the default human settings. Only reads with >=80 non-repetitive bases and >=100 Phred quality (Q)>=30 bases were used in this analysis. These RRS reads were assembled using phrap_manyreads. Contigs with 2 or more reads must be aligned from a common starting point, the enzyme identified in the Production Protocol. High quality base discrepancies, Q>=23, were identified as candidate SNPs. Further restrictions on the candidate SNPs were that its neighbouring 5 bases all had Q>=15, and that at least 9 of these 10 neighbouring bases agreed with the consensus. If the number of detected SNPs in one clique was greater than 4 or the depth of the assembly (not including the genomic sequence) was greater than 5, then all SNPs were discarded for that contig.

### EXAMPLE 5

### PCR Confirmation of Polymorphism

[0043] PCR primers were designed to flank each candidate SNP, and the resulting fragment amplified from each of the DNAs used to construct the library. SNPs were considered validated if at least two distinct genotypes were observed at the candidate position (or three, if a homozygous variant was observed); in addition, no position could be heterozygous in all individuals, as this would indicate a repeat sequence.

### EXAMPLE 6

### BLAST Analysis/Comparison of Base Call and Quality

[0044] Each sequence was blasted to a library of known repeat sequences, and any read containing >50% of bases in repeats was removed. The remaining reads were blasted against one another, and candidate pairs identified if they shared >80% sequence identity over at least 270 bases. These candidate pairs were aligned using a modified Smith-Waterman alignment, and candidate SNPs identified (see below). Two filters were used to ensure high accuracy of declaring a sequence match, and to avoid inclusion of low-level repeat sequences. First, a pair was declared only if the sequences aligned over their entire length (save 50 bp allowed on either end for sequencing end-effects), and no more than 1% of the bases in the alignment were candidate SNPs (see below). Second, pairs were then arranged into higher-order connected component groups (using transitivity). Component groups with more than 8 reads were removed. Paired sequences (see above) were run through the algorithm “SNPfinder”, which compares the base-call and quality of each position. A candidate SNP was declared if two base calls were present, the Phred score of each was >20, and the 10 bases flanking the SNP (5 on either side) were of Phred quality >15.

### EXAMPLE 7

### Cloning and Sequencing to Confirm Polymorphism

[0045] A pool of 10 DNAs (the Pilot Panel) or 24 DNAs (the TSC Panel) was digested with a restriction enzyme, size fractionated on an agarose gel, and cloned into M13-based vectors. Sequences were obtained on ABI 377 or 3700 sequencers.

[0046] Base-calling was performed with Phrap.

The application's sequence listing, which the Patent Office published only in electronic form, follows.

SEQUENCE LISTING (957086 sequences)

SEQ ID NO: 1 - DNA, 440 bp, Homo sapiens
cagagagtgtagtgagccaagattgtgcccctgcactccagcgtgggtaacagagtgagactccatctaaaaaaaaaaaacctattgtgaactattagtatattagtatctagagtatgtctataaaatttaaaagataaagaccattttattgaaagttgttttatcttagaaaaggaactaatctctgtaaatatgctctgtrtatatgctatatgctctatgttaaaggtatttgaacttttctagagagatggtatatatttttttatttgtttatttttgagataggatcttgatctgtcacccaggctggagtacagaagtgcaatcacagctcactgcagcctcgacctccctgggcacaagtgatcctcccacctcagcctcccaagtttctgggaccagaggcatgcaccacaatgcttagctaatttttc

SEQ ID NO: 2 - DNA, 440 bp, Homo sapiens
cagagagtgtagtgagccaagattgtgcccctgcactccagcgtgggtaacagagtgagactccatctaaaaaaaaaaaacctattgtgaactattagtatattagtatctagagtatgtctataaaatttaaaagataaagaccattttattgaaagttgttttatcttagaaaaggaactaatctctgtaaatatgctctgtatatatgctatatgctctatgttaaaggtatttgaacttttctagagagatggtatatwtttttttatttgtttatttttgagataggatcttgatctgtcacccaggctggagtacagaagtgcaatcacagctcactgcagcctcgacctccctgggcacaagtgatcctcccacctcagcctcccaagtttctgggaccagaggcatgcaccacaatgcttagctaatttttc

SEQ ID NO: 3 - DNA, 623 bp, Homo sapiens
ccccatctcaaaaacaaacaacaaacaaaaacaaaaaaaatggccgggcacggtggctcacacctgtaatcccagcactttgggaggccgaggcaggcagatcgcctgtcaggagttcaaggccagactggccaacatggtgaaacctcatctctactaaaaatacaaaaattagtcgggcatggtggcagagacctgtaatctcagctgctcgggaggctgaggcaggagaatggcttgagcccaggagctggaggttgcagtgagccgagattgcaccactgcactccagcctgggcgactgagtggagcggaactctgtctcaaaaaaaaaaaaaaaaawttttttttttagatcatcagctattgttagtgttagtgtatgttatgtgtggctcaagacaactttgcttcttttaatataggcagggaagtcaaaagattggatatccctgctttataccaagaaagacaacaccccacatttgcaatgcctaaaaacactaccagccatctgaaaaacatgagacttctctaacttctgttcttttttgtagcagtggaatcccacggtgatatctgagggatgtggttaccttttggaggaggttgacggtttctaa

SEQ ID NO: 4 - DNA, 669 bp, Homo sapiens
ccatgtacatataaacaaccataatttgtaaatttgcaataaattttttattgtaattttttatatttatcccagattataatctttttcttcacttccagatctcactggattgtctcaagggccccatccacaccactgagccctgatgaaaggctctaggctgtggccgggagaggcagtctcttcttccagagcacacyctgtttgagggggagatgtcatctctgcccttgaggagccccagctgatgggggagcttttgcccttaggaagctctcagtctgatggggaagacgctgtccctgccctcaggaggctcttggtctgagaggggagacataattcattctctctgagtgccctcagtctgatgggggagacaccgtccctgccctcaagaggctccaagtctgatgggggaatattggctctgtcctcaggagtccggtctaaggagggtgtctcagccccactcctgagggtaaggattccatggccacagtctggacagtgggccagtcacgcttgacagtgggcatgttgccagcaggaccctttgggatgtgtctgagcctggaggtgagtggcacgggggctggcaaggctagggtggaggcaagcaggttccgctgtctgccgccttcacacctttctccttccacatgc

SEQ ID NO: 5 - DNA, 669 bp, Homo sapiens
ccatgtacatataaacaaccataatttgtaaatttgcaataaattttttattgtaattttttatatttatcccagattataatctttttcttcacttccagatctcactggattgtctcaagggccccatccacaccactgagccctgatgaaaggctctaggctgtggccgggagaggcagtctcttcttccagagcacactctgtttgagggggagatgtcatctctgcccttgaggagccccagctgatgggggagcttttgcccttaggaagctctcagtctgatggggaagacgctgtccctgccctcaggaggctcttggtctgagaggggagacataattcattctctctgagtgccctcagtctgatgggggagacaccgtccctgccctcargaggctccaagtctgatgggggaatattggctctgtcctcaggagtccggtctaaggagggtgtctcagccccactcctgagggtaaggattccatggccacagtctggacagtgggccagtcacgcttgacagtgggcatgttgccagcaggaccctttgggatgtgtctgagcctggaggtgagtggcacgggggctggcaaggctagggtggaggcaagcaggttccgctgtctgccgccttcacacctttctccttccacatgc

SEQ ID NO: 6 - DNA, 669 bp, Homo sapiens
ccatgtacatataaacaaccataatttgtaaatttgcaataaattttttattgtaattttttatatttatcccagattataatctttttcttcacttccagatctcactggattgtctcaagggccccatccacaccactgagccctgatgaaaggctctaggctgtggccgggagaggcagtctcttcttccagagcacactctgtttgagggggagatgtcatctctgcccttgaggagccccagctgatgggggagcttttgcccttaggaagctctcagtctgatggggaagacgctgtccctgccctcaggaggctcttggtctgagaggggagacataattcattctctctgagtgccctcagtctgatgggggagacaccgtccctgccctcaagaggctccmagtctgatgggggaatattggctctgtcctcaggagtccggtctaaggagggtgtctcagccccactcctgagggtaaggattccatggccacagtctggacagtgggccagtcacgcttgacagtgggcatgttgccagcaggaccctttgggatgtgtctgagcctggaggtgagtggcacgggggctggcaaggctagggtggaggcaagcaggttccgctgtctgccgccttcacacctttctccttccacatgc

SEQ ID NO: 7 - DNA, 610 bp, Homo sapiens
gatgctttccataattcaacttgcttaattacccatatgaattaatcattcatacctcaagcctgctaacacttttggatacctgatgtttatgtaatggtggtgctcatttgctgagtaaggcatgagtagtttcctaggtaagcagaagtagccgtcaaaacaatcataatgtgacacagtaacaacaaggctgtattttgaaggctctagaaacccaagacgtatttcaagagtcaagttactttttttttcctttaccacttatcctcaagttctacaagttacttatactgtatcaattcaaatacatttggttattagatatctattttttaaagatggacaagataaaattgtgtaaatttacaagaagtaatggaaactgctaataatgcttatttaaaagagttattaaagcaacagcttactaccaactgtaggcttctgaaaaatttgcacargtgggaaaagatatgggcatagcatattttaacaactgaaaatgtggcagggaaaaagtctttattctgagagtataaccatcttacttttggggtattaaaattaccttttatgagataattcattttcaatgttatttgacaaa

SEQ ID NO: 8 - DNA, 655 bp, Homo sapiens
ttgatgaagctcagtcccttcctcctcatctggcccgagacccccaccccaggcagagggagcctctggcacccacgggtgggaactgcgcctcctcacctgattagctttctccaggttggtcatgatcaggccgacttcatctgccctgagacacaaagatgaggccctgaggaagggcttccggcgggctccaggcccccgcccctcctgacacccccagcccctgcctgagcccaggggagggctgaaggccttgctacaggagagaaatcgggctggggagaaaagagcctaggcttcgaggaaaagggagtagggcgtcagcactgcacctcttcaggacagcctggcctcccctctcccccaggggccactctctgaactccacctccaagcctttgtcctggtagtgcctggaatgcccatcctcaagagaacagcccccggctttaaaaccctgatcacagtgttctccggggaggccgccctgcactgtccccagtggtcacttgtttactgcgctgcccagccccctscaggctgccagcatggaggggcttgggagaggcatcccctctgttagcagggggtgggagacgcggggggcacgtggggagcactttgtgacccaaggccacacacatgcttcatg

SEQ ID NO: 9 - DNA, 1623 bp, Homo sapiens
cctccctccttgcactaaactataaaatctcagaagccagggttttgcctctttcttcactgtatccccagtgtttgtggaccaaatgacagagcaaaggttgagtttacctggtcacactacagagctagggtcataccccagatctcctatctcctaatttcttttttctttctttcttttttttttttttagatggattcttgctctgtcacctaggctggagtgcagtggtgcaatctcggctyactacaacctccacctcccaggttccagtgattttcctccctcagcctctcaagtagctgggactacaggcatgtgccaccaaacctggttaatttttgtatttttagtagagacaaggtttcaccatgttggtcaggctggtcttgaactcctgaggtcaagtgatctgcccgccttggcctcccaaagtgctgggattataggcatgagccactgcacccagccctacctcctaatttctatgtccttccatattccctctctacaaaagcatctctctactatgaaataagcctctaaacaagctgttttgcatagtcattacaaacaagtaattaagtgcttgtgctacttaggttcaaatcccagcttctttctcccttttctagttgtgtgaactgcaaccaattccttactcttgttgtactttagtttctcgctcggtaaaatgtaggttggccaggtgtggtggttcacgcctgtaatcctaacactttgggagtccgagtcaggaggatcactggaggtcaggagttctagaccagcaacatagtgagaccccatctctataaaaataataagaagaagaagccaggggtggtggcccttacctgtagtttcagctactcaggagattgagctgggaggatcccaggagttcaaggttacagtgagctatgattgtgcctgggtgacagagtgaaacccagtctcaaaaaaaaaaaaaaaaaagcggggggtaataatactcactcaatagggctgatatgaagctcaaatgacttaatgcctgtgaaattcttagcacagggttcaatgagtgttaggcacacagaaacaggagaggagctctcaaatcaatattaattaatactaaggaaataatgctttattttttgagacagggtcttgctctgttgcccaggctggagtacagtgaggcaatcttggctcactgcaacctctgcctccaaggttgaggtgattctcatgtctcagcctcctgagtggctgggattacaggtgtgtgccaccacgactggataatttttttttttttttttttgtgagacggagtctcactctgtcacccaggctggagtgcagtggcacgatcttggctcactgcaacctccacctcccaggtttacacgattctcccacctcagcctcccaagtagctgggactacaggtatgcaccaccacaccggctaatttttgtattttttagtagagaagaggtttcaccatgttggccgggctgatcttgaactcctgatctcaggtgatctgtccgcctcagcctcccaaagcgctgggattacaggcgtgagccaccgcgcctggccaggaaataaactattttcttaaat

SEQ ID NO: 10 - DNA, 663 bp, Homo sapiens
ttagattttaaaaacaatgtttstcttgggatagcaactgttactgctgcttctttgtgttttttttttgtttttttttttttttttgagacagggtctccctgtgttgcccaggctggagtgcagtggagcgatctcggctgattcactgcaacctctgccttctgggctcaagtgatcctcccacctcagcctcccgagtacctgggacttgggtgtataccaccacgcccagctaattttttgtatttttagtagagaccgggtttcaccatgttgcccgggctggtctcaaacccctgggctcaggcgatccacccgcctcagcctcccaaagtgctgggattataggcaacagttaccgtttgaggttacctgtttaaaatgattagcagtataagataccaatactaacaaaattttattaaattttattcgcatactttcagctgaccaacattctccctcagacaagaggggaaaaacccaaaatacctggtgaacaaaaaaaaattgttccattttggcagagcacagtggctcacatctaatcccagcactttgggaggccaaggtgggtagacaacttgagctcaggagttcaagacaagcctgggcaacgtagtgagacccccatgtctacaaaaaaattttttttaaata

SEQ ID NO: 11 - DNA, 1648 bp, Homo sapiens
ttttttttttttttttttttagaggtggagtctcactatgttgcccaggctggtctcaaactcctgttctcaagcgatcctcctgcctcagcctcccaaagtgctgaggttacaggcgtgagccactgcacctggctaggaaactgagttttttcagtggtagaggctcctagccagtggccaagggaaagagagagttctgggttcaggggctggcaggaagttagcaagacaccagggactcagctacactggctggatctcagagaagagcaactgccacagtggggacctggagcacaaggggaaactggggcagcagctgcaccacagggttggcggtacctgataagggaagaggatgacttccataagtaggcccacaggtgcccagggctccccatacccactgggtgccaggtctaaaaccatgagaccagtaccagcaccaaccactcaaggagctgagacggctgacccactctctgccctggctaggactggccccagcacccccagtggggaggcctcaatgatcccagctgccaggggcccaggaacactagcaacagaagaatggccaaagtgacagggaacccttgagaccctagagcagcaatgcctgggccgggcctgatccttcccaccagcccccagccattcctggccttctgccatgcttcctggttggtctgcaaagtgcctggggcaaataccttctgggagaagagtagagagggtatccaggctccatgggcctcaggattcctgaagtaggaggctctgatggggccaccctgctctggacagaaattccctagcctcagggacatgttgaatcttgtcacccagaggaaccaagtggctgggtggtagcccagtgcagtggctcatgcctgtaacctcaacactttgggaggccaagacaggcagatcacgaggtcaagagattgagaccatcctggctaatatggtgaaaccccgtctctactaaaaatacaaaaattagctgggtgtggtggtggcaggcacctgtaatcccagctactcgggaggctgaggcaggagaatcrcttgaacctgggaggcacaggttgcagtgagctgagatagcgccactgcactccagcccgggcaacagagtgagactccatctgaaaaaaaagaaaaagaaaaaaaaaagaaagaggctggacagcaaaataaaatggttccccagttcagcctttggaggtaccaaccatctgttagcagagctctaagaccaaatgggctcccactccaggaacgtcccccttcccacaggggctggggagatggagtccggggctgtgctgccctctggagcagcaggtggaggccaaggcagcctcactgttctccggggccctgggaagccatgcagagaggcagaggtcctttatgtgccagatgaggctgctgtcaagggactgcaaatctgcttgaggtgtgacatatctgtttttagaacaagaacatcacatcaggaggagccggtggccagagcttgggggaaggggggatccaggtccaattcccatgtatctagggcacatgtgcacagcactgagggccactccagcccctccccagctctcagaggaccctgctcccacctgccttttgc

SEQ ID NO: 12 - DNA, 1648 bp, Homo sapiens
ttttttttttttttttttttagaggtggagtctcactatgttgcccaggctggtctcaaactcctgttctcaagcgatcctcctgcctcagcctcccaaagtgctgaggttacaggcgtgagccactgcacctggctaggaaactgagttttttcagtggtagaggctcctagccagtggccaagggaaagagagagttctgggttcaggggctggcaggaagttagcaagacaccagggactcagctacactggctggatctcagagaagagcaactgccacagtggggacctggagcacaaggggaaactggggcagcagctgcaccacagggttggcggtacctgataagggaagaggatgacttccataagtaggcccacaggtgcccagggctccccatacccactgggtgccaggtctaaaaccatgagaccagtaccagcaccaaccactcaaggagctgagacggctgacccactctctgccctggctaggactggccccagcacccccagtggggaggcctcaatgatcccagctgccaggggcccaggaacactagcaacagaagaatggccaaagtgacagggaacccttgagaccctagagcagcaatgcctgggccgggcctgatccttcccaccagcccccagccattcctggccttctgccatgcttcctggttggtctgcaaagtgcctggggcaaataccttctgggagaagagtagagagggtatccaggctccatgggcctcaggattcctgaagtaggaggctctgatggggccaccctgctctggacagaaattccctagcctcagggacatgttgaatcttgtcacccagaggaaccaagtggctgggtggtagcccagtgcagtggctcatgcctgtaacctcaacactttgggaggccaagacaggcagatcacgaggtcaagagattgagaccatcctggctaatatggtgaaaccccgtctctactaaaaatacaaaaattagctgggtgtggtggtggcaggcacctgtaatcccagctactcgggaggctgaggcaggagaatcacttgaacctgggaggcacaggttgcagtgagctgagatagcgccactgcactccagcccgggcaacagagtgagactccatctgaaaaaaaagaaaaagaaaaaaaaaagaaagaggctggacagcaaaataaaatggttccccagttcagcctttggaggtaccaaccrtctgttagcagagctctaagaccaaatgggctcccactccaggaacgtcccccttcccacaggggctggggagatggagtccggggctgtgctgccctctggagcagcaggtggaggccaaggcagcctcactgttctccggggccctgggaagccatgcagagaggcagaggtcctttatgtgccagatgaggctgctgtcaagggactgcaaatctgcttgaggtgtgacatatctgtttttagaacaagaacatcacatcaggaggagccggtggccagagcttgggggaaggggggatccaggtccaattcccatgtatctagggcacatgtgcacagcactgagggccactccagcccctccccagctctcagaggaccctgctcccacctgccttttgc

SEQ ID NO: 13 - DNA, 1438 bp, Homo sapiens
ctgtgccacagattaaaaaaaaaaaaaaaacacttgtaattctcttctctctgctactttagctggttcataaatcagacatctcagaaaaggttttgccaggcaagtttacctggaagtgtctctcccctgctgcaccctccttccccctctgccttggggtttcaggtctgttgctggaacgggactctggctgggccagggctcctcgcccaggatgcctggggagaggccccgtgtgagggcctcactctgtgggcttaggaatcccagagtaaacagatcaagttacccgtgtcagccgggccgtccacaacaggcagccgcagcgattgaagatgggaatgttcttctcagagatgactcagctactcagcttctcggcccagatcaggggccaccctgggcctcagctctgccctggtgcttggctccaggccaaggccagggttgggtggtggggggaacaatggattttgagagtcagcgactggtgtgcaattctctttcaccccgtcagggtgagggcacatgtcaacaactctggcagggtgaggggaccagctgcgacctggatcatctatagggtggtggctcagcctctctaagcctcagtttcctcatctgtcaaatgggcagcaacaactatgtcagagagttgatgggacaaatgaatcaaccgcccgggtgtggtggttcatgcctgtaatcccagcactgtggggggccgaggcgggtggatcatgagatcaggagttcgagaccagcctggttaacatagtgaaaccccatctctactaaaaaatacgaaaattagccgggcgtggtggcaggcgcctgtaatcccagctacttgggaggctgaggcaggagaattgcttgaacctggtaggcagaggttgcggtgagccgagattgtgtcgctgcactccagcctaggcaacaaagcaagactccatctccaaaaaaaaaaaaagaatcaaccaaggtggttgaagccagggtgcagggagagaagtgcaagtctgcagggagagcctggaccacggtggttggaagcccaggagtgagcatctggggacagggtgtaataggagatgagagaggaccccttgagagctgcctacgctggggaggagaagagcagccaccacaggaagcagaggactgtcagtgtccaagacgtcagaggagaccgtgcgggagattgcagattccagggaggccttggccagccatgtgggtccaggcaacaggtcaagggcagggaggcatgagggaagacgtcatcgggctgggctcagggaggtcactgatgaacggagcgggataccctggagggcttgaggaggtggcccaatggcagggggtcggggtaaggaggtggcctcaggaggagatggggatgaaggaagactcttctttttrggacataaga

SEQ ID NO: 14 - DNA, 683 bp, Homo sapiens
gggtttcaccatgttggccaggctggtcttgaactcctgacctcaagtgatccgcctgcctcggcctcccaaattgctgggattacaggcgtgagctaccacgcttggccgatacttgattctaaaagcatcttggtacccaccagaatcttccatgggttcagttttcacattgatggggccgcagctgcaaggagaagggaaccctggtcagatgggcagggtgaggaccaggcacagccgcctggacacgatgagctcaaatgccctggatctccgcagcaccaaatccccctcctcccctcaatcaaatgcaacaatgcctccattttaacattaatgtcttaataagttgttcccaaattaaacgtgtctaccgaaartagtcttctaattccaaaggtccttttggacaaagaataggatagaaaataaggaagggaagaagcacattaaccctttacactccacttaaatgctgtaaggaggcctttctgtcatccaaaaacgaacgctgtgcatagttgtggattttggttgctgtgatttatcttttacctttcacttggtgatactatggatctctccgcatctgttaccatcccagggccacctgtagaggaatgaaaaaacacacaccagccccttttagcacctcggaaaatgactaacatccaaaggca

SEQ ID NO: 15 - DNA, 683 bp, Homo sapiens
gggtttcaccatgttggccaggctggtcttgaactcctgacctcaagtgatccgcctgcctcggcctcccaaattgctgggattacaggcgtgagctaccacgcttggccgatacttgattctaaaagcatcttggtacccaccagaatcttccatgggttcagttttcacattgatggggccgcagctgcaaggagaagggaaccctggtcagatgggcagggtgaggaccaggcacagccgcctggacacgatgagctcaaatgccctggatctccgcagcaccaaatccccctcctcccctcaatcaaatgcaacaatgcctccattttaacattaatgtcttaataagttgttcccaaattaaacgtgtctaccgaaagtagtcttctaattccaaaggtccttttggacaaagaataggatagaaaataaggaagggaagaagcacattaaccctttacactccacttaaatgctgtaaggaggcctttctgtcatccaaaaacgaacrctgtgcatagttgtggattttggttgctgtgatttatcttttacctttcacttggtgatactatggatctctccgcatctgttaccatcccagggccacctgtagaggaatgaaaaaacacacaccagccccttttagcacctcggaaaatgactaacatccaaaggca

SEQ ID NO: 16 - DNA, 603 bp, Homo sapiens
ttataaaaacattttgattaaattagtttcagaaattgctctctggccaaggagctatctgcttcacaatggaccatgcaataaatcttagactacatgtgctgacaggtataagatgatttattgaaatgtaggatgagraattgtgaagcattactaagaaatacacactttcttccaatgtaacattattttacttaacaaaagtaatttaggaggaaactgtactatcaagataatagcaaacacttcccaaacatctctaattctacatattaaaaataatccaagaatgaaatcattagatcgtgcggctggctctagatcagacagatgacttaataatgatccatctccctataacaaagctcacctctgttaataatcagagaatttatactatctgtgaccttcaatattgcttcaatcatgtgctagccctaggatttttaatcttttatttgatttttctttgcaatgttattctattttacataatgatgactaaagagattgagacttcactataaattgagattcttaaaataaagctgcttctgaattcaaaacaacaagaacaaaaccaaacaaacaaaaaaagaa

SEQ ID NO: 17 - DNA, 603 bp, Homo sapiens
ttataaaaacattttgattaaattagtttcagaaattgctctctggccaaggagctatctgcttcacaatggaccatgcaataaatcttagactacatgtgctgacaggtataagatgatttattgaaatgtaggatgagaaattgtgaagcattactaagaaatacacactttcttccaatgtaacattattttacttwacaaaagtaatttaggaggaaactgtactatcaagataatagcaaacacttcccaaacatctctaattctacatattaaaaataatccaagaatgaaatcattagatcgtgcggctggctctagatcagacagatgacttaataatgatccatctccctataacaaagctcacctctgttaataatcagagaatttatactatctgtgaccttcaatattgcttcaatcatgtgctagccctaggatttttaatcttttatttgatttttctttgcaatgttattctattttacataatgatgactaaagagattgagacttcactataaattgagattcttaaaataaagctgcttctgaattcaaaacaacaagaacaaaaccaaacaaacaaaaaaagaa

SEQ ID NO: 18 - DNA, 1225 bp, Homo sapiens
tgcatgccattaggcatcatagcagtgacatcaccacatatcatgcactctctgaaaactctaccattcactcatgagacaatgagtgtgaaagaggcaaatagtattattatgaagataattttgaccttctggactctgaaagatcttcagaaaccccagggtttttgagaactgcattttgagaactgctgccttagctgctgctaccatccttataaatgtttctgaagcttaggaagctaaaatgttctgcctccagatctgtaaatgacgtcagcacaggaagcaagtacggaaagagcacgggggtaggaagccttgcttccatttgtcctttccagagattgacgccttctccaatacaacaatttcccatcctgcacaaacagaaacacactactgcttgctgatttgggttttgtcccccttgccctgctcrgatgagatgaatactcacaactctctgctaaagacaaagatggagtttgggtggacaaagcaagaaactcttttctgtgcacacaatgtccctacaaggaataggacccccagtaactttccatgcctccaagaaagacaactggagccaggcgcggtggctcatgcctgtaattccagcatttaggaggccgaggcaggcagatcacgaggtcaggagttcaagactaccctggccaacatggtgaaaccacatctctactaaaaatacaaaaaaattaagcccgggcgtggtggctcacgcctgtaatccaaacactttgggaggccgaggcaggcggatcacctgaggtcaggagttcgagaccagcctggccaacatggttaaaccccatctctactaaaaatataaaaattagctggccatggtggtgcatgcctgttatcccagctacttgggaggctgaggcaggagaattgcttgaatccagagggtggaagttgcagtgagctgagatcgcaccactgcactgcagcctgggtgacaaagcaagactcagtctcgaaaaaaaaaagaaatagaactgggtggcatgcacacaggggcaataggaaatagggagattttcacagtttcattttgaatttgatgtcatacaaatatgttatctatccccccccacaaaaaatttaaaatctaaatctaatccccagtactatcagtcttttgatagctaacattccaaaatgccctccagagttcacaagactcccaaaaaatgca

SEQ ID NO: 19 - DNA, 1986 bp, Homo sapiens
tcaagcccagaaaagttgtatttttttattccttgtactcaaaagtgtgaaataaaacacagcggtttattatcaccaaaaaggcartatttattcataattaatatttatccacacacccattaacatttactaattctaggtgatggaaacacaggtttgtgtttacgtaattatttttaaagttcactggatatatataaaatacacagagacaataaatgtcaggctaatgtcctaaagttttcagcttggttaactagatgagtgtttcaagtgttgttccctgaccagcagcagaagcatcacctgggaaattaaatcttgtgccccaccccagacctactcgatcagaaattctgaggatgagtcccagcaatctgtgttttaacaaaccctccagttaattctgatgcacacttacgtttggggactagctgacaatttaaaagctcttgctattcatcaagaacagaaaacaagagaagcaggcaggagcagaggcgatcataaggacacggtgccttagtgctttattaattcacactattcatcaagaacagaaaacaagagaagcaggcaggagcagaggcgatcataaggacacggtgccttagtgctttattaattcacgctattcatcaagaacagaaaacaagagaagcaggcaggagcagaggcgatcataaggacacggtgccttagtgctttattaattcaccttcttttcctctccccctgcccacatcccccaggtggtcactgtggtgtttttcattcttgttataagagacagggtctcgctctgtcacccaggctggagtgcagtgacaggatcaggactcactgcagcctcaacctcctggactccagcaatcctcccaccttagcctcctgagtagctgggatttgcaggcacctaccactgtacctgtctaatttttcttctgcccttttttttttttttttttttttttttggggtagagacgaggccttgctatgtagcccttgctggtctcaaactcctcgcctcaagtgatcctcctgcctcggcctcccaaaccactgggattacaggcatgagccaccatgcccagccagtcttctttatttctaattataccgagataagtgtattttagtattcatgaatttatgcttcttagtctaactgcattatatgctttttaacctctaaatcctcaacccagaatatacattacgattaccttaggagagtgttttaaaaatcctgatgtccaggttgtagcccacaccaattaaatcgggggatgggggctgaccaaaagtattttaaaaatgccccagattccaagtgtgcaacagtagctgaaaatcatgcaatctaagtgaaactttttgtctctagttcaatatttctccaagtatgatgacaaaactatctgtatcagaatcgctagtagttcccaaaatgatattaaaaataatcttcagagtggtacatatatgacttttttttttgagactgagtctcactctgttgccaggctggagtgcagtggcacaatctcggctcactgcaacttccgcctcccgggttcaagcgattctcctgcctcagcctctctagtagctgggactacaggaacgcgccaccacgctcagctaatttttgcatttttttgtagagatggggtttcaccatgttggccaggatggtctcgattccttcacctcgtgatcaacccgcctcggcctcccaaagtgctcggcctgacctttttcttaatagttatgtatttacactttcattttttattttttggcaaatgttttccacgtgtagtagtgacagtttcattttaaaataagattcagttttttaaaatgagtcaattttttaaattactaaataaatagaacaaagaatagggaaaacactgaatagatggtaagcaaacaaaaaaggttcagttaaccttcacaaatacagattcctgag

SEQ ID NO: 20 - DNA, 1986 bp, Homo sapiens
tcaagcccagaaaagttgtatttttttattccttgtactcaaaagtgtgaaataaaacacagcggtttattatcaccaaaaaggcaatatttattcataattaatatttatccacacacccattaacatttactaattctaggtgatggaaacacaggtttgtgtttacgtaattatttttaaagttcactggatatatataaaatacacagagacaataaatgtcaggctaatgtcctaaagttttcagcttggttaactagatgagtgtttcaagtgttgttccctgaccagcagcagaagcatcacctgggaaattaaatcttgtgccccaccccagacctactcgatcagaaattctgaggatgagtcccagcaatctgtgttttaacaaaccctccagttaattctgatgcacacttacgtttggggactagctgacaatttaaaagctcttgctattcatcaagaacagaaaacaagagaagcaggcaggagcagaggcgatcataaggacacggtgccttagtgctttattaattcacrctattcatcaagaacagaaaacaagagaagcaggcaggagcagaggcgatcataaggacacggtgccttagtgctttattaattcacgctattcatcaagaacagaaaacaagagaagcaggcaggagcagaggcgatcataaggacacggtgccttagtgctttattaattcaccttcttttcctctccccctgcccacatcccccaggtggtcactgtggtgtttttcattcttgttataagagacagggtctcgctctgtcacccaggctggagtgcagtgacaggatcaggactcactgcagcctcaacctcctggactccagcaatcctcccaccttagcctcctgagtagctgggatttgcaggcacctaccactgtacctgtctaatttttcttctgcccttttttttttttttttttttttttttggggtagagacgaggccttgctatgtagcccttgctggtctcaaactcctcgcctcaagtgatcctcctgcctcggcctcccaaaccactgggattacaggcatgagccaccatgcccagccagtcttctttatttctaattataccgagataagtgtattttagtattcatgaatttatgcttcttagtctaactgcattatatgctttttaacctctaaatcctcaacccagaatatacattacgattaccttaggagagtgttttaaaaatcctgatgtccaggttgtagcccacaccaattaaatcgggggatgggggctgaccaaaagtattttaaaaatgccccagattccaagtgtgcaacagtagctgaaaatcatgcaatctaagtgaaactttttgtctctagttcaatatttctccaagtatgatgacaaaactatctgtatcagaatcgctagtagttcccaaaatgatattaaaaataatcttcagagtggtacatatatgacttttttttttgagactgagtctcactctgttgccaggctggagtgcagtggcacaatctcggctcactgcaacttccgcctcccgggttcaagcgattctcctgcctcagcctctctagtagctgggactacaggaacgcgccaccacgctcagctaatttttgcatttttttgtagagatggggtttcaccatgttggccaggatggtctcgattccttcacctcgtgatcaacccgcctcggcctcccaaagtgctcggcctgacctttttcttaatagttatgtatttacactttcattttttattttttggcaaatgttttccacgtgtagtagtgacagtttcattttaaaataagattcagttttttaaaatgagtcaattttttaaattactaaataaatagaacaaagaatagggaaaacactgaatagatggtaagcaaacaaaaaaggttcagttaaccttcacaaatacagattcctgag

SEQ ID NO: 21 - DNA, 589 bp, Homo sapiens
ccctggggtagatcccagccccccacgtaggtcccttggctgcaaaaggaagagggagtgtttggatgaatctgatgatgagccagagaaggagctcgcccctgagcctgaggagacctgggtggcggagacgctgtgtggcctcaagatgaaggcgaagcgacggcgagtgtcgctcgtgctccctgagtactacgaggccttcaacaggctgcttggtaggaggacaccccagagagcacctccaatcctgttctttctaaaaagaggaaacttccaataaccacacttttccaatgggaaaaatatgccccagtgggtgagctctccatgcgggaggactctgaagtgatcactcatgagggacacttaggagacaacagaggattaggtagacttgataaaggtcggtgcttgggataagaaagcttggttttgggccaggcgctgtggctcccgcctgagatcccagcacgttgggaggctgaggcaagaggattgcttgaactcaggacttygaggctgcagtgagctatgactgcaccactgcactccagcctgagtgacagagcaaaactctgcgtcaaaa

SEQ ID NO: 22 - DNA, 589 bp, Homo sapiens
ccctggggtagatcccagccccccacgtaggtcccttggctgcaaaaggaagagggagtgtttggatgaatctgatgatgagccagagaaggagctcgcccctgagcctgaggagacctgggtggcggagacgctgtgtggcctcaagatgaaggcgaagcgacggcgagtgtcgctcgtgctccctgagtactacgaggccttcaacaggctgcttggtaggaggacaccccagagagcacctccaatcctgttctttctaaaaagaggaaacttccaataaccacacttttccaatgggaaaaatatgccccagtgggtgagctctccatgcgggaggactctgaagtgatcactcatgagggacacttaggagacaacagaggattaggtagacttgataaaggtcggtgcttgggataagaaagcttggttttgggccaggcgctgtggctcccgcctgagatcccagcacgttgggaggctgaggcaagaggattgcttgaactcaggacttcgaggctgcagtgagctatgactgcaccactgcactccagcctgrgtgacagagcaaaactctgcgtcaaaa

SEQ ID NO: 23 - DNA, 608 bp, Homo sapiens
tttcagaacgacaatcttatttttgtgccttataaaactacattcagggcaaagcataattaaaacaaggcaagaattcatgaacaaatgaagcgtttactacataggccaaagaaaagataaattatatgcctgaaaggtttcactgagctgtgattcatacaaaccaatgtgttggcagggatgaggtttttttcctctccccacaacaactgaaccagagctgtaagatatgcatttaaaagattcaacacacacacacacaaaatcacataatgcaaacttgacctttattggttaaaaataaaacccaccacatttctgttatcaacacagtacttccagagttgtgtttgtgttgagtgggggtgtggggcgcrtaaagtgttgccatgcagagtttcataagatgaagaatgtcttttttcttttaaaagtgtaattaaatcctgcaatcgttactttcgcactaaccttgtgcaaggcatttgaaaaataaatcatgtttctcgtctgtcaaggagtgtataatctagtaagagacatagtattttaagagacattgtgataagtgcatcggtcctcagattggctcaggctactaataa

SEQ ID NO: 24 - DNA, 1232 bp, Homo sapiens
actaaaagacctggcactttaaggaaaacaacaaaagcacacatacaactcttcatggtcaattggcaaaataaaataggtttttctccttccatttttcacaaatggaaagacaagctgagtgaggaaaacaggaaggcatacactagaaattagacatgccccccaaaaaagaatttaggggagtattggtaagggactccgaggctaaaaataatagagtctttatatccataagaagggcaaggtcagctagatgctcatggaactggttaaatggatgtcatggaaaggtggaacttgcagaaactacaaacagcaacaatataacaatagaaaactttcggtgactaccagccatatgccaggcactgtaccaaggatttcacatacagtgcctcatttaatccccataatttactgttgttggtgtccttttacagatgaggacactgagtcacagagagaataagggacaaagtcacacagctggcaagtgacagatttgacaaatgaatgcaagcctgagtctagagtcygcatactctgtgccttagactttggtaacaaataaccaaacagatcagagttactggcctaattaatggaaaactcgcaagatgaaactgtcaaggcagacacagacactgcagataaagaccagatggcatccacatgaaagttcattgaaattgacaaacaggtagactgggcacgatggctcacgcctgtaatcccagcactttgggaagctgaggcgggcggatcacaaggtcaggagattgagaccatcctggctaacatgttgaaaccctgtctctactaaaaaaatacaaaaaattagctgggcgtggtggcgggcgcctgtagtcccagctgctcgggaggctgaagcagaagaatggcgtgaacccgggaggcggagcttgcagtgagccaagaagttccactgcactccagcctgggcaacagtgcaagactccctctcaaaaaaaaaaaaaaagaaaaaaaaaaagaaattgacaaacagactctgagctggagatgaacaatgtgatctatgccctgccctgactttgcttccagtccccaaacaagctcagagggaacagagcagtgagtttggatcttggaccagataaattagtaccacctataacaaagttagagtcactgagtatttaacaacatatcacctagcctagaaaaagctacatggtgtgtaaaaaaga

SEQ ID NO: 25 - DNA, 766 bp, Homo sapiens
aacctattaataattcaatggccaacattttccaaacaaaccaataaaatgcatagtgtgcatgaagctatctgttacagtctgtggcactcatatttcacaaagaattctgtgccaatctgagcccctgcactgtgccttcaaatgctcctggactgtgacaaccaagtccataagaaacaggacctccaggttccgscccagggaggttggcattcagcaatataaaaagggaggtggtgccgcaggaaagggtggaactggaaacactcctggtttcttacttttctccaaggactcctagaagtaccccaccccacccctgctccttggaggacaacgtgatcactgtattcagctctgtcaagaatggtccaggttcttctagatgatctgcacaaatggttcctctcctccttcctgatgtctgccattagcattggaataaagttcctgctgaaaatccacatctcccctgggtccggtgttctggaagtgagagagacaatgtcacacttcaaggaggcagctctctagacaggaaggttattcacgtcccatgtcaagtctagctagagttcagagcaattgagaagtgcaattttatctcctgcctttcattctataccctgcttctgaaccatcgtgttcaactgtgaaactcacactttggtgaccctgactccaaaacttaatacacccaaggtcagccccagtgatctgcttcatagccaggactttgggtgggtcttcccagggagtaggg

SEQ ID NO: 26 - DNA, 578 bp, Homo sapiens
ctccagcctgggcaacagagcgagactccatctcaaaaaaaacaaaaaacaaaacaaaacaaaaaattagctgggtgtggtggtgggcacctgtaatctcagctactcaggaggaggaaaatcgcttgaatccgggaaacagaggttgcagtgagccgagatcacaccattgcactccagcctgggtaacaaragcaaaactctgtcttacaaaaataataataataaaataacaatggattggttgagagatcaccgtatgccagaagttgctttaagcattttgcatgtattaatccattttacacctcacaatatcgctaccaagtagaaacgattatctcgattttgtaaaaggtgaaacaggaaaaaaccactagagcagagctggcagaccctcaaccttcttttccttctgactccaaatgacagacagcattctttccatctctcacctcctcatgcctcctgtggaaaaaatgaatgaacagatgagaaaagttggagctggagaaagaccgtgttcctcgtgttctgtgagacctgggaaggctgctaaaacccagggagcaggagtt

SEQ ID NO: 27 - DNA, 578 bp, Homo sapiens
ctccagcctgggcaacagagcgagactccatctcaaaaaaaacaaaaaacaaaacaaaacaaaaaattagctgggtgtggtggtgggcacctgtaatctcagctactcaggaggaggaaaatcgcttgaatccgggaaacagaggttgcagtgagccgagatcacaccattgcactccagcctgggtaacaaaagcaaaactctgtctyacaaaaataataataataaaataacaatggattggttgagagatcaccgtatgccagaagttgctttaagcattttgcatgtattaatccattttacacctcacaatatcgctaccaagtagaaacgattatctcgattttgtaaaaggtgaaacaggaaaaaaccactagagcagagctggcagaccctcaaccttcttttccttctgactccaaatgacagacagcattctttccatctctcacctcctcatgcctcctgtggaaaaaatgaatgaacagatgagaaaagttggagctggagaaagaccgtgttcctcgtgttctgtgagacctgggaaggctgctaaaacccagggagcaggagtt

SEQ ID NO: 28 - DNA, 578 bp, Homo sapiens
ctccagcctgggcaacagagcgagactccatctcaaaaaaaacaaaaaacaaaacaaaacaaaaaattagctgggtgtggtggtgggcacctgtaatctcagctactcaggaggaggaaaatcgcttgaatccgggaaacagaggttgcagtgagccgagatcacaccattgcactccagcctgggtaacaaaagcaaaactctgtcttamaaaaataataataataaaataacaatggattggttgagagatcaccgtatgccagaagttgctttaagcattttgcatgtattaatccattttacacctcacaatatcgctaccaagtagaaacgattatctcgattttgtaaaaggtgaaacaggaaaaaaccactagagcagagctggcagaccctcaaccttcttttccttctgactccaaatgacagacagcattctttccatctctcacctcctcatgcctcctgtggaaaaaatgaatgaacagatgagaaaagttggagctggagaaagaccgtgttcctcgtgttctgtgagacctgggaaggctgctaaaacccagggagcaggagtt

SEQ ID NO: 29 - DNA, 1208 bp, Homo sapiens
cttgcgaaaatgctgtgtgattatttttaacttctcagaacaaaaaagaccgatgtcacaggaaaccaagcagcattagtaaactggtctgtgacatctctattgcactctgtgaaaattccatgaaaagcaaaatgggaatacaagaatcacagagaaacaaacaagtggagaagaggcaatgacttcatgtttatgttcttggtagcaatttcctagggaaataataacttcagagaaatagtcaatttgccttacctggtgtgatatacgttgtatattgtctaaaaaataagtgctctagaataggcaaaaacactttgcctaaaaagttgtgtacgtgaatgatactggaaaattcaatgatagcctttttgtctgttctcattttgtgtagttgagagcaagatgctcacaagtacatattaatattgagtgaaattaagaagtctcatccccagaataatgttgctcacaaaatagatgctcaataaatgcctgtggttgcattgggctcatttctgttcatgtgctgtttttttcttttcttttcttttttttttttttttttttgacagagtcttcctctgtcaaataggctggagtgcagtagtgcgatctccactcactgcaacctgcacctcccacattcaagcaattctcctgcctcagcctcttgagtggctgggattacaggtgcacgccaccacgcctggctaattttttttttttttttttgtatttttagtaaagaaggggtctcaccatgttggtcagactggtctcgaactcctgacctcaagtgatccacccgcctcggcctcccaaagtgctgggattacaggcgtgagccactgtgcccggccacatatgctgttttaatttcaacttattacatggcttagaatatatttttaaaaagatattttgatgacacaatgaccctgatctataggaatgccatttttagccagaattaatatagagcactctgctttgggattagctttgggttcagtttttggccatatcatttaccagctcagtcatgggaaggataccttggaacatttaataattttttggagtttcagcttgattctcccaaaatgtgactgattaaatcttacctaatacrtcattcattcattcaacaaacatttaatgaatgtccagatgtgacaggtgctgctccaggactgggggcc

SEQ ID NO: 30 - DNA, 560 bp, Homo sapiens
aagtatctatggctaccacaaattgagagtttgcttacttcaaatgccagcaaaggtgttgctttttcattttcagcccctcacgtggtgcccatccctgagagttcctttgccccaatccagacttacaagaccccatcttatccctcaatttctggttccatttagcrgtagcaagatcttaaaactagtatctactggaatatgtcagttctgtaatgctgactgaagcttgagtaaaccaggtgcttgtaaagtggcatgaaatatccagaaataaactttactttctacgggcattaaatttacttccaccttttagaaagagacttcaatttaccttattaaataactgaccaatctgtattcaccactaaaacattctaagtagcgtattgaaataagctaatctttacagtagtataactgattttatctgtgatgaaaatcccaaatatttattgtcacgatttttgttttttaatgtgtttttctacctatgtgttagcttctttaattcgaatgttattctctatgaattaaaaatattttaatagcat

SEQ ID NO: 31 - DNA, 560 bp, Homo sapiens
aagtatctatggctaccacaaattgagagtttgcttacttcaaatgccagcaaaggtgttgctttttcattttcagcccctcacgtggtgcccatccctgagagttcctttgccccaatccagacttacaagaccccatcttatccctcaatttctggttccatttagcggtagcaagatcttaaaactagtatctactggaatatgtcagttctgtaatgctgactgaagcttgagtaaaccaggtgcttgtaaagtggcatgaaatatccagaaataaactttactttctacgggcattaaatttacttccaccttttagaaagagacttcaatttaccttattaaataactgaccaatctgtattcaccactaaaacattctaagtagcrtattgaaataagctaatctttacagtagtataactgattttatctgtgatgaaaatcccaaatatttattgtcacgatttttgttttttaatgtgtttttctacctatgtgttagcttctttaattcgaatgttattctctatgaattaaaaatattttaatagcat

SEQ ID NO: 32 - DNA, 541 bp, Homo sapiens
ccgctatttcccctactctttgccccatgctgtacggtggccgcggtcacaaatgccacaggcagtgccctgactcagcttgtgtggggagccacttccccagcctccatctgtcagctgtggtcccacaagagatggaaaaaattattcagcatgcactagatgctcacaagggccatgattccctgatcttcatacttttcatttcttgaacttgaacaacgaggactttaggttgctcacgctaagccacatgttcctaaatgtacrggatttttctaggctggcaagggagacctgtgacccaagctgagtccacgtgaagaggacctagggcttaagtccatcatgctaggccaccttgagccagccccttctgtgaacccattaacccagtagacagactcaatcagtcagagagcggatacatggcatgagcaccactaccagccacatggtgctcacggcagattttactaatcaatcacagactctttccctctgaacttgcattggtgctagaatcctcttcactccagct

SEQ ID NO: 33 - DNA, 644 bp, Homo sapiens
ttttttttttaatttaacttttttagagacaaggtcttcctctgtcgtccaggctggagtgcaatggcatgatcatagctcactgcagccttgaattcctgggctcgtgcaggcctcctgcctcagcttcctgaggactataggcattcaccacaatgtgtgaagtttgtttgcatgaagtttgcagctaattttaggaagcttttttattttttatttttttggagatggagtctcactgtgttgcccaggctggagtgcagtggtrcaatctcggctcactgcaacctccacctcctggattcaaacgattctcctcagcctcctgagttgctgggattccaagtgcatgccaccacacccggctactttttgtatttttagtagagatggggtttcaccatgttggccaggctgatctggaactcctgacctgaggtgattcgcctgccttggcctcccaaagtgctgaggttacaggcgtgaggcaccgggcccagcttgttttttattttactgattgactgattttttttttgagatgaggtctcgctctgtcgccttggctagagtgcagtggtgtgatctcggctcactgcaacctctgcctcccaggttcaagcgattctcctgcctcagcctcc

SEQ ID NO: 34 - DNA, 583 bp, Homo sapiens
aggtggaacgatctaaaacgctgcatggcgataacacatgtgatgggttacaatgtctaaattccgtctattatttgtgaagagagcagtaacattaactttagactttaggtcaaatgtgcttgacaaaagtttagggctcaccactaaaacactggaaatagagtgtgtaatttccaaattaatagagggaaaaggggaaaataaagaaaacttgatgaaaccgaaagaaggcaggaaaggaggaagaaaaggcattagaaagcatagtaaatagaaactacaaaaagamatggtggaaataaatccaaatatattaggaaacaataaatgtaagtgaattagactcactagttaaaaaatgattgccaggttcaattttttttaataaaaagaaaacttgcttatgctgttttaaaaatacatacctaagacaaaaggacacaacaaaaaggctgaaagcaaaaggataaaaagagatataccaggcaagtaagagtcaaaacaaagtgtagctataataactgtagcagaaaaaaagtctgaggcaaaaagtgatcattatataatgatgaaaggatca

SEQ ID NO: 35 - DNA, 1022 bp, Homo sapiens
tcaattaaaattcggttcattgatttgccggtgacgagaacctgcaaacagaatgtgcaggtgtcctgatctgaccctggaagagagagaaaggttcaaagatgagctcttttagtttcaagatatgagtcaactgccttggattcatttccttgttttctttttttttttaatattagggatgtcaatgactcctcataagatgatgaggagagatagatggtataaagtgtattataaatgtgatggttcttactgcctgcttaaggttctagtgcaatagaatattagggatgtcagtgatttcctcataagatgatgaagagagaaagatggcataaagtgtattataaatggtggttcttactgcctgcttaaggttctagtgcaataaaatatgagaaatacatggcttataattcaggcagctattaatgtgatcctgttggacttttgtctgcccatatatggccaaccaagaccgaacaaagtatattccttaaatgttggaagaatctgcaaaccacagactagccagtttggtgttaatcgccagaagatgattaaccatggaaatcaaagccagataaacagtttctgatcataaactgaacmtgtgtgtggacctcccctttctccagccccaaaaaggattgcaaagcccttgaggatgctttatcttgtgtcgctcagggtgcctagaagagcgttgaaaactggcaaattctccataatgtgtgtgttggcatggggaagtggggacgatgggaagctcattaggtacgcagccattagcttttgcagcaaaacaaaccaccccaaaacgtggtgctttaaaacaatacccatttagttcgttcccgattccgtggctcagctgttcaggtttggctcagtgaggcagctctggggtcagctggattcactcatgagtcagtgctcagctgccgggtggccaggagcaggctggtttggatgactcagctggggcagcttggtttagctccaactggtctctcagc

SEQ ID NO: 36 - DNA, 1309 bp, Homo sapiens
tgcctgccttccttcttttgcacctactgtgggcttggggtcagggaaatatatccaagggagtgctggtggcctaagaattcagtttcctggagaacagaggcatctgaacaggcagacgggagacagggccacagggacctttatagttccatcacgaaataactcaggggttcccagtggtaaatcttggtgaggggcttggctggattttgaagccctagggacagatttgccggctggtctggcgttccaggtcattggagcagagtgagtggaaagccttatattctctaagccccaaacaagtcgttgcacagtttttttgtttttgttgktggtggtggttttttttttttggacggagtttcactctgtcaccagtctggagtgtagtggcacgatgtcggctcattggcgttgcacagtttttaaacccacagcagtgttcatctggaactcctgattttggaagcagactgggcttaggaactccagctgctgatgctttgagtaaagggaagagtacctgtctatggggtgggtgggtagggaagagcagtgggataggggcataacaggggccaacctatccttccaattgcagaggagggcctggccgtcagcactgatggatctccttgagggacgcttctcaccccttctttgcagtctgaccctgctagagatggagacagaaacagcctgtcccaataatattaatacacgtttcatcgggaaagttgacttttgagttggtgatgctcagaacacactttcttatagcaacgtgcatcaggctgcaaaaccccgttgagcctgaagtaggttctcagactggtgctgatagctctggcctgatctcagagtgttggggaccctgtgttccttggttccttcataaattctcaggggtacaggtgggatgtggtgagggatggatggacagagggaggtgtatagaggaaaagaggaggcttcagctttgtagagagcaggatgtccccacagggcgacgttggccccgaggagacactttgtgatggttgcagacatttttggttgccaccctggggtgggacatcccaccatcctgcaatgggtggggcagcttagggaagctgctcagaatctttcaagggccaggacggcctccagcacaaagaattcatctggtcccaaatgccagtggtgttgagggtggaaaaccctgaggagggcttgggagttgcatgtatgcgctgattcagggctgcccctgcagttaggagcctgccgtcccgacagtagagtcgcacacatccgatgc

SEQ ID NO: 37 - DNA, 1309 bp, Homo sapiens
tgcctgccttccttcttttgcacctactgtgggcttggggtcagggaaatatatccaagggagtgctggtggcctaagaattcagtttcctggagaacagaggcatctgaacaggcagacgggagacagggccacagggacctttatagttccatcacgaaataactcaggggttcccagtggtaaatcttggtgaggggcttggctggattttgaagccctagggacagatttgccggctggtctggcgttccaggtcattggagcagagtgagtggaaagccttatattctctaagccccaaacaagtcgttgcacagtttttttgtttttgttggtggtggtggttttttttttttggacggagtttcactctgtcaccagtctggagtgtagtggcrcgatgtcggctcattggcgttgcacagtttttaaacccacagcagtgttcatctggaactcctgattttggaagcagactgggcttaggaactccagctgctgatgctttgagtaaagggaagagtacctgtctatggggtgggtgggtagggaagagcagtgggataggggcataacaggggccaacctatccttccaattgcagaggagggcctggccgtcagcactgatggatctccttgagggacgcttctcaccccttctttgcagtctgaccctgctagagatggagacagaaacagcctgtcccaataatattaatacacgtttcatcgggaaagttgacttttgagttggtgatgctcagaacacactttcttatagcaacgtgcatcaggctgcaaaaccccgttgagcctgaagtaggttctcagactggtgctgatagctctggcctgatctcagagtgttggggaccctgtgttccttggttccttcataaattctcaggggtacaggtgggatgtggtgagggatggatggacagagggaggtgtatagaggaaaagaggaggcttcagctttgtagagagcaggatgtccccacagggcgacgttggccccgaggagacactttgtgatggttgcagacatttttggttgccaccctggggtgggacatcccaccatcctgcaatgggtggggcagcttagggaagctgctcagaatctttcaagggccaggacggcctccagcacaaagaattcatctggtcccaaatgccagtggtgttgagggtggaaaaccctgaggagggcttgggagttgcatgtatgcgctgattcagggctgcccctgcagttaggagcctgccgtcccgacagtagagtcgcacacatccgatgc

SEQ ID NO: 38 - DNA, 1700 bp, Homo sapiens
tgatcttgtcatgaccgtttaggtttaagagaaggcatcgtatattggttctctaaccgtccatagcaacacacttaggaatagaactggcttggattcccaggccaatgttctttctgtacattatgcttttgttgttgaaygtagtgtttttaaaaattatatcttcattatttttaattgctgattaatgtttttctctgtacttcgtacattttgtctactagttttatttagagctggtttctgcatatgaagtaaatctgagagagtgggccctccttgcccagatgtctaacgcagccctcctctcccactcctcttctcatatccctctcatcactaagttctacagtcttatactacttattaccatttgaaaatatctctttaggctgtttaattttttacgatctaattaactccccaactggactttgagctccttgaagatataaaatttctttgttctggtgctagaaccataccccaagttccaaacagtgattatcacatagaagcccttggataaggccattctagaagtttgtaagaagttcatatttgtcctttcctcaaaaacataatttgtaataaataaatagataaataataaactcattaaatggagtatctgcaataaggtagtatgtgtttattcattcttttttgatcaaatatttaccaaattactatttgggctgtgcactgggctaggtgtttagagtacagtaaaaatgagacatggctcctgccttcaaagaacgtatagtctaataaaaaaaaaacagacatgtaaacaaaaatagaaatattgggtaaaaaaacactacgttcaaagtctacataaatcatctcttccccctccaccctggcttcactggagtcataaagggatatttaaaaaatactgatgcctgaaagaagtcagagacaaaaggccacgtattatttgattccagttacgtgaaaatttaaaataagcaaatgcatagagagagaaaggagattagtagatactgagggctgaggggtggaggaagagaagaaatgaggagtgactgttaatgaatatgaggttggttttttttttggaatgatgaaaatgttctagaattggatagtggtaatagttgcataaccttgaaaatatactaaaaaattcgattttatactaaatgagtgcattatatggtatgtgaattgcatatcaagacaatttttttttaaattctgatgcctgactttcacttctaaagattctgatttaatcagtctggaatgtactgtgggcattgaggttttcagaggcatctctgggggcctaggttgaggaccactggtctgactacagtggtaggtaagagaaggcagggaccaaccctgttcaggagaattagaaagttttccagtggcagaagatggaactaaaagttaaacaagtcatttgactttcatagatgtgactaagacttgattcgacatagaaatagtctattattgctaatttgccaagattttgtcaatatctaagcactaatttaacatagccccttttatctgcagtgtcacttttcaaggtttcagttacctgcagtcaaccatggtacaacaatattaaatgtaaaattctagaaataaacaattcctatgttttaaattgcaaacaccattctgagttgtgtgaacaaatcttgagc

SEQ ID NO: 39 - DNA, 580 bp, Homo sapiens
aaatagcttgaatttacctgctaaaatttttaattgtatattttctctggctcagcagtttcactagaaatttgaaaccagtcatatggaagcattttgccaatgacaaagatttatctaaatgaggtttttacactgctgtttatttatttatttatttttaattttactttaagttctgggatacatgtgcagaacatgtaggttagttacataggtatacatgtgccatggtggtttgctgcacccatcaactccatctaggtttttttttttttgagacagagtcttgctctgtcgcccaggctggagtacagtggcacgatcttggctcactgcaacctgcacctcccaggttcacgccattctcctgcctcagcctcccaagtagctgggactacaggcacccaccaccacaacccgctaatttttttgtatttttagtagagatggggtttaaccacggtctcgatctcctgacctcgtgatccacccacctcagcttcccaaactgctgggattacaagcrtgcgccaccgcgcccggcctcatctaggttttaagccgcacatgcgttagc

SEQ ID NO: 40 - DNA, 490 bp, Homo sapiens
cacatagctaacttagtgctgttccaagtactttatgtgtattcattttaatctttagaataatgcaatgaggcaggcactgtattggccccattttatggatamtgagacaggcaacagaggctaagtgatttttccaaggtgatcacaaatagatgggaactatgaccaaatccaggaagcctgcctcccgggtatacactctccactccctgtactctgctgccccaatcccatagaagaagtgccttgaatattaatgacaccttaggggtctttctaatgccaggggctgatcttctaatgtctaaatcttcatatttaagagctgcagggtttctagagaaatcatccagcctggtctcctgcatctaggcaaggttaatatgaaactttccttgacagccatgtatagctctgtaagcaattttgtttttctttctgtttttgttttgttttgttttgttttgagacagtctcgctcttgttg

SEQ ID NO: 41 - DNA, 422 bp, Homo sapiens
agaggaaattgtgggtgatgtatcttcacagatattcctgggatagatgaacgtgacttagattatatagaaatcaaagattatatttcagggataagaaaactaggcacagaagacactaagattgaaaaataattatttctgagtaactgagtcatgcctagagtaaagaaatagtcaaattagccacaaggcaagtagtatgtgtttgcttaagtcctgaggttgaacgatctcattaatggctccaattcctcacacgcacccygccccctccgagatcagcatccttgagcatgtggtcttccagtaccctcctagtctgtgcccactgttcgatttgttgggaaaggggtgttaacatatgcaacaggggccgggcgcggtggctcacgcctgtaatcccagcactttgggaggcc

SEQ ID NO: 42 - DNA, 422 bp, Homo sapiens
agaggaaattgtgggtgatgtatcttcacagatattcctgggatagatgaacgtgacttagattatatagaaatcaaagattatatttcagggataagaaaactaggcacagaagacactaagattgaaaaataattatttctgagtaactgagtcatgcctagagtaaagaaatagtcaaattagccacaaggcaagtagtatgtgtttgcttaagtcctgaggttgaacgatctcattaatggctccaattcctcacacgcaccccgccccctccragatcagcatccttgagcatgtggtcttccagtaccctcctagtctgtgcccactgttcgatttgttgggaaaggggtgttaacatatgcaacaggggccgggcgcggtggctcacgcctgtaatcccagcactttgggaggcc

SEQ ID NO: 43 - DNA, 422 bp, Homo sapiens
agaggaaattgtgggtgatgtatcttcacagatattcctgggatagatgaacgtgacttagattatatagaaatcaaagattatatttcagggataagaaaactaggcacagaagacactaagattgaaaaataattatttctgagtaactgagtcatgcctagagtaaagaaatagtcaaattagccacaaggcaagtagtatgtgtttgcttaagtcctgaggttgaacgatctcattaatggctccaattcctcacacgcaccccgccccctccgagatcagcatccttgagcatgtggtcttccagtaccctcctagtctgtgcccactgttcgatttgttgggaawggggtgttaacatatgcaacaggggccgggcgcggtggctcacgcctgtaatcccagcactttgggaggcc

SEQ ID NO: 44 - DNA, 1225 bp, Homo sapiens
cccgggttcacaccattctcctgcctctgcctcccgagtagctgggactacaggcacccgcccagttaattttttgtwtttttagtggaaacggggtttcaccatgttagccaggatggtctcgatctcctgatctcatgatctgccctcctcagcctcccaaagtgctggtattacaggcgtgagccaccacacccggccaaataattacttcttgatggaagtgtatgcaaaagtcttatttcctttatatttttcttttttcccccaattttttggagtaaaatatatattgttttcataataaaaacataaaactttatttcttaaaaaaactcttgttgaaaaagaaataaaggaacgtggcaggagcagtcctctgagggggtccaaggaggaatcagtgttactgtggaaagtaataccaggccttgcttctgttgacttgaagattattgagctcccaattcattagttaggccagaggtgtcctgttcatgaaaattgccaggccggtgacatgcaacaggtgcagacctgctgtgtgagccctgggaacacactgagatctgccagcgttttggcggtgcttcgcagtgctcacagctgctgtgtgtcaagcaggggctgctctaatgcttcagtgttctgtgatggtgaggtctggccccactctcttcctcagcactccaggctttgaccagctaccaaatacctggccagactattgtcacgagagctgccaaatgaaatcctggggcaggagtcatcagtcatttagtgtgcttccagaaggaatcaaaggagtagctgttcaagcaggggaaaggaatgagaaaagaaaaaacgtagagcaagtctgttacttaagaaaaacacagaaccaatgttacaactaagaatttcagagtccttggctgtgagtcaggtgtttggtgttatatagggatttatcagtcactggttcagaagaatatcggataacctctgtgaaataaatgagaagagcataagccaggatgagacagaattcgtaatgagttccctcatcacatctcttggccaagaaaaacatgcactttctccagaggcagaatttttcttccattctaggaggtggaggaacacttggagtatatgtagtccaggctttcagatgagcagtttcactagcagttttttgtaatctactcataaataagtgaaaagagaaactgtgaggtaa

SEQ ID NO: 45 - DNA, 615 bp, Homo sapiens
ctaagtaatgcttacaaatgttgtaaaagcaagaagtttaggaacttacaattgccaaagcagataatacataacaaaattcaaaatggcaataatggccaggcgtggtggctcacgcctgtaatcccagtactttgagaggccaaagtgggaggatcacttcaactgaggagtttgagaccagsctcagcaacctggggaaatcccatctccacaaaaaatacaaaaattagccaggtgtagtggtgagcagctatagtcccagctactgggaaggctgaggtgggaggaccacttgagcccaggaggccaaggctggagtgagccgagatcatgcccctgcactccagccagggcaatggatgcagaccctgtctcaaaaacaaaacaaaaaaaaagggcagtaataacttgtaggacagaattgtgagacataatatattaacaaatttatataaataagagtcaaaatataattttcttttaaaaacccatatgttgggaagccaaggggagcagattgcctgagctcaggagttcaagaccaccctgggcaacatggcaaaaccccatctctactgaaatacaaaaaaaaaaaaaatttagctggacatg

SEQ ID NO: 46 - DNA, 315 bp, Homo sapiens
gctrcaatcttattcataatctctattatttcagcagattgtctaacctttcattagtttacaaatgtagattacccgttttttttttggcttctaattctgtatctttgcttttaagcatcgattgttatctagacaagaagaacttaaggaaagagcaagagttctgcttgagcaagcaagaagagatgcagccttaaaggcggggaataagcacaataccaacacagccaccccattctgcaacaggcagctaagtgatgtgaggagcattggttaaaaaagaccataagttgttcattgtaatcatgggga

SEQ ID NO: 47 - DNA, 1302 bp, Homo sapiens
gatgcatattatctatatttttgaagttgtgctaaatggacatgtataaaatcttcttgataacatggttgactcctccaaatccartatttattatttcaaattatgttattcaaaattttgcttaattagctcattggggaaaaccaaatattttaaatcattcaggtgctttcaagacctggggtttattattaaattactaaatgccaataatttttatatgactccatgtggaaatttggaagatatacaagatgtttctgaaggtgtatcgatgcccttttttgaccagtacttaacatgaacttaccgtgtactgtgtgattatttctctttttgaaagggaaccagagggtgcaaactctttatttgagggccctggtgtctcaaggttatactccagaaaatctcattctttcctttcccaactggcatttcaaagatatttcaagtactcatattaccagatattaagcacttcagcaagaaattatctaaatttcccaatttgctccttaaagacttcttgcagactctttttcaaatttgcctgtggagtgcagattttcttgtgcacaacactgaatttatttaggtagtagaaaccttcctaggtgatcctggttctctcaaaatgtgacagataagaaggccagttcataacagggcaaggtagatttttctggaaagtaacttgcagaaaaatgaaaggctaaaggtctaattagagatagaaattgttttttaacatattagttagtggtaaaaaaaataagtgaatgctttttcatgtccataacgctgcagggacacccttgaacatgtctctttataatatttctccaaagtatgtatctggaaatgacattaatggatggtaggaaatggacatcttcaaagttttccatcattgacaatattttctccaaaattcttttaacaatttagcacctccatcaataaggcatagaaatttctacttccttacattttcaagaaccctttgttatcagattttaattcctgtctaaaacttgtaaaagggtagggagtaattgttttaatgtgcattctctaatcactaatgaaatagagcagtttaacaacaacaaaaagaaaggaaagccctaatggccaatagaaagaataacttctgatgtttgatagaacagtggggtgcctacagttcataataatttattgaatatttcaaaatagcagaagaaaagatttgaaacattaccaacacaaaaaataataaatgtttgaggtgatgaataacctaaatgccatgatttg

SEQ ID NO: 48 - DNA, 1302 bp, Homo sapiens
gatgcatattatctatatttttgaagttgtgctaaatggacatgtataaaatcttcttgataacatggttgactcctccaaatccagtatttattatttcaaattatgttattcaaaattttgcttaattagctcattggggaaaaccaaatattttaaatcattcaggtgctttcaagacctggggtttattattaaattactaaatgccaataatttttatatgactccatgtggaaatttggaagatatacaagatgtttctgaaggtgtatcgatgcccttttttgaccagtacttaacatgaacttaccgtgtactgtgtgattatttctctttttgaaagggaaccagagggtgcaaactctttatttgagggccctggtgtctcaaggttatactccagaaaatctcattctttcctttcccaactggcatttcaaagatatttcaagtactcatattaccagatattaagcacttcagcaagaaattatctaaatttcccaatttgctccttaaagacttcttgcagactctttttcaaatttgcctgtggagtgcagattttcttgtgcacaacactgaatttatttaggtagtagaaaccttcctaggtgatcctggttctctcaaaatgtgacagataagaaggccagttcataacagggcaaggtagatttttctggaaagtaacttgcagaaaaatgaaaggctaaaggtctaattagagatagaaattgttttttaacatattagttagtggtaaaaaaaataagtgaatgctttttcatgtccataacgctgcagggacacccttgaacatgtctctttataatatttctccaaagtatgtatctggaaatgacattaatggatggtaggaaatggacatcttcaaagttttccatcattgacaatattttctccaaaattcttttaacaatttagcacctccatcaataaggcatagaaatttctacttccttacattttcaagaaccctttgttatcagattttaattcctgtctaaaacttgtaaaagggtagggagtaattgttttaatgtgcattctctaatcactaatgaaatagagcagtttaacaacaacaaaaagaaaggaaagccctaatggccaatagaaagaataacttctgatgtttgatagaacagtggggtgcctacagttcataataatttattgartatttcaaaatagcagaagaaaagatttgaaacattaccaacacaaaaaataataaatgtttgaggtgatgaataacctaaatgccatgatttg

SEQ ID NO: 49 - DNA, 938 bp, Homo sapiens
tgcatggttgacaatgaaatggacgtttcatcacattgccctactcctgacctccacactgacctccagatcacccctcagtcaaaatgttaaaggagtcaccgaatgcagttttaagctgaatttagcctagttttctgaagagaaagccagagagtaatgtattttcagtggtgcttttttaatcctgtagttgaaggcttctgtgccatgattagcgttgatgatrtcatcaatttatcagtttattgccaaggtgtgtttcttctttcatttttcatgtatctcctaagccattaaatattttaaaaaataacaaaaacaaaactttgaaaaagggagagctacctacattttttttgttgtttacaatgcaaaagatattagtattttctgacctgttctgtaagttatctctgagtcaaatttagaatttatctggataaaaggtaagtgaataggttggtcccagaacccaaaatggagcatgtggtatgactggattttagcatgacctttttctgtttatctggcaacaaatcaattagctgttcaaggaattaattgtagaagaaatcatccaatcaggtccagaaattacctagcatatgattaaccaaattttttggttttgatgatatttttaataacaaacttggttttctttggcttaaaacaaatatgagcaggctataaagaatcacacaagcaaatgcaaatcagttaattaattaagaagttcagtcaaaatagttctatggcattgtacatcaattgactcctaggctttttaacatggacatttggttccccctagttttttaaggagtttctaaaaccacacgtaccaaatattattcaaaagattgcataaggtttacatacatttgtactactatttttgtgtatacaaaagcgtcttaaattaaaattaattt

SEQ ID NO: 50 - DNA, 1269 bp, Homo sapiens
atatgtaatcaatgaagatgtaaagaaatatccagtttccctagttttcatagaatcaaatgttgatataaacagtctcacaattcagctgattagcattaatgaaatgccaaaggctctttcttagtctgttgctaaacaaaaatactgacaaacaacagaaatttatttcttgcaattctggaggctgggaagtccaagatcaaggtgccagtaaatttggtgcctgatgagggccaattcttcacagatggttccttttctctcacgtggtagaagggccaaacaagcttcctcacaccttttttatcagagctctcattccattcatgagggcttcatctcagtgatctaatcaccccctaaaggtctcacctcttaatattattgcattggtgattaggtctcaacatgtgaattggggggtggggggacattaagacggtagcatgctatcaccccagttgggactcaagcaactcaccacaactttttcttcactttgcacagatttcacatgcactcccttcagtaataaccccaaatccccttttcttcaatctttaattcccactcttctcccaatgtatgtttttgcctccaatttcatcacagaaactgtggttcagtttctgtgatgaaattggaggcaaaaacatacattgggagaagagtaggaacctcattcctcagttttttttcctcctctccaaaccacagggactggaggtaggactgtatttctccctgtgcccctctctcttcctcaggagtctctcctgccctggcagaggaagactgctgctataagaatcatctctttgcatctaccagtaggatgtggaaattgatctctgggatttgatcatgttcttagcacatacttgacggaagggacctctagtagcttctctctagatgtagctagcaacatcttctggagcaagctttttgccttctgtttctctttagctggattgatagacagatggacagacagatggatggatggatagatcgatcgattgatcgatcaatagatagacacatacatttctgattaagggrttcaaacttcatggtgcgtatgctcgactaacctatgaatttatcaagcctgaagactggtaggaacttcagagttcatttagtgcagttcttctcaaatttagtatgcgttaaaatcttctggagctggataaataaactgtggtacatccagacagtggaatattattcatggcaaaaaagaaatgacctctcaaacca

SEQ ID NO: 51 - DNA, 1111 bp, Homo sapiens
tctagttccaggcctgagatccgggagttataaacgaaggaatacatcataacatagtgggctattcttgccagttctttcatcaagtgagagtttttgattccagcagccagactaactgctttgtagctactttatttttgaagacaggcagtcaggactctgtgctttggctacttgggataataaataaagcacacagataaatgtgtttatttggacatgtaatttagtttctatataactttatttttttttaatgacacacatgctgattcctagtcatcagccctaggcgccagtaaaatcagattaaaagcattagtaacgtagtcaattccatttataatatgcctacactagaggtgcaaacattaaaataaggaaaatctataaactggaattaaagatattttctggaactcctcttaagaaatctttgaaagaaagacataagattttacataaatactctcaaggagccctttatttgccatgcgatatttgtaattccaattaaaatttgccttggtcacttgagtcttcatcttttgtacttcaggttgattcagatggctttgtattaaggaatgggcatcatttagtgatgctctgctagttgtaatattgccttctataatcttgcctaataatcactatcagcaaatcaatttttcctttttattcacattctattatccactcccttttgacctatagttcttgggacagcccatgtattattttttttctgaaatcctcagcatattacatgcagcataatgggataaaagccctagcattaaatccaatcaatagctcccacaggtagatatctatttcatccccctctttaatgtgctgtcctttgtacatgaagatgtcgctatcgacctacaattcatctggcatctggtgtgggttctggactttgtccactggtaggggtgtatttagactaagtcatcctcattccttccccagcttacstctccgtactcactgtcccatttgacaaacaggtaggctagggccatagaatgacataaagccacctgaccatgaatcaaaactataacaatcattttacttgcttcctctcagccacaaa

SEQ ID NO: 52 - DNA, 641 bp, Homo sapiens
ttactcaaagctaacatctgggatcacttgcatttttttttgtgaatttcattttttaaaagttcattcaaagaggatctgttgatagtgaactattaattttgtatcaacaaataccactaccttacccactctcttgaaaatcactttgattaacatgcagtctcagtagacagttattttctctgagcacattaaagacattaccacagtgtgtggctttcataattgctgttgagaagttagctggaagttcatcaaacattgaaggttctcatttttgtcttggtrctttaatacatttatgtcttttatggtctgcagttttgtgttctagatatttattttgctggttaggattcatttagcttcataagtctgggaattggtattaaaaataataaattttagaaaattctaaaccgctatgctgccaaatactaccacagctcccttctgtcttgtttatgagacttaattaggcatatattaaaacttttttattccccatcatgatttaacttttaaaacattttgcatctctttgcttcccttcggacatatcttccagctcacaaaatttctgtctttatttgtattcaactgttaaatccatccaatgagttatatgttatttctat

SEQ ID NO: 53 - DNA, 565 bp, Homo sapiens
aggacaattagaaatataaacaaatgactgagaagccaagttgcttggtgatgtcaaggttgacacccatgcccaggatatctttagggaagacacaaatgtgaccaataatctctgtctagaagtcagagamtctgtgagtgtgaatgtgtttgatgtccccctgctcaccactgtgttcctagtgcctaaaaaactggtacttatgagatgcttaatatctatttgttaaatggatcagtgaatgatggagttctgaatttagtggttacatgaaggaagtgagctccacacaggaaactatttatctgttaatgtcactagagtcaaagattaataaaatttatttcatgtaagttttttcctctaagttctatcagattaatgaaacttatttcatgtaagtgttttcctctatattctgtcagattaatgaactttgtttcatgtaagtttttttccccctaaattctatcagaggcacattctgagtgccttcattgtgagaagaaataaactaagcattgctgatagtgagataaatagtctgggaggtagtaggtta

SEQ ID NO: 54 - DNA, 565 bp, Homo sapiens
aggacaattagaaatataaacaaatgactgagaagccaagttgcttggtgatgtcaaggttgacacccatgcccaggatatctttagggaagacacaaatgtgaccaataatctctgtctagaagtcagagactctgtgagtgtgaatgtgtttgatgtccccctgctcaccactgtgttcctagtgcctaaaaaactggtacttatgagatgcttaatatctatttgttaaatggatcagtgaatgatggagttctgaatttagtggttacatgaaggaagtgagctccacacaggaaactatttatctgttaatgtcactagagtcaaagattaataaaatttatttcatgtaagttttttcctctaagttctatcagattaatgaaacttatttcatgtaagtgttttcctctatattctgtcagattaatgaactttgtttcatgtaagtttttttccccctaaattctatcagaggcacattytgagtgccttcattgtgagaagaaataaactaagcattgctgatagtgagataaatagtctgggaggtagtaggtta

SEQ ID NO: 55 - DNA, 893 bp, Homo sapiens
cattcgtctacttgggctggtataatgaaataccacagactgggtggcttaaacaacagaaatgtattttctcccagttctgtagtctggaattccaagatcaaggtgccagcagagttggtttctggtgaggcctctgtctttggcctgcaaacggcctttcttctatgtgtatgcagagagagagagagagagatctctgctgtctcttccttktcatgtaaggacaccagttctgaactggagccctaccctatgaccccatttaaccttcactgcctctttaaaggctctgtctccaaatgcagtcacagtgggggttagggcttcaactcatgaattttggagggacacaattcagcccataacaatatggatatctagatctcatacagatttaaacactttgaacaccatttcaaataagtgtcagtggctttgggaaaaggagcctgaaaaatgcaaattgcatttccattgaagtcagccaatttgtattgaagtcagcccagggctgtgcttggagccctgtttgttcaagagtagtatacaagcatagtccctgctctttaactgcatagcctctcattcattgttgaggaggtgatgccaacctctgaaacaataagagaatagtacaaaacccagtatcattaagggcaagttgtgggcttcaacaaatgtttctacttaccatcagataataaggcatctttagagttccaacactaaagttgtgctgagaccattttctgggtttttagcgccttcagaggcaaagcagaaagtagcatcaaatttctcctgtgaaaacttctttgagtgttaacttgttctgaatggaggcaggtaaccctgttctgagctgacaaaatcaaactttacttgatgca

SEQ ID NO: 56 - DNA, 1054 bp, Homo sapiens
gcatttttctttcacctctttcttttggaatgccctttttgcagaaagctacgggtttatgaggaacacacaygcaggcacacacacacaacgtgctgacaaaaggcatccattgtcaataaggtcatccaactcaattaaaaacattataaagaaatcaaccccttcacactgcatactttctaaaatatctcaatttgatcagcttttctttaccccataaatggctcattttaaggacactgtatatgtgcctacaaattagtctctaatgtcacctgctttcttccctgaccatcatgatgctcccacttctatgcctgggttcaaataacctccctagaacattagttccaatttctgttaaacaataattcagtctatttttgttggtgggatggatttcattatttttatttaatcaattttctcccaagtgcctagcaagttcagaagcttctaggcccttctagaaaaaaacataacaaaggtggattccccacaacattgcaccctcatgttttcagtaatacatctggatgagtggtcacagaagctgctgtcaatcttgtcgcaacattgactcatgaaattaccaatccatgtccaaattttgtattcccattttccccactgtaaaatggaagcagtttaaagcttgtaaaactctccttgtgaagaatttggtgaaagatgaggtgagggtaggggaggaaaagggaagattccaaagttgagtatcaacaacatcagtggtaataggaataactgtgttctccccaccctgtacttaataagacatgtttagagatgaaaagaaacaaagaaataactgtagaaagaaataattttatgaatgtcatttctgatggtagattgttagtcattcacgaaaaaaaaaaaaaaagaaacaaaacagaactggcagagccaccaacaggttgagagttaatatgatttctctgtgtttgtgtatgcagggatcaggcataggcaggttgctttgccttgagatacacaatagatgaaagaagcagacccagaagtgagactg

SEQ ID NO: 57 - DNA, 1054 bp, Homo sapiens
gcatttttctttcacctctttcttttggaatgccctttttgcagaaagctacgggtttatgaggaacacacatgcaggcacacacacacaacgtgctgacaaaaggcatccattgtcaataaggtcatccaactcaattaaaaacattataaagaaatcaaccccttcacactgcatactttctaaaatatctcaatttgatcagcttttctttaccccataaatggctcattttaaggacactgtatatgtgcctacaaattagtctctaatgtcacctgctttcttccctgaccatcatgatgctcccacttctatgcctgggttcaaataacctccctagaacattagttccaatttctgttaaacaataattcagtctatttttgttggtggratggatttcattatttttatttaatcaattttctcccaagtgcctagcaagttcagaagcttctaggcccttctagaaaaaaacataacaaaggtggattccccacaacattgcaccctcatgttttcagtaatacatctggatgagtggtcacagaagctgctgtcaatcttgtcgcaacattgactcatgaaattaccaatccatgtccaaattttgtattcccattttccccactgtaaaatggaagcagtttaaagcttgtaaaactctccttgtgaagaatttggtgaaagatgaggtgagggtaggggaggaaaagggaagattccaaagttgagtatcaacaacatcagtggtaataggaataactgtgttctccccaccctgtacttaataagacatgtttagagatgaaaagaaacaaagaaataactgtagaaagaaataattttatgaatgtcatttctgatggtagattgttagtcattcacgaaaaaaaaaaaaaaagaaacaaaacagaactggcagagccaccaacaggttgagagttaatatgatttctctgtgtttgtgtatgcagggatcaggcataggcaggttgctttgccttgagatacacaatagatgaaagaagcagacccagaagtgagactg

SEQ ID NO: 58 - DNA, 1152 bp, Homo sapiens
aatcttactgactcatcccaacaaccttatgaggtcagtacaattatcattgctgatttatagataaccaaacagacacagagcgtctagagcacatattgagagttacatggtagactcaagatataaacttggatctccaccaccgtatctctgaagtttgcataccattttctatcataaattataagaagatgcttagtgaccatccttattaaagctgtcagttaagagataggtaaaacggtgtgtgagctgtgcatgtgtrtgggggtgttgggaggaaggaaggggaaaatggagagggaaggaagaagaaatgagggaggtagaggggctcaaataaagacagtaagaagagacaaaactagaactaagaatgacattattcatcttatctgccgttccttcagaagacaaaatgccaagcccatctctacctactcattagcgagctaccaatgccaattttgatgtggcatgagaacaagcacagccaccctacagataatagggtagaatgccctcccaacacccaaggactggtcccgaggggtgtgctggggagatctcgctgcgttaaatagcactgacatcttccaaactaaattgcgatggggaaggaaacagaattaatagttattgatacaggggagagagcaggaggtagcaggaggcagatgcagctcatgctgaattccttagtcctgaaaattatgcctagaagtaacagaaatgttctaattccatgaccttcttcctcaatctactagatgtagttccataccactttgtcccaagacatatttacagaattccaaggctgatactaaccccttggttactatgtcagcttagcagtgacataattgcagagatgattctccccccttcaaatcacgaggtttctgttaggaaatctagtgcaaaattctgaaaatcaagtctcgatacctgcattccaaggaaagctctgtggtgaacttccataagattttcggtaagtcataaacattctctctgccatgagtttccagcttgttaaataagtcaaaacatcttaaaaactccaaatcaccataaaaaggcaacagaaattgccttttggaccatgcaacaaaaaaattacagattactcttgttttcttaccc

SEQ ID NO: 59 - DNA, 1152 bp, Homo sapiens
aatcttactgactcatcccaacaaccttatgaggtcagtacaattatcattgctgatttatagataaccaaacagacacagagcgtctagagcacatattgagagttacatggtagactcaagatataaacttggatctccaccaccgtatctctgaagtttgcataccattttctatcataaattataagaagatgcttagtgaccatccttattaaagctgtcagttaagagataggtaaaacggtgtgtgagctgtgcatgtgtatgggggtgttgggaggaaggaaggggaaaatggagagggaaggaagaagaaatgagggaggtagaggggctcaaataaagacagtaagaagagacaaaactagaactaagaatgacattattcatcttatctgccgttccttcagaagacaaaatgccaagcccatctctacctactcattagcgagctaccaatgccaattttgatgtggcatgagaacaagcacagccaccctacagataatagggtagaatgccctcccaacacccaaggactggtcccgaggggtgtgctggggagatctcgctgcgttaaatagcactgacatcttccaaactaaattgcgatggggaaggaaacagaattaatagttattgatacaggggagagagcaggaggtagcaggaggcagatgcagctcatgctgaattccttagtcctgaaaattatgcctagaagtaacagaaatgttctaattccatgaccttcttcctcaatctactagatgtagttccataccactttgtcccaagacatatttacagaattccaaggctgatactaaccccttggttactatgtcagcttagcagtgacataattgcagagatgattctccccccttcaaatcacgaggtttctgttaggaaatctagtgcaaaattctgaaaatcaagtctcgatacctgcattccaaggaaagcyctgtggtgaacttccataagattttcggtaagtcataaacattctctctgccatgagtttccagcttgttaaataagtcaaaacatcttaaaaactccaaatcaccataaaaaggcaacagaaattgccttttggaccatgcaacaaaaaaattacagattactcttgttttcttaccc

SEQ ID NO: 60 - DNA, 1192 bp, Homo sapiens
gtactagggccagctatgttttgagtcaaaattagtcttgtttgtggattaaacagatattggacagctagaggayggaaagacactcaattaaaagggcataagagaacagtcttccagctattaccaatgaatagctatggttctgtaacatagcattagccgactcaagaatgattttcttccttttatttctgtgattaaaatagggaatgattaggatgatgactgctaacatccaagttaaaaggagttacttcctcacttcctactgattctgcaaagggtacacttttgggagggaagggcattatactttgcatcaccagtcacaggtagattgatggtgcaaagaataacacctatatccacccttccatcctacctccacccttccaaacctttccatcctatatccacacttccaaaaatgtcaaggaacgaatacctctgtgacatctgcaaagaaaaattctactgatcaaagactgttccacggtgtgatttggaggaaagatcatccccatcactaaacagataagtaaattccctttttattccagaaataaccccctccaaaagttattctctatcttgaacacaaatcaagggcatagttggtaaaaatgataaaagctcattctgttcagattctggagacacactcaatccctgcttactcttctcacaccactggagctaaagaagttggtctataccctcctgggggtgacagcatctcaatgagaagcattgccttgagaactaatgtccagaattcgctgttggttccactagaccttagatccagaattccaaccctattcaattcagtagtaccccaagcaggtattactaaaaacacactctacaatgcagccaagcacagaggcatacaggcgtattcaggtgctatctgcttagagacctaagaccttgcttcagctgtaccagcagagacagtaagcaacatacagggacattaacaacatgtgctcgaagtcagagttcttgggtttaaatctcaattttgcagtttcccagaagtgcaactcagacaacagctctcacctgactgagtttcaggttttcagcctgtaaactggagataacaaaaatgacgcagtatctagcataggacatgtatgtggtttgtcacaaaatcatgtatgtacaatagtatgtatgatgc

SEQ ID NO: 61 - DNA, 1192 bp, Homo sapiens
gtactagggccagctatgttttgagtcaaaattagtcttgtttgtggattaaacagatattggacagctagaggacggaaagacactcaattaaaagggcataagagaacagtcttccagctattaccaatgaatagctatggttctgtaacatagcattagccgactcaagaatgattttcttccttttatttctgtgattaaaatagggaatgattaggatgatgactgctaacatccaagttaaaaggagttacttcctcacttcctactgattctgcaaagggtacacttttgggagggaagggcattatactttgcatcaccagtcacaggtagattgatggtgcaaagaataacacctatatccacccttccatcctacctccacccttccaaacctttccatcctatatccacacttccaaaaatgtcaaggaacgaatacctctgtgacatctgcaaagaaaaattctactgatcaaagactgttccacggtgtgatttggaggaaagatcatccccatcactaaacagataagtaaattccctttttattccagaaataaccccctccaaaagttattctctatcttgaacacaaatcaagggcatagttggtaaaaatgataaaagctcattctgttcagattctggagacacactcaatccctgcttactcttctcacaccactggagctaaagaagttggtctataccctcctgggggtgacagcatctcaatgagaagcattgccttgagaactaatgtccagaattcgctrttggttccactagaccttagatccagaattccaaccctattcaattcagtagtaccccaagcaggtattactaaaaacacactctacaatgcagccaagcacagaggcatacaggcgtattcaggtgctatctgcttagagacctaagaccttgcttcagctgtaccagcagagacagtaagcaacatacagggacattaacaacatgtgctcgaagtcagagttcttgggtttaaatctcaattttgcagtttcccagaagtgcaactcagacaacagctctcacctgactgagtttcaggttttcagcctgtaaactggagataacaaaaatgacgcagtatctagcataggacatgtatgtggtttgtcacaaaatcatgtatgtacaatagtatgtatgatgc

SEQ ID NO: 62 - DNA, 1192 bp, Homo sapiens
gtactagggccagctatgttttgagtcaaaattagtcttgtttgtggattaaacagatattggacagctagaggacggaaagacactcaattaaaagggcataagagaacagtcttccagctattaccaatgaatagctatggttctgtaacatagcattagccgactcaagaatgattttcttccttttatttctgtgattaaaatagggaatgattaggatgatgactgctaacatccaagttaaaaggagttacttcctcacttcctactgattctgcaaagggtacacttttgggagggaagggcattatactttgcatcaccagtcacaggtagattgatggtgcaaagaataacacctatatccacccttccatcctacctccacccttccaaacctttccatcctatatccacacttccaaaaatgtcaaggaacgaatacctctgtgacatctgcaaagaaaaattctactgatcaaagactgttccacggtgtgatttggaggaaagatcatccccatcactaaacagataagtaaattccctttttattccagaaataaccccctccaaaagttattctctatcttgaacacaaatcaagggcatagttggtaaaaatgataaaagctcattctgttcagattctggagacacactcaatccctgcttactcttctcacaccactggagctaaagaagttggtctataccctcctgggggtgacagcatctcaatgagaagcattgccttgagaactaatgtccagaattcgctgttggttccactagaccttagatccagaattccaaccctattcaattcagtagtacccyaagcaggtattactaaaaacacactctacaatgcagccaagcacagaggcatacaggcgtattcaggtgctatctgcttagagacctaagaccttgcttcagctgtaccagcagagacagtaagcaacatacagggacattaacaacatgtgctcgaagtcagagttcttgggtttaaatctcaattttgcagtttcccagaagtgcaactcagacaacagctctcacctgactgagtttcaggttttcagcctgtaaactggagataacaaaaatgacgcagtatctagcataggacatgtatgtggtttgtcacaaaatcatgtatgtacaatagtatgtatgatgc

SEQ ID NO: 63 - DNA, 1192 bp, Homo sapiens
gtactagggccagctatgttttgagtcaaaattagtcttgtttgtggattaaacagatattggacagctagaggacggaaagacactcaattaaaagggcataagagaacagtcttccagctattaccaatgaatagctatggttctgtaacatagcattagccgactcaagaatgattttcttccttttatttctgtgattaaaatagggaatgattaggatgatgactgctaacatccaagttaaaaggagttacttcctcacttcctactgattctgcaaagggtacacttttgggagggaagggcattatactttgcatcaccagtcacaggtagattgatggtgcaaagaataacacctatatccacccttccatcctacctccacccttccaaacctttccatcctatatccacacttccaaaaatgtcaaggaacgaatacctctgtgacatctgcaaagaaaaattctactgatcaaagactgttccacggtgtgatttggaggaaagatcatccccatcactaaacagataagtaaattccctttttattccagaaataaccccctccaaaagttattctctatcttgaacacaaatcaagggcatagttggtaaaaatgataaaagctcattctgttcagattctggagacacactcaatccctgcttactcttctcacaccactggagctaaagaagttggtctataccctcctgggggtgacagcatctcaatgagaagcattgccttgagaactaatgtccagaattcgctgttggttccactagaccttagatccagaattccaaccctattcaattcagtagtaccccaagcaggtattactaaaaacacactctacaatgcagccaagcacagaggcatacaggcgtattcaggtgctayctgcttagagacctaagaccttgcttcagctgtaccagcagagacagtaagcaacatacagggacattaacaacatgtgctcgaagtcagagttcttgggtttaaatctcaattttgcagtttcccagaagtgcaactcagacaacagctctcacctgactgagtttcaggttttcagcctgtaaactggagataacaaaaatgacgcagtatctagcataggacatgtatgtggtttgtcacaaaatcatgtatgtacaatagtatgtatgatgc

SEQ ID NO: 64 - DNA, 1192 bp, Homo sapiens
gtactagggccagctatgttttgagtcaaaattagtcttgtttgtggattaaacagatattggacagctagaggacggaaagacactcaattaaaagggcataagagaacagtcttccagctattaccaatgaatagctatggttctgtaacatagcattagccgactcaagaatgattttcttccttttatttctgtgattaaaatagggaatgattaggatgatgactgctaacatccaagttaaaaggagttacttcctcacttcctactgattctgcaaagggtacacttttgggagggaagggcattatactttgcatcaccagtcacaggtagattgatggtgcaaagaataacacctatatccacccttccatcctacctccacccttccaaacctttccatcctatatccacacttccaaaaatgtcaaggaacgaatacctctgtgacatctgcaaagaaaaattctactgatcaaagactgttccacggtgtgatttggaggaaagatcatccccatcactaaacagataagtaaattccctttttattccagaaataaccccctccaaaagttattctctatcttgaacacaaatcaagggcatagttggtaaaaatgataaaagctcattctgttcagattctggagacacactcaatccctgcttactcttctcacaccactggagctaaagaagttggtctataccctcctgggggtgacagcatctcaatgagaagcattgccttgagaactaatgtccagaattcgctgttggttccactagaccttagatccagaattccaaccctattcaattcagtagtaccccaagcaggtattactaaaaacacactctacaatgcagccaagcacagaggcatacaggcgtattcaggtgctatctgcttagagacctaagacctygcttcagctgtaccagcagagacagtaagcaacatacagggacattaacaacatgtgctcgaagtcagagttcttgggtttaaatctcaattttgcagtttcccagaagtgcaactcagacaacagctctcacctgactgagtttcaggttttcagcctgtaaactggagataacaaaaatgacgcagtatctagcataggacatgtatgtggtttgtcacaaaatcatgtatgtacaatagtatgtatgatgc

SEQ ID NO: 65 - DNA, 1192 bp, Homo sapiens
gtactagggccagctatgttttgagtcaaaattagtcttgtttgtggattaaacagatattggacagctagaggacggaaagacactcaattaaaagggcataagagaacagtcttccagctattaccaatgaatagctatggttctgtaacatagcattagccgactcaagaatgattttcttccttttatttctgtgattaaaatagggaatgattaggatgatgactgctaacatccaagttaaaaggagttacttcctcacttcctactgattctgcaaagggtacacttttgggagggaagggcattatactttgcatcaccagtcacaggtagattgatggtgcaaagaataacacctatatccacccttccatcctacctccacccttccaaacctttccatcctatatccacacttccaaaaatgtcaaggaacgaatacctctgtgacatctgcaaagaaaaattctactgatcaaagactgttccacggtgtgatttggaggaaagatcatccccatcactaaacagataagtaaattccctttttattccagaaataaccccctccaaaagttattctctatcttgaacacaaatcaagggcatagttggtaaaaatgataaaagctcattctgttcagattctggagacacactcaatccctgcttactcttctcacaccactggagctaaagaagttggtctataccctcctgggggtgacagcatctcaatgagaagcattgccttgagaactaatgtccagaattcgctgttggttccactagaccttagatccagaattccaaccctattcaattcagtagtaccccaagcaggtattactaaaaacacactctacaatgcagccaagcacagaggcatacaggcgtattcaggtgctatctgcttagagacctaagaccttgcttcagctgtaccagcagagacagtaagcaacatacagggacattaacaacatgtgctygaagtcagagttcttgggtttaaatctcaattttgcagtttcccagaagtgcaactcagacaacagctctcacctgactgagtttcaggttttcagcctgtaaactggagataacaaaaatgacgcagtatctagcataggacatgtatgtggtttgtcacaaaatcatgtatgtacaatagtatgtatgatgc

SEQ ID NO: 66 - DNA, 1192 bp, Homo sapiens
gtactagggccagctatgttttgagtcaaaattagtcttgtttgtggattaaacagatattggacagctagaggacggaaagacactcaattaaaagggcataagagaacagtcttccagctattaccaatgaatagctatggttctgtaacatagcattagccgactcaagaatgattttcttccttttatttctgtgattaaaatagggaatgattaggatgatgactgctaacatccaagttaaaaggagttacttcctcacttcctactgattctgcaaagggtacacttttgggagggaagggcattatactttgcatcaccagtcacaggtagattgatggtgcaaagaataacacctatatccacccttccatcctacctccacccttccaaacctttccatcctatatccacacttccaaaaatgtcaaggaacgaatacctctgtgacatctgcaaagaaaaattctactgatcaaagactgttccacggtgtgatttggaggaaagatcatccccatcactaaacagataagtaaattccctttttattccagaaataaccccctccaaaagttattctctatcttgaacacaaatcaagggcatagttggtaaaaatgataaaagctcattctgttcagattctggagacacactcaatccctgcttactcttctcacaccactggagctaaagaagttggtctataccctcctgggggtgacagcatctcaatgagaagcattgccttgagaactaatgtccagaattcgctgttggttccactagaccttagatccagaattccaaccctattcaattcagtagtaccccaagcaggtattactaaaaacacactctacaatgcagccaagcacagaggcatacaggcgtattcaggtgctatctgcttagagacctaagaccttgcttcagctgtaccagcagagacagtaagcaacatacagggacattaacaacatgtgctcgaagtcagagttcttgggtttaaatctcaattttgcagtttcccagaagtgcaactcagacaacagctctcacctgactgagtttcakgttttcagcctgtaaactggagataacaaaaatgacgcagtatctagcataggacatgtatgtggtttgtcacaaaatcatgtatgtacaatagtatgtatgatgc

SEQ ID NO: 67 - DNA, 1399 bp, Homo sapiens
cttcagagctcaccaagaaagagcatgaagctgatggtttgggtcctggagacagggacaaaaggaacagagccttcccccagcacccctttccactggaggttcctcagaggcaataaagcttgatggttagaacatggcacctggcatctgaactcaaaccagcccgaacactcacctctctgagcctcagaatcctggtctgtaaaatgcgcacactactagtacttacttctcaaagttggacttggtaatgtctgtcaagcacctaacatataacagggcaaggaagaaaagctcaagcaatggtagccatcaccaggcgtggtggctcacacctgtaaccccagcactttgggaggctgaagcgggtggatcacctgaggtcaggagttcragaccagcctggccaacatggtgaaaccccgtctctactaaaaatacaaaaattagccgggcatgatggcaggcgcctataatcagctacttgggaggctgaggtaggagaatcacttgaacccgggaggcagaggttacagtgagccaagattgcaccactgcactccagcctgggtgacaagagcaaaactccgtctcaaaaaaaaaaaaaaaaaaaggtagccaagccatcatcatcatcatctccctattattattaatctctgttgcatttctattaactgtgtgtcttgggagaatggaaattccccaagtaggcgtcctgctcaacagttaatgatggtaaaacagtctcacttgcctaaccacttcgcctaagtgttacttgactgacagggtgggttattttggggagaaaaaaaatcagtcaagctctcgagtgcaccgtccctgaaaggtttctatgacaacacatacctggatgttccagtgggagggtcacctggggaagagttcagagctaaaatcaagagggggccccacccaggtgggggccccacctggaggctgggggaggtcctcccactcctcctatttttctgcctgtgttttcccagccctgactctgtatcccttttaaacctcttcacagccctgtggggtaagtactattattcttacatccattttacagatgaagcaactgaggcttggagaaattaaagcttgcccaaggtcagtctgctgatcacatcttggatcatcttagacctttctgggtttcatttgtcagactagaggagttacactagagtgaggtttctcagtctcagcactgccaacgtgttgggctcagtaatcccatgtcataggagactgtcctatgcattgtagagcattcagcagtcccctcggcctctacccaccggatgccaggagcacctccctgtctcccacccccgaccacagtcatgacaaccaaaactgtctccagctgtgg

SEQ ID NO: 68 - DNA, 1283 bp, Homo sapiens
tgcattaaaaatgagcaaagtgggctggccaccttgtctcacgtctgcgatcccagcactttgggaggctgaggcggcagaatcacttgagcccaggagtttgaggctgcagtgagttgtgagtgagccactgcactccaacctgggcaacaaagggacactgtaaataattaatcataagataaaaattaaaatgaatagagcacaacccacagaggttgagagacttgctaacaccagaagttgccagtggtgaaattcagctttgagtttgctgatagttacggggccaagagacaggaatctgaggctcatctcagcaggycaagcctccttccttactgtggggaaattccttctctgagcacctagagggatcctggtgtcagactgacctcacctgaatcaggcttccacccacgtgatgacctcaggccagccactttaactctcagtgcctcatttctctaactttaaaatagctaaaaggcaaaggaaaaaacatgaaagccaaaaaaaaaaaaaaaggtagaaggaggaggcaatagtagaacctctctcattgggccgctgtgaggattacataaaaccatgtgttccgacccccagtacttagtaggtgcttaattaacacgagccctggtctctcctgcctttttctctgcttgcctgctccttgccaggatgcagaagacaaaagcctcagaaaggacagtgggggctcctgaggccccaagaatgcttagcaggctgaatcagttgtcctcacttcttcactttgccctctgatccaccatgaccactctgctgcaggagcttttaacagaaagcctgggagagcattctgagggggtctgtgctatagctcttcctccctggggtctaaccatccttgctttctctagacactccacacattaaactgtcttgcccgttgcagggatgggatggcatcatgtggcctctaattacacatcccttcaataataagattgactctccaagggcaagttttcctcctccttcaaaagctatctcacattgcgtcttttacaggtagtcttccccgaccctcccccacctccagccaggaaaaccatttctcctcctcccaactcctgtcatccacatcctagacttcctgggtctgccacatcctattcttcctgggtccatcacatcctagatttcttgggtccatcactgtttgctggatttcttcccaatccataattgcctggaagcagccatcacatccatcacatttattcttgtgtcttaaa

SEQ ID NO: 69 - DNA, 1083 bp, Homo sapiens
tatttgtggtaagagaagatacctgccgcggaggagggtggcataattatttttttttcaaaaagctattctggggccctggccccctggctcctgtcacagctcagcttgaactctgtagcctctcaaatgaagaaggtggctgttatttaggactctgtggaaagcaaatcacagtgctgtttttaatgcctgagaaatgcactttaggggtagacttataccttaagtgaaggagtgggggaggaagaagcattcttaagtagaagcattttaaaataaggcaggattgcttttaatgttaaactacaaaactgtacagcctattttagtgtggactattaaaacccttgcactgtaaggcttaaggtgacttttgtattttttccattccaagactgaatcccatcatacttaaaagcaggcakgcaaagtccgaggtgagagttaatcatttgccacacaacataacagtgactagtggaaagctgcagggaagagaatatttctggaaaccagcaacacctggactggaacttgttagccagatatccctatttatcagccaaattcgaggaagggagagaggtaccaattcattattcctaaattcaccttttacttcagtgcattttcatagactatagtaagttacaatgctagtaatacatccttttcagtatccattgttaaacttactaacgattgtctaaaatcaaaaaacaaggccaggtacggtggctgatgtctgtaatgccagcactttgggaggcctaggaaggtggatcacctgaggtcaggagttcaagaccagcctgaccaaaaaggtgaaaccctgtcgctactaaaaatacaaaaattagccgggcgtggtggcaggcacctgtagtcccagctactcgggaggctgagacaggagaattgcttgaacctgggagacagaagttgcagtgagcagagatcgtgccactgcactccagcctgggcatctgaaggagactccatctcaaaaaaaaaaaagactgaactctgcgcagctaaagaggtgggggtattttccccacccctttgctttaaaagctt

SEQ ID NO: 70 - DNA, 1930 bp, Homo sapiens
ctctactcttctgtaaaattggggaattagtttatattcctgttctaaaactctgatttagtattctcctattctgagcaactcgttgtgaaagtaaactcataaaatattcattgttcactttgaaaacaaaaggcaccagctgtccagtactgattgttaagtggggcgatgggagggaagtctgagaagtataaactatgttatggatgccaccaccactgtactgccatttggcctaacgattgggggtaatcctgctatctaggaacatgaagcctcattattcattttcagaatcaaattgtggaagaaatatcttatcatagtcgattagcatcaaaaagtgtgcttttgtgtatattacttcatttgttcctcataactagctcttaagggtccaaaattctgtcaacccacctgattgtctactctgtttaaactcaatttttccattcccaatgatgttttcctaggtcaagaattcattccctccaggcacagaggcccgaagacaattgtttcttcacccttctccatactctgtttgaaatcctgcaggataaggtcaaaccccttcaccatgtccagctattccacatgacagacaacccctgatgcatggttgtgctttgccatgtctgcaaatatctgtcaatcctgttgcctctgttgggcatattctttccccaccacctgcctggcaaatcctcaatagccttcaagactcaagaatctctttctatttaactgctacgggcctccttctcccaagcagatctgatcaccctgttgagacacatccataaacctgtgttatcccccagcaggaactatagtatataaatatgatctcatgtctctctgccrttttagtcatggagctcaggaaaattcagggggcaatgttcattccttatgaactttcatgaactcctggttaatctacaaggaagtggacccttcagatagaacaagcagctagcatgtagctcttagcagggccacaatcttttctcctctggggaaacaggttatgtctggcaggtagagaaatgtctgggggttgtcaatcagtcagagtccaatcgggacagagaagccacatagtaatttgaacagagtatatttaatataaagaactattacacatagcaaagattgattgctaagaagtaaagggaaccctaaagaatatattgctcatgccaatgagcagccactacccctagaactgagacagagtgctcaaagaataaccccttttctctccaacccctcaaaccttattggaagtgactcggccatgacccactgattggttgacaagttgccatgatgccccaccagcaaaagttgctggttactgtataccagtaggtcctaaagcactaatcattaaatgctttgagcttcatgaatgaaaatatcataggaaataccactaggttaatacagtatggggaggaccaggctgcatcagtttttatgacatctccttctatttaacacactctgatgagacaatcccttcaaaataaaattcaagatcatttaaagttcttgaagggccctacttggtccagcctctgcctgtttctctccagctctctctctctctcgctgtctttctctctccctgccatctctccaaacactctccattcaagtgaaagtaggctcatttcagtccattgatcaccatctctcttctacctccaggtcttacaacacgttccttccaccacttagaaaccctccgggggtttaggttttccaagagctcaggagcttgatgaacctcttgagatatgctctttcttcacagacttcctgtgattttcaggacacttcagctgcttgagcaaccatatataaacagaacttgagtggagttaactagcctctctgattctgtttcccttgttag

SEQ ID NO: 71 - DNA, 1930 bp, Homo sapiens
ctctactcttctgtaaaattggggaattagtttatattcctgttctaaaactctgatttagtattctcctattctgagcaactcgttgtgaaagtaaactcataaaatattcattgttcactttgaaaacaaaaggcaccagctgtccagtactgattgttaagtggggcgatgggagggaagtctgagaagtataaactatgttatggatgccaccaccactgtactgccatttggcctaacgattgggggtaatcctgctatctaggaacatgaagcctcattattcattttcagaatcaaattgtggaagaaatatcttatcatagtcgattagcatcaaaaagtgtgcttttgtgtatattacttcatttgttcctcataactagctcttaagggtccaaaattctgtcaacccacctgattgtctactctgtttaaactcaatttttccattcccaatgatgttttcctaggtcaagaattcattccctccaggcacagaggcccgaagacaattgtttcttcacccttctccatactctgtttgaaatcctgcaggataaggtcaaaccccttcaccatgtccagctattccacatgacagacaacccctgatgcatggttgtgctttgccatgtctgcaaatatctgtcaatcctgttgcctctgttgggcatattctttccccaccacctgcctggcaaatcctcaatagccttcaagactcaagaatctctttctatttaactgctacgggcctccttctcccaagcagatctgatcaccctgttgagacacatccataaacctgtgttatcccccagcaggaactatagtatataaatatgatctcatgtctctctgccattttagtcatggagctcaggaaaattcagggggcaatgttcattccttatgaactttcatgaactcctggttaatctacaaggaagtggacccttcagatagaacaagcagctagcatgtagctcttagcagggccacaatcttttctcctctggggaaacaggttatgtctggcaggtagagaaatgtctgggggttgtcaatcagtcagagtccaatcgggacagagaagccacatagtaatttgaacagagtatatttaatataaagaactatyacacatagcaaagattgattgctaagaagtaaagggaaccctaaagaatatattgctcatgccaatgagcagccactacccctagaactgagacagagtgctcaaagaataaccccttttctctccaacccctcaaaccttattggaagtgactcggccatgacccactgattggttgacaagttgccatgatgccccaccagcaaaagttgctggttactgtataccagtaggtcctaaagcactaatcattaaatgctttgagcttcatgaatgaaaatatcataggaaataccactaggttaatacagtatggggaggaccaggctgcatcagtttttatgacatctccttctatttaacacactctgatgagacaatcccttcaaaataaaattcaagatcatttaaagttcttgaagggccctacttggtccagcctctgcctgtttctctccagctctctctctctctcgctgtctttctctctccctgccatctctccaaacactctccattcaagtgaaagtaggctcatttcagtccattgatcaccatctctcttctacctccaggtcttacaacacgttccttccaccacttagaaaccctccgggggtttaggttttccaagagctcaggagcttgatgaacctcttgagatatgctctttcttcacagacttcctgtgattttcaggacacttcagctgcttgagcaaccatatataaacagaacttgagtggagttaactagcctctctgattctgtttcccttgttag

SEQ ID NO: 72 - DNA, 341 bp, Homo sapiens
ttttttttcctatggctgcttttttatgatttttttctccatccttacttcttcccttccttctctagtttacggcatcctgggtagaattttcttttaatatgtcctgcttggtgttggcagagcgttctgaatttctagattgatttctgtcatsagtttttgaaaactcccagttattctttcttagaatattgcatttatcaatttatctacttttctaggacttctgttttatatgtgtgtgtgtatatatatatatatatatatgagaactgtgacacacacacacacattagacattgtgagtgtgcatcacatttctcttaaacctctccctc

SEQ ID NO: 73 - DNA, 1391 bp, Homo sapiens
ctttagaacaaagcctttgtgttagtcaagactctttgacctgaaaataataaaaataacaacctaacacaactcagttttttggggttttatttctatttcttatttttattttttaaaggtggatctcactctgtcatccaggctggagtgccatggcatgattatagctcactacagcctcagtctcttggactcagccacacctggctggtgatcggtgggagtgtgtctctaggctgcccagctcaccatgaggtttgttctctgtgtgaccacatcccagcgctctcccctgcccatagtttatggcccaaaccatggttgcctggtgtcacctcccagcctgcacctgaccgtggctcgctgtccctcattttctctctggctatggccatgggcctgtacgtgaggctgcttcccttctgaacagatttctggcttccttcttcaactgtggcttgaacttttattctgttattcattccacaaatattgccagggcattaccaactgccaagtataaagggtccgtgttgaacaaggtagatctggtccctgttcatgtgaacttaggtgcccttagagaaggttgttaagcaattagaatactaagagaccaggtgcggtggctcatgcctgtaatcccagcactttgggaggctgaggtgggaaaattgcttgagcccaggtgtttgagaccagcctaggcaacatagggagacctctatcactgctaaaaatttaaaaatttagcggggcacagtggtgcatgcctgtagtcccagctactcaggaagctgaggtagaaggatcacttaagcccaggagtttgaggttgctgtgagccatgattgcagcactgcactccaacctgggcaacagagtgagactccatctctaaaaataagtaaataaataataataaataaaataaaataaaataaaaatctgatgagtgataggaattagaagggcctgcaagaacacgtggcaagaccctaaaccagtctagtgctcagagaagggctctgtgaacaccagatagtttgaagaacaaatgatgagttcaaagtgggctgtgttgtatgtgcaggacctggagacatccgggtgagtgtctcacgctttggattgtgtggcctgctgctgctctgggcaagcactctcccacccagaccygacccagtgcccagggacccagccaacacaggcctgaaagaccccatgctctccaagttcaccttaaacatgatgctgacacatccaggtttgtcatcagaatgtcctaggccagcaaaagagatgaaagggctaaaaagatgctctgtgtgaaacaagagctgctcccgggaagccaataattacacgctgtgcttatcatgctgagt

SEQ ID NO: 74 - DNA, 613 bp, Homo sapiens
tggtatttgaatgtttaggatgtagatgactgggccacaagtacaatgacatgaaattctgcaaacaaaaatctcagattctttatcagcaaaaagtgatggtcttaagtaatatgagtcagggatggggaatacctgctgtgagtaccactgttacctcagtctgtactcatggcagatgtcactaatcaattaccactctcttttccacttatccaaactgtagccccagaagcctggcagacactcttttaaccaagagatcaatgttaatgttgctggtgatacattatgttgaaagcagaatagcatgatatgatatgatgagaaatttgtgacattcttccccaaaaccccagcctaatgagaaagacatcaagacaagcycattctgagggatattctataaaatacctgaccagtactccacaaaactgtcaagatcatgaaaaaccaggaaagactgagaaactgtaacagactagaaaaaactaaagagacataatgactaaatgcaatgtggcatcttgactgtccttgatcttgataccgtggattagaaaaagagcattagtgaaagacaaaacatatataaaaatatataattctgatt

SEQ ID NO: 75 - DNA, 566 bp, Homo sapiens
aagtccctgggagtttgcaccaaagcccattaatcagaatcagttaagaaaaatgttcaagagaatttcccatttctgcagatagacaaggttgagaaatatcagaggtagagttatatagtgtgaaatgacactttctaaagggctcttttgagcaatttattaagaatttgtcaaagacatgccaagtgttcatcagtgaattaggcatgtattataatgcttattgtagcatttaaagatcatgatacttatcacttagattgtacttaatgtgctcaaaacattttcagttctaattaaatattctcccacgtgtatctgtgtagagaaataaccatttacaggaggaagaaatacccagactcacaaataaaaaaatccatcaaaaaaaggcttgtgtccacaccacagggagagcccttatcagccaagaggctacaagatccctctaagaatcaggcctctggcccrgggaaggagggcatgggaaaagtccagaaacatgtttttggtagctggcccaggtggtggcatggcacagcagacaggatactggctttgac

SEQ ID NO: 76 - DNA, 610 bp, Homo sapiens
cccaagtatctgggattataggcacgtgccaccacacccagatgatttttgtatttttagaaaagaygaggtttcaccatattggccaggctggtctcaaaatcctgacctcaagtgatccacctgccttggcctcccaaagtgctgggattacaggcatgagccactgtgcctgactcccaccctcatttcttactcaaggtgttgggtcacacttctataatgcccactgcttctccctttgcaatgtgattcacacttgtacttatccctacaaaagctgtctttccctgcattattaagctttaacatgttagggactgtgtcaatgtgattcaccaatatatttctgtttccatagtacctggcgtttagcaggcatttcatcaatatttgtggaatgaatggatgaatgaatgaaggaaagaacaaagccaacctataggactgccttcaagcatgatggagagacactttcctcttcggaaagatggcgcttcacatagagaaagaaggaagtgccaaagatatcatgagtcccaaagttatctacctgctgacccaccatggtgatgaaattctttgcacagattcacctcttaggacccac

SEQ ID NO: 77 - DNA, 610 bp, Homo sapiens
cccaagtatctgggattataggcacgtgccaccacacccagatgatttttgtatttttagaaaagacgaggtttcaccatattggccaggctggtctcaaaatcctgacctcaagtgatccacctgccttggcctcccaaagtgctgggattacaggcatgagccactgtgcctgactcccaccctcatttcttactcaaggtgttgggtcacacttctataatgcccactgcttctccctttgcaatgtgattcacacttgtacttatccctacaaaagctgtctttccctgcaytattaagctttaacatgttagggactgtgtcaatgtgattcaccaatatatttctgtttccatagtacctggcgtttagcaggcatttcatcaatatttgtggaatgaatggatgaatgaatgaaggaaagaacaaagccaacctataggactgccttcaagcatgatggagagacactttcctcttcggaaagatggcgcttcacatagagaaagaaggaagtgccaaagatatcatgagtcccaaagttatctacctgctgacccaccatggtgatgaaattctttgcacagattcacctcttaggacccac

SEQ ID NO: 78 - DNA, 610 bp, Homo sapiens
cccaagtatctgggattataggcacgtgccaccacacccagatgatttttgtatttttagaaaagacgaggtttcaccatattggccaggctggtctcaaaatcctgacctcaagtgatccacctgccttggcctcccaaagtgctgggattacaggcatgagccactgtgcctgactcccaccctcatttcttactcaaggtgttgggtcacacttctataatgcccactgcttctccctttgcaatgtgattcacacttgtacttatccctacaaaagctgtctttccctgcattattaagctttaacatgttagggactgtgtcartgtgattcaccaatatatttctgtttccatagtacctggcgtttagcaggcatttcatcaatatttgtggaatgaatggatgaatgaatgaaggaaagaacaaagccaacctataggactgccttcaagcatgatggagagacactttcctcttcggaaagatggcgcttcacatagagaaagaaggaagtgccaaagatatcatgagtcccaaagttatctacctgctgacccaccatggtgatgaaattctttgcacagattcacctcttaggacccac

SEQ ID NO: 79 - DNA, 610 bp, Homo sapiens
cccaagtatctgggattataggcacgtgccaccacacccagatgatttttgtatttttagaaaagacgaggtttcaccatattggccaggctggtctcaaaatcctgacctcaagtgatccacctgccttggcctcccaaagtgctgggattacaggcatgagccactgtgcctgactcccaccctcatttcttactcaaggtgttgggtcacacttctataatgcccactgcttctccctttgcaatgtgattcacacttgtacttatccctacaaaagctgtctttccctgcattattaagctttaacatgttagggactgtgtcaatgtgattcaccaatatatttctgtttccatagtacctggcgtttagcwggcatttcatcaatatttgtggaatgaatggatgaatgaatgaaggaaagaacaaagccaacctataggactgccttcaagcatgatggagagacactttcctcttcggaaagatggcgcttcacatagagaaagaaggaagtgccaaagatatcatgagtcccaaagttatctacctgctgacccaccatggtgatgaaattctttgcacagattcacctcttaggacccac

SEQ ID NO: 80 - DNA, 610 bp, Homo sapiens
cccaagtatctgggattataggcacgtgccaccacacccagatgatttttgtatttttagaaaagacgaggtttcaccatattggccaggctggtctcaaaatcctgacctcaagtgatccacctgccttggcctcccaaagtgctgggattacaggcatgagccactgtgcctgactcccaccctcatttcttactcaaggtgttgggtcacacttctataatgcccactgcttctccctttgcaatgtgattcacacttgtacttatccctacaaaagctgtctttccctgcattattaagctttaacatgttagggactgtgtcaatgtgattcaccaatatatttctgtttccatagtacctggcgtttagcaggcatttcatcaatatttgtggaatgaatggatgaatgaatgaaggaawgaacaaagccaacctataggactgccttcaagcatgatggagagacactttcctcttcggaaagatggcgcttcacatagagaaagaaggaagtgccaaagatatcatgagtcccaaagttatctacctgctgacccaccatggtgatgaaattctttgcacagattcacctcttaggacccac

SEQ ID NO: 81 - DNA, 2342 bp, Homo sapiens
atatgccaaggacttacataaatacaaattcaccgagtcctcttgtaaaccctctaatcttgtttccactttwcagatggggaaactgaggcccaaatcagttgggtgacatgctcaggccacattgcttatagatggcagagttgaattgcaaacccgagtctgtctaactccaaagcttttgctcctgtgggatttccttggaggcaactctcattaggcctttctgtagttgagccccagaacccattgtcagggtcaggcccaggtagctgtctcatgcactccttttcctcctagactgttggtcccaagactggaaccaacagtcttggtctgttggtttctatggttccttctcgcatagaaaactatccctactcactctttcttttgtgggtgcctctatcaaactagctgcagaatgaagcttctacttcttttctttatcattttgagtgtttcctactgggataccaatagaaaatcaagacgatgtaaaaatatctcaaaatagtagcctctggctctggccagtctttcttgactttcatctgggagtatggtgaccgattcatccagtttgcctgggacttttcctgttttagcactgaaaatacctgtgtcctggagtctcctcactcctgggcaacgaggacagttggtcacctgaactgggaaggtaaatggacaaattttagataggcttggggaatgagaagattataaatgaacctcctaaaattgaacacaaattgtatgttgactagagacaggtagcagtcagactgctagtaaatggcagaaccaggtttcaaacacatgtcaggctaagtccaagctagacataccgtgtcctttccatgacggctctggaaaaatctctcctagggcaaggcatcaacagattatcaaaaaagaaaaaaaacatgtcctaggaaatggcaagtataatggacctaaataccgttgagttagtaaaattttcttgtgaaaagagattctcagaatgtagcatttcaggcatagttcgaccagtataagctaagacttctaaatctgttcttctatatattgtatctttatccatatagctttaggacatagtcacagcttttgtggggcctgccacattattcttgactctagggtctgagatcagttagtgctcttttttctttcatttgaactgatattaatctgggtatctgccatttgtattttttcacccctctattatttctggatgtctgaaaacactttaataattactttgattttccgagtgtttgtattctagactgtcttgtggttatcattgtatctatgcatgtaggccacgtctaataaataaagtgacacctcaaaataatagtgttatgagtagttgcatgttcactgaaattagagataatttacatggtttgcaagcttcttttttattggaatatggcaagtgcaaaaaaaatgtaatatgaataccttagaagttctgttttgctatcaaaaaccattgatttccttcttggtacaataatagcagttaaaccgtccagaaatacaactattctaactgggaaaagaataaggaaacaatatgagcttgggtatgtgatgaggcagtctcaagtgcgaatgttattgaaaaaggtttctcactggtagtttttcatgcaaatgagaacaagctaatcactttacatacattacctcatttggtcttcataacaaacctataataatcattaacacttattatgtgtttgccatgagtcaggcactattttaagtaccttatctgtattatctcattgaattatcactatatctctaggaggagtattaggaatactttctaaacctggctaaggtggcttaaactggcaaaagtacttattgatttataggaaatcctgaagcagattgtattagtccaccgctatgaagaaatactcaagactgggtaatttttaaaggaaagtggttaattgactcacagttccacatggctggggaggcctcaggaaacttacaattatggtggaaggtgaaggagaaagaagtaccttcttcacaaggtggcaggaaagagagatcacaggggaaactgctacttataaaaccatcagatctcagaactcactcactgtcatgagaacagcatgggggagaacacctcatgatctagtcacctcctaccaggtccttcccttcacacatagggattacaggtggagatgacatttgggtggggacatagagtcaaaccatgccgcaggttttactggagctcaatgatatcctaaaagattcagcctcctttgatgctttctttctgccac

SEQ ID NO: 82 - DNA, 2342 bp, Homo sapiens
atatgccaaggacttacataaatacaaattcaccgagtcctcttgtaaaccctctaatcttgtttccactttacagatggggmaactgaggcccaaatcagttgggtgacatgctcaggccacattgcttatagatggcagagttgaattgcaaacccgagtctgtctaactccaaagcttttgctcctgtgggatttccttggaggcaactctcattaggcctttctgtagttgagccccagaacccattgtcagggtcaggcccaggtagctgtctcatgcactccttttcctcctagactgttggtcccaagactggaaccaacagtcttggtctgttggtttctatggttccttctcgcatagaaaactatccctactcactctttcttttgtgggtgcctctatcaaactagctgcagaatgaagcttctacttcttttctttatcattttgagtgtttcctactgggataccaatagaaaatcaagacgatgtaaaaatatctcaaaatagtagcctctggctctggccagtctttcttgactttcatctgggagtatggtgaccgattcatccagtttgcctgggacttttcctgttttagcactgaaaatacctgtgtcctggagtctcctcactcctgggcaacgaggacagttggtcacctgaactgggaaggtaaatggacaaattttagataggcttggggaatgagaagattataaatgaacctcctaaaattgaacacaaattgtatgttgactagagacaggtagcagtcagactgctagtaaatggcagaaccaggtttcaaacacatgtcaggctaagtccaagctagacataccgtgtcctttccatgacggctctggaaaaatctctcctagggcaaggcatcaacagattatcaaaaaagaaaaaaaacatgtcctaggaaatggcaagtataatggacctaaataccgttgagttagtaaaattttcttgtgaaaagagattctcagaatgtagcatttcaggcatagttcgaccagtataagctaagacttctaaatctgttcttctatatattgtatctttatccatatagctttaggacatagtcacagcttttgtggggcctgccacattattcttgactctagggtctgagatcagttagtgctcttttttctttcatttgaactgatattaatctgggtatctgccatttgtattttttcacccctctattatttctggatgtctgaaaacactttaataattactttgattttccgagtgtttgtattctagactgtcttgtggttatcattgtatctatgcatgtaggccacgtctaataaataaagtgacacctcaaaataatagtgttatgagtagttgcatgttcactgaaattagagataatttacatggtttgcaagcttcttttttattggaatatggcaagtgcaaaaaaaatgtaatatgaataccttagaagttctgttttgctatcaaaaaccattgatttccttcttggtacaataatagcagttaaaccgtccagaaatacaactattctaactgggaaaagaataaggaaacaatatgagcttgggtatgtgatgaggcagtctcaagtgcgaatgttattgaaaaaggtttctcactggtagtttttcatgcaaatgagaacaagctaatcactttacatacattacctcatttggtcttcataacaaacctataataatcattaacacttattatgtgtttgccatgagtcaggcactattttaagtaccttatctgtattatctcattgaattatcactatatctctaggaggagtattaggaatactttctaaacctggctaaggtggcttaaactggcaaaagtacttattgatttataggaaatcctgaagcagattgtattagtccaccgctatgaagaaatactcaagactgggtaatttttaaaggaaagtggttaattgactcacagttccacatggctggggaggcctcaggaaacttacaattatggtggaaggtgaaggagaaagaagtaccttcttcacaaggtggcaggaaagagagatcacaggggaaactgctacttataaaaccatcagatctcagaactcactcactgtcatgagaacagcatgggggagaacacctcatgatctagtcacctcctaccaggtccttcccttcacacatagggattacaggtggagatgacatttgggtggggacatagagtcaaaccatgccgcaggttttactggagctcaatgatatcctaaaagattcagcctcctttgatgctttctttctgccac

SEQ ID NO: 83 - DNA, 544 bp, Homo sapiens
ccatcatgactctaaagagcatttatcaatacaactgcaaggacggctccttgctctgggctgttatacagggactctgtggaaggaaggaacaactgagattgagggagtgctaaactcgtttttagttgagtttactggggtataatttacatatggtagaagccatccgtttcaaggtccatttctattagctttgaaaaacacttacagmttcataccaccaaaattaagaaatagaatggtctcatcagccccaaatgcctcctcttgtttctttataattaacccctctccaaaccccagccctgggtacccattgatatgttttctgtccctgtaattttgccttttcctgagtgtcatacagatgagaacataaagtgtatagctttgtgtgtctggcttctttcacttggtatagtgcatttgaattttatctatgttgaaacaggaattatgagtttattcctttttattgctgtgtggcaattccattgtaggggtataccacagtttgtttccattaatcagttgaaggaca

SEQ ID NO: 84 - DNA, 1276 bp, Homo sapiens
agtttgcaaaaattgtctcccattctgtaggttatctatttactctgttgatagtttcttttgctgtgcagaagctcttcagtttaattagatcccatttgtcaatgtgtacttttgttgcaattgtttttgacatcttcttcatgaatctttgcccgtgcctacgtcctgaatggtattgcctaggttgtcttcccattatctttagcaaactaacrcaggaacagaaaatgaaacactgcatgttctcacttataggtgggagctaaatgatgagaatacatggagagaataaaaaaaaataactaatgggtactagacttaatacctggatggcgagataatctgtacaacaaacccccatgacacatgttacataggcatgtaacaaacctccacatgtacccctgaacttaaaataaaagtgtatattaaaaaggcatatcagcccatgagaaatatttttattacgttcaagattcacaaaaaggcacgacaaaagaaaaataaagataactattctctctagtccaaaggtggcagtattcccctacttgttatcaattctttattttctatattttcctttatcattaactctattgaagttatttgaagtctcatataatcctgccctcaggaggccctagctttcttatcatttctagtgccaaaataaaacacatatgaaactaaagcaaaggaacacaggaaaagtggctgagaaattggtacaataatctaggccaattgaggataaaagttccaagattcaaaggatgaaggcagtgtctgataggcggatattatgatacagagattttacttgagcaatgctttattaagaagagaaatgaggccgggcgtggtggctcacacctgtaatcccagcactttgggaggccaaggctggtggatcacctgaggtcaggagttcaagaccagcctggccaacatggtgaaaccgcgtctctacttaaaaatacaaaaattagctgtcatggtggcgggcgcctgtaatcccagctgcttgggaggctgatacaggagaatcccttgaacctgggaggaggaggttgcagtgagctgagatcacaccactgcactacagtctgagcgatagagcaagactgcctcttaaaaaaaaaaaaaaaagagagagagagagagaaacgaaaaaccttaaaacaggcacagacacccatacccaacatacatttgatggtttctaaaaggtcagttaaaaatgagcatttctacagctactgattgaatc

SEQ ID NO: 85 - DNA, 1276 bp, Homo sapiens
agtttgcaaaaattgtctcccattctgtaggttatctatttactctgttgatagtttcttttgctgtgcagaagctcttcagtttaattagatcccatttgtcaatgtgtacttttgttgcaattgtttttgacatcttcttcatgaatctttgcccgtgcctacgtcctgaatggtattgcctaggttgtcttcccattatctttagcaaactaacacaggaacagaaaatgaaacactgcatgttctcacttataggtgggagctaaatgatgagaatacatggagagaataaaaaaaaataactaatgggtactagacttaatacctggatggcgagataatctgtacaacaaacccccatgacacatgttacataggcatgtaacaaacctccacatgtacccctgaacttaaaataaaagtgtatattaaaaaggcatatcagcccatgagaaatatttttattacgttcaagattcacaaaaaggcacgacaaaagaaaaataaagataactattctctctagtccaaaggtggcagtattcccctacttgttatcaattctttattttctatattttcctttatcattaactctattgaagttatttgaagtctcatataatcctgccctcaggaggccctagctttcttatcatttctagtgccaaaataaaacacatatgaaactaaagcaaaggaacacaggaaaagtggctgagaaattggtacaataatctaggccaattgaggataaaagttccaagattcaaaggatgaaggcagtgtctgataggcggatattatgatacagagattttacttsagcaatgctttattaagaagagaaatgaggccgggcgtggtggctcacacctgtaatcccagcactttgggaggccaaggctggtggatcacctgaggtcaggagttcaagaccagcctggccaacatggtgaaaccgcgtctctacttaaaaatacaaaaattagctgtcatggtggcgggcgcctgtaatcccagctgcttgggaggctgatacaggagaatcccttgaacctgggaggaggaggttgcagtgagctgagatcacaccactgcactacagtctgagcgatagagcaagactgcctcttaaaaaaaaaaaaaaaagagagagagagagagaaacgaaaaaccttaaaacaggcacagacacccatacccaacatacatttgatggtttctaaaaggtcagttaaaaatgagcatttctacagctactgattgaatc

SEQ ID NO: 86 - DNA, 1276 bp, Homo sapiens
agtttgcaaaaattgtctcccattctgtaggttatctatttactctgttgatagtttcttttgctgtgcagaagctcttcagtttaattagatcccatttgtcaatgtgtacttttgttgcaattgtttttgacatcttcttcatgaatctttgcccgtgcctacgtcctgaatggtattgcctaggttgtcttcccattatctttagcaaactaacacaggaacagaaaatgaaacactgcatgttctcacttataggtgggagctaaatgatgagaatacatggagagaataaaaaaaaataactaatgggtactagacttaatacctggatggcgagataatctgtacaacaaacccccatgacacatgttacataggcatgtaacaaacctccacatgtacccctgaacttaaaataaaagtgtatattaaaaaggcatatcagcccatgagaaatatttttattacgttcaagattcacaaaaaggcacgacaaaagaaaaataaagataactattctctctagtccaaaggtggcagtattcccctacttgttatcaattctttattttctatattttcctttatcattaactctattgaagttatttgaagtctcatataatcctgccctcaggaggccctagctttcttatcatttctagtgccaaaataaaacacatatgaaactaaagcaaaggaacacaggaaaagtggctgagaaattggtacaataatctaggccaattgaggataaaagttccaagattcaaaggatgaaggcagtgtctgataggcggatattatgatacagagattttacttgagcaatgctttattaagaagagaaatgaggccgggcgtggtggctcacacctgtaatcccagcactttgggaggccaaggctggtggatcacctgaggtcaggagttcaagaccagcctggccaacatggtgaaaccgcgtctctacttaaaaatacaaaaattagctgtcatggtggcgggcgcctgtaatcccagctgcttgggaggctgatacaggagaatcccttgaacctgggaggaggaggttgcagtgagctgagatcacaccactgcactacagtctgagcgatagagcaagactgcctcttaaaaaaaaaaaaaaaaragagagagagagagaaacgaaaaaccttaaaacaggcacagacacccatacccaacatacatttgatggtttctaaaaggtcagttaaaaatgagcatttctacagctactgattgaatc

SEQ ID NO: 87 - DNA, 1276 bp, Homo sapiens
agtttgcaaaaattgtctcccattctgtaggttatctatttactctgttgatagtttcttttgctgtgcagaagctcttcagtttaattagatcccatttgtcaatgtgtacttttgttgcaattgtttttgacatcttcttcatgaatctttgcccgtgcctacgtcctgaatggtattgcctaggttgtcttcccattatctttagcaaactaacacaggaacagaaaatgaaacactgcatgttctcacttataggtgggagctaaatgatgagaatacatggagagaataaaaaaaaataactaatgggtactagacttaatacctggatggcgagataatctgtacaacaaacccccatgacacatgttacataggcatgtaacaaacctccacatgtacccctgaacttaaaataaaagtgtatattaaaaaggcatatcagcccatgagaaatatttttattacgttcaagattcacaaaaaggcacgacaaaagaaaaataaagataactattctctctagtccaaaggtggcagtattcccctacttgttatcaattctttattttctatattttcctttatcattaactctattgaagttatttgaagtctcatataatcctgccctcaggaggccctagctttcttatcatttctagtgccaaaataaaacacatatgaaactaaagcaaaggaacacaggaaaagtggctgagaaattggtacaataatctaggccaattgaggataaaagttccaagattcaaaggatgaaggcagtgtctgataggcggatattatgatacagagattttacttgagcaatgctttattaagaagagaaatgaggccgggcgtggtggctcacacctgtaatcccagcactttgggaggccaaggctggtggatcacctgaggtcaggagttcaagaccagcctggccaacatggtgaaaccgcgtctctacttaaaaatacaaaaattagctgtcatggtggcgggcgcctgtaatcccagctgcttgggaggctgatacaggagaatcccttgaacctgggaggaggaggttgcagtgagctgagatcacaccactgcactacagtctgagcgatagagcaagactgcctcttaaaaaaaaaaaaaaaagaragagagagagagaaacgaaaaaccttaaaacaggcacagacacccatacccaacatacatttgatggtttctaaaaggtcagttaaaaatgagcatttctacagctactgattgaatc

SEQ ID NO: 88 - DNA, 1267 bp, Homo sapiens
tagatgcagcttagaagacagatgtcacaaatatttttggaggagtgtctacaagaacccatctgtactaatcacagccaattagaggtctggctaaaaccagccacgttaggatcaataatattttttaaaaaggatcctgtcattatcattatgcacagaaataacaccaatacaggagagaaagaacatggtatgaaaaacatccaaggaagaacacattctgggaaaactaagatccaaggaatacaagaaatcttctaaaaatgcttgtgctatagagtaattcaataaggacatgaatttaatgaaatacacaccacccaacatgatttttttaaaaagagagatgaaaagctatgaattactctgagaacaaaaatgtattatggagctaataaatttagtagggattctcaaacgtgcaaagacaaagagaagaacatttttcttctcattattcaagatacaggttgagaggagaacattttaactacttgatacttaaatccacccccctacccaagaaaaaagggaggatcacaatgaagaactagggaataaaattactacagaatgaatggtaatgagggctgtttttttaccccaatctttatacattttatttttctttcttggcttactacattgttgttaagaccagacatatttttttcttttttgtccttgtaagagggtggttggaaccatttaattgatcaatgtagaacacatggtataatgagaatttaaatgttaaattgagaaaaacagttacaggaataaatatgggtccggaacaaaaatttaaataagtaaatcttgacaaagtaaaaataattttacaacaatttaaaaaacagtccatagaggacaaaagagagggagaagaaatgtaagcaaggttgaatgtctaatcatgtggacacaaacatactgagtctctcataactgtcttaccttttttctttcactcatagagaaatattacaaaacaaggatttcctcttgttcaatatagttctcttgaagaacagcaatttctttagttctctagttactttttctttttaaatttgagtaacattratttttttgttattaaacctatttattactaaacaatgccagttttctttctgtctcttcatccattcatcttttcatctctcttttcgccttactacaatgcccaacacttatctccataaatattcatgaagagagacagccaggtgttcacagttaacactgaaagggaaatgca

SEQ ID NO: 89 - DNA, 1254 bp, Homo sapiens
cttaaattgtaataactcagctggatgcctgggtatctgtaggttttatcttctagagacttactatggaacatccggagaatagagcaaatccacaagacagacagagtctcagaagggcccaagtcaacaccaaggttttgtttttgttttgttttgtttttacatttttcctcttgacattccttcttttgattttcatggcattctggaacattcataggcttcccgtttgtgatatctcttgatcttcacacttaccctgtgaggtgaataaatcaggtgtacaaagagcctgtctcatagatgggaccccttgatgctgggagattcatttccgaagccagcgtctcacaggaactcacgtggaataagagaggattctgggctacctgatcccccagccaggaccctttccctgggtgctggagatgccaggtgtcaattaggtttcttttcttttttttttttttttttttttgagacagagtctcagtgttaccctgctggagttcagtggctcgattttagctcattgctacctccacctcctgggttcaagcaattctyctgcctcagcctcctgagtatctgggattacaggtgcccaccataacacccagctaatttttgtattttcagtagagacaggttttggcatgttgaccacgctggtctcaaactcctgaccccaaatgttccacctgcctgggcctcccaaagtgctgggattagaggtgtgagccaccacacccggtgtgatcaggtttctttacggaggctctgtggtgacctggggaaaatggcagggtccaaggccaactacacatctctacatggggctggtgccctttgcttttatggtgcatcctttccccgatttgattgagtcccatttgggaacaacagtctttgtgcttagggtccttcatgggtcgctgtcaattattcttgacagtatcacttaccaggttcaaagacagctcatgtcaatatggcattcacctgccttaagcctgggtgccctctccaccccccaacctttgccacaacatcagattttcacagccttgaaaggataggaagattctcacacaagcctgagggctgagcagtgaagggcagtggcgcgttgaagagggaatgagcagagccactgtagcggagtacaaagtccttaaccttgggaatgtgggactgggctttttttctagctcccaggagagctagagaataaaaaacgaagatgatgca

SEQ ID NO: 90 - DNA, 1611 bp, Homo sapiens
aaagtattgtatccaacatgcttgtgtatgtatgtctattatgtagcaggaaggttttccccgaacatctattctgctatcatgctggaccaggtaaacaagctctttatatgcaatatctcatttaatcctggaaacaaaccctcaaggttagtaatcaggaatatccccattttacagatgaggaaactgagactctgagaggatgagcaacacatccagagttgcccaactggtacatggcagaagcagatttagatccaggtcttatggccctggtgcctatgtcacttgctgaagtcagtgtccaggatggcttgggtttcactccaggtctctgggccaatagagcaatcacattattgagaggacctggtcagttggcaaggctgcctgcaggacaaagcaatggccaagctttggagctaggatccaggctggacataggatgaggccatcacactggcttctttgggaggtagagatggccacatggaaaagtgtcatttgctgaattgagcatcttcagatatcacagatgtaccagttcaaacgcagggaacatcccaggggaagaaatgtgggtggatggaacatttcaggtcattaggctattacaaagggaagttctttaagtgtagcttcataactaggcttcctgagtcacccagggaatgctcccatggtatgcctcccctcctttgggtattctgatccctctatttttctcccagccccactccccaacctagtttggtctggtgggctccatggtgcagtcccctctagccttttcctggttgggatctggactcctgggttccagagctgggtgaacaggaactggggatggggatctggagtgccttcatctctgctgcgttgtcccacttgctggggaagagtgtgccaggctcctagttctgagccactgccttttcatccaatgcgtggttggaaaagaggttcaaagagttggaagcatagaaactaacccctgttgagcatttgctgtgtgtcaagcacttgtttcatggtaatgagacaggagttattttattttgataatttttttattcttatttttctttttttgaatgccattagagttcattttcatcttccatcatttttcattgcattgtgtttggagagtgcgacaygggacaggcggtggagcccaccaggtcagagcccgagctcaagtcccagcttttccaccttctacctgtgtgactgtgagtctccctgagtctcagcttctccacctgcaaaatggggatacaaagaatagcggcttcagagagcttcctggagtgcaggagccattgttggggtgctgactataacccctggcccactggagaggtcccctgttgtcagtttccttacttgccaatggctttgcatctcaggctctgcctgagaatgttcttgagaactgcaagaggaacagtttggaaagttaaagtttcaggaaagaccctcacccagagagggctgggagatggtgggtaaatgccccagcttctttgcccctggtgggaccattctgtgttgtcttctgcagcctctcagagggttgccagcaagatcaagcccagctgtcca

SEQ ID NO: 91 - DNA, 1611 bp, Homo sapiens
aaagtattgtatccaacatgcttgtgtatgtatgtctattatgtagcaggaaggttttccccgaacatctattctgctatcatgctggaccaggtaaacaagctctttatatgcaatatctcatttaatcctggaaacaaaccctcaaggttagtaatcaggaatatccccattttacagatgaggaaactgagactctgagaggatgagcaacacatccagagttgcccaactggtacatggcagaagcagatttagatccaggtcttatggccctggtgcctatgtcacttgctgaagtcagtgtccaggatggcttgggtttcactccaggtctctgggccaatagagcaatcacattattgagaggacctggtcagttggcaaggctgcctgcaggacaaagcaatggccaagctttggagctaggatccaggctggacataggatgaggccatcacactggcttctttgggaggtagagatggccacatggaaaagtgtcatttgctgaattgagcatcttcagatatcacagatgtaccagttcaaacgcagggaacatcccaggggaagaaatgtgggtggatggaacatttcaggtcattaggctattacaaagggaagttctttaagtgtagcttcataactaggcttcctgagtcacccagggaatgctcccatggtatgcctcccctcctttgggtattctgatccctctatttttctcccagccccactccccaacctagtttggtctggtgggctccatggtgcagtcccctctagccttttcctggttgggatctggactcctgggttccagagctgggtgaacaggaactggggatggggatctggagtgccttcatctctgctgcgttgtcccacttgctggggaagagtgtgccaggctcctagttctgagccactgccttttcatccaatgcgtggttggaaaagaggttcaaagagttggaagcatagaaactaacccctgttgagcatttgctgtgtgtcaagcacttgtttcatggtaatgagacaggagttattttattttgataatttttttattcttatttttctttttttgaatgccattagagttcattttcatcttccatcatttttcattgcattgtgtttggagagtgcgacacgggacaggcggtggagcccaccaggtcagagcccgagctcaagtcccagcttttccaccttctacctgtgtgactgtgagtctccctgagtctcagcttctccayctgcaaaatggggatacaaagaatagcggcttcagagagcttcctggagtgcaggagccattgttggggtgctgactataacccctggcccactggagaggtcccctgttgtcagtttccttacttgccaatggctttgcatctcaggctctgcctgagaatgttcttgagaactgcaagaggaacagtttggaaagttaaagtttcaggaaagaccctcacccagagagggctgggagatggtgggtaaatgccccagcttctttgcccctggtgggaccattctgtgttgtcttctgcagcctctcagagggttgccagcaagatcaagcccagctgtcca

SEQ ID NO: 92 - DNA, 1187 bp, Homo sapiens
tttattgcagtgctttcatttatttattcaacacatatttattgagctcttactatgggtcaggtcaggtcctatcaatgctacactatgcactggagatgcaacagtgaagaagacacactaaaaacagtgaagaaatctctgttctccaagaacttatatttttgtgagagaargcagcaaaaatacaggataagtaagtaaaatatatagtattatcagatagtgtttgatgtgttggagaaaattaaagggagagaagttcaggcattgagattggcagatgttacagttttaaacagagtggccaaaataggcctcactgggaaggataggagagggccagccatatggttatttatgggaatagcatgccatgaggagggaacagcacaggcaaaagtcctgagggagaaacagtcagttggccaatgtggctggcatggggtgacaggggtgagagaaggaaagagcaataggaagtgaagtcagaggcacggggggtgggagtggaggttggcgtccaggttacacacggctgtgtagattactgggatgattttgtctctacctttaattgtgactacagaagaatgcactctctgtgtggggggctatattgttagaaatccagatttttagaaatatttatatggaccatttcccaactatgagcttcttgagaacacagaacacttgttatatttcttcgttatttctctgagattccaaaataccataccaaagaaagcaaatatactatcgcttcccacctcttacatccatacagttcatggcatcaatattttctgccaaatactggcatggcctcagaattctcaaaaactaattacacttcaaaatgtttctgcttatctattaccacttttcagctgcattcacagtggtaatcattcatacctacatcagaaaccattaaagcctagtattcttctccatagaatatttctagctacattttatcaacaactgtgtgcattatattataagaaacacatatcaacaaggatggtgacattgcaattgtgtgatgcaatttacaaaacgtactaccagaaataagagagcaatataatgtttcatttttcaacagccactaatggtatgactatagagtgtgagaacacatcacactaattgccaacacactgtgccagtgcaagcat

SEQ ID NO: 93 - DNA, 1187 bp, Homo sapiens
tttattgcagtgctttcatttatttattcaacacatatttattgagctcttactatgggtcaggtcaggtcctatcaatgctacactatgcactggagatgcaacagtgaagaagacacactaaaaacagtgaagaaatctctgttctccaagaacttatatttttgtgagagaaggcagcaaaaatacaggataagtaagtaaaatatatagtattatcagatagtgtttgatgtgttggagaaaattaaagggagagaagttcaggcattgagattggcagatgttacagttttaaacagagtggccaaaataggcctcactgggaaggataggagagggccagccatatggttatttatgggaatagcatgccatgaggagggaacagcacaggcaaaagtcctgagggagaaacagtcagttggccaatgtggctggcatggggtgacaggggtgagagaaggaaagagcaataggaagtgaagtcagaggcacggggggtgggagtggaggttggcgtccaggttacacacggctgtgtagattactgggatgattttgtctctacctttaattgtgactacagaagaatgcactctctgtgtggggggctatattgttagaaatccagatttttagaaatatttatatggaccatttcccaactatgagcttcttgagaacacagaacacttgttatatttcttcgttatttctctgagattccaaaataccataccaaagaaagcaaatatactatcgcttcccacctcttacatccatacagttcatggcatcaatattttctgccaaatactggcatggcctcagaattctcaaaaactaattacacttcaaaatgtttctgcttatctattaccacttttcagctgcattcacagtggtaatcattcatacctacatcagaaaccatwaaagcctagtattcttctccatagaatatttctagctacattttatcaacaactgtgtgcattatattataagaaacacatatcaacaaggatggtgacattgcaattgtgtgatgcaatttacaaaacgtactaccagaaataagagagcaatataatgtttcatttttcaacagccactaatggtatgactatagagtgtgagaacacatcacactaattgccaacacactgtgccagtgcaagcat

SEQ ID NO: 94 - DNA, 1246 bp, Homo sapiens
aagtcttgaaacatatgagcactcaaattcttaataacgtagtctgattacaaacaaataactgcttgaatcatgtgtttgacgtatgtttgaataatttcattttttgaaacatgtttgattgtttaaaacaactcttctgactatgatcaatgtttatcattatattaatttcctttcgggtattttgtaattttcttcctccaagaatactaccaaactttgctattttctacttctggtgtattcaattgttgttcaaatgtggctttttaaaatccaccttgtgtataaaataaaaagagagaaaaagctacttgacatttttgctttggtgtctaacccatgcacttcagaaatgagtgagcttcattttcgtaattgatgacaaaatgatcatcttagaatgtggggaagatgtaaaattctttctgtttcttcactgcgggttttcccctcaaaccaactgaggagaagcagcactgccaagtaaaaaagtttaacagtttgttatgttaatctttaaaatgtacccagaaaacattttttggccaaagcagtcaagattgacagctgttccgtgtcccccactgaaaacaaatggagtaaagagttctgtgcatgtgatgtgttgaacagtcaaatgacaactgtgggttgatccacactctaaagcagcagaattagaaggagggtgtggagtgggggtagagggaggcatgctgtagaaagcattatacttgcatcacctgccaattcttgtcaatatggcaaaatgtagttgctgtaactgagagaccccatagctataaagttctcactttcgagtctcattcaaagtgagattagaatcaggttggaacagactcacagagagatttctctccttcgcaatgttatcacggaggaaaggtaatgtcacatagagtccaagagccaaaagcaatcacataaggagggcagccatgcagcaatgcactgcagagctcaraacagcagaaaagtccgaaggattggagattcctgaaagggaaggggaaacaaagactgccttaagaggggagtatgcccccagatgaggaagccgtgttagacagagatgccacaaaacacatcagcttaagaaagagaagagtagagccagacactggtgctactcctgccgctgtacttaaaaaaactacaagttattaatccctccataactcggtttcctcctctgtaaaaagataataggtcctaagaa

SEQ ID NO: 95 - DNA, 1246 bp, Homo sapiens
aagtcttgaaacatatgagcactcaaattcttaataacgtagtctgattacaaacaaataactgcttgaatcatgtgtttgacgtatgtttgaataatttcattttttgaaacatgtttgattgtttaaaacaactcttctgactatgatcaatgtttatcattatattaatttcctttcgggtattttgtaattttcttcctccaagaatactaccaaactttgctattttctacttctggtgtattcaattgttgttcaaatgtggctttttaaaatccaccttgtgtataaaataaaaagagagaaaaagctacttgacatttttgctttggtgtctaacccatgcacttcagaaatgagtgagcttcattttcgtaattgatgacaaaatgatcatcttagaatgtggggaagatgtaaaattctttctgtttcttcactgcgggttttcccctcaaaccaactgaggagaagcagcactgccaagtaaaaaagtttaacagtttgttatgttaatctttaaaatgtacccagaaaacattttttggccaaagcagtcaagattgacagctgttccgtgtcccccactgaaaacaaatggagtaaagagttctgtgcatgtgatgtgttgaacagtcaaatgacaactgtgggttgatccacactctaaagcagcagaattagaaggagggtgtggagtgggggtagagggaggcatgctgtagaaagcattatacttgcatcacctgccaattcttgtcaatatggcaaaatgtagttgctgtaactgagagaccccatagctataaagttctcactttcgagtctcattcaaagtgagattagaatcaggttggaacagactcacagagagatttctctccttcgcaatgttatcacggaggaaaggtaatgtcacatagagtccaagagccaaaagcaatcacataaggagggcagccatgcagcaatgcactgcagagctcagaacagcagaaaagtcygaaggattggagattcctgaaagggaaggggaaacaaagactgccttaagaggggagtatgcccccagatgaggaagccgtgttagacagagatgccacaaaacacatcagcttaagaaagagaagagtagagccagacactggtgctactcctgccgctgtacttaaaaaaactacaagttattaatccctccataactcggtttcctcctctgtaaaaagataataggtcctaagaa

SEQ ID NO: 96 - DNA, 971 bp, Homo sapiens
ttacattatggaatattagttcattacaatatggaatattgtgcattcattaacatcaatctgatgtatctaaattctaccattagattgtaagctcaatgaagscaaagctattgctcacaattttatcctcagggcataggactgacccatagacagggattccagtgattattaattaaaagaaataatagacttttatgaattaacagaaatatatctattatatattaagtgaaaaaaaagtgttacagaattttcctctcccttctacacttgccttttcttatccttgagggtttagcttctctagagcactttctgagccctttagctagtgtgtgggccccacacaatattctgtttcagccttgtgtttatttccttccttgggcagatcacaattcttaattgttttatttgtatgttaatctgaaattatttttctctatttcctttcttcactaaattatgaggtgcctaaaggcaggaatcgtgtctgttctgtccactattataaacccagaaccacatacatagtaggtactccacaaacatttgctgagtgaaagactatgaaattgatatggatatgggaggattcacaatagactattaacttgattccttttaatgaaggcagaaactacagaagctgggtaaaggaagctgttattttttttactctgttcttctgaattgttaattttttaaaacagtaaatctgaatcacatttatcactaaactatctcactaagccaaaacattcagacttgactaggaagtaatgaatattcattaatttattttcagaatgatcttttccctcagtggagtctccgtgggggacagaaactatgagaaattttctcaccattaccctccaattatgtaggaaggaactttcaggtttgtgagaaagggggaaagtttcgctagtggacccactctttatttagcatttctgttt

SEQ ID NO: 97 - DNA, 971 bp, Homo sapiens
ttacattatggaatattagttcattacaatatggaatattgtgcattcattaacatcaatctgatgtatctaaattctaccattagattgtaagctcaatgaagccaaagctattgctcacaattttatcctcagggcataggactgacccatagacagggattccagtgattattaattaaaagaaataatagacttttatgaattaacagaaatatatctattatatattaagtgaaaaaaaagtgttacagaattttyctctcccttctacacttgccttttcttatccttgagggtttagcttctctagagcactttctgagccctttagctagtgtgtgggccccacacaatattctgtttcagccttgtgtttatttccttccttgggcagatcacaattcttaattgttttatttgtatgttaatctgaaattatttttctctatttcctttcttcactaaattatgaggtgcctaaaggcaggaatcgtgtctgttctgtccactattataaacccagaaccacatacatagtaggtactccacaaacatttgctgagtgaaagactatgaaattgatatggatatgggaggattcacaatagactattaacttgattccttttaatgaaggcagaaactacagaagctgggtaaaggaagctgttattttttttactctgttcttctgaattgttaattttttaaaacagtaaatctgaatcacatttatcactaaactatctcactaagccaaaacattcagacttgactaggaagtaatgaatattcattaatttattttcagaatgatcttttccctcagtggagtctccgtgggggacagaaactatgagaaattttctcaccattaccctccaattatgtaggaaggaactttcaggtttgtgagaaagggggaaagtttcgctagtggacccactctttatttagcatttctgttt

SEQ ID NO: 98 - DNA, 971 bp, Homo sapiens
ttacattatggaatattagttcattacaatatggaatattgtgcattcattaacatcaatctgatgtatctaaattctaccattagattgtaagctcaatgaagccaaagctattgctcacaattttatcctcagggcataggactgacccatagacagggattccagtgattattaattaaaagaaataatagacttttatgaattaacagaaatatatctattatatattaagtgaaaaaaaagtgttacagaattttcctctcccttctacacttgccttttcttatccttgagggtttagcttctctagagcactttctgagccctttagctagtgtgtgggccccacacaatattctgtttcagccttgtgtttatttccttccttgggcagatcacaattcttaattgttttatttgtatgttaatctgaaattatttttctctatttcctttcttcactaaattatgaggtgcctaaaggcaggaatcgtgtctgttctgtccactattataamcccagaaccacatacatagtaggtactccacaaacatttgctgagtgaaagactatgaaattgatatggatatgggaggattcacaatagactattaacttgattccttttaatgaaggcagaaactacagaagctgggtaaaggaagctgttattttttttactctgttcttctgaattgttaattttttaaaacagtaaatctgaatcacatttatcactaaactatctcactaagccaaaacattcagacttgactaggaagtaatgaatattcattaatttattttcagaatgatcttttccctcagtggagtctccgtgggggacagaaactatgagaaattttctcaccattaccctccaattatgtaggaaggaactttcaggtttgtgagaaagggggaaagtttcgctagtggacccactctttatttagcatttctgttt

SEQ ID NO: 99 - DNA, 971 bp, Homo sapiens
ttacattatggaatattagttcattacaatatggaatattgtgcattcattaacatcaatctgatgtatctaaattctaccattagattgtaagctcaatgaagccaaagctattgctcacaattttatcctcagggcataggactgacccatagacagggattccagtgattattaattaaaagaaataatagacttttatgaattaacagaaatatatctattatatattaagtgaaaaaaaagtgttacagaattttcctctcccttctacacttgccttttcttatccttgagggtttagcttctctagagcactttctgagccctttagctagtgtgtgggccccacacaatattctgtttcagccttgtgtttatttccttccttgggcagatcacaattcttaattgttttatttgtatgttaatctgaaattatttttctctatttcctttcttcactaaattatgaggtgcctaaaggcaggaatcgtgtctgttctgtccactattataaacccagaaccacatacatagtaggtactccacaaacatttgctgagtgaaagactatgaaattgatatggatatgggaggattcacaatagactattaacttgattccttttaatgaaggcagaaactacagaagctgggtaaaggaagctgttattttttttactctgttcttctgaattgttaattttttaaaacagtaaatctgaatcacatttaycactaaactatctcactaagccaaaacattcagacttgactaggaagtaatgaatattcattaatttattttcagaatgatcttttccctcagtggagtctccgtgggggacagaaactatgagaaattttctcaccattaccctccaattatgtaggaaggaactttcaggtttgtgagaaagggggaaagtttcgctagtggacccactctttatttagcatttctgttt

SEQ ID NO: 100 - DNA, 917 bp, Homo sapiens
caaggtatagtgaaaacaaatatttaaaataaatgtaagtgaccccttcaggcaaatctaatttttctarggactccttttttcttcatgttcacaaaaataaatacaattctcagaatccctctttattggtaatacaaaagccaaaaagtaaaaggtaaggttttatgatatcatactctttacacatgtagatcattgagctaataatgcttttaaggcaatattataatattatgatgaaaatactgacataaaataagaaacgtattttaggaaacctagtatttaagatttagattaaacctattcattaaagtttgtgcatctgtgcattctttttttttttttttttttttgaaatgaagtctcactctgtcgcccaggttggagtgcactgaagcaatctctccactctgcaacctctgcctcccaggtttaagcgattttcctgcctcagcctcccaagtatctgcgactacaggcgtgtgctaccaggcctggctaatttttgtattttcagtagaaatgggggtttgccatgttggccaggctggtctccaactcctgacctcaagtgatctgcctgtctcggcctcccagagtgccggggttacaggagtgagccatcacttgaggccaggagtccgagaccgcctggctaacatagtgaaaacacatctctactaaaaatacaaaaattagcagggcgtggtggcacatgcctgagaatcgcttgaacccaggaggcagaggttgcactgagttgagatgggaccattgctctccagcctgggtgacacaatgagactctctctcagaaaagaagaaaaaaaaaagttttaattgtattggtctttcttaataaatgaatagtgacatatatttatcaagcagtgactgtgagcatcttaaga

SEQ ID NO: 101 - DNA, 1301 bp, Homo sapiens
aaaagtggtgtttttacattggctctttccttcctatatgagtggaattaacatgcctggaactagagctttactctgtaaactactctgtcygtccgccaggctcattcttctatttctcactcattcttctaaatctcattcaggatttcctttacacctttcaaaacttacattttaagatgtttgtaaatgtgaaaactatcacataagaaaggaactgtaagaataaaaatgattaaattgggcctaggaatagagcatgtacctaaatgtaacctcatgggatcaggcctactgaggtcaaatcctgatgctacctattccaagttagacaagttgttttatttccttatgacttagttccactgtctataaaatgggaatgaaaatagtactacagtttaggattgtgaagattaaataaattaatccatataaaatgcttaccccagtgcatgacacatatcaagcatttgataaatatgaactattgttattattatatttagtttatatagactagccttcagctgcaactaagcattaacaattaaaatttgtcattgtagtgtgaaagtattaacacatatttaagaaaaattggttcttctcacaggaaatcctttcagcacagggacaatttggatttaaaaattcactgagacatattttcacaagtaattttattccccctatttttgagaaaatagacaaattacagattgtgacagaaccacctaaaaagtcatcagagtttacgatgttatcacctaacaagctaaaagtagccttttttttttttctttttttcttgagacagggactctctatgtcatccaggctggagtgcagtggcacgatcacagctcactgcagccttaatctcctgggctcaagtgatcctcctgcctcagcctcccaagcagctgggactacaggtgcacgacaccatgcctgactaattttttgtatttttagtagagatgaggtctcgctatgttgcccaggctgctctcaaactcctgagctcaagcgatcttcccacctcagcttcccaaagtgccgggattacaggtgtgagccattgtgcctggcctaaaagtagcttttcctatacagcaaggttttaaataacataaaagtattgcttgcttaattgtttttatatcataattcatatttctaaacagagttacttaagtcaaattgacctcgatggcagtgatgcaattttaacaattgtgcaattaaacatcagtaaaattgtccatatcttcagcttgtccattttttatgca

SEQ ID NO: 102 - DNA, 606 bp, Homo sapiens
gcctggccaacatgatgaaaatctgtctctaataaaaatacaaaaattagcaggtgtattggagtgcctgcaatcccagctacycaggaggctgaggtgggagaatctcttgaacccaagaggcagaggttgcagtgagctgagattgcaccactgcactccagcatgggcaacaaagcaagactgtctcaaaaaaaaaaaaaaaaaaaaaaaaaagatagtattctgtctttctttttttttttctcagtgtttccccaaaactcccaggcaaataccccagtggatttagctcagaggcagagaataaaagcatgtagttctttcttgtgatcttagtgtgtttgtctttggggaaaacagagtgaaacactttaaaattactgagcaccagaaaagtatactaatcatgaatgggcacgaaaatcatgcttctcatgcatttgcacgtcaagatcaatttattatacttggcaaaaagatgagaagaaaataagtgggttattatttatataaccatcatcattttttcccataggatctaatattcagagtcctataatacataggggggtttgtctttcaaaaagaaagaaggaagggagg

SEQ ID NO: 103 - DNA, 1569 bp, Homo sapiens
catgtggagtttaaaacctagatgatgggttgataggtgcagcaaaccaccatggcccaggtatacctatgtaacaaacctgtaygttcagcacgtgtatcccagaacttaaagtaaaataaaaaaaggcattatctctaaatatgtatttgaatccacaagtcttcatccctattcatttctgctaaaacatagatagtagaagattaactggccagtttttaacatgggacactgtgacatgcaaaatgacattatcaaaagggtatgagataaaaaatgattcagtccagtagaattgcatttattacacaaacacatattgagtatctcctgggtaacaggcacttagctaatccctgggtttcagagataaataagaaagagtttgtgccttcatagcccagtagaggcagtaaacctgtaaacaaaaattgatataaagtgtgataagacttataataaagatatgtatgaggtatatttatggcactaagggagcaatacattttgcttgtggaatcagaacgtcttcacctttgagctgctcttgaggagtaagttggagttttctaggctgtcaaggagggttagagtattctaggcagaaaataactacatgtgcaaagctctgcatgtccaggcatggcagtaattcagcctgtcaaggctggagtgaagggtgaagacggagatcagtcagaaatgatgttggagggtaggtgaaattagtttgtcaaaggtctgtatcccatgctaggaagcttacaatttatcacataggtttctggttttccagatatgctgtaaatcagtagggggttcacagaggtacctgggggtactggtggggtatgttcagggcaagcagggaggattctgctcctacccttgtctcaataagaacttctcagctttactgtgtgcatgcttcaagttggacttcattgtaagatttcattttactcaacagtggtctattgagcacatacttggtgccaagcattttgctggcatagcctgcacagagcttacctcccagtgcagaaaaaatattcctttttttttttttaagacaggggcttgctctgccacccagactggagtgcagtggcacaatcacggctcacggaagcttcgacctcctagactcaggcaatcctcctgcctcagcctctgaagtagctgggactacaggcatgcgccaccatgccgggctaatttttaaattttttttgtagaaatgaggtctcactgtgttgcccaggctggtctcccattcctgggctccagcaatcctcctgccttgacctcccaaagtgctgtgatttaaaggtgtgagctaccgtgccgggcctaaagatttcttttttaaaaacttataaatcaacaataataggtgagggagaacctctagaaggtggtaagcaggagagtgatatgaccagatttgcttcttaatctctctctgtttgcagtgtggacagtaggctcaagagcagagaggctgggcagaaaatgaaagtacaaaatcaataggacttgaggtgaatatggagatgaagatga

SEQ ID NO: 104 - DNA, 1242 bp, Homo sapiens
tgcattgctataacagcacaaggaattgtcagaacaggaaacgcaattcaaaacattcaaaaccatcaggatctactttttattctaaaagaaaaaaccaaggaaaacagcaagaagaatttctctccagtatcgaaatcatcactactttcgaaaatgtttactctggaaacgattgtcgaatatttccactggattatamcaaattgaccttttttttttttaaggtcaataggaaatgaataaatgtcatcaatttagaggatttcgcacctagcattcttttctgtatcattgtgaatttgatagtgttaaaacatttttataggtaaaataaatgtcagttttgcaaagagcgataccagaccctgagagacaaatggcctatccattgaatctctggctacagcaagacttgcccacctcacaggagacttcagcttttcatatttctctttacccagaaagcaaagcagctgtacagtttctttcaaatggtaactctctcttatcctgaagagtcttctcataatacaatcatcttggatggcaggggcggtgggggtaggaagtgcatcgggttttaaaaaaattaaaataaaaaacaaatatttgaatagtattatagtgttataatgccatcctcaatagggagcaaagaggaggggaaaggccagactaaattcctgggttataagaaagggttatgttgctttgggcttaatggctcataaattcatgaggtaatattcagggaaaatgtgatattttatcagaatgtcattcaaatataaggtttaacatttacatcacaagagcatggatggagtaaaactatccgctgggagaaaaaatggcaagaataaacagtgtgataaaaatggtgttttctgggacaggaaatgggaagtggaggatgggggagttttagagacagctgactaaactttttgaaatatgtgactggttatgacatgtgaagcaattaccattaatggaagaaaagcgatttcaaagctcattttccattcttctatatccttcctgagactacaccttgcagccacaaagtgaaaaaagagcacaaagacagaaatcacagcgcaagtctcttccctggtacgagggccgataaaggttgctttactcataagcaaaaggggaaaagtaatgcacatattccctgaggttttttattttctcagcaaaagagatcgatgttattttgcagaacagacaaaa

SEQ ID NO: 105 - DNA, 1242 bp, Homo sapiens
tgcattgctataacagcacaaggaattgtcagaacaggaaacgcaattcaaaacattcaaaaccatcaggatctactttttattctaaaagaaaaaaccaaggaaaacagcaagaagaatttctctccagtatcgaaatcatcactactttcgaaaatgtttactctggaaacgattgtcgaatatttccactggattataccamattgaccttttttttttttaaggtcaataggaaatgaataaatgtcatcaatttagaggatttcgcacctagcattcttttctgtatcattgtgaatttgatagtgttaaaacatttttataggtaaaataaatgtcagttttgcaaagagcgataccagaccctgagagacaaatggcctatccattgaatctctggctacagcaagacttgcccacctcacaggagacttcagcttttcatatttctctttacccagaaagcaaagcagctgtacagtttctttcaaatggtaactctctcttatcctgaagagtcttctcataatacaatcatcttggatggcaggggcggtgggggtaggaagtgcatcgggttttaaaaaaattaaaataaaaaacaaatatttgaatagtattatagtgttataatgccatcctcaatagggagcaaagaggaggggaaaggccagactaaattcctgggttataagaaagggttatgttgctttgggcttaatggctcataaattcatgaggtaatattcagggaaaatgtgatattttatcagaatgtcattcaaatataaggtttaacatttacatcacaagagcatggatggagtaaaactatccgctgggagaaaaaatggcaagaataaacagtgtgataaaaatggtgttttctgggacaggaaatgggaagtggaggatgggggagttttagagacagctgactaaactttttgaaatatgtgactggttatgacatgtgaagcaattaccattaatggaagaaaagcgatttcaaagctcattttccattcttctatatccttcctgagactacaccttgcagccacaaagtgaaaaaagagcacaaagacagaaatcacagcgcaagtctcttccctggtacgagggccgataaaggttgctttactcataagcaaaaggggaaaagtaatgcacatattccctgaggttttttattttctcagcaaaagagatcgatgttattttgcagaacagacaaaa

SEQ ID NO: 106 - DNA, 634 bp, Homo sapiens
gtttagaccacatcaaatatttctgtgctctgggtcttgctgcctctaagccataggtatttcaaggaaggtgaacttaatctataaaaaactactggccaggctctaaaagtaaagctggcctccaccaaagtaagactgattactacagggctctgataaccaatggaccagatattaattctcctcaccctcaagaatccattggtaaaacttccctttcttgtagttcctatatgtagcaaatatacgtatggaatggtattttgtgaaggtgacaaaactctgggcatgaagcaggatacgaacacagcattcagcattcttctatcacccagtcgtctcactggttctccaatatgccatggtccagttcccactcttcacaagtctgcacttacaaattatagcttgcaaagcctattcccatacattttcttatttgtactcccaaaaactctgagaaggaagtatcattaagctcccattttacagtgaaggcagagactaagagaggcactagcaatacacaggcaattgacaatgcggtgagtctgggacctggttacctgatagaaatcctatggtcctttcasaactctaccctaaactgttgacaaggtaaagaaaaacc

SEQ ID NO: 107 - DNA, 634 bp, Homo sapiens
agccctatttcttattctctactttctatttccttagccaagagctaagatacaaaagattctcagcttggtgtggtggttcacacttgtaatcccagcactttgggaggctgaggcaggcagaccacttgaagtcaggagttcaagaccagcctggccaacatggtgaaatcccgtctctactaaaaatacaaaaattagccgggtgtggtggcacatgcctgtaatcccagctactcagraggctgaggcaggagaatcacttgaacctgggaggcagaggttgcagtaagccaagatagtgccactgcactctagcctgggtgacagagcaagactccatctcaaaaaagaagattcccacccttgtgattacttcctctgtttccttaactccacacctggaggagctttaaaaggctggtcccttgctatccatgtcacagatcttgaggcaggagaaactcacaagttgtagatggccagctggtaccatggagtctaatgatgcctcatctgtccagtgctgatcttcgacattcccatgtctgggatgggaaatccattttgtagaacgaaaggagacagaaggcaaaaggggaaagtgtgacatagggaaggcacattctaggag

SEQ ID NO: 108 - DNA, 634 bp, Homo sapiens
agccctatttcttattctctactttctatttccttagccaagagctaagatacaaaagattctcagcttggtgtggtggttcacacttgtaatcccagcactttgggaggctgaggcaggcagaccacttgaagtcaggagttcaagaccagcctggccaacatggtgaaatcccgtctctactaaaaatacaaaaattagccgggtgtggtggcacatgcctgtaatcccagctactcagaaggctgaggcaggagaatcacttgaacctgggaggcagaggttgcagtaagccragatagtgccactgcactctagcctgggtgacagagcaagactccatctcaaaaaagaagattcccacccttgtgattacttcctctgtttccttaactccacacctggaggagctttaaaaggctggtcccttgctatccatgtcacagatcttgaggcaggagaaactcacaagttgtagatggccagctggtaccatggagtctaatgatgcctcatctgtccagtgctgatcttcgacattcccatgtctgggatgggaaatccattttgtagaacgaaaggagacagaaggcaaaaggggaaagtgtgacatagggaaggcacattctaggag

SEQ ID NO: 109 - DNA, 634 bp, Homo sapiens
agccctatttcttattctctactttctatttccttagccaagagctaagatacaaaagattctcagcttggtgtggtggttcacacttgtaatcccagcactttgggaggctgaggcaggcagaccacttgaagtcaggagttcaagaccagcctggccaacatggtgaaatcccgtctctactaaaaatacaaaaattagccgggtgtggtggcacatgcctgtaatcccagctactcagaaggctgaggcaggagaatcacttgaacctgggaggcagaggttgcagtaagccaagatagtgccactgcactctagcctgggtgacagagcaagactccatctcaaaaaagaagattcccacccttgtgattacttcctctgtttccttaactccacacctggaggagctttaaaaggctggtcccttgctatccatgtcacagatcttgaggcaggagaaactcacaagttgtagatggccagctggtaccatggagtctaatgatgcctcatctgtccagtgctgatcttcgacattcccrtgtctgggatgggaaatccattttgtagaacgaaaggagacagaaggcaaaaggggaaagtgtgacatagggaaggcacattctaggag

SEQ ID NO: 110 - DNA, 1395 bp, Homo sapiens
catccccaccgtgcaaaaaaaggggaaaataaaaagaaaaaccttttcccagaatccttaggcaccactgcgcagcggaattttaacaaagctatccttattataatgaaatcaaagaccgactcatccagccaagaactgctgctcctcaagatgggaggctgatackaagactcagtagattaacgattgttaagcaggactcacccactccacacggatcaggccattataattacagaagaacagcatgcaacattctaccattgcaaatggtatcatacgttttcctggctggctttcggggaagggtttagctcatttgacatggcagaaggtcctggagccatgcattcatagctacctgtctttcatatctagcggcataaaattaagtttctttctttttgtgattgcatcacttgtatatgactgcaaagatggtcactgaacttggaggctattcttggcttggtccacctctaaatagaattagctattaaaaagaaaatttactttaaaagggagctttggaaggcagttgttctccagagcaactgaaaccaagatcaacaaaagatcttgagaatgtgctaatagagaaagacctgctctatgaattaaaatgttgtagactgagaaatcaaactgtggtttcaaatgtggcccacaaatcagaagttataaaggcagctgcttggaattttccttgttgattttggtatttgagattgtgattgtggggatgccatttattcaacacaatgggaacactgctgcctggcattctgtcataatcaaactgcttttcatatgggcaattccacatagaatgttccaagattaatagcactatggatttacttattttaatgatggtacaagattctccagaacagggtaggggcagacaattaaacagtaaaaataacaaatacattataaacacaatttgcaaagcacttaaatatacatcctcattaagtttcaaaattacagctgccatggtggctcacacctgtaatcccagcactttgggaggacaaggtgggcggatcacttgaggccaggagttcgagatcagcctggccaacatggtgaaaccccatctctactaaaaacacaaaaattagttaggcgtggtggcgtatgcctgtaatcccagctacttaggaggctgaggcaggagaatctcttgaatccgggaggcagaggttgcagtgagccgagatcgtgccactgcactccagcctgggtgacagaggaagactctaactcaaaaaaaaaaaaaaaaagtttcaaaattactctataaggttggcattattattctgattttacacaagatgaaactgaaggtcaaggaagttaaatggcttttccaagataacaggg

SEQ ID NO: 111 - DNA, 1395 bp, Homo sapiens
catccccaccgtgcaaaaaaaggggaaaataaaaagaaaaaccttttcccagaatccttaggcaccactgcgcagcggaattttaacaaagctatccttattataatgaaatcaaagaccgactcatccagccaagaactgctgctcctcaagatgggaggctgatacgaagactcagtagattaacgattgttaagcaggactcacccactccacacggatcaggccattataattacagaagaacagcatgcaacattctaccattgcaaatggtatcataygttttcctggctggctttcggggaagggtttagctcatttgacatggcagaaggtcctggagccatgcattcatagctacctgtctttcatatctagcggcataaaattaagtttctttctttttgtgattgcatcacttgtatatgactgcaaagatggtcactgaacttggaggctattcttggcttggtccacctctaaatagaattagctattaaaaagaaaatttactttaaaagggagctttggaaggcagttgttctccagagcaactgaaaccaagatcaacaaaagatcttgagaatgtgctaatagagaaagacctgctctatgaattaaaatgttgtagactgagaaatcaaactgtggtttcaaatgtggcccacaaatcagaagttataaaggcagctgcttggaattttccttgttgattttggtatttgagattgtgattgtggggatgccatttattcaacacaatgggaacactgctgcctggcattctgtcataatcaaactgcttttcatatgggcaattccacatagaatgttccaagattaatagcactatggatttacttattttaatgatggtacaagattctccagaacagggtaggggcagacaattaaacagtaaaaataacaaatacattataaacacaatttgcaaagcacttaaatatacatcctcattaagtttcaaaattacagctgccatggtggctcacacctgtaatcccagcactttgggaggacaaggtgggcggatcacttgaggccaggagttcgagatcagcctggccaacatggtgaaaccccatctctactaaaaacacaaaaattagttaggcgtggtggcgtatgcctgtaatcccagctacttaggaggctgaggcaggagaatctcttgaatccgggaggcagaggttgcagtgagccgagatcgtgccactgcactccagcctgggtgacagaggaagactctaactcaaaaaaaaaaaaaaaaagtttcaaaattactctataaggttggcattattattctgattttacacaagatgaaactgaaggtcaaggaagttaaatggcttttccaagataacaggg

SEQ ID NO: 112 - DNA, 585 bp, Homo sapiens
attatcatttccattttgcaaatgaaaaaactgagactcagaaaggttaagtaatttgtcaaattttatatcattagtaagcaacagagccaaatctaacccagacatcaggcgcctgtgcccaaaactaacatatacgtaaactgacaaagttyggaaagtgctttcattaacttcatctcatttgatcctcatactaactatgtgtgttgggtagagcaagtattaatcacatttttatagacaaggaaactgaggcttagctaaattaagtaactctttaatatcaaagtttgtaaagaagttgagctcagactagaaaccaggtgttctaactccaggcccagcacggtttatacagaacatatggaatggaacatactgaaggtaaactgccatgtgataaaccaatcaatgacatttgagtctctgctatacagaagacatccagaaggtcacaatacctggccactaggagcttacaatctatgctgggaaatacaacatatacacagggtggaggatgaccaagggggacataaaataactgttaaatttgattaagcttttagggttgattttgat

SEQ ID NO: 113 - DNA, 556 bp, Homo sapiens
gttgtacagaatcctatttatattgcatatataatctatagtacatttatttacctgctgatgaacaattatgttgtttaccattttttgctattacaatgctgcattaaatatccttttatgttacattgtttacaattttttgctattrcaaacaatgttgcattaaatatccttttatgttttcttgtatacatgcatgattcccttaggagcagaactgctgggtaataggtaagagaatttcaaccataaagtattatcaaattaatctccagataattataaattggtattatttataaaaatactgtgtgtgtgtgtgtgtgtgtgtgtgtacatagatacaaataaagcctacctgtaggagccacagtatgtagaacttgttactttgtaacaaaacaacagagacaaaatggaaatagaaggccaagatctatgtcaatgcttttgaagagtacaaattttaattggggtgagctctaagacaagctcaaaacagttggttaaaacaatcagactcaaccactggtattgacagagccatatgtaa

SEQ ID NO: 114 - DNA, 1222 bp, Homo sapiens
tactggaggagagaaaagggggcatctgtgtccaattaaaagacgccccttacacaaaatggtacaagaaacaagattgcggcaggcacctttcctttgggacttaagacttctcactcagtcttggtcacagggatggtgagaacagaatctaaccaaggccaagcagtgtttcctaggagtttgattcttaagtagatatgcacagggaaggtgtttggagtgtggccatgtgctggctgcttttgagaaagacagaccaagacttcctggcttaccatgttcaccagagatgctctgagtgctgcaagtaccactcccacaatttttgtgttttgcttacattagtgaagcccagtctctattatttgcaaacaaacaatctagtaacagtctttaaaactcagagtgacacagattggaccagcttcctgtaacaggagcgttgaaaaatttaaattctggctgggtgtggtggctcatgcctgtaattccagcactttgggaggccgaggcaggtagatcacctgaggtcaggagttagagaccagcctgaccaacatggagaaaccctgtctctaccaaaaatacaaaattagacaggtatggtggcgcatgcctgtaatcccagcttttcggggggctgaggcaggagaatcgcttgaaccagggaggcggaggttgcagtaagccaagatcatgccattgcactccagcctgggcaacaagagcgaaactttttctcaaaaaacaaaattaaattctactcaaccaattagaaatttgttaaggtcaatgacagagacagtggaaatttatttatttgtttgttatcatttttttaaaagacagaatctcactctattgctcaggctggagtgcagtggtgaaatcacagytcactgcagcctagaactcccagactcaagcaatcttcctaccacagcctttcgagtagctgggactacaggcacacaccaccacactaacctgattttttttttattttttgtggagtcaggggtctcactatgttgtccaggctggtctcaaactcctgggctcaagaaatcctcttaccttggcctcccaaagtgctgatgttactagtgcaagccactgtggccagcctcagtggaaataaatttaataaattgcaagagagcttgtagaggcagcatgtagtttaaatgtaagagaggaaaaaattaaatcaatacag

SEQ ID NO: 115 - DNA, 1235 bp, Homo sapiens
atgggaggccagatccccaacaccccagtccccgacagctactctgagtccatggagtctgacacaggttcctttgatgagaaaaattttgatgacctagacaacttctctgatgaaaacatggaagactgtcctgagggcagcatccctgatacacctaagtctgcagacgcctcccaagacagcttatcctcttcgcctttgcccctygagatgtcgagcatcgctgctttggaaaatcagatgaagatgatcaatgctggcctggcagagcagctacaggccagcctgaagtcagtggagaatgggtccatcgagggggatgtcctgaccaatgattcatcctcagtgggtggtgacatggaaagccaaagtgctggcagcccagccatctcagagtctacctcttccatgcaggctctgtccccgtccaacagcacgcaggagttccacaagtcacccagcattgaggagaaaccacagagagcggtcccaagcgagtttgccaatggtttgtctcccaccccagtgaatggtggggctttggatttgacatctagtcacgcagagaaaatcatcaaagaagattctttggggatcctcttcccttttagagaccggggtaaatttaaaaacactgcttgtgacatttgtggcaaaacatttgcttgtcagagtgccttggacattcactatagaagtcataccaaagagagaccatttatttgcacagtttgcaatcgtggcttttccacaaagggtaatttgaagcagcacatgttgacacatcagatgcgagatctgccatcccagctctttgagcccagttccaaccttggccccaatcagaactcagcggtgattcccgccaactcgttgtcatctctcatcaagacagaggtcaacggcttcgtgcatgtttctcctcaggacagtaaggacacccccaccagtcacgtcccgtctgggcctctgtcttcctctgccacatccccagttctgctccctgctctgcccaggagaactcccaagcagcactactgcaacacatgtggcaaaaccttctcctcatcgagtgccctgcagattcacgagagaactcacactggagagaaaccctttgcttgcactatttgtggaagagctttcacgactaaaggcaatcttaaggtaccttgctctctctgcaccatacctgctccatcaaccctgtcccactgccattgattatctat

SEQ ID NO: 116 - DNA, 644 bp, Homo sapiens
aggccaaggtggtaggattgcttgtggccaggagttccagactacccagggcaacatgctgagatcccatcactaccaaaaaaaaaattaaattagccaagcatggtagtgcacactactcgggaggctgaggtgggaggatctcttgaaccaggaattcaaggctgcagtgagccatgattgagccactgcactccagcctggacgacagactgtatctctaaaaaacgacaaaaaaaaagctatttggaattttattttctttactctttataggcagaatccatgtcagttattttacctgtccaggtgtggcagccccagtgggtgtgtgcccatatcccttcaccattcaactctacaagctgcaygctgcttggaaggaagacctgactctgtctgggggctctttctggccttggaagtagggagcggtggccgtttactaccttggaagcagtcctgaaccaacagcagacaaggagttggtgaataaataccaccttcctcactctccatgactcgaactctgaaacaggttctattcccactgcgcaagttgtcagtgcaactgaaccccatttccccccatgacaactccctgtttatgtgactgcctttccttccctatctcacttacaaac

SEQ ID NO: 117 - DNA, 683 bp, Homo sapiens
catttccctaatgactaatgatgttgatcatcttttcatctaattatttgccatccacatattttctttgtgaagtgtgttcaaatatttgcccactttttaattgagttgttttccttattgttgagttttgagttatttaaatattctgggtacaagtagttatgtaatttgtaaatgacttctccttttctgtagtttgttttttcattctcttacctgtcttttgcagaggaaaatctttttagtgaagtccagttaattaccttttttcttttattgtgttttttttggtacaaaaaatgtctaagatctctttacctcacctaaggtcacaaagtttttcaccgtatgtagtcttttaaaaattttatagttttatatttaagatctgtggtctattttgagttaatttttgtataaggtgtgagatatatatcagtgtattttctccttcctccttccctccattccttcttttctttsttttttctttccttccttccttttttttttttttaaagaaagttaagtctctttttcctcctttcttgggcagaggtgtgttcaattgttcccacaccatttgttgaagaggctattctttctccattgaatggcctttgcacctttgtcaaaaattaatacactctatttatatgggtttatcactggactctcca

SEQ ID NO: 118 - DNA, 1618 bp, Homo sapiens
gagcactgttcaaaatcagtgggcggtgaggacttcccagaataggtaactgggagatatccggcctccgtgagtttagacaaggctcgcagcatgagcactaatcacatgtcaggatcattgtcggtacacagaggataacaaagacagacaagagacagccccttccctcaaggaaattatagactggtaggagaagatagacacatacacacatttttctgtgtttctgacataggaagagtggcataaaaacatgaaatatggataaacctcagaagaagcaaacaaactttggcacctttgctgcctctgcaatggtgacctgtgtctcctgtcagctggcttcaataggaggactttaattatattgcttaattacaccagagcacaccagaatttttaatttttttttaacattaattcccctctgggttcctgatatttgccttacgttattgccaagcactggagaggagcgacaaacacaagaagggtcttaatatttggaattctcagccctgcagtgtgttatttgcctttccatttggagctcgaggatgcaaacccttcatctgttcatggtgacctctgagcagagctccaggaaccagggatggctgggacttcatggcaaagcatccagaggctgccctagactttgtgaaacactgaaagctttcttgtttgaacttttcagcaactacatggaggagatctcagctccactgttttacaaatgaggaaactgaggcatagattggtgaattggtttgtttgcctataaataaatctggtcagagcgaaagatgggactgaaatttatatctttaaactccaagccactagtgtttgccacgaaacatgagctttttgccaagatattttcatctgtgccaaatcgtatgacaatatgctgggtaacttattctttacaaatatttattttttgccttttggcagcttcaggttagcatatgtgtttaattaacatttctaattaaaatcacaatgtgtaaaaatcaaatattgtccatgagttacattctgccttatctctaaatggtgccaatttgcacatggtaggtaaactattttaacttttctagtaagawcttctggtaaaattttataaaataaaatcagtgggaagaagttaaaaactcttagccagctctccaccaaggctgagatcatgaagcaggagctgcactatgggcattgcttactgcagctggaatgggtaagcaagttcactaggtgcaataagctaaatctctgtgtcccccaaagttcatatgttgaaaccctaattccagcatgacagtatttggaggtgaggcctttgggaggtaattaggtcatgaaggtggccctctcatgaatgggattagtgcctttatagaaacaagccagagagctctcagtttctttctgccatgtgaggatacaatgaaaagccagcacagtctgcaacctggagaagggtcctcaccagaatctcaccatgccggcaacctgatctcacacttccagcctccagatctatgagaaacagatttctgctgtttataagccacccagtctatgagactttgttgtagcaacctgaatgaac

SEQ ID NO: 119 - DNA, 1618 bp, Homo sapiens
gagcactgttcaaaatcagtgggcggtgaggacttcccagaataggtaactgggagatatccggcctccgtgagtttagacaaggctcgcagcatgagcactaatcacatgtcaggatcattgtcggtacacagaggataacaaagacagacaagagacagccccttccctcaaggaaattatagactggtaggagaagatagacacatacacacatttttctgtgtttctgacataggaagagtggcataaaaacatgaaatatggataaacctcagaagaagcaaacaaactttggcacctttgctgcctctgcaatggtgacctgtgtctcctgtcagctggcttcaataggaggactttaattatattgcttaattacaccagagcacaccagaatttttaatttttttttaacattaattcccctctgggttcctgatatttgccttacgttattgccaagcactggagaggagcgacaaacacaagaagggtcttaatatttggaattctcagccctgcagtgtgttatttgcctttccatttggagctcgaggatgcaaacccttcatctgttcatggtgacctctgagcagagctccaggaaccagggatggctgggacttcatggcaaagcatccagaggctgccctagactttgtgaaacactgaaagctttcttgtttgaacttttcagcaactacatggaggagatctcagctccactgttttacaaatgaggaaactgaggcatagattggtgaattggtttgtttgcctataaataaatctggtcagagcgaaagatgggactgaaatttatatctttaaactccaagccactagtgtttgccacgaaacatgagctttttgccaagatattttcatctgtgccaaatcgtatgacaatatgctgggtaacttattctttacaaatatttattttttgccttttggcagcttcaggttagcatatgtgtttaattaacatttctaattaaaatcacaatgtgtaaaaatcaaatattgtccatgagttacattctgccttatctctaaatggtgccaatttgcacatggtaggtaaactattttaacttttctagtaagatcttctggtaaaattttataaaataaaatcagtgggaagaagttaaaaactcttagccagctctccaccaaggctgagatcatgaagcaggagctgcactatgggcattgcttactgcagctggaatgggtaagcaagttcactaggtgcaataagctaaatctctgtgtcccccaaagttcatatgttgaaaccctaattccagcatgacagtatttggaggtgaggcctttgggaggtaattaggtcatgaaggtggccctctcatgaatgggattagtgcctttatagaaacaagccagagagctctcagtttctttctgccatgtgaggatacaatgaaaagccagcacagtctgcaacctggagaagggtcctcaccagaatctcaccatgcyggcaacctgatctcacacttccagcctccagatctatgagaaacagatttctgctgtttataagccacccagtctatgagactttgttgtagcaacctgaatgaac

SEQ ID NO: 120 - DNA, 1158 bp, Homo sapiens
ttttctttyttttttttttttttgagacggaatctctctctgtcacccaggctggagtacagtggtgcgatctctgctcactgcaacctccgcctcctgggttcatgccattctcctgcctcagcctcccgagtggctgggactacaggcacccaccaccatgcccggctaattttttatatttttagtagagacagggtttcaccgtgttagccaggatggtctcaatctcctgacctcgtgatccgcccacgtcagcctcccaaagtgctgggattacaggcgtgagccaccgtgcccggacgattcatccctggttttctaagagcaccagacacacagtagagggctcacaagacttccagaagctaagagagacatgactcatctatctttattccttgattcatcctggatagtaaaaaaataaagagatgccaaaacagggcagcaaaattattgcatattataattttttctttgaacaattaatacttttacactaaagcccattcaacacaataatttactagtctgtatccatcagttatatgactgaagaattttgactaatgcaaaatgtcagaacatttatggcaaaataatgacacttcagaactttcgataaaacagagcgtgtagtaacaattatggtttgaatgatagctacccataatctcttgacttcattttgttttcagtgttctattgcaggtggcaatgtcctaagatgtaaattgccattcacaaagtaattacaggatttatgttttaaaaaattcacagcacacgccaggcagtgggttccggcaaggggactcacatttaaagctggaagacaggatcttcttttagtcctcttgtgcattgctgtggctttatgtataaatatattaggtgacaatgtcaattttaagtttaaggatctctgtgaatatgcaggaggccaagtagttactccacccaccccctggtcccccacacccaccacgatgtgtactcatgtgggcttgtgcgattgctttgagcgtcgctaattcagaggcctgacagtgcagtggagatttggggacagacagtgagggagggggtgctcgggctgctgacatgggcacatttggcgacaggctgtgatcacaccgcgggtggctggacagc

SEQ ID NO: 121 - DNA, 1226 bp, Homo sapiens
atataatttatcccacctacagactctgctgggtgaacttatgaattgcgaattctccttacaataaaccgtcatttttcccctcaactccattcccctcagtgagtctaaaaaccctaagttgagattcagtgctttacgtaagatataagagaaaaacagcagctatcatgtgccaggtactagtttccacattacaatatctcatttaaactatataacaactcagtggaataggtactattataattttccagatgaggacacttatactcaaaaagacaaaataattcattcagcatcacacaaatagtcaatatcagaatcyagactcaactacaggtttccacaccaaatgctatgctcttcaaccatgccaaagaaaatatgtctaccatatgcccagtacagctgagcagattgtgtattgcataactttagggggtaaaattcacactgttgtcatcacagacttctctgtatttattttgacgatttcccagcagatggtaataaattatctttaagagagggtacatttttcttatttaaataaataacagttcataaatggtctcgtttctttgttgtgggaaaattgccaccttaaaagaaatccatttcatatagtggttttaattgccagaaaatttatctctcaaggcaaaatctagcactttgtacctataggtaggatttctatgtctgccctactctgcctcagagaataagtgctagcccataagccagtgattctcaaactctaatgtccttaaaaatctaccagagaggccaggcacagtagctcacacctgtaatcccagcactttgggaggccgaggtgggcagatcacgaggtcaggagatcgagaccatcctggctaacatggtgaaaccccacctccactaaaaatacaaaaaattagctgggtgtggtggcacatgcctgtagtctcagctactcaggaggctgaggcaggagactggcttgaacctggaaggcagaggttgcagtgagccaagagtgcgccactgcactccagcctgggcaacagagcaagactccatctcaaaaaaaaaaaaaaaatctaccggaggaacttttaagaatctcacacctgaagttgtgattgcatatgtctggagtgagagataggaagctgcatatttagcagacactgtaagtgatccctgggaaaaacattggcagacagctattatgccac

SEQ ID NO: 122 - DNA, 1183 bp, Homo sapiens
ttgccatttttatttgccttaggaacttcagaccgcaggcctccttaagcatgaactgtttgttaaagtctggtgttgccttttgtggactggtctagccaagagttgttttaacccaaatggggagatgggggtggggctggggtggggtaagacatctgcagagcccaacaaccgttaccaaggcctaccctggctctgcccytacctgccgaacgttaaacaaagcccctgggagaactcgggcaagctgaacaccttggtcaaacacgaagcaaaccaccaccaggtgtgcttgcagaacagactctccatcagcgtcctgtcatgcagaaaatgtttatccaatttgtcaagataatctttcctcaaataagctttgggcctattccttggaacagcctgaatttagtcggtataatgtaactctattttttttcacccattttcctttaattgctgtgtcaacttttccctggctttaagcaaactgaaagtaattatatcattcttaagtgagtaatcttctgactgggttagctgattcgtgagttactctaaaattctaaactgtgctgttctttttcaaacacattttcttagatgtttcgcaaagtttggctcatcgatgacccacgggtgtgtttattctgtcacgtttcgtggctacgccgtgactatattagggcatttgaaaagaagttaagtgtagaaatatgagaagggagaaaaaggaaacttcacctactaatttcagtatttcttggaaatattacagtcattgtaaataacttgcagcttcaagcatgaagaacgtttgattagtgctttgaatcatggtgtaatattagaggctgggcttgatggacttaaaaagcactcacttctttcatttcataatatagtttccttgctatttgacaccttgtgtgatattgttttgtttaaaacacagaaacgctaaaggttaccacatttttcttagttctactcattgacatactcccacagaactcatgatatatttaaaaatagaaggctcagccatctggctattggatggtttctatttttgtttctctttgcattcacaaagtctgttgagtctgaaattctctatgttctgccctatatgtaattgtgtatacacacacacacactttctcatttaaatttagccatt

SEQ ID NO: 123 - DNA, 1187 bp, Homo sapiens
gcatctagaagactggctatgtatcacccttgggagaactaaaaaaaaaaaaaaaaaaaaaaaacagtctttcaaatgattttctgtagagctaaattctttcataaaaccctacatgaaaaactgcaaaatgagttgaaaaattgttcacagacataaataaagcaagatcccaaatattcccacacacagctcctaaaataaatgggagaaacacagttgtgtataagaaagtaccacacagctacaacaaaggagcccatgggagagaagaagagatcatgacccaaaaagctaacagagacctggccatacccatcctatcctggccagagcagcattcttgtcccaggtagtttctgtgagggtgaaatcagctatcattccaattcaccaaagttgcttcacagtatttcacaatactcaaggaaggaagggagaaagaaagcaayttgggaagacaggagccatctagttcgcatcctccagccaagagaatgtcaagagatcaagagcatataattcttaccgattcctccccctcttacttgtttaaggcaggatttacaggcttgttgtgatatgaagtgtgtcggggggagggaggggacgggggggttgtatgtgtatctatccagaaacactggtgtgtatgagccctccatggttcacaatagggagggaatgtctcagttctatctacgtcacgagtgtggctactccacaaaggaaaggcttattcatgccaacgtggtagattacacagagggctgaaaacctgtgtgctcttgagacaaggcagcttgtgcagttgtggcaagaaaaaaaagtattcctcatagccaaaaccacaaagccaacttatgttcagcaagactgctattattcatcctctgaaggactaaagaataagtaaatgcactaagccacaccttgaaaagtcatggcagagtggcaagccacagcttgatggaagcattacaaaagagagtgggaatcacgtgtgctaatctaaatcaacccacctcaggactgaggactttctatattcctccggcagtgacctcttcaaaaatcccactttccctaataaaaccttcctaacaaacacctcataaaccatatgcttaaaataagcatacattcattcttaagtgtgctgcttgctgcatatgtgtgtgtctttg

SEQ ID NO: 124 - DNA, 1187 bp, Homo sapiens
gcatctagaagactggctatgtatcacccttgggagaactaaaaaaaaaaaaaaaaaaaaaaaacagtctttcaaatgattttctgtagagctaaattctttcataaaaccctacatgaaaaactgcaaaatgagttgaaaaattgttcacagacataaataaagcaagatcccaaatattcccacacacagctcctaaaataaatgggagaaacacagttgtgtataagaaagtaccacacagctacaacaaaggagcccatgggagagaagaagagatcatgacccaaaaagctaacagagacctggccatacccatcctatcctggccagagcagcattcttgtcccaggtagtttctgtgagggtgaaatcagctatcattccaattcaccaaagttgcttcacagtatttcacaatactcaaggaaggaagggagaaagaaagcaacttgggaagacaggagccatctagttcgcatcctccagccaagagaatgtcaagagatcaagagcatataattcttaccgattcctccccctcttacttgtttaaggcaggatttacaggcttgttgtgatatgaagtgtgtcggggggagggaggggacgggggggttgtatgtgtatctatccagaaacactggtgtgtatgagccctccatggttcacaatagggagggaatgtctcagttctatctacgtcacgagtgtggctactccacaaaggaaaggcttattcatgccaacgtggtagattacacagagggctgaaaacctgtgtgctcttgagacaaggcagcttgtgcagttgtggcaagaaaaaaaagtattcctcatagccaaaaccacaaagccaacttatgttcagcaagactgctattattcatcctctgaaggactaaagaataagtaaatgcactaagccacaccttgaaaagtcatggcagagtggcaagccacagcttgatggaagcattacaaaagagagtgkgaatcacgtgtgctaatctaaatcaacccacctcaggactgaggactttctatattcctccggcagtgacctcttcaaaaatcccactttccctaataaaaccttcctaacaaacacctcataaaccatatgcttaaaataagcatacattcattcttaagtgtgctgcttgctgcatatgtgtgtgtctttg

SEQ ID NO: 125 - DNA, 493 bp, Homo sapiens
tgcattatatagagagaaactggaaaggacgtggatccttgaatgccaggtgttcgcattcaggctccctgtctcagtttccgtctctgaaaaatgtcaacaataatattcaaggaattattgttgggaagattaaacaagttaatgagtaaaacagttttttagagtgtctggcactttcaagycctatataggtgttagtaattatcagtttatttctttttttaatgagacagagtttcgctttgtctcccaggctggagtgcagtggcacaatctcggctcgctgcaacctccgcctcccaggttcaagcgattctccttcctcagcctcctgagtagctgggattacaggtgcctggcaccacgcccggctaatttttgtatttttagtagagacggagtttcgccgtgttggccaggctggtctcgaattcctgacatcaggtgatccatccgccttggcctcccaaagtgctgggattacagccgt

SEQ ID NO: 126 - DNA, 493 bp, Homo sapiens
tgcattatatagagagaaactggaaaggacgtggatccttgaatgccaggtgttcgcattcaggctccctgtctcagtttccgtctctgaaaaatgtcaacaataatattcaaggaattattgttgggaagattaaacaagttaatgagtaaaacagttttttagagtgtctggcactttcaagccctatataggtgttagtaattatcagtttatttctttttttaatgagacagmgtttcgctttgtctcccaggctggagtgcagtggcacaatctcggctcgctgcaacctccgcctcccaggttcaagcgattctccttcctcagcctcctgagtagctgggattacaggtgcctggcaccacgcccggctaatttttgtatttttagtagagacggagtttcgccgtgttggccaggctggtctcgaattcctgacatcaggtgatccatccgccttggcctcccaaagtgctgggattacagccgt

SEQ ID NO: 127 - DNA, 963 bp, Homo sapiens
tgcatattcacaggtaatatttaggggcagtgttctcagtgatttacacttgtcaagccgacttcacctgcacaatgaacctgtgagataggcaccaatatggcacscatctgcagaggaggaaaccagcagagaggttaagcagtttgcccaaatgcacacaataggaagtggtcaagccccgattgaagtcagaagagaagctacatggaagatggccgccaacactgtcttatctgaaattattatgaagttttattctatgtattattgtattgtgggaaggcttggggctgctgatgcaattatgggaatcaaaattggttcttgggatgctactttatcctgttttctctacatgggccttgcatctccggatgccttggtcatatgacaacccacagctctcatccggggagaaggggaggcagaagcccatccaatgcccagtagtgaggtcacatgaagcacccaggtttccgggagaaaggaacagattgtggcaagggtggatgtgagtcccttctgctcagggtctacatacagctacaggaagaatacgttctttctgctgcttcccacaggtggccttggagtgtctgtaccatcgagagaagaggattgggattgatttggtccatgacaacgtggagaaaaaccttatccgggtaaggcatctcctggttctgcccagccccctgaaggaggcgggaaggccagcaggtcagagaaattactgagctacctgtcaggagcagaagccacacgtgtcactgtgtggaaagtgagggctcaggaagcatgggtggaggtctagtttgcaatttaggaacagggagtaatggagttatttgaccctcagtcttttcatctccaaaatgggcatgataataatataccaataacaataataaaagctagcgtttattgagcacctactatatgtcataggctgtaccacat

SEQ ID NO: 128 - DNA, 963 bp, Homo sapiens
tgcatattcacaggtaatatttaggggcagtgttctcagtgatttacacttgtcaagccgacttcacctgcacaatgaacctgtgagataggcaccaatatggcacccatctgcagaggaggaaaccagcagagaggttaagcagtttgcccaaatgcacacaataggaagtggtcaagccccgattgaagtcagaagagaagctacatggaagatggcmgccaacactgtcttatctgaaattattatgaagttttattctatgtattattgtattgtgggaaggcttggggctgctgatgcaattatgggaatcaaaattggttcttgggatgctactttatcctgttttctctacatgggccttgcatctccggatgccttggtcatatgacaacccacagctctcatccggggagaaggggaggcagaagcccatccaatgcccagtagtgaggtcacatgaagcacccaggtttccgggagaaaggaacagattgtggcaagggtggatgtgagtcccttctgctcagggtctacatacagctacaggaagaatacgttctttctgctgcttcccacaggtggccttggagtgtctgtaccatcgagagaagaggattgggattgatttggtccatgacaacgtggagaaaaaccttatccgggtaaggcatctcctggttctgcccagccccctgaaggaggcgggaaggccagcaggtcagagaaattactgagctacctgtcaggagcagaagccacacgtgtcactgtgtggaaagtgagggctcaggaagcatgggtggaggtctagtttgcaatttaggaacagggagtaatggagttatttgaccctcagtcttttcatctccaaaatgggcatgataataatataccaataacaataataaaagctagcgtttattgagcacctactatatgtcataggctgtaccacat

SEQ ID NO: 129 - DNA, 963 bp, Homo sapiens
tgcatattcacaggtaatatttaggggcagtgttctcagtgatttacacttgtcaagccgacttcacctgcacaatgaacctgtgagataggcaccaatatggcacccatctgcagaggaggaaaccagcagagaggttaagcagtttgcccaaatgcacacaataggaagtggtcaagccccgattgaagtcagaagagaagctacatggaagatggccgccaacactgtcttatctgaaattattatgaagttttattctatgtattattgtattgtgggaaggcttggggctgctgatgcaattatgggaatcaaaattggttcttgggatgctactttatcctgttttctctacatgggccttgcatctccggatgccttggtcatatgacaacccacagctctcatccggggagaaggggaggcagaagcccatccaatgcccagtagtgaggtcacatgaagcacccaggtttccgggagaaaggaacagattgtggcaagggtggatgtgagtcccttctgctcagggtctacatacagctacaggaagaatacgttctttctgctgcttcccacaggtggccttggagtgtctgtaccatcgagagaagaggattgggattgatttggtccatgacaacgtggagaaaaaccttatccgggtaaggcatctcctkgttctgcccagccccctgaaggaggcgggaaggccagcaggtcagagaaattactgagctacctgtcaggagcagaagccacacgtgtcactgtgtggaaagtgagggctcaggaagcatgggtggaggtctagtttgcaatttaggaacagggagtaatggagttatttgaccctcagtcttttcatctccaaaatgggcatgataataatataccaataacaataataaaagctagcgtttattgagcacctactatatgtcataggctgtaccacat

SEQ ID NO: 130 - DNA, 963 bp, Homo sapiens
tgcatattcacaggtaatatttaggggcagtgttctcagtgatttacacttgtcaagccgacttcacctgcacaatgaacctgtgagataggcaccaatatggcacccatctgcagaggaggaaaccagcagagaggttaagcagtttgcccaaatgcacacaataggaagtggtcaagccccgattgaagtcagaagagaagctacatggaagatggccgccaacactgtcttatctgaaattattatgaagttttattctatgtattattgtattgtgggaaggcttggggctgctgatgcaattatgggaatcaaaattggttcttgggatgctactttatcctgttttctctacatgggccttgcatctccggatgccttggtcatatgacaacccacagctctcatccggggagaaggggaggcagaagcccatccaatgcccagtagtgaggtcacatgaagcacccaggtttccgggagaaaggaacagattgtggcaagggtggatgtgagtcccttctgctcagggtctacatacagctacaggaagaatacgttctttctgctgcttcccacaggtggccttggagtgtctgtaccatcgagagaagaggattgggattgatttggtccatgacaacgtggagaaaaaccttatccgggtaaggcatctcctggttctgcccagccccctgaaggaggcgggaaggccagcaggtcagagaaattactgagctacctgtcaggagcagaagccacacgtgtcactgtgtggaaagtgagggctcaggaagcatrggtggaggtctagtttgcaatttaggaacagggagtaatggagttatttgaccctcagtcttttcatctccaaaatgggcatgataataatataccaataacaataataaaagctagcgtttattgagcacctactatatgtcataggctgtaccacat

SEQ ID NO: 131 - DNA, 963 bp, Homo sapiens
tgcatattcacaggtaatatttaggggcagtgttctcagtgatttacacttgtcaagccgacttcacctgcacaatgaacctgtgagataggcaccaatatggcacccatctgcagaggaggaaaccagcagagaggttaagcagtttgcccaaatgcacacaataggaagtggtcaagccccgattgaagtcagaagagaagctacatggaagatggccgccaacactgtcttatctgaaattattatgaagttttattctatgtattattgtattgtgggaaggcttggggctgctgatgcaattatgggaatcaaaattggttcttgggatgctactttatcctgttttctctacatgggccttgcatctccggatgccttggtcatatgacaacccacagctctcatccggggagaaggggaggcagaagcccatccaatgcccagtagtgaggtcacatgaagcacccaggtttccgggagaaaggaacagattgtggcaagggtggatgtgagtcccttctgctcagggtctacatacagctacaggaagaatacgttctttctgctgcttcccacaggtggccttggagtgtctgtaccatcgagagaagaggattgggattgatttggtccatgacaacgtggagaaaaaccttatccgggtaaggcatctcctggttctgcccagccccctgaaggaggcgggaaggccagcaggtcagagaaattactgagctacctgtcaggagcagaagccacacgtgtcactgtgtggaaagtgagggctcaggaagcatgggtggaggyctagtttgcaatttaggaacagggagtaatggagttatttgaccctcagtcttttcatctccaaaatgggcatgataataatataccaataacaataataaaagctagcgtttattgagcacctactatatgtcataggctgtaccacat

SEQ ID NO: 132 - DNA, 1262 bp, Homo sapiens
tggtcttttatgatctggccttggaagccacatacttgyttgcaccatatactgttgattgactggacaccaatcaatgggtccaaagctctcaatgggctgtcacagaatttgcagacatttttaaaaaccaccacacatcccccaaggatgtgcctttcattcgttaactcattcatcaaatatttattggttctcatgccccttccttttgtataatttgtgccctgcacaaggattcccagcctggagattagagggtgaaatgcagcctacagactcttcaccaaaccatatgcctggcttggggttgtgtctgcctagaggaaggggcatttttttccgtttgcaccaaggtgctatctatttgtcaagctatctgccctgagaggttactattttctaaatcactggctcagaagaggcatctttttctaattttcatataggcactgtaaagattagtggggctgggtgcagtggcttgcacctgtaatcccagcactttgggaggccgaggcaggaggatcatttgagcccaggagttcgagaccagcctgggcaaaatagtgagacttcatctctgcataaaataagaaaattagccgaacatggtggcacacagctgtagtcccagctactcaggtggctgaggcaggaggatcacttgagcccaggaatttgaggctgtggtgagctacgatctcaccactgcattccagcctgagccacagagcgagacctccatttctaaataaaataaaataaaaattaaattaaaatttaaaagactaataggaacactggttgttcacccactgtgtgaagacattggtggaaaagccacgggtaagatagatgaaacctctgctctcggtaagcttgtgttctattggggaatgaagacaataagcaagaaagcacacacttgaaaaaatacaaatctaattacagattggaaacagcattatggaagaaaagcccctcacgtgagcatctccactgtgctggttgctgaaggcagaggctggagtctggaggctgaggctgccttatcttggacccccacctctcagaggacatcaaacaacggaggaacgaacaagagcaaacagacatagcctgtgtccaagaggattttaatcccacattacgagggaattccagaatgtcaacatataaggcctttaaaatcaagaatctcattcatccagaatagtttacgtaccttcctgccaggaggagagaatggggaggaattc

SEQ ID NO: 133 - DNA, 1449 bp, Homo sapiens
gcagtctgcaaacaaggaagagaggcctcaccaggaaatgagtcagcttaatcaactgaaatttgcatttgcaaaaaaggaagagagccctcaccaggaaatgagtcagcttaatcaactaaaatttgcgtttgcatagttctctagactagaagttccagaccaggacacagtgaggaggcagcagtctgcaaacaaggaagagagtcctcaccaggaaatgagtcagcttaatcaactaaaatttgcgtttgcatagttctctaggctataagttccagaacaggacacagtgaggaggcagcagtctgcaaacaaggaagagaggcctcaccaggaaatgagtcagcttaatcaactgaaatttgcatttgcatagttctctaggttagaagttccagaccaggacacagtgaggaggcagcagtctgcaaacaaggaagagagccctcaccaggaaatgagtcagcttaatcaactgaaattcgcatttgcatagttctcgaggctagaagttccagaccaggacacagtgaggaggcagcagtctgcaaccaaggaagagagcccccaccaggaaatgagtcagtttaatcaactaaaatttgcatttgcatagttctctaggctataagttccagaacaggacacagtgagaaggcagcagcctacaaacaaggaagagaaccctcaccaggaaatgagtcagcttaatcaactgaaattcgcatttgcatagttctcgaggctagaagttccagaccaggacacagtgaggaggcagcagtctgcaaacaaggaagagagccctcaccaggaaatcagtcagctgttctcatttaatgttctcactttagaagatcatgcaagggacaaaatctccagaatctttcctgggcggggtcacagctggggtgggaaagttgtagcccctctgaaacttcccgcatagctgtccttctatggaggccaggagcgcatcggggaaggtacagtccacagtccccctccatcccaccagtcaggctccaaggggtcttcacatccacaaaacaccattttcatagatcaatagcacacacaccaagatgcgcaaattcaaaccagatacccaaatggcactcacttattgaatttgcaaggatttttaccactactcttttggtggtagtgcctagtggcaagaatatagaaaaccaggaagtattcagcactgatgtgacagatcagtagctcctgggatttgggcagaattttgtgcagtccagctttttggagaagcttatgtcatttaygcttgctgagtcctgtgtaagccccaaagccaagctttcacaagctaggacttaggcagctttgaaaaggagaagtttatcttctaccctctcaaagagggtgtaggaggttccccttgagagtaaccactggtccctccagatggcttggctg

SEQ ID NO: 134 - DNA, 532 bp, Homo sapiens
gagaaactgatgtctagcaaggaacagatttgcccaaggtcacattgccagctaatggcagagctggccttggagccagtactctcaattccaaaaccagataacaaagaaatgttgggggagggaaggcaggtgagggaactgaacatcctgaagttgctagatgttggtggggggtaggtgtcagggtgtcattgcttttagtcctgggtgagaccgacatctggtgatctgaatgcagacagcccgctttgaactcagctcctctgcctcccagcaagtaatttcatttatctgtgcctcagtttcctcatctgtgaaaatgggggtatactcatatctaccaggtagagctgctgtaaggattaaaggagcctatagataaaacacttagaatagtgctgaagaaagtgacatcttactatcacaaatgctttcttcacctaacccatgtttgcaacctccggtgggggccctgctgkgacagccactgggccagtggtgggcaccagctgggcaaggcagaaaagcc

SEQ ID NO: 135 - DNA, 906 bp, Homo sapiens
cagaaacatccccaccctcaggtcactccagtaccaccagcgacgcyaccaccagtgacgccaagagcatcattctcgcagttcctaaagcagtgttctcacagagcactgcgggaggcccagctctcagtgactggcgtgctcaaggctggacactaaattattcggtttgtacacaatctcatttgacacgctacaaagaaataacgctacttcggttttttgtcgatacaaacaataacacgatccaaaggcctctctcacttccactctttctgaatcacttgataaaagggctggaaaagcttctctttttgagtgtccctgatgttggcatcatctgaaaaacatctatgcgtttgtgtttttgcacagcccaaaaagcaattgctgaaggttttcagggtctctttccaaaagggtaaatgaaagacaacaccgctaccaagaacagacgagaaactcactagaactgcgacaggattcattttgtttgtttttgtttttgtttttgttttgaggtggagtctcgctctgtcaccgaggatggagtgcaatggcgctttctcggcgctctgcaacctctgcctcctgggttcaagcaattctcctgtctcagcctcccaagtagctgggattacaggcacccaccaccacgcccaactaatttttgtatttttagtaaagacggggtttcaccatattagtcaggctggtttcgaactactgacctgcctcagtcctcatccacctgcctcggcttctcaaagtgctgggattacaggcatgagccacggcgcctggccaacaggattcttactgaagggagagcaccagggtcgccgctccggttgtcttcattcccttttgaagaatcagccacatttcccccgtaatccctcaatg

SEQ ID NO: 136 - DNA, 906 bp, Homo sapiens
cagaaacatccccaccctcaggtcactccagtaccaccagcgacgctaccaccagtgacgccaagagcatcattctcgcagttcctaaagcagtgttctcacagagcactgcgggaggcccagctctcagtgactggcgtgctcaaggctggacactaaattattcggtttgtacacaatctcatttgacacgctacaaagaaataacgctacttcggttttttgtcgatacaaacaataacacgatccaaaggcctctctcacttccactctttctgaatcacttgataaaagggctggaaaagcttctctttttgagtgtccctgatgttggcatcatctgaaaaacatctatgcgtttgtgtttttgcacagcccaaaaagcaattgctgaaggttttcagggtctctttccaaaagggtaaatgaaagacaacaccgctaccaagaacagacgagaaactcactagaactgcgacaggattcattttgtttgtttttgtttttgtttttgttttgaggtggagtctcgctctgtcaccgaggatggagtgcaatggcgctttctcggcgctctgcaacctctgcctcctgggttcaagcaattctcctgtctcagcctcccaagtagctgggattacaggcacccaccaccacgcccaactaatttttgtatttttagtaaagacggggtttcaccatattagtcaggctggtttcgaactactgacctgcctcagtcctcatccacctgcctcggcttctcaaagtgctgggattacaggcatgagccacggcgcctsgccaacaggattcttactgaagggagagcaccagggtcgccgctccggttgtcttcattcccttttgaagaatcagccacatttcccccgtaatccctcaatg

SEQ ID NO: 137 - DNA, 576 bp, Homo sapiens
cacaatgcttccctctccggagcaggcttcatttgtctatttgtctttgaccaacaccggccattgattctagaggccgttctgtaagccaactgcttttcctaacccttgctgccttttgttcttgctggctttccctmacactttctacactttcttttgttgttatcattgttgtttttagagacaggctcttgctctgttgcccacagcctgggcacgatcagtagcgcgatcctgactcactgtagcccagaactcctgggctcaagggatcctcccaccttagcctcccaagcaggtgggagtatgggtgcacgccaccatacctagctaatctttttattttttgtagagatggggtctcactaagttgcccaggctggtctcaaactcctggcttcaagtgatccacccacttcagtcttccaaagtggtaggattacaggcatgagctaccatacctggccatagacactttcttttaatgaagtggtaggtaaacaccaccaccaccaaacaattagaggtgactgtgaggagcctgggaagccagtacctggtcatccagggaag

SEQ ID NO: 138 - DNA, 620 bp, Homo sapiens
tagccaagtgtggtggtgcatgcctgtagtcccagctactcaagagtctgaggcaggagaatagcttgaacctgggaggaggaagttgcagtgagccgagatcgcacccctgcattccagcctgggcaatagactgagactccgtctcaacttaaaaaagagaaaaaaaagtgatttacatactcgagaatgctacgcagtggttacaaacaatgaggatgaagactccttcatgatacacagttaagtgaaagaaacaagtccaggacaatatgccagggccagccatttcagttaaaaaaaaaargggtggggggaaatgggagagtgggagagttctgaaaagggatttttattttatctttttattttttgtagagacagggtctcactatgttgcccagactggtctcagacacctagcttttgatcttccctttttcatttttgttaagacccttttcgttcaagggtctgctatggataacccactttttattattacatgctcttatagatctatccattcctggggtaaaaaaaaaaatccagttttaagtgacttatatttttatttggctctggagttctgatttgtatcacaatagaatacatttaca

SEQ ID NO: 139 - DNA, 633 bp, Homo sapiens
atctaaaataaaagttgggggaaaacggaagtaaaataaatccataaactttcttgatgtttaaagtactatgcaagcccacgaaaacatatctgcaggttgaatctggccctcgggccaccagcttgagacctctggggttggtgagggcctcgagaagccccagacaccctgaagtgaggtggrgagtggtgtcattaggcagcagatggcccaacattagttgaatcctcagccaaggggctgggatgtgggactcggtgtggttaagttctgacaaagagggtaagggtagaagatgaagttctgttaagacagaaccatccatatgtcctgggttctgctgcctcatgggcattcccacccagccagcccaagtgtttctgggtgcgccaggtgctggcaaacctgggagaccaaggagcatgtaaggagaccagaaactcccactttcctagagccacccaggaggctcaacacggctgtctcgggggttgtccgtgggctatctggagagacaagcgccagagtttgccacatgaccgcattcaaaaatctggaccataagtaacccccacaccttccttgcttcaaaggacctgagatccctcccttctaccctccacagtgtcc

SEQ ID NO: 140 - DNA, 551 bp, Homo sapiens
cactgtgcaggaagcagagagcctcacttgcctcctccgctcaaacactcaaacccaaatgagtagaacacattccacaactcccaccacaagccccacttctctctgccagtatcctactttaatgcccaggtcccaagcctgtattcaagtctacaaaatggtgagagtcaagagcatttctagtrgcccctagaatgttgcagaggcagcaatggttgcagaggcaccaatgagataataattgcaaactgtgaagtgtttcaacggggttacaaactcacagtgcaagttggtaataagccaggtaaggaaggccagttgtgggctgtgttgaaccaggaagcacatcccagtatccaaaggggtcacacagaaatgtcggccaggggctgccaggcctgatttatagaaaaatcaataaatccagccatttagtgtggtggtgaagaggacagaagccggggctggtggcctgggtccagcattaaccagctctgaggccttggggggttagttgacctctctgtgcctcattttgcttgtcttca

SEQ ID NO: 141 - DNA, 551 bp, Homo sapiens
cactgtgcaggaagcagagagcctcacttgcctcctccgctcaaacactcaaacccaaatgagtagaacacattccacaactcccaccacaagccccacttctctctgccagtatcctactttaatgcccaggtcccaagcctgtattcaagtctacaaaatggtgagagtcaagagcatttctagtggcccctagaakgttgcagaggcagcaatggttgcagaggcaccaatgagataataattgcaaactgtgaagtgtttcaacggggttacaaactcacagtgcaagttggtaataagccaggtaaggaaggccagttgtgggctgtgttgaaccaggaagcacatcccagtatccaaaggggtcacacagaaatgtcggccaggggctgccaggcctgatttatagaaaaatcaataaatccagccatttagtgtggtggtgaagaggacagaagccggggctggtggcctgggtccagcattaaccagctctgaggccttggggggttagttgacctctctgtgcctcattttgcttgtcttca

SEQ ID NO: 142 - DNA, 551 bp, Homo sapiens
cactgtgcaggaagcagagagcctcacttgcctcctccgctcaaacactcaaacccaaatgagtagaacacattccacaactcccaccacaagccccacttctctctgccagtatcctactttaatgcccaggtcccaagcctgtattcaagtctacaaaatggtgagagtcaagagcatttctagtggcccctagaatgttgcagaggcascaatggttgcagaggcaccaatgagataataattgcaaactgtgaagtgtttcaacggggttacaaactcacagtgcaagttggtaataagccaggtaaggaaggccagttgtgggctgtgttgaaccaggaagcacatcccagtatccaaaggggtcacacagaaatgtcggccaggggctgccaggcctgatttatagaaaaatcaataaatccagccatttagtgtggtggtgaagaggacagaagccggggctggtggcctgggtccagcattaaccagctctgaggccttggggggttagttgacctctctgtgcctcattttgcttgtcttca

SEQ ID NO: 143 - DNA, 551 bp, Homo sapiens
cactgtgcaggaagcagagagcctcacttgcctcctccgctcaaacactcaaacccaaatgagtagaacacattccacaactcccaccacaagccccacttctctctgccagtatcctactttaatgcccaggtcccaagcctgtattcaagtctacaaaatggtgagagtcaagagcatttctagtggcccctagaatgttgcagaggcagcaatggttgcagaggcaccaatgagataataattgcaaactgtgaagtgtttcaacggggttacaaactcacagtgcaagttggtaataagccaggtaaggaaggccagttgtgggctgtgttgaaccaggaagcacatcccagtatccaaaggggtcacacagaaatgtcggccaggggctgccaggcctgatttatagaaaaatcaataaatccagccatttagtgtggtggtgaagaggacagaakccggggctggtggcctgggtccagcattaaccagctctgaggccttggggggttagttgacctctctgtgcctcattttgcttgtcttca

SEQ ID NO: 144 - DNA, 551 bp, Homo sapiens
cactgtgcaggaagcagagagcctcacttgcctcctccgctcaaacactcaaacccaaatgagtagaacacattccacaactcccaccacaagccccacttctctctgccagtatcctactttaatgcccaggtcccaagcctgtattcaagtctacaaaatggtgagagtcaagagcatttctagtggcccctagaatgttgcagaggcagcaatggttgcagaggcaccaatgagataataattgcaaactgtgaagtgtttcaacggggttacaaactcacagtgcaagttggtaataagccaggtaaggaaggccagttgtgggctgtgttgaaccaggaagcacatcccagtatccaaaggggtcacacagaaatgtcggccaggggctgccaggcctgatttatagaaaaatcaataaatccagccatttagtgtggtggtgaagaggacagaagccggggctggtggcctgggtccagcattaamcagctctgaggccttggggggttagttgacctctctgtgcctcattttgcttgtcttca

SEQ ID NO: 145 - DNA, 690 bp, Homo sapiens
gcccacagacatgcaygcagcttctgacacaagtatacacacagacccatccccacacgtaccacacaccctcatgtacacacatgtagactcataagtgctcacatgtgcactcacacataggcacatacacacacaggctcaccagcccccaaaccctccaagcatggctggactccagtcctcaccccaacatctattcctagtctatccccactctcaacccccctggagaccccctcctcctgcagcttcagcccccactaggagatataattacagaaagacagaacttggcactcaaagcacctcccctgccataagccccttccctggggcccagcccaggagaactagagctgagttccagggcctgtggccagggctgcctcccccaacacagccctgagcaactgcagaggggggccccgggcaggaagaaaacacacttgagaatggcaaagacaggagagggagggcagggaagaaatggccaggcccttcaagacaggaaggagagaaggaaaagccagccagagctgttatatttccatgatcgtgagcactgccaatgttcactgagcacttgccatgtgtgggcagcatttatgctaaatactcacaaaccctctgcaagctccaccctagggatggggtaagtggagtttcaagaggctgcatcacttggtc

SEQ ID NO: 146 - DNA, 690 bp, Homo sapiens
gcccacagacatgcatgcagcttctgacacaagtatacacacagacccatccccacaygtaccacacaccctcatgtacacacatgtagactcataagtgctcacatgtgcactcacacataggcacatacacacacaggctcaccagcccccaaaccctccaagcatggctggactccagtcctcaccccaacatctattcctagtctatccccactctcaacccccctggagaccccctcctcctgcagcttcagcccccactaggagatataattacagaaagacagaacttggcactcaaagcacctcccctgccataagccccttccctggggcccagcccaggagaactagagctgagttccagggcctgtggccagggctgcctcccccaacacagccctgagcaactgcagaggggggccccgggcaggaagaaaacacacttgagaatggcaaagacaggagagggagggcagggaagaaatggccaggcccttcaagacaggaaggagagaaggaaaagccagccagagctgttatatttccatgatcgtgagcactgccaatgttcactgagcacttgccatgtgtgggcagcatttatgctaaatactcacaaaccctctgcaagctccaccctagggatggggtaagtggagtttcaagaggctgcatcacttggtc

SEQ ID NO: 147 - DNA, 986 bp, Homo sapiens
tgcatacctgcatgtgtacccacacacacatgcaaaagtacagatcctgacactggcgtgaggccactgacaccctggtgtctctagagagttctagagaggttataagacatcacagtgtgtattacacaacttgttaatcaaaggaaatgcttacctcagccagcaaagagtcttcgtgacttgtttyctattttaaaggtgtttatttgaggcattcacatcgtctgaatctggtaagcaaaggcgtggttagcatgttcaggctcacagatttccctgattaaagaaaatagaaggaaacatctactgtgcgaacagttatttgccaagatttccttaattattcacatgaaataaatgacatcaagtgatacacagaatgtgacatgagttgtgttttcaaaactgcctgttaggtaaaaggaatagaaacataaattccccttcataggagaaaaatgataatgcctaactctttaagagcattgctggctgggcgcagtggctcacgcctgtaatcccagcactttgggaggctgaggagggtggatcacatcacctgagatcaggaattcaagaccagcctggccaacatagtgaaacctcgtctctactaaaaatataaaaattagccaggcatggtggtgtgcgcctgtagtctcagctacttgggaggctgaggcaggagaaacgcttgaacctgggaggcagaggttgcagtgagtcaagatggtgccactgccctctagcctgtgcaactggagcaaaactccgtctcaaaaaaaagcattgctggtcgggcgcggtggctcatgcttacaatcccagtgggattacagccctgggaggccgaggcaggtggatcacctgaggtcaggagttcgagaccagcctggccaacatggtgaaatctcgtctctcctaaaaatgcaaaaaattaaccaggcgaaataaaaatagaaaaaattggctgggtgtcgtga

SEQ ID NO: 148 - DNA, 670 bp, Homo sapiens
ttctgccctttagctgtgactcagcaattaggatcagatttcccatcccgagggttgtccttgtgacctgccagatggatgatcatcacccccataccagcatcgagtgagaagacctcgagctggggcctgcacaagggtggctgcagccgtgatgaagtggcagtgatttgcagagccttgggctgcctctctgctgcagggactgtgacaaatcraagaggaagccttctagagccctgcatcatgtgcacttcttggcacttgtgaaatatttcataatcccaattgcgtaggtagctccagttctgccgcccactgtccgtgtgacctcggtgaagtcacttcatctctgagcttcagtttcccaggctgcagaacaagtatcagagcgagaaccccttcattcgtttgttcattcactgacttacacactcagtcgctccacgaacatgtgctgagcagctactatgtgctggatgcagtgctcagccctgcggatccagccgtgaatgcctaataaggacccagccctggcagagtggacctccctttctactgagaggacagtcaacaaacaaggttatccacatcgacacattgttggccgggtgcggtggctcacacgtgtaatctcagcactttgggaggctaaggcaggtggattgct

SEQ ID NO: 149 - DNA, 670 bp, Homo sapiens
ttctgccctttagctgtgactcagcaattaggatcagatttcccatcccgagggttgtccttgtgacctgccagatggatgatcatcacccccataccagcatcgagtgagaagacctcgagctggggcctgcacaagggtggctgcagccgtgatgaagtggcagtgatttgcagagccttgggctgcctctctgctgcagggactgtgacaaatcaaagaggaagccttctagagccctgcatcatgtgcacttcttggcacttgtgaaatatttcrtaatcccaattgcgtaggtagctccagttctgccgcccactgtccgtgtgacctcggtgaagtcacttcatctctgagcttcagtttcccaggctgcagaacaagtatcagagcgagaaccccttcattcgtttgttcattcactgacttacacactcagtcgctccacgaacatgtgctgagcagctactatgtgctggatgcagtgctcagccctgcggatccagccgtgaatgcctaataaggacccagccctggcagagtggacctccctttctactgagaggacagtcaacaaacaaggttatccacatcgacacattgttggccgggtgcggtggctcacacgtgtaatctcagcactttgggaggctaaggcaggtggattgct

SEQ ID NO: 150 - DNA, 587 bp, Homo sapiens
tgccccagacaacaacaagccaagatgccactctyctactcggcttgcaaaagaacctccttgtctagggttttctccaagacgcaccatggctgggctgttgctgtgtttcccgaaatttgaacctccatatcagtgtctgtccatcatctgagacccctggcacgagctgcggtggctcaaggcgggtttcttttcctgaggccagaaggggaagcgcaggtagggagtcgtgcctgtgggtaccgggaagccacaggttgctcaacctcccgagggggtaaccggggcttacggtgcagccaggccccctttggtttttaggaaatggtgaaagcggtgacaatgatgacgtggctttgaaagttccctctggtctctttcgcagcggccacaggacctgagccagcgcctcccttccagaacctatgtttttgttctctcagctgccctgcctcctccccatggtcatgacaatgagataaagcagcaggcaccgtgcctcattcagctatttatgtatttatttatttttttaagacagagtctccctctgtcacccaggctggagtgcagtggcgcaatct

SEQ ID NO: 151 - DNA, 602 bp, Homo sapiens
ggtcaggagcttgagaccagcctgaccaacatggagaaaccccatctctactaaaaatacaaaattagccgggcatggtggcacgtgcctgtaatcccagctacttgggaggctgaggcaggagaatcgcttgaacccgggaggcagaagttgcagtgagccgagattgcaccattgcactctagcctgggtgatgagagcaaaactctgtctcaaaaaaaaaaaaaaaaaaaaagattaccctgttgtctctacaaggaactgaggacargggtttggcctttccagatctttccaggcagaatcaaaggcttctcgcagcacttgttagtatggcccgttcaatgttcaatgctgtgagaagaaaatttctgttatttataaatcacccaatctaaggtattttattacagcagcccaaatggactgcttgtcacatatccctaaaaagttatttacatgccgtctttccaactagattgcaagtccctggagaagaggcacatactcagctacctattgtcagcataacacctgaaaaacagaaagcatttaatatatcttagttaaatgagtgcgcatgaaaattagaagcttaaacc

SEQ ID NO: 152 - DNA, 1172 bp, Homo sapiens
tttgttgtatcttagctaatgccgtttcaaatggagaagacggtttccagagaatcttacagcgttagtgctacgtaaggtgtttggtgatgctgctacagcttctctgaaagctaacaagttaccaactttgagtgttttcacgttatcacctttcttttgtatgccctctggtggagtgatgataataagcggcaagtgagtagaataggtcaagaagaaactaaaatacaagaacctagatcacaaactggataattaacttaaaaaaaatagatttgaaaattttaactttagttaagcctcctgaataattacaatacgattagaaagaatgaaaagaaaatgagccacagatttgaagagagatctggcttaggatgaaaaaataacctattgagcacacccaaaatgtttggatctcttaaaagaattcctgcttaaatatacttctgtcccttgaagtattttaatatttttccatctttagttcaaagacctctttctctcaactgtagtaataatttcagtgaacctttattgactaccatgtgtcggttaacgtacacaagtggtgaagccagtgttcaaactccagcagtggaggaccagagtcagtgccctaaatcttcatgcttcactaccacctttgtgccaaggtcgtgtggatggtacagggaccggagaatttcctttggagcaatagttatggacagaaaaatgcttggtaagttcacagtgtgtgttcctcagttccattttccagtatgtttatagagagccttttcttccagaattgctgaaagatgtgttattttatcttttttgaaatagaaatcacatgaaatgtttctacactcagatgctactgacttgctgaaataatataaagtttctcttagtgtctatatttcatatttatggcagtaacagcttaattgttcctccacttttggctttagcagggtttgttcatatactgtgtagttattacaaargaaatgtagtataccttactgggtaaggacaaactcccactgagatgcttgtcttacttgcagtaggaaccctctaaaaaagaattcgctcagaagatatcattattcttagtatctctgcaagtcagagcgctgtcttcttaatagctgcataatatttcactgtatgaatgc

SEQ ID NO: 153 - DNA, 1172 bp, Homo sapiens
tttgttgtatcttagctaatgccgtttcaaatggagaagacggtttccagagaatcttacagcgttagtgctacgtaaggtgtttggtgatgctgctacagcttctctgaaagctaacaagttaccaactttgagtgttttcacgttatcacctttcttttgtatgccctctggtggagtgatgataataagcggcaagtgagtagaataggtcaagaagaaactaaaatacaagaacctagatcacaaactggataattaacttaaaaaaaatagatttgaaaattttaactttagttaagcctcctgaataattacaatacgattagaaagaatgaaaagaaaatgagccacagatttgaagagagatctggcttaggatgaaaaaataacctattgagcacacccaaaatgtttggatctcttaaaagaattcctgcttaaatatacttctgtcccttgaagtattttaatatttttccatctttagttcaaagacctctttctctcaactgtagtaataatttcagtgaacctttattgactaccatgtgtcggttaacgtacacaagtggtgaagccagtgttcaaactccagcagtggaggaccagagtcagtgccctaaatcttcatgcttcactaccacctttgtgccaaggtcgtgtggatggtacagggaccggagaatttcctttggagcaatagttatggacagaaaaatgcttggtaagttcacagtgtgtgttcctcagttccattttccagtatgtttatagagagccttttcttccagaattgctgaaagatgtgttattttatcttttttgaaatagaaatcacatgaaatgtttctacactcagatgctactgacttgctgaaataatataaagtttctcttagtgtctatatttcatatttatggcagtaacagcttaattgttcctccacttttggctttagcagggtttgttcatatactgtgtagttattacaaaagaaatgtagtataccttactgggtaaggacaaactcccactgagatgcttgtcttacttgcagtaggaaccctctaaaaaagaattcgctcagaagatatcattattcttagtatctctgcaagtcagagygctgtcttcttaatagctgcataatatttcactgtatgaatgc

SEQ ID NO: 154 - DNA, 1357 bp, Homo sapiens
tacttgtgactgctgaggccacagactttgtttgtatgataaaagtcttactttgtaattaaaacattcctcaaatgtttatcttaggaaataattctggaataagaagctaagattatttttctagttttctttttttttyttccttgagatggagtcttgctctgttgcccaggctggagtgtaatggtacaatcttagcttactgccacctctacctcctgggctcaggtgactctcccacctcagcctcccaagtagctgaatttacaggcacttgccatcatgcccagctaatttttgtatttttgtagagacggggtttccccatgttggccagactggtcttaaactcctgacctcaagtgatctgcccacctcagcctcccaaagtgccgggattacaggtgtgagccaccgcacctggcctatttttctagttttctaatgaggggttagaaatacaacattttcacatagatatctattgggaatgatgcttgcgaaattgaagtaaggagaaaatgggtcttgtgatctttggaaaggtaaggtaccactgtcattgggaactttaaatttggaatgctaggcccaagtgggaaaatcatgacaagggatgatcctctgcccttaatggacattcagtcattcagtgcctactgtgtgataggtgatgaagacaggtggacaggtagactggttttttgtcttttccaggcaaaggttgaataatcaaaaacaaagtcagtctcttcactgagcactaactgtaggtctctgatggtctttatgtattgctggaaatagggagaatgttgaaatgatagcatgttggagaagtaggaatatattttcccactaagaaagctgggacctactgcaaatgagtaaatgaggtgattgctggcctaagtgtaatgtagtgctttattgcatgtcagtgcatttgacatgtgtgcttgctttctgttggcagatataccacaatggtgtcctagaattctgcatcattacaactgatgaaaatgaatgtaattggatgatgtttgtgcgcaaagccaggtatgagtagtcttggatgagaaaaaatagttaccatttagatgtttttcaataggaagctttgcataaaagaagaaagagttaagaatccaaattacaccaacacctggacatacttaaagcccaaggcagccaggcatggtggctcacacctttaatcccagcacttggggtggctgaggtgggagaatcgcttgaggccaggagttcgagaccagcctgggaaacatagcaagaccctcatctctaaaaaaagtttttttcaaattagctgggtgttgtggtatatgca

SEQ ID NO: 155 - DNA, 2330 bp, Homo sapiens
acagagtgagactccatttcaaaaaaaaaaggataggaagaatgaatttttcctatacgattttgctgtgtatggaggctcatgaggcgttccatgtaaaagccccaggtaaaagtaccacacttctttccacattaattctagacctggtacacttgcagttattgccatttaatttcaaacctggtggaatataaagcccaattccccatgctctctgggaatagttattagagtaattttaactgattctcttctattaacccagggaacgggtactgaagtgtgaaccagatgaatgggcagccctaaataaaatgccaagttaattacagctctggacaaaaagctaccaactcagaagaggactatcagaaaaaattgctgctactatccactagaattctaatactctacctctacaaaaaccttattttccattacctatcacatgttgaaccaccattcaggcctgcttaccttctcccttctaccttctacccttaaaggggctctgatctcttctagactccatttagaattgataacagagttaagtgttgaaatgcagtaggtctcccttaccactcacctggggcagggatggcactgtgagtgggtgaggcagccaatcccaggtgacttcctgagactggcaaggcattgctcacagaggatgaagtcagctgctccatccccactggactcaggttcatttcattcatcctagaaaagagcacamacaactagttatgcaaaaatttactccaatgactctgtattaagatactgaagaaactgaaacagtggggatggggaaatgggacttggccaactattagttcacttttacgctcaacaattctcttagatagctagtgccatattctttctactgataagaaaactgagattgagacattaaaaactcaattcaatgtcacatagcagaaataggatttgaattctgccttgttcgaaactctaggcacaccatctaaagcaaagtctgcaattcttagagcacaatggcaatgacagtttttttttaaatcactcaagcttcatcttttataatatttatttttctccaaatggcttattatttcaaaccagtagtgttttaggcagcgcattttaacctactcaagtaaattttactaatcatttttaataggagttaaagatccagattatcgatgatgtgaaaagcatcgtattttccccattcagcaacagtttactaagattctgtatcagtatattaatgtcctccaaatattgagggtcattatgtaagctttgctaccacttcacttaaaatgacttcaaatcctcacaccaatactgcaacgtaagatagatgagggaactatggctcagagaggccatgtcatatgccccaaatcacatagctattaagtgaaagatcacagatcaaactgcaaaacactgccaaaaagtttttcattgcaccaaacttttttttaactgcaccaaactttttttttaactacagactatttttggcaaggtgaagaacctaggaatcaccttttctatgcaaaccatcttgcactgccattacaaatgtctttcgaataagagtaatactgatttgaataaaacagcactgaaggttgttatcaaaaagtattagttcttatatcataatttagagactgccatactataaacattacagaaccactaggctagccaacaggttacccaaaaggggctctctaatgacctccagtccttacactgggctttattctctgcgtatgggagggggtgaagcagagaagaggaatcaaatgaggttacatattccttagcagtgaaatcaaatctaaataggtttttaattctgaaaaatggcaatgccattttatcaatcaacctgaaaataataatagctaaaatttatggctcccttaccatgtgctatgtattgggctaagtgatttatatgtaactatctctcttaatcttctttttttttttttttttttttttgtttttgagacagggtcttgctcagtagctgcaagctggagtgcagtggcgtgatcacagctgactgctgcctctacctcctaggctcatgagatcttcccacctcagcccccaagcagctgggaccacaggcaagtgccaccatgcctggctaatttgtttttattttgcagagatggggtctccctatgttgcccaggctggaggtaggtattattcttaatcccactttaaagatgaggaaacttaagattcaatgatgctaggaaacttaacccagaatcacataaccagtaaggagagctggg

SEQ ID NO: 156 - DNA, 655 bp, Homo sapiens
ccaggaacctgctctgggcttggggcccaggccgatgcgatgcggcatcacagcagccctgccagctccctctccgggcatcccccagccttcgccaggagtgggagcacagccaggcagctggggtggggcttggcagggcttccctgcccagtagggacttggccagtgctgggtgccctgactgcgggtctaatgatggagagaaaggagctaatcaccagtctggccctgccagggactgggcccgggacccaggacaggagaagggtggctgggtggggcgaaccataatgggggttgggtgggcaaagtgcaatggcaggttcaagactgaggtgccagaacctcyggcctagttggcagaaagaatctacagtggtgccaagaagggctgccaagggccaaaactggctccttcctcatccccagggaaactggcctggcctccttatgtccctttgaacgcaggtagggaaatcaaggcaaatactaagaatatctcaagggcctgcgcttctgctgcccacatttgggaaccttttcagagggcttccagaatagaggctagtggcctgcacccctcccatccaccccgggctcaaaatgccagcttgccacccctgctgctaccctgggatgcttgcatgtttgg

SEQ ID NO: 157 - DNA, 1276 bp, Homo sapiens
actttaccagcaaagccgtgctcgctggcagcagcccccatgtaggaagaggggcagaggcaggggcctgagtccccatcaagcagggcaccttcaggactcagacaccaggccactcttgatttcaaaactcctgagtcctgattctcctgtctcagacccttatatgcaggagggtgcagacccaggggtctcccagctcagaaagcattaggatcagctcggtagctggttcaaaagttggagtcccaggcccctacccagatccactgaaacagaacctcccagctgggacctgggcatctacttcacaaatcagttcccttgatgaatctgacataggtgggccagggcctaaatgtggcccccaaaatggtgtgggatggagacagtggggtttgaagtcagagacccttggggttgattctgggctccttcaagaagtagcagcagggatcttgggcaagtcactcagcttgcaaccctccttgacatataagcctcagtttcccaatctgtagcatggggacaagggcagtgcctgctgtggctgcctcctggggctcaaggggacaagagcatgcctgtgctctgcccacccacacattcacagctccaaggggctgagcaaggtgttccctcctcatcttctccagatgggccacttctggggacaccacacgtcctgcaggctgatgctgtggtggattccaggcaccgtgagagggaagagaagcctctttagggctggaagatccttcaaagcattcactccacacactgtgttgttgttaggagacatctaccataccctggcatgttcaggatgcaaaggtgaacagaatccacttgctgcccctcagggggcctaacaggagcctgagagatggtcgtctyggagataacagagagggtcccaacagagacaaagtgactcggagctctgggaggttggaggagagagaggtggggtccacctaggagttgaagatgcagggagggtgccccagaaatgggggtgactttgtgggggtttgaataggggttggcttcagttgtgcagaggatgctgggatataggggagtctcgtgaaaaggtcaagcctctccaacaccatcattcattcattcattcattccaccaatatagattgagtcccttctctgtattaggtgctgtcttgggtgcagaagatcagtgaaccctcgggtcactggtattctagaggggagaggcagacacaaggatgatacagatagaaaatgccacaggtca

SEQ ID NO: 158 - DNA, 1276 bp, Homo sapiens
actttaccagcaaagccgtgctcgctggcagcagcccccatgtaggaagaggggcagaggcaggggcctgagtccccatcaagcagggcaccttcaggactcagacaccaggccactcttgatttcaaaactcctgagtcctgattctcctgtctcagacccttatatgcaggagggtgcagacccaggggtctcccagctcagaaagcattaggatcagctcggtagctggttcaaaagttggagtcccaggcccctacccagatccactgaaacagaacctcccagctgggacctgggcatctacttcacaaatcagttcccttgatgaatctgacataggtgggccagggcctaaatgtggcccccaaaatggtgtgggatggagacagtggggtttgaagtcagagacccttggggttgattctgggctccttcaagaagtagcagcagggatcttgggcaagtcactcagcttgcaaccctccttgacatataagcctcagtttcccaatctgtagcatggggacaagggcagtgcctgctgtggctgcctcctggggctcaaggggacaagagcatgcctgtgctctgcccacccacacattcacagctccaaggggctgagcaaggtgttccctcctcatcttctccagatgggccacttctggggacaccacacgtcctgcaggctgatgctgtggtggattccaggcaccgtgagagggaagagaagcctctttagggctggaagatccttcaaagcattcactccacacactgtgttgttgttaggagacatctaccataccctggcatgttcaggatgcaaaggtgaacagaatccacttgctgcccctcagggggcctaacaggagcctgagagatggtcgtctcggagataacagagagggtcccaacagagacaaagtgactcggagctctgggaggttggaggagagagaggtggggtycacctaggagttgaagatgcagggagggtgccccagaaatgggggtgactttgtgggggtttgaataggggttggcttcagttgtgcagaggatgctgggatataggggagtctcgtgaaaaggtcaagcctctccaacaccatcattcattcattcattcattccaccaatatagattgagtcccttctctgtattaggtgctgtcttgggtgcagaagatcagtgaaccctcgggtcactggtattctagaggggagaggcagacacaaggatgatacagatagaaaatgccacaggtca

SEQ ID NO: 159 - DNA, 1276 bp, Homo sapiens
actttaccagcaaagccgtgctcgctggcagcagcccccatgtaggaagaggggcagaggcaggggcctgagtccccatcaagcagggcaccttcaggactcagacaccaggccactcttgatttcaaaactcctgagtcctgattctcctgtctcagacccttatatgcaggagggtgcagacccaggggtctcccagctcagaaagcattaggatcagctcggtagctggttcaaaagttggagtcccaggcccctacccagatccactgaaacagaacctcccagctgggacctgggcatctacttcacaaatcagttcccttgatgaatctgacataggtgggccagggcctaaatgtggcccccaaaatggtgtgggatggagacagtggggtttgaagtcagagacccttggggttgattctgggctccttcaagaagtagcagcagggatcttgggcaagtcactcagcttgcaaccctccttgacatataagcctcagtttcccaatctgtagcatggggacaagggcagtgcctgctgtggctgcctcctggggctcaaggggacaagagcatgcctgtgctctgcccacccacacattcacagctccaaggggctgagcaaggtgttccctcctcatcttctccagatgggccacttctggggacaccacacgtcctgcaggctgatgctgtggtggattccaggcaccgtgagagggaagagaagcctctttagggctggaagatccttcaaagcattcactccacacactgtgttgttgttaggagacatctaccataccctggcatgttcaggatgcaaaggtgaacagaatccacttgctgcccctcagggggcctaacaggagcctgagagatggtcgtctcggagataacagagagggtcccaacagagacaaagtgactcggagctctgggaggttggaggagagagaggtggggtccacctaggagttgaagatgcagggagggtgccccagaartgggggtgactttgtgggggtttgaataggggttggcttcagttgtgcagaggatgctgggatataggggagtctcgtgaaaaggtcaagcctctccaacaccatcattcattcattcattcattccaccaatatagattgagtcccttctctgtattaggtgctgtcttgggtgcagaagatcagtgaaccctcgggtcactggtattctagaggggagaggcagacacaaggatgatacagatagaaaatgccacaggtca

SEQ ID NO: 160 - DNA, 1276 bp, Homo sapiens
actttaccagcaaagccgtgctcgctggcagcagcccccatgtaggaagaggggcagaggcaggggcctgagtccccatcaagcagggcaccttcaggactcagacaccaggccactcttgatttcaaaactcctgagtcctgattctcctgtctcagacccttatatgcaggagggtgcagacccaggggtctcccagctcagaaagcattaggatcagctcggtagctggttcaaaagttggagtcccaggcccctacccagatccactgaaacagaacctcccagctgggacctgggcatctacttcacaaatcagttcccttgatgaatctgacataggtgggccagggcctaaatgtggcccccaaaatggtgtgggatggagacagtggggtttgaagtcagagacccttggggttgattctgggctccttcaagaagtagcagcagggatcttgggcaagtcactcagcttgcaaccctccttgacatataagcctcagtttcccaatctgtagcatggggacaagggcagtgcctgctgtggctgcctcctggggctcaaggggacaagagcatgcctgtgctctgcccacccacacattcacagctccaaggggctgagcaaggtgttccctcctcatcttctccagatgggccacttctggggacaccacacgtcctgcaggctgatgctgtggtggattccaggcaccgtgagagggaagagaagcctctttagggctggaagatccttcaaagcattcactccacacactgtgttgttgttaggagacatctaccataccctggcatgttcaggatgcaaaggtgaacagaatccacttgctgcccctcagggggcctaacaggagcctgagagatggtcgtctcggagataacagagagggtcccaacagagacaaagtgactcggagctctgggaggttggaggagagagaggtggggtccacctaggagttgaagatgcagggagggtgccccagaaatgggggtgactttgtgggggtttgaataggggttggcttcagtygtgcagaggatgctgggatataggggagtctcgtgaaaaggtcaagcctctccaacaccatcattcattcattcattcattccaccaatatagattgagtcccttctctgtattaggtgctgtcttgggtgcagaagatcagtgaaccctcgggtcactggtattctagaggggagaggcagacacaaggatgatacagatagaaaatgccacaggtca

SEQ ID NO: 161 - DNA, 1276 bp, Homo sapiens
actttaccagcaaagccgtgctcgctggcagcagcccccatgtaggaagaggggcagaggcaggggcctgagtccccatcaagcagggcaccttcaggactcagacaccaggccactcttgatttcaaaactcctgagtcctgattctcctgtctcagacccttatatgcaggagggtgcagacccaggggtctcccagctcagaaagcattaggatcagctcggtagctggttcaaaagttggagtcccaggcccctacccagatccactgaaacagaacctcccagctgggacctgggcatctacttcacaaatcagttcccttgatgaatctgacataggtgggccagggcctaaatgtggcccccaaaatggtgtgggatggagacagtggggtttgaagtcagagacccttggggttgattctgggctccttcaagaagtagcagcagggatcttgggcaagtcactcagcttgcaaccctccttgacatataagcctcagtttcccaatctgtagcatggggacaagggcagtgcctgctgtggctgcctcctggggctcaaggggacaagagcatgcctgtgctctgcccacccacacattcacagctccaaggggctgagcaaggtgttccctcctcatcttctccagatgggccacttctggggacaccacacgtcctgcaggctgatgctgtggtggattccaggcaccgtgagagggaagagaagcctctttagggctggaagatccttcaaagcattcactccacacactgtgttgttgttaggagacatctaccataccctggcatgttcaggatgcaaaggtgaacagaatccacttgctgcccctcagggggcctaacaggagcctgagagatggtcgtctcggagataacagagagggtcccaacagagacaaagtgactcggagctctgggaggttggaggagagagaggtggggtccacctaggagttgaagatgcagggagggtgccccagaaatgggggtgactttgtgggggtttgaataggggttggcttcagttgtgcagaggatgctgggatataggggagtctcgtgaaaaggtcaagcctctccaacaccatcattcattcattcattcattccaccaatatagattgagtcccttctctgyattaggtgctgtcttgggtgcagaagatcagtgaaccctcgggtcactggtattctagaggggagaggcagacacaaggatgatacagatagaaaatgccacaggtca

SEQ ID NO: 162 - DNA, 1008 bp, Homo sapiens
tacaattattctgctcacttcacagttgggaaaactgaagcacccagaagctcagtgacttacccaaagtcacccacccagctaattcatggtggaaccagcattgagctccagtggtcttgttccagagctcctttttgagaaccactgagatagacttagactgaattttagtttctgctccttactagctgtgtgacctcaacatgttactcaacctctcaaagcttcaatatcctcatctacaaaatgaagaattcagtgggcatatgtacttctgtctgcctggggttcgttcctcttggaaattgctcctcctttccctctaaccatcagtgccagttggaatggtcatgttcttaacagccccattactaattaatccaagaatagacagctgatctaagctgggcctatctaaactcttctctgagaattttttttctcctaggctgaagtgcagtggtgcaatcttggctcactgcaacctccgcctcccaggttcaagcgattctcgtgccttagcctcctgagtagctgggattacaggtgcgaaccattacagttggataattttggtattttcagtagagacaggagtttgccatgttggccagactggtctcaaactgggcctcaagtgatctgcccacttcggcctcccaaagtgctgggattacaggtgtcagtcaccgtgcctggcctctctgggattttttaaactaaaactragaaagaaaattagtccctctctggtggaggaaaggcaaatatgtaaaactcctgagctactggaagtcacatgctccagtgtgtggtagaggttaagtttgcagagaataaaaacaacacaaaaagagaaggaagagactgaaaaggctttcaaaactcctgcatttgcctaagccagttcgacttgggtttatgacataggaaagaattttcatcagtaagaaatagtagtacctgtttcctagggttgttttaaagatgggttaccatgatgca

SEQ ID NO: 163 - DNA, 1008 bp, Homo sapiens
tacaattattctgctcacttcacagttgggaaaactgaagcacccagaagctcagtgacttacccaaagtcacccacccagctaattcatggtggaaccagcattgagctccagtggtcttgttccagagctcctttttgagaaccactgagatagacttagactgaattttagtttctgctccttactagctgtgtgacctcaacatgttactcaacctctcaaagcttcaatatcctcatctacaaaatgaagaattcagtgggcatatgtacttctgtctgcctggggttcgttcctcttggaaattgctcctcctttccctctaaccatcagtgccagttggaatggtcatgttcttaacagccccattactaattaatccaagaatagacagctgatctaagctgggcctatctaaactcttctctgagaattttttttctcctaggctgaagtgcagtggtgcaatcttggctcactgcaacctccgcctcccaggttcaagcgattctcgtgccttagcctcctgagtagctgggattacaggtgcgaaccattacagttggataattttggtattttcagtagagacaggagtttgccatgttggccagactggtctcaaactgggcctcaagtgatctgcccacttcggcctcccaaagtgctgggattacaggtgtcagtcaccgtgcctggcctctctgggattttttaaactaaaactgagaaagaaaattagtccctctctggtrgaggaaaggcaaatatgtaaaactcctgagctactggaagtcacatgctccagtgtgtggtagaggttaagtttgcagagaataaaaacaacacaaaaagagaaggaagagactgaaaaggctttcaaaactcctgcatttgcctaagccagttcgacttgggtttatgacataggaaagaattttcatcagtaagaaatagtagtacctgtttcctagggttgttttaaagatgggttaccatgatgca

SEQ ID NO: 164 - DNA, 1802 bp, Homo sapiens
ctttattttaaataaatgcctcataaatgtgtcaaattaacttctgcaaaattataaaaacaaaaatatttttaaaaggaaaaagattaaaataaagtctatattcctcgatgaagcagatctagatatcagcaatgaagatccaaatttgtagataacagcacagtgttagagctagacgagacagaaaagatctccaaaagttattaggcaatataagttactgtctgattcaaaaatatataatgatgagtaagtatagagaagaaaataatcaattaaaaartaatcccacattggtgttcccactgatctgtaggatatttaagaggtaccttgaaaaaagaacattttactccaaataagtatgggaagtgttaatttaaataaagttccccttctaagttatttctcagcatccttactacactaatatgctaattaatctctatggggaacatatataatatgcagcagttcccagatttattttatcaggaactctaatcatacattaataatataaatttatatatgtaattaaaacataaaaccaacaaacttgtcaatttcccttgaaaacagaccctacaaacacctaacatgctactcatcactgccaacttattttgatatactttcaatagaaagtgcaagaaatagacctttcatctagatatatcaaatattaacattcagccccttttgtttacttctcccctccctccatactcgcgctcgatactctctctcctgtgtgagggcatatatatataatatttatatataacattatatataatatttatatatgtattatataatatataatatataataaatatatataatatatataatacatgtcttgcaatgaatatataaaatgtatgacccccatatatataaagagaggcatatatttttatatatacttatgtattattttccttcctgaacattttgacaggtcattactacatcacaagcttgttacctaacacatcaatacttgtcttctaagaaagaaaacatttgcacaatcacaaaacaattgtattcagaatatttaccattgagacaatactattatctaacaaacagttcatgttcaaatttcacctatcatccaggaatgtccattacaaaaaaatccactgacattttaaataagttatttttatacgtctatctcccatcatacaaccaaaactagtaagaattaatggtgaaataactgtgcaaaagatatttggatttctaacttgcctttagaacaatgcagtccaaatgcattttgaaactttccaaatacagttttaaaacaataagaaaatgtattgacagactaacattgattttcctttcttccttttttttgaaagaaaagagagtctcactctgtcacacaggttggagcacagtggtacctccatagctcaccatcaccacagcctcaaacttcttggccttctacctcagcctctggggtagctgtgactatagtcatgagctatcatatctggatttttttttttcctgctagagatgtgatttagtcttttcatgtttttgcccaacctgatctcaatctcctaagctcaagagatcttcctgctttggcatcccaaagtactggcattactggcatgagccaccaatgcccaggctaatattgattttttttattgcttttactccatttaattttcaagccttgcttaaattagtattctaaatgtttaaaatacttagatccatttgaatcaaatgaatctaaagaagttcacggcacaggtcaa

SEQ ID NO: 165 - DNA, 1802 bp, Homo sapiens
ctttattttaaataaatgcctcataaatgtgtcaaattaacttctgcaaaattataaaaacaaaaatatttttaaaaggaaaaagattaaaataaagtctatattcctcgatgaagcagatctagatatcagcaatgaagatccaaatttgtagataacagcacagtgttagagctagacgagacagaaaagatctccaaaagttattaggcaatataagttactgtctgattcaaaaatatataatgatgagtaagtatagagaagaaaataatcaattaaaaagtaatcccacattggtgttcccactgatctgtaggatatttaagaggtaccttgaaaaaagaacattttactccaaataagtatgggaagtgttaatttaaataaagttccccttctaagttatttctcagcatccttactacactaatatgctaattaatctctatggggaacatatataatatgcagcagttcccagatttattttatcaggaactctaatcatacattaataatataaatttatatatgtaattaaaacataaaaccaacaaacttgtcaatttcccttgaaaacagaccctacaaacacctaacatgctactcatcactgccaacttattttgatatactttcaatagaaagtgcaagaaatagacctttcatctagatatatcaaatattaacattcagccccttttgtttacttctcccctccctccatactcgcgctcgatactctctctcctgtgtgagggcatatatatataatatttatatataacattatatataatatttatatatgtattatataatatataatatataataaatatatataatatatataatacatgtcttgcaatgaawatataaaatgtatgacccccatatatataaagagaggcatatatttttatatatacttatgtattattttccttcctgaacattttgacaggtcattactacatcacaagcttgttacctaacacatcaatacttgtcttctaagaaagaaaacatttgcacaatcacaaaacaattgtattcagaatatttaccattgagacaatactattatctaacaaacagttcatgttcaaatttcacctatcatccaggaatgtccattacaaaaaaatccactgacattttaaataagttatttttatacgtctatctcccatcatacaaccaaaactagtaagaattaatggtgaaataactgtgcaaaagatatttggatttctaacttgcctttagaacaatgcagtccaaatgcattttgaaactttccaaatacagttttaaaacaataagaaaatgtattgacagactaacattgattttcctttcttccttttttttgaaagaaaagagagtctcactctgtcacacaggttggagcacagtggtacctccatagctcaccatcaccacagcctcaaacttcttggccttctacctcagcctctggggtagctgtgactatagtcatgagctatcatatctggatttttttttttcctgctagagatgtgatttagtcttttcatgtttttgcccaacctgatctcaatctcctaagctcaagagatcttcctgctttggcatcccaaagtactggcattactggcatgagccaccaatgcccaggctaatattgattttttttattgcttttactccatttaattttcaagccttgcttaaattagtattctaaatgtttaaaatacttagatccatttgaatcaaatgaatctaaagaagttcacggcacaggtcaa

SEQ ID NO: 166 - DNA, 618 bp, Homo sapiens
gcaggcttgcagagagaagcccaagagaggtggccggccgggagggcctcttcgctgcaggaaagcggctstcactgcacggggcactctggctgtgtgtagagacatgattggctgtcacagctaggggtagaggtgctactggcatcgggtgggtcatggcctgggatgccactaaacatcctacaatgcacaggacagctctgccacagaaaagggtccagtcccaactgtcagcagggccaaagggggagaggccccgacgtggggcactgggcagccatgggaggttttaagcagggtaaggcatgggcaggcctatgagcctaggcaaatgagcttcagtgggcttatttgcctctgccctgggtgaagggtgtggtctgacctggccagggcagcagggagtgaagaagtaggtggctctccgttcatctggcctcactggggctgggcaagtggacccagccatggacccccatcccgactctgcccggggcagcctcctcctaagtggcctaaaataaactcggtgtggagaatggaaatgtcactttggccaacgggggaatctttctccgagattggatttaaactacattatacaagcaatttcat

SEQ ID NO: 167 - DNA, 618 bp, Homo sapiens
gcaggcttgcagagagaagcccaagagaggtggccggccgggagggcctcttcgctgcaggaaagcggctctcactgcacggggcactctggctgtgtgtagagacatgwttggctgtcacagctaggggtagaggtgctactggcatcgggtgggtcatggcctgggatgccactaaacatcctacaatgcacaggacagctctgccacagaaaagggtccagtcccaactgtcagcagggccaaagggggagaggccccgacgtggggcactgggcagccatgggaggttttaagcagggtaaggcatgggcaggcctatgagcctaggcaaatgagcttcagtgggcttatttgcctctgccctgggtgaagggtgtggtctgacctggccagggcagcagggagtgaagaagtaggtggctctccgttcatctggcctcactggggctgggcaagtggacccagccatggacccccatcccgactctgcccggggcagcctcctcctaagtggcctaaaataaactcggtgtggagaatggaaatgtcactttggccaacgggggaatctttctccgagattggatttaaactacattatacaagcaatttcat

SEQ ID NO: 168 - DNA, 589 bp, Homo sapiens
gcagggcaggcggagtgggttggggatgtgccagagggaccatggagcagcggggagcttggactgcaacactctgcaccacagggcctgtgatatgggaccccaggcacctaccgcagagtgagccaggcagggccaggctgggtccagggagaggcrtgtgttcttcagccctcaccatcctgtggggtgcattctggggctgcccccatttgacagataagcagctgaggcttggagagggcaagtcgcctgtccaaggagctgggagtggcagtcaggagacttggaggtgggttctgctggcactagagctacctcctggatccccctgcggtcctaggttcctactgcttcactgggcatacccctggagaaggggttcccttggtggacttcagctttctggacggtagaagggagcaaattctcgccttcccataggagaggggagagtgaaaggtgtgcaagcacacagtaggtgttcacccagtgtcgtttctttctcaagccgttgcacgctttgtctactgcctcctttgttagggctcagggtattacctgtgttgaaatgggggagcaaggggtg

SEQ ID NO: 169 - DNA, 589 bp, Homo sapiens
gcagggcaggcggagtgggttggggatgtgccagagggaccatggagcagcggggagcttggactgcaacactctgcaccacagggcctgtgatatgggaccccaggcacctaccgcagagtgagccaggcagggccaggctgggtccagggagaggcatgtgttcttcagccctcaccatcctgtggggtgcattctggggctgcccccatttgacagataagcagctgaggcttggagagggcaagtckcctgtccaaggagctgggagtggcagtcaggagacttggaggtgggttctgctggcactagagctacctcctggatccccctgcggtcctaggttcctactgcttcactgggcatacccctggagaaggggttcccttggtggacttcagctttctggacggtagaagggagcaaattctcgccttcccataggagaggggagagtgaaaggtgtgcaagcacacagtaggtgttcacccagtgtcgtttctttctcaagccgttgcacgctttgtctactgcctcctttgttagggctcagggtattacctgtgttgaaatgggggagcaaggggtg

SEQ ID NO: 170 - DNA, 569 bp, Homo sapiens
agagatgggtttcaccatcttgttggccaggctggtcttgaactcttgacctcaggtgatccacctgcctcatcctcccaaagtgctgggattacaggcatgagccaccgtgcccagccattttttaaatgtttaaaagagacagggtattgctatgttgcctaggctggtctcaaactcctgccctcaagcgatcctcctgccttgacctcccaaagtgctgggatgacaggtgtgagacaccgtgcctggctggagtgaggatctgaatccaggtccatggtrctccccatggcacttacacctcagaggcaacggccctgtgaccaagaccaacgtgcagcctgtggtccagagtgctgcctgcgctcatggccagagtggccctgggtgtctgggtgatggtcagggctgcagacaccaaccagtatcatgctatctcccgccatgcttctccagcatgctgtcagcccccaccaggcccctccttaccaaagtagaagtagcccccctcatccttgggctggaagaagcgcccacgggcctgggcgtggacatcagctccctgg

SEQ ID NO: 171 - DNA, 569 bp, Homo sapiens
agagatgggtttcaccatcttgttggccaggctggtcttgaactcttgacctcaggtgatccacctgcctcatcctcccaaagtgctgggattacaggcatgagccaccgtgcccagccattttttaaatgtttaaaagagacagggtattgctatgttgcctaggctggtctcaaactcctgccctcaagcgatcctcctgccttgacctcccaaagtgctgggatgacaggtgtgagacaccgtgcctggctggagtgaggatctgaatccaggtccatggtactccccatggcacttacacctcagaggcaacggccctgtgaccaagaccaacgtgcagcctgtggtccagagtgctgcctgcgctcatggccagagtggccctgggtgtctgggtgatggtcagggctgcagacaccaaccagtatcatgctatctcccgccatgcttctccagcatgctgtcagcccccaccaggcccctccttaccaaagtagaagtagcccccctcatccttgggctggaagaagcgcccacgggcctgggcrtggacatcagctccctgg

SEQ ID NO: 172 - DNA, 1197 bp, Homo sapiens
tgcatgttttatcctggattttcagtgttatcgagggatataagtagaattattattgatttctttatgtatgaatggtaggtgagaaatacttccttgaaaggcaggcacaaaagagagtattactactctgcctgctcattcattcattttagctactcatggtgtgccaggtactttgctagtactttgtaaaacaatcttttaatccttcattttgtgattgaagaaactgaggctcagtgagattaagacaatttcccaaggtcacagagcaactggagctggttcatttccaaacctcttgtacaatttcctctgtgccatgtaacctttcctttattcatttgttctatgtgtgtatatctgtaaatcatttgtatttctttttatttaagtttgggaacacatgatatttcgttttgtcgtatataccagtaagcaaaacaaagttccaaatagatgtgctgaaactgacaaatcataaagaaaaccctaagtgtttaaatcatgaatagtcagtcccacaggaggaaggctctaggaaggaacttgtacaatgtgcctcctcctggctgctgcttcctgacgcagctggtcaaatgtaatttcagaagttttgctaaaaccttctctgaaggtgtttttagctacaggtgaaaggatgaaacatcaggaactttggcagggttgtgcagagacaaaggaagggaaggattggccctagtgtgtgagctgtgagctgctattagcccagagttttgtttagtggatacttaacctgtgtgaggataaataatacacagtttgacaggataaactgaagtcaacatggtagcttcttcttttagggttctccctttaaaaattttcttctattccccattttctttaaccactctgcgttcattttcccrtttttccccatctccctctttttcctcctgttcctgtccttttgtgtttttggaccccaatccatgttgccctcttttttatttgttttatttcttctttctacatttattctctttttttcctttcttttatttagtcctttcctttctccctcccccacaacctccttatatttcttcttcatctactctcgcttgatattttctgcaaagcgctgcctgggccccttgacctcacaagaagctctctgacgaaacgcttaagaaaaacaaggtatta

SEQ ID NO: 173 - DNA, 1197 bp, Homo sapiens
tgcatgttttatcctggattttcagtgttatcgagggatataagtagaattattattgatttctttatgtatgaatggtaggtgagaaatacttccttgaaaggcaggcacaaaagagagtattactactctgcctgctcattcattcattttagctactcatggtgtgccaggtactttgctagtactttgtaaaacaatcttttaatccttcattttgtgattgaagaaactgaggctcagtgagattaagacaatttcccaaggtcacagagcaactggagctggttcatttccaaacctcttgtacaatttcctctgtgccatgtaacctttcctttattcatttgttctatgtgtgtatatctgtaaatcatttgtatttctttttatttaagtttgggaacacatgatatttcgttttgtcgtatataccagtaagcaaaacaaagttccaaatagatgtgctgaaactgacaaatcataaagaaaaccctaagtgtttaaatcatgaatagtcagtcccacaggaggaaggctctaggaaggaacttgtacaatgtgcctcctcctggctgctgcttcctgacgcagctggtcaaatgtaatttcagaagttttgctaaaaccttctctgaaggtgtttttagctacaggtgaaaggatgaaacatcaggaactttggcagggttgtgcagagacaaaggaagggaaggattggccctagtgtgtgagctgtgagctgctattagcccagagttttgtttagtggatacttaacctgtgtgaggataaataatacacagtttgacaggataaactgaagtcaacatggtagcttcttcttttagggttctccctttaaaaattttcttctattccccattttctttaaccactctgcgttcattttcccgtttttccccatctccctctttttcctcctgttcctgtccttttgtgtttttggaccccaatccatgttgccctcttttttatttgttttatttcttctttctacakttattctctttttttcctttcttttatttagtcctttcctttctccctcccccacaacctccttatatttcttcttcatctactctcgcttgatattttctgcaaagcgctgcctgggccccttgacctcacaagaagctctctgacgaaacgcttaagaaaaacaaggtatta

SEQ ID NO: 174 - DNA, 634 bp, Homo sapiens
aaagtccattttcaaagattaagacaagggaacataccaccattctggggttgggaaagaaacaatttctgtacagatcaattgtacacagaagaaactgtaggrctcattaattgaattatctactttgagggctcatgtagatatactagaaaccaggaacatgataagatttggacttcaaacattttagaaaatataatgctcttatactgggttttgatagtaaagtgttcaaatcaactttataaacactcttgaaaaatacactttttgaaatgagaagaattttctgttgcatagagaaactgaaaaataattctagggctaggtgcagtgactcatacctgtaaccccagcacttcgggaggctaaggaaggaggattgcttgagcccaggagtttgagaccagcctgggcaacatggcaagactctgtcttacaaaaaaaattagctgggcatggtggtgcacacctgtagtcctagctacttgggaggctgaggtgggagcctgagagttcaagactgcaatgagctatgatcacgccactgcactccaccctgggcaacagagtgaaactctgtcttccaaaaaaaaagaataattctaaaatttgtctgggcttacaccca

SEQ ID NO: 175 - DNA, 717 bp, Homo sapiens
cttttcggggttttagccagctgtcttgtagattcacttaggttcatgaaagtttggaatgaagagagttagatggctagtgtaaactcatttttattaattataaagcagcttgcagcacagggtttactgataagcatcagcaacaatgtcttttactcaaaacatattatctgcttctcaatgccaggactctgatgacataacagctttttaagcacttactatgtgctgggcactgtactaagytttctttatacgttaactcatttcatcctcacaataactctgtgaaataagttactattattttcctcatatctttttaacatgtgaggaaacagaggtacagagatgtcaattcacttgcttatagtcactcagcttagaagtggcaaaaccaggattcagactcagaaaacttggttccatgctctttaccctacactaaaccatgtctaaagtagcgttagcaagtgaagaagttgagacccctagcatatatctatcttggcccggccagtgctatgtctacacaatgtctaaattggttatttgatattatattaactccaaatccccaaacttgtgaatggcatttatcactcttaactctctctctctctctctgtgtgtgtgtgtgtgtgtgtgtgtgtgtgtgtgtgtgtgtgtaaaacaggaagtgaaatcctggaaaacagacaataaaatgaaatc

SEQ ID NO: 176 - DNA, 717 bp, Homo sapiens
cttttcggggttttagccagctgtcttgtagattcacttaggttcatgaaagtttggaatgaagagagttagatggctagtgtaaactcatttttattaattataaagcagcttgcagcacagggtttactgataagcatcagcaacaatgtcttttactcaaaacatattatctgcttctcaatgccaggactctgatgacataacagctttttaagcacttactatgtgctgggcactgtactaagttttctttatacrttaactcatttcatcctcacaataactctgtgaaataagttactattattttcctcatatctttttaacatgtgaggaaacagaggtacagagatgtcaattcacttgcttatagtcactcagcttagaagtggcaaaaccaggattcagactcagaaaacttggttccatgctctttaccctacactaaaccatgtctaaagtagcgttagcaagtgaagaagttgagacccctagcatatatctatcttggcccggccagtgctatgtctacacaatgtctaaattggttatttgatattatattaactccaaatccccaaacttgtgaatggcatttatcactcttaactctctctctctctctctgtgtgtgtgtgtgtgtgtgtgtgtgtgtgtgtgtgtgtgtgtaaaacaggaagtgaaatcctggaaaacagacaataaaatgaaatc

SEQ ID NO: 177 - DNA, 1982 bp, Homo sapiens
agagctcgttaaaacagtttggtgagctgccccatgctcagagtttctgattcagtgtgtctggggtggaacctgagaatctgcacttctaacaagttcacttgggtaaggctgatgctgatgctgctggcccagsgatcacgctttgagaaccaccactctcaagccagacaaaggtgtcatgcagacattgaaatagaaatcactggctagaaatctctaacctagaatggtgatgctaagctactgggtgtcaattgctaacaagcaataccagctaggaaaatagaagagcaaagacccataatcctgactccttcatggacttatcagggtcagaggattccatgctagatgagcactttgtctaagaccccttataattaagacgttcagaatttccgactgaaggacctcccaactccacttctgggaacatgctgccttataaatagcctctgaaaatccctgggagcacctagaccactgcttctgtgaaatccagcatgaatctaattgaagctgcttaatcgaacaccaagttgccctcagtgtgatttttacatcgctggctcctcagttgcttccccacccggccctaccccacatgcacacacaaatatactgaatctgagagtccttcaggagtgcaattaggacagtcatttaagagatgcaccagcaatacctcatttttacacatagacatttttctgaaagagaatcatggattttgcttcttaaagggaataacaacaacaaaaccccagaaaatacgttaaccctattttatgaaggtggtatagacagtatatcctcttttgtttctagatatgaagaatacataaaaatgtgatgaacaggcactggcatatatatcaccctattcttgtgaagaaatttgtaatatatctctattttgctgcagccgatgccactgagtcatcaatttccactgtattatccaatgttctgcttggttggaatattaagcagccatcagattttgaacttcacgtttcctcacatttggcccttcactgatcaagctttgtttctctgtgattatagatatatatcagaccccggaatcaactttctttgttttatcaagacctggtgtgtagtaattctgatttatcatttttacaacagtctcttccctgcgggctccaggtcgtgatggtggcattgctacgatttatggtggggactgttgacggaaaatgtatggtctttttgattttccttctttccaacacctggttcttattttcccaactctagcttctgccattttaagcattatttacvcatgacagtcctcccttcatggccttccctagttctatttgtcagggttatttatttttgaaatggagtctcgctctgtcacccaggctggagtgcagtgtgcaatctcccctcactgcaacctccgcctcccaggttcaagcaattctcctgcctcagcctcatgagtagctgggactacaggagcccagctaatttttttgtatttttagtagaaacagggtttcaccatgttggtctgactggtttcaaactcctgacctcaggtgatctacccgcctcggcctcccaaagtgatgggattacacgcgtgagccaccatgcccagccaagggttatttttttttttaacacaaagtcactccatattgattctgacaactttcvcagggggaatgtaaggagaggaacggcagcggctcaggagcaccgggcagggaggggtttcaggtgggttccaggaatggggaggctgtggcctgggcagctagctgaccctctccactctgaggaggaaggtgtgcttagggaggcagccagcaggggtggagacagaagtccaggggatggggaggaccatgactcaagaggagccaccactatgctgctgggggcacacagaggagtcagggtccagcctgtgcagaagcaggcccagccaccgtcct

SEQ ID NO: 178 - DNA, 1217 bp, Homo sapiens
tgcttacaatagtatctaatacttggtaaacattagattattatatttctctttgtgaaaacagctcaaatgaataacgaaaatgtctactttatacttcacatttcatgaagcttcgtgatttaaaacagagcaacttggcctggtgcagtggcttgtgcctgtaatcccagcactttgggaggctgaggcaggtggattgcttgagctctgaagttcaagaccaggctgggcaatatggcaagaccctgcctccactaaaaatataaaaaaatagccaggcattggggtgcacacctgtggtcccagctactcgggaggctgaggcccgagaaccgcttgaacccgagaggcaaaggttgtagtgagccgagatcacgcagctgcaatctagcctgggtgacaaagcgagaccctgtctcaaaataaataaagaaaatagagcarcttgtttaatctcacaaaaacctgatgatgtataagtattaccatcccttttttaaacagaagaaacagagtttcagagaggtcaattgtcttccttggctcacaaaacttgacagaatacaggccttctaactaaaacatccagggcttctatcaccataccacagttgcttaaatacgttaggagatgtgcccacccccgaccccgacgcccccgcctttttaatggctatatgatatcatgtatttgtttgggcaaaacatgtttctttctgagcttttctttactcacagtaaaatggcaacaataacacttatggggtagtatgttacaaacatcaaacaagagaacataagtaaaaggcccagaagagtgtctagaatgcagtaggtactctgaatttaactctctgttcttctctcctctggcaaagaaaaaaaaatacagacagatcatcatcaactctttttagtcttagggagtttcaaggggtctaggaatgggactgcagagaaccaagtctaccattctgttatcagcaactgtccaaagaagaaaagactactttagcaagcatctctctctcttgaggcatgctattattttcaggctcttaggagctgggttctctgttttgaattgctctatgctaaacagtaaccacctaatgatttgacttcttggatggattttcctaacaagcaaagaagaaggtaggtccactgcttggtagcatatgaactgcttggcaatgaaactcccacctttt

SEQ ID NO: 179 - DNA, 1217 bp, Homo sapiens
tgcttacaatagtatctaatacttggtaaacattagattattatatttctctttgtgaaaacagctcaaatgaataacgaaaatgtctactttatacttcacatttcatgaagcttcgtgatttaaaacagagcaacttggcctggtgcagtggcttgtgcctgtaatcccagcactttgggaggctgaggcaggtggattgcttgagctctgaagttcaagaccaggctgggcaatatggcaagaccctgcctccactaaaaatataaaaaaatagccaggcattggggtgcacacctgtggtcccagctactcgggaggctgaggcccgagaaccgcttgaacccgagaggcaaaggttgtagtgagccgagatcacgcagctgcaatctagcctgggtgacaaagcgagaccctgtctcaaaataaataaagaaaatagagcagcttgtttaatctcacaaaaacctgatgatgtataagtattaccatcccttttttaaacagaagaaacagagtttcagagaggtcaattgtcttccttggctcacaaaacttgacagaatacaggccttctaactaaaacatccagggcttctatcaccataccacagttgcttaaatacgttaggagatgtgcccacccccgaccccgacgcccccgcctttttaatggctatatgrtatcatgtatttgtttgggcaaaacatgtttctttctgagcttttctttactcacagtaaaatggcaacaataacacttatggggtagtatgttacaaacatcaaacaagagaacataagtaaaaggcccagaagagtgtctagaatgcagtaggtactctgaatttaactctctgttcttctctcctctggcaaagaaaaaaaaatacagacagatcatcatcaactctttttagtcttagggagtttcaaggggtctaggaatgggactgcagagaaccaagtctaccattctgttatcagcaactgtccaaagaagaaaagactactttagcaagcatctctctctcttgaggcatgctattattttcaggctcttaggagctgggttctctgttttgaattgctctatgctaaacagtaaccacctaatgatttgacttcttggatggattttcctaacaagcaaagaagaaggtaggtccactgcttggtagcatatgaactgcttggcaatgaaactcccacctttt

SEQ ID NO: 180 - DNA, 1217 bp, Homo sapiens
tgcttacaatagtatctaatacttggtaaacattagattattatatttctctttgtgaaaacagctcaaatgaataacgaaaatgtctactttatacttcacatttcatgaagcttcgtgatttaaaacagagcaacttggcctggtgcagtggcttgtgcctgtaatcccagcactttgggaggctgaggcaggtggattgcttgagctctgaagttcaagaccaggctgggcaatatggcaagaccctgcctccactaaaaatataaaaaaatagccaggcattggggtgcacacctgtggtcccagctactcgggaggctgaggcccgagaaccgcttgaacccgagaggcaaaggttgtagtgagccgagatcacgcagctgcaatctagcctgggtgacaaagcgagaccctgtctcaaaataaataaagaaaatagagcagcttgtttaatctcacaaaaacctgatgatgtataagtattaccatcccttttttaaacagaagaaacagagtttcagagaggtcaattgtcttccttggctcacaaaacttgacagaatacaggccttctaactaaaacatccagggcttctatcaccataccacagttgcttaaatacgttaggagatgtgcccacccccgaccccgacgcccccgcctttttaatggctatatgatatcatgtatttgtttgggcaaaacatgtttctttctgagcttttctttactcacagtaaaatggcaacaataacacttatggggtagtatgttacaaacatcaaacaagagaacataagtaaaaggcccagaagagtgtctagaatgcagtaggtactctgaatttaactctctgttcttctctcctctggcaaagaaaaaaaaatacagacagatcatcatcmactctttttagtcttagggagtttcaaggggtctaggaatgggactgcagagaaccaagtctaccattctgttatcagcaactgtccaaagaagaaaagactactttagcaagcatctctctctcttgaggcatgctattattttcaggctcttaggagctgggttctctgttttgaattgctctatgctaaacagtaaccacctaatgatttgacttcttggatggattttcctaacaagcaaagaagaaggtaggtccactgcttggtagcatatgaactgcttggcaatgaaactcccacctttt

SEQ ID NO: 181 - DNA, 636 bp, Homo sapiens
tatakatatatatatatatatagatatatacccaaaggaatataaattgttctattataaagacacacacacacacacacacacacacacacacacatacgttcttggtaaggcacagctggaagaacattagacaaattatgtagagcaattagcaaagaagtggaatgaacctaaatgcccatcgatgatagactggataaagaaaatgtgagacatatacaccatggaatactatgcagtcataaaaaagaattagatcatgtccttggcaggaacatggatggagctgcaggtcattatccttaggaaatgaatgcaggaatagaaaaccaaataccacatgtcctcacttataagtaggagctaaataataagaacacatggacacatagaagagaataacacacactctggcctatcagagggtgaagaggatggagaggatcaggaaaaatcactaatgggtcctaggcttaacagctgggtgataaaataatctgtaaaacaagcccccatgacacaagtttacctatgtaacaaacctgcacatggacccctgcacttaaaagtttaaaataaaaataaataaaatgtgttttaatcccccttaagtaacatttatagcaacgtaag

SEQ ID NO: 182 - DNA, 636 bp, Homo sapiens
tatagatatatatatatatatakatatatacccaaaggaatataaattgttctattataaagacacacacacacacacacacacacacacacacacatacgttcttggtaaggcacagctggaagaacattagacaaattatgtagagcaattagcaaagaagtggaatgaacctaaatgcccatcgatgatagactggataaagaaaatgtgagacatatacaccatggaatactatgcagtcataaaaaagaattagatcatgtccttggcaggaacatggatggagctgcaggtcattatccttaggaaatgaatgcaggaatagaaaaccaaataccacatgtcctcacttataagtaggagctaaataataagaacacatggacacatagaagagaataacacacactctggcctatcagagggtgaagaggatggagaggatcaggaaaaatcactaatgggtcctaggcttaacagctgggtgataaaataatctgtaaaacaagcccccatgacacaagtttacctatgtaacaaacctgcacatggacccctgcacttaaaagtttaaaataaaaataaataaaatgtgttttaatcccccttaagtaacatttatagcaacgtaag

SEQ ID NO: 183 - DNA, 636 bp, Homo sapiens
tatagatatatatatatatatagatatatacccaaaggaatataaattgttctattataaagacacacacacacacacacacacacacacacacacatacgttcttggtaargcacagctggaagaacattagacaaattatgtagagcaattagcaaagaagtggaatgaacctaaatgcccatcgatgatagactggataaagaaaatgtgagacatatacaccatggaatactatgcagtcataaaaaagaattagatcatgtccttggcaggaacatggatggagctgcaggtcattatccttaggaaatgaatgcaggaatagaaaaccaaataccacatgtcctcacttataagtaggagctaaataataagaacacatggacacatagaagagaataacacacactctggcctatcagagggtgaagaggatggagaggatcaggaaaaatcactaatgggtcctaggcttaacagctgggtgataaaataatctgtaaaacaagcccccatgacacaagtttacctatgtaacaaacctgcacatggacccctgcacttaaaagtttaaaataaaaataaataaaatgtgttttaatcccccttaagtaacatttatagcaacgtaag

SEQ ID NO: 184 - DNA, 636 bp, Homo sapiens
tatagatatatatatatatatagatatatacccaaaggaatataaattgttctattataaagacacacacacacacacacacacacacacacacacatacgttcttggtaaggcacagctggaagaacattagacaaattatgtagagcaattagcaaagaagtggaatgaacctaaatgcccatcgatgatagactggataaagaaaatgtgagacatatacaccatggaatactatgcagtcataaaaaagaattagatcatgtccttggcaggaacatggatggagctgcaggtcattatccttaggaaatgaatgcaggaatagaaaaccaaataccacatgtcctcacttataagtaggagctaaataataagaacacatggacacatagargagaataacacacactctggcctatcagagggtgaagaggatggagaggatcaggaaaaatcactaatgggtcctaggcttaacagctgggtgataaaataatctgtaaaacaagcccccatgacacaagtttacctatgtaacaaacctgcacatggacccctgcacttaaaagtttaaaataaaaataaataaaatgtgttttaatcccccttaagtaacatttatagcaacgtaag

SEQ ID NO: 185 - DNA, 636 bp, Homo sapiens
tatagatatatatatatatatagatatatacccaaaggaatataaattgttctattataaagacacacacacacacacacacacacacacacacacatacgttcttggtaaggcacagctggaagaacattagacaaattatgtagagcaattagcaaagaagtggaatgaacctaaatgcccatcgatgatagactggataaagaaaatgtgagacatatacaccatggaatactatgcagtcataaaaaagaattagatcatgtccttggcaggaacatggatggagctgcaggtcattatccttaggaaatgaatgcaggaatagaaaaccaaataccacatgtcctcacttataagtaggagctaaataataagaacacatggacacatagaagagaataacacacactctggcctatcagagggtgaagaggatggagaggatcaggaaaaatcactaatgggtccyaggcttaacagctgggtgataaaataatctgtaaaacaagcccccatgacacaagtttacctatgtaacaaacctgcacatggacccctgcacttaaaagtttaaaataaaaataaataaaatgtgttttaatcccccttaagtaacatttatagcaacgtaag

SEQ ID NO: 186 - DNA, 1243 bp, Homo sapiens
atgctgacgcttgctttcactttccttttcgttttctgttgcctttttcctttttgctgaactctcttctctggtaattagataccaagttcctttttggtcttccattcattgttacttttcagtacatgaaaaatatttgctaaagaagaaagagacagtatttgtattatttctgaactcacgtgatgtatggtatcctttccttagtcgatgttactgatggaagctgaggacaggctaaacttccttctgtccgaggtggaacagaagaccctgtctcagtgctccgctggcgagctggagattgtggtggaggcccggcttcagctggctgcagttgctctgcagaggcaccgggcggcatacaggtgcgtctctccatgcacaggggagggatacctttgaagagagttccttcaccctagtttattaaatagacttaaattttatgtaagttttagaaattcctatatccatagtatgcttgctttttattattcagggaagttttcatacatgatttcacttaaaattatagctctggctgggtgtggtggctcatgcctgtaatcccagcactttgggaggctgaggtgggcagatcacttgaggccaggagttggagaccaggctggccaacacgaagaaaccctgtctctactaaaatatgaaaattaaccaggctttgtggcrgcacatgtaatcccagctactcgggaggctaaggcaggagaatcacttgagcccgggaggcagaggttgcagtgagctgagattgcccctctgtactccagcctggatgacagagcaagactctgtctcaaaaaaaaaaaaaattacagttctcaataaagcaattattttatgaaggcacacagctgggttgtttaatttcatatatagaatgaacaaattaacaatgctttgatttttttatacatttaatttactttttaaaaagactaaacctttttacgaataaaagctatggagtgttttctttttttctaaaacattgacttaaaatattaaaaacaaacctattttgaaaaagtaagtttctgcatcatattgcactgaactgtttaataaactgttgtaggtagctaattatttaaatgtgctgcaattgttagtgtcagctctttcatttagtttgttcatcgatttatttatttagtcaaccagtatctgttaactctctcactgccaggctctgatctaggcagtgaagatataa

SEQ ID NO: 187 - DNA, 1190 bp, Homo sapiens
ctaatgcatgtaaagtgtttagtgcaccgcatgacagttacctagcgtgcagtaaatgccagttgttataattattactattactgcttagggtggaggccatgggagtgtttggagaggagagggtacttgggctgggtcatgaaggatgaattgaggttggctttgcagaacttggcaagagtccagggccaccatgtcgcacagctccaagaggcatcattcccatttctgtctctgtraatggcacctcctggagttgttcagttcacagctaccacggcaatgtgtagtggctttggagtcaggatgttcccccagcaggaggaaggtgctagaagagttgtcttctcagagagactgctggtttccccctgcctagctgtggctgtagggaacaacatgcttaaggttgccagagagatgggatcacaacagctacagcaaatggacagacagcacctttggataatgcaattttgagagctgcaattcactgtgggaacaagacataccagtcttgtcctcatgacccagccttgggtgacccaaccatccagccacctttaatgtatgccatcgaagtgaagcttaatttaagacagggcttatattaaattccacatggagtttgtatctccagaaagttcaagaggcttcttaggtcatgtgataatcttggcctctgcctcactggggccagatccaggtggggtgctttgatatccttctagctaccatgctatcatgaggaatagggtacctctccctgacccatcaggctgtataaattgggctttgggttagaaatggggcccacgtctctgcctgctgtggctatccctgctgctgttcagaattccctgattctgggctcttgttgcccaggatagactcttgtctgattggatcctagctaccactgtgctcctctctgagctagtcagttttgttgaattcactctcctgtcctttttaggaatgctgtcaagattgagtaggtcaccagttacttgtttttaaatcctgaggccaaccaatattagctgtgtgaccttgcctacattgcttaaactgtttgagcttcagtttctgtatgtgtaaaatggagacgatagtagcattgaccttgtaaggatgttgtaaggattgaatgggatttaatgactatgaagtgcttagtgcatgca

SEQ ID NO: 188 - DNA, 1190 bp, Homo sapiens
ctaatgcatgtaaagtgtttagtgcaccgcatgacagttacctagcgtgcagtaaatgccagttgttataattattactattactgcttagggtggaggccatgggagtgtttggagaggagagggtacttgggctgggtcatgaaggatgaattgaggttggctttgcagaacttggcaagagtccagggccaccatgtcgcacagctccaagaggcatcattcccatttctgtctctgtgaatggcacctcctggagttgttcagttcacagctaccayggcaatgtgtagtggctttggagtcaggatgttcccccagcaggaggaaggtgctagaagagttgtcttctcagagagactgctggtttccccctgcctagctgtggctgtagggaacaacatgcttaaggttgccagagagatgggatcacaacagctacagcaaatggacagacagcacctttggataatgcaattttgagagctgcaattcactgtgggaacaagacataccagtcttgtcctcatgacccagccttgggtgacccaaccatccagccacctttaatgtatgccatcgaagtgaagcttaatttaagacagggcttatattaaattccacatggagtttgtatctccagaaagttcaagaggcttcttaggtcatgtgataatcttggcctctgcctcactggggccagatccaggtggggtgctttgatatccttctagctaccatgctatcatgaggaatagggtacctctccctgacccatcaggctgtataaattgggctttgggttagaaatggggcccacgtctctgcctgctgtggctatccctgctgctgttcagaattccctgattctgggctcttgttgcccaggatagactcttgtctgattggatcctagctaccactgtgctcctctctgagctagtcagttttgttgaattcactctcctgtcctttttaggaatgctgtcaagattgagtaggtcaccagttacttgtttttaaatcctgaggccaaccaatattagctgtgtgaccttgcctacattgcttaaactgtttgagcttcagtttctgtatgtgtaaaatggagacgatagtagcattgaccttgtaaggatgttgtaaggattgaatgggatttaatgactatgaagtgcttagtgcatgca

SEQ ID NO: 189 - DNA, 1190 bp, Homo sapiens
ctaatgcatgtaaagtgtttagtgcaccgcatgacagttacctagcgtgcagtaaatgccagttgttataattattactattactgcttagggtggaggccatgggagtgtttggagaggagagggtacttgggctgggtcatgaaggatgaattgaggttggctttgcagaacttggcaagagtccagggccaccatgtcgcacagctccaagaggcatcattcccatttctgtctctgtgaatggcacctcctggagttgttcagttcacagctaccacggcaatgtgtagtggctttggagtcaggatgttcccccagcaggaggaaggtgctagaagagttgtcttctcagagagactgctggtttccccctgcctagctgtggctgtagggaacaacatgcttaaggttgccagagagatgggatcacaacagctacagcaaatggacagacagcacctttggataatgcaattttgagagctgcaattcactgtgggaacaagacataccagtcttgtcctcatgacccagccttgggtgacccaaccatccagccacctttaatgtatgccatcgaagtgaagcttaatttaagacagggcttatattaaattccacatggagtttgtatctccagaaagttcaagaggcttcttaggtcatgtgataatcttggcctctgcctcactggggccagatccaggtggggtgctttgatatccttctagctaccatgctatcatgaggaatagggtacctctccctgacccatcaggctgtataaattgggctttgggttagaaatggggcccacgtctctgcctgctgtggctatccctgctgctgttcagaattccctgattctgggctcttgttgcccaggatagactcttgtctgattggaycctagctaccactgtgctcctctctgagctagtcagttttgttgaattcactctcctgtcctttttaggaatgctgtcaagattgagtaggtcaccagttacttgtttttaaatcctgaggccaaccaatattagctgtgtgaccttgcctacattgcttaaactgtttgagcttcagtttctgtatgtgtaaaatggagacgatagtagcattgaccttgtaaggatgttgtaaggattgaatgggatttaatgactatgaagtgcttagtgcatgca

SEQ ID NO: 190 - DNA, 660 bp, Homo sapiens
gagcacttttagaacatggaaaagtgtggtcatcccatcattagacagcacacatcctacataaataaaaagtcgtatggggaaggaggttggggagggaataaaaaattggcacagacattgatagactggtttccagtttcaaggtaacagatgcacatcatgagaccagaggaggcagagacaaggctggatttggcttttctaagcaacatgtgttcctgcgcagggctgaatggtygctgagacagagatggaagccaggacaagggagcccaccgggcccagataggtacagagagcagaggctcctgttctgtcctcgccacccacgagggtgacactgcttgtaaatggtggctgtgctctcccagcaagaaaaaagcacaactaaatccacactgcacacagacgcagacagaaagccttcaagtggctctgttttctgctccctgccttgccaggtccacaagcagagaggagtgtcaggcacatggccccgctgtcaggctccccagtgagctgcgggctcagcaggagctgcccactgacacacaggggacacccactcctgccaccttgggagcggttgccagacagagccgcactgggtgctggtgtcatccagggaccccacacacttccttaaatgtgatcctg

SEQ ID NO: 191 - DNA, 1110 bp, Homo sapiens
ttactacttttctaaatctcttctaacactttcgaacctgactctgtattgactgcattaacacgtcatgggtgaatttcagactaaagtcaattcagaatgatgatatttagcatattaatttcccaaagaattatagaacttctttattttataattgaaagcctgtaactttgtttggaaaacacctgcatattttactttttagagctgttgaaaggggaaaaggccaaatgaattaaagtcctaaccagaaatcacttaatttactgtaccttcgttcctttgtcttctatttttgctccatcctgttatatcattttcatatttatgtgtttgttattccaactttaaccaaagacttctatctgctactggattttcataatatgcttttgcatatacatgtagttacaaatagtcactgtgcaaaaaatgtggaaaacaatgtgagatgaacagtccatgtgttgctctgggtttggatggcattactgcctcaatagagccattcaagggtttttgttgttgttgcttcattttatattgtttcactggtgacacaatttagacttattttttccaaacactctttttttggttacttgcaacttttttttccacaagaattgttgaccgaatatatagtagcagatcacagaaggtacagtgctaaaataaaaatagctgtcttctcactccgctcttgatgatttaattcagtactgaaacaaagcttaatttcttttctgcttcctgtaagatataacagtacaactgatgtggaaacattctgttaacttgtctttcatgacacatgacatagatttttttgggttttgtttatatatttttgttttgtttagtttttaaygagagaaattctgttttcttatttaccatgaattgcaattcttttctgggggtactccttaatttatcttcctttctgctggtggttttacttctagtcaacggaagcgaccataaagactaatgaactgatttaaaacccttctttacactgagttaccacttcgataaagattcacatttagaattgtgattctattggcaggtttatctatctcctgagtttacaaggttttg

SEQ ID NO: 192 - DNA, 1042 bp, Homo sapiens
gctacccacagtggtagatgtgttttctattgccatcrtctacaaatatcattgccatttaaaatattaggattctcaacaacactggaaggaaatagagtatggtaaaacagctaatgagtttttggctgttctaaatgaagatcaatgaaacatttatggtaaatgatgaaaataatctctgttttgtgtcagaaatatgtgttatgaaattaaatggcaggaaaaggttacaacaaatgaatctgagtcatttctctggtttcacctctgggaaaagtattgcataaaatttttaaaactgctaaagtaaagatgtttgcagtctagcctaagcatagtttaatttttctgagttctctttacaacagagattagcttgaacttggtgtgttaacgtctacataaactttggaaaacaaattatttatttagtttaacagggggttgcatagggaacataattgagctctattctagtgagttgacttccttgtcacaatgaaaaaactttatctacctcctccctaaattttaattatgatgattgctcaggtcttaaaattttatttacaacaaacaactatagctgtgtgaagccatgagttgacttaagtataaatgctgttcttcattttgcatttctttgaggaatacctaggaaacacaagtctaccataattttttaaagtattgactaccattcagggagataagaaataccatggaggagaaacaacttgaagttgggataatctgttttgtttagctggtaattattggataggcaaacctgtggtgatgtagtaactccaaaagtcttgaccagtctgcctataaccttgatgtttgtgctttactcttttgcttgctatgcaatgctatttggcaatttgcatgacaaatatatattttcccaatcaaagaaaactgaaaatgaattaggctttaagaatcctgtgtcatcctttgataagtaaaataatacagagtcttagaaaaactgtcttgtttacttctcattctctctattttattaaaa

SEQ ID NO: 193 - DNA, 1042 bp, Homo sapiens
gctacccacagtggtagatgtgttttctattgccatcatctacaaatatcattgccatttaaaatattaggattctcaacaacactggaaggaaatagagtatggtaaaacagctaatgagtttttggctgttctaaatgaagatcaatgaarcatttatggtaaatgatgaaaataatctctgttttgtgtcagaaatatgtgttatgaaattaaatggcaggaaaaggttacaacaaatgaatctgagtcatttctctggtttcacctctgggaaaagtattgcataaaatttttaaaactgctaaagtaaagatgtttgcagtctagcctaagcatagtttaatttttctgagttctctttacaacagagattagcttgaacttggtgtgttaacgtctacataaactttggaaaacaaattatttatttagtttaacagggggttgcatagggaacataattgagctctattctagtgagttgacttccttgtcacaatgaaaaaactttatctacctcctccctaaattttaattatgatgattgctcaggtcttaaaattttatttacaacaaacaactatagctgtgtgaagccatgagttgacttaagtataaatgctgttcttcattttgcatttctttgaggaatacctaggaaacacaagtctaccataattttttaaagtattgactaccattcagggagataagaaataccatggaggagaaacaacttgaagttgggataatctgttttgtttagctggtaattattggataggcaaacctgtggtgatgtagtaactccaaaagtcttgaccagtctgcctataaccttgatgtttgtgctttactcttttgcttgctatgcaatgctatttggcaatttgcatgacaaatatatattttcccaatcaaagaaaactgaaaatgaattaggctttaagaatcctgtgtcatcctttgataagtaaaataatacagagtcttagaaaaactgtcttgtttacttctcattctctctattttattaaaa

SEQ ID NO: 194 - DNA, 1166 bp, Homo sapiens
aaaccaccatggcacatgtttatctatgtaacaagcccgcatatcctgcacatgtatcccggaacttaaaataaaatataatagggtgacaatggtcagagaaagaaggttgaggcagaaatgtggcttctcatctgtgttattacaaaactcagatcagtgtttggattcgcggtactgtacaagagtctatgtttgacaactaagtcatatctggacttgcaaaagcacagtctgattctgttctatgtacggtggtaaggataatccctgagagcagatgatttttaaaaccggagtcctctactgttaagaaaattagattgcagcgcaccagcatggcacatgtatacatatgtaactaacctgcacaatgtgcacatgtaccctaaaacttaaagtataataaaaaaaaaaagaaaagtaaaaaaaaaaaaaaaaaaagaaaattagattctagcttctcactctgctgttgcctggctctgttacaaacaattcactttatctttggtttcttggttcctaaaattctatagtttatgactgtatgactataaatcaacaacttggctttttatttttactgttacttccaaacactagtatttcaagctaaaatgtgagtttttcttatttcaactaggcatatcatgctgatccartgacagttaaatatattccaggagagatatttagacacgcagagagtccaggatatggagttattttattaactgaaagggccataaatgaatattaataacactgctggaaagagaactcgaagtgatgtcaagttcttgtttttaatctgtgtaataacctgatttcacatatttaaattagtttagtggactaaacaaaagatagactgtaacccctctgtagaatacacatttgtaaattctaataatttttatcattaaaggatgattttatatggattcttttgtttgtaacatttcataagaaaaaaattcaataaagaaaaacagaaactggttaagactaatgtatgggaactcataaaactgcacacaagtagatattaactggtaaatgtttgtggactccagacaaaatgacatttaatactctttgtccttcctgtcttcaaagaaagttaaagcaataatagatgattaaagttactgaaaatgttt

SEQ ID NO: 195 - DNA, 562 bp, Homo sapiens
atgatatggtaagacaccaaatactttgctatcattctttcaccattacatgtgtctctgattgcataaattttatttatttatttattgagacagagtctcactctgttgcccaggctggagtgcagtggcatgatcttggctcactgcaagctcggcctcctgggtttatgccattctcctgcctcagcctcctgagtagctgagactacaggtgcctgccaccatgcctggctaattttttgtatttttagtagagacagggcttcaccgtgtttgccaggatggtctckatctcctgacctcataatccgcctgtctcggcctcccaaagtgttgggattacaggcgtgagccaccgtgcccggccataaattttatttttgaatgtgtcctcatgcacaggcatgaacaaaatcgagtaaagtactctgacctactgcagcaggaaatatttactttgggccggagaaaaggcattgttgttcatccagcacacacctgtgtgggtagaacgtggaacatacagatgccgatagttgtttccttgggaattgcttcc

SEQ ID NO: 196 - DNA, 600 bp, Homo sapiens
gcatccctgccttctccttctgtacaattattaaccacttatcaatctggttcccagaacatttttagagtcttcactccatctaatctctagagcctcttgaaaaagtaagttggttttggagtttcccactgaatttrgatctgtcattggggatggtagcagaatttggacatactaattcatccccctaagaatacctgtctccaaagttattccccctcaaaacctaaaaacaccatgaaagccattgcaggatctaacagtagcctatgtaattgtagatttttttttttttttgagatggattcttgctctgttgcccagactggactgcaatggcaccatctcagctcactgcaacctccacctcccaagttcaagtaattctcccacctcagcctcctgagtagctgggattacaggtgcataccaccatacttggctatttttttttttttatttttagtagagactggggttcaccatattggtcaggctggtctcgaactcctgacctcaagtgatccacctgcctctacctcccaaagtgctaggattacagttgtgagcactgtgccagccgtaaattctttttat

SEQ ID NO: 197 - DNA, 1249 bp, Homo sapiens
actattgatcaaaatccctccacaatggtggctctggtctacactccacaagcagtgccctcatcaacttccccacttccccacccaacatgaagacttcttttttttttctttttgaggcagggtcycacttgttgccctggctacttacaggtgcgatcatagctcactgcagccccaaactcctgggctcatgggatcctctcacctcagcctcctgagtagctgggatgacaggcatctgccactgtgcccagctccaatacttgtctcttcctagattagttttgcctaaaagattgcattagttttctacagctgcagaacaagttaacacaaattgtgtggcttaaaacaccatttatttttcatctcccattttctgtgggccaggattctgggctcggcttagctgggtgctctgctcagactgtaacccggtgttggccaggctgcattctcatcagaggctccactggagaaagatctgattccaggctgcctcaggtggctggcagtattcatctccgagtggttgtagaactcaaggagacttgcttcttcaatgtcagcaggagagatagtctcatacctttacatccttttttaaagggctcacctgattagatgcaccctggatgatgtcctttttcattaacataaagtcaactgatcagggactttaattacattggcaaattcttttccccttttccatatggcacatcatcacctttgttagaatctattaattagaagcacatttaccaggagaggattacagaagtgcttgcctattggagttcagctgagaattttgcctaccatgtatgtataaggttgtatctggttcaaattgtagtaaagcacacagaacataaaatttcccatcttaaccactgttaattgtacactttagtggtatcaaatactttcacattgttgtgcaaccattaccaccatccatctcaagaactctacttttgtgaaactgaaacactgtgtccaattagatactaacttcccattccgtttttgccccagcccttggcaatcattctattttctgtttctatgaatttgattattctaggtatcacatgtaagtggaatactgtctttttgtgactggctattccacttagcataatgccctcaaggttcatccacgatgtagcctatcacaggattctctccctttctaaggctgaatcatattttattgcatgtatagaccacattttgttca

SEQ ID NO: 198 - DNA, 644 bp, Homo sapiens
tgcattatacactgtcgagtcggaataagagattctggaagaatttagaaaatacagttctattaatattaaatagtttacaaaatttgaaaagatagatcataaactgtccacagtggttctctggattattcaagtgggggactggagtggagggtagggtaggaaaaaaatgtttcctttctctatttttgtgttgtttgattttctttttaaaccataaaaatttattacctttagattcaatagccaaaagaaaggtatcattttagagaaaaccaaaaaaattacacatactgttttataacctgctttccatgttttataattgacatttttcataaatcatttatatacctttccacatcaaggaagaaggaatctacattatcattttcaataatttgatgccattccaacatktggttatcttataacttaacgcattttctatgaatatacagtcaggctatttctaacttcttactattagaaaaaatgctgagatgaacagagccttaataaatttaaactctggaggataatgggtttggttacaggatcattctgctttcctagtttcaaacttcattgaaaatactttaaaacttttgattctcaacagagcgcatttaaatgaacag

SEQ ID NO: 199 - DNA, 520 bp, Homo sapiens
aaatgggcactcccattttgtagacagaaactcaaggttcagagaagtcaagtgacttcccttaacacattcagttaggcaatggcaattccaggcctgaactctgatctctgtgaccctgaaacatatactcttaattgccaaactctatagcctccttctcttctgggctctctcattatagcatgtaaaccatagacttataccacagaaagtgaatgaactcactgaggaggaggtagggcagggtgcatgagtgagcagaggrtattgggaagaagagacataggaacaagatttcttagttctttaagaatttcacattaacagaactgcagggtgacaaactcccttttccctgagctcctaccaagtgccagaggacagaggcccagagctggaaaggaccagctcttctgggatgctgaggggacagcagtcagttaaacatggctaccagagtgcagtggtgaggcagattctgaggccacgtcctcgtttagtgaagagtgctgtgata

SEQ ID NO: 200 - DNA, 630 bp, Homo sapiens
gtcaggggtcctatctctcccgttctagccccttccattcagtcaacctgagttctgcgaagttttaaaaactgtgccataggtcactgcatccctagcatatgcctctcaagccagtgccaggcaaaggtgatgttttagaatccgatttgccttccattggcgttactttgatataagaattcaacataagcctctctgtggtcatttctgttctcctgtgtgtaaacctttaccaccgtgaactattaacataaaaaggatggattgacttctgactgtgagaaataaatcaccccaacttttgacagcagagttagaaaaaaaagaaaagattaattggttttatttagtggcttattgtttattgtgatagccattaaaaatagataaccagaggctaataaatgttaatggtcccttcactattagaaaaatcaattgtcagtgaatatagcatatattaatatattattttgtttataatcttcaataacagtttagaaaattcaaccctgagagaattattttttcaggaaccctttyaagtttaatgtttgccacaaagaacagattcggcaggaggacattttcatctacatataattttaatggttttcaaaggattat

SEQ ID NO: 201 - DNA, 603 bp, Homo sapiens
ggtgcatgttgaattgatggggcacatttcagtgcattcatcaatatctgtggggtacagaatgggtgtggagccaagttggccaatgagccaacaaaatcatgcttccctttgcaaaatatggagtcatgtttcactagaaaatggtgtcccagccagggactacatttcctagaaccctctgcatctaggtgaggtcatgtgactacttttcactcatggaatatgagagccatgatatatgtcacttcagggccaaggtggtcaagaagtgggtgtgacttctctcctccctctttcacctcaactggctaaaccaggaacaccaagsctctaaggaatgcaaaaaccaaaagatggagagagattgaactcctttatcaccatgtggagaaaagctgcccaccagccaggtatatccatattgaattattatgagagtgatacatttctattacgctaagctagtaatgaggcaggaaacaggactcaactccagatgagggactcagacactggacaaaattgaggactagctaaaacaaggacagagtggaagcagctttccataggacatgcccaccagtgtgccaggtcagttta

SEQ ID NO: 202 - DNA, 603 bp, Homo sapiens
ggtgcatgttgaattgatggggcacatttcagtgcattcatcaatatctgtggggtacagaatgggtgtggagccaagttggccaatgagccaacaaaatcatgcttccctttgcaaaatatggagtcatgtttcactagaaaatggtgtcccagccagggactacatttcctagaaccctctgcatctaggtgaggtcatgtgactacttttcactcatggaatatgagagccatgatatatgtcacttcagggccaaggtggtcaagaagtgggtgtgacttctctcctccctctttcacctcaactggctaaaccaggaacaccaagcctctaaggaatgcaaaaaccaaaagatggagagagattgaactcctttatcaccatgtggagaaaagctgcccaccagccaggtatatccatattgaattattatgagagtgatacatttctattaygctaagctagtaatgaggcaggaaacaggactcaactccagatgagggactcagacactggacaaaattgaggactagctaaaacaaggacagagtggaagcagctttccataggacatgcccaccagtgtgccaggtcagttta

SEQ ID NO: 203 - DNA, 643 bp, Homo sapiens
cttccttccttccttccttccttccttgctacttccccacccttcctctctytgatcatgtaaataattcctggtcactgtaaaatttcatggatggttgagtttcctcacaatatggtggctggattccaaggataagcatcccaagagaacaaggtggaagtacatgatatttttatgacctagtgtcacttccaccatagtcacaagtatgctcagattcaagatggggacgtaccttccattgcttgacagaagaagtaccaaagtgaagtgcatatgggatgggagatattgttttaactttttttttttggcaaaatacagtcttctatctagtataagtgaatttgtaactccaattctctgtctagatattgatgaatgttctcaaagcccccagccctgtggtcctaattcatcctgcaaaaacatgtcagggaggtacaagtgcagctgtttagatggtttctcttctcccactggaaatgactggatcccaggaaagccgggcaatttctcctgtactggtgatgccctcagtttcccagggatgggtcttgagtggatatctatcagtggggtgagttcatgtatttctgaactgaggcacccaatttcttatctgctcaccctctttcac

SEQ ID NO: 204 - DNA, 563 bp, Homo sapiens
ttaaaatttaattttctcttatatttatttttagaactcatctgaaagacttttataaatgacagtgcatcaacagttgagcatgtgttaacgtggagtggtatattaatagaaagaagcataatatagcacaaagcactcagtcaagcttctagtccagaaagcgtatgattttatctgaagtaatttggaataaatttacttgaaggcaaggtattctatatgagaagttaggccaaatgttgatttggacaaaagtgaatgtagtaaaatgggaaaaaaatcctgaaggctggcatcaaaataactcttaaacaatgaactattacagagatttccacttgagtcatgactyatgccatcttcccctcaagtgcaacataaggtaagctgaactttgtgcagatgtggccaagatgatgggactccctctcccctaagcttccaatcaagggttactgtatcttattagtaggggcagtctgccagcatttctaatccccttcaactcaaatttaaaagactaatttcctggtgattgtggctgagaggctgggggctcc

SEQ ID NO: 205 - DNA, 625 bp, Homo sapiens
tggcccttcacagtgtgactttacagcaactcccataaatactttactttcccagcccttgccatatgattacttcagttaagagaatgcagcacaagtgaggagctctgaatctaggcctccagagcctttgtaccccttcccttgccctcttggtatcttgacagccactgtgtaagcaagaccaggttagttctctcaattaagtaacaaaccttcattgtcccagccaatggtcacttcccagccaatcttacagctgatcacagatgcatacgtgtattagtctgttctcacactgctaataaaracatacctgaaactgggtaatttataaaggaaatagggttaagtgactcagagttcagcatggctggggcggcctcaggaaacttacaatcatgaaaaaggggaagcaaacatgttcttcttcacatggaggcagcaaggagaagtgcagagtgaagagtggggaaagccccttataaaaccatcagatcttgtgagaactcactcagtatcatgagaatagcaaggaggtaaccaaccccatgattcaattaccaaccatgggctccctcccatgacatgtggggatttggggaactatcattcaagatgagat

SEQ ID NO: 206 - DNA, 625 bp, Homo sapiens
tggcccttcacagtgtgactttacagcaactcccataaatactttactttcccagcccttgccatatgattacttcagttaagagaatgcagcacaagtgaggagctctgaatctaggcctccagagcctttgtaccccttcccttgccctcttggtatcttgacagccactgtgtaagcaagaccaggttagttctctcaattaagtaacaaaccttcattgtcccagccaatggtcacttcccagccaatcttacagctgatcacagatgcatacgtgtattagtctgttctcacactgctaataaaaacatacctgaaactgggtaatttataaaggaaataggkttaagtgactcagagttcagcatggctggggcggcctcaggaaacttacaatcatgaaaaaggggaagcaaacatgttcttcttcacatggaggcagcaaggagaagtgcagagtgaagagtggggaaagccccttataaaaccatcagatcttgtgagaactcactcagtatcatgagaatagcaaggaggtaaccaaccccatgattcaattaccaaccatgggctccctcccatgacatgtggggatttggggaactatcattcaagatgagat

SEQ ID NO: 207 - DNA, 1336 bp, Homo sapiens
tggctgtcttttccccatgtgttgtcacatcagattccttctgtgtgtgtctgtctctgtatccagattcccccgtttataaggacaccagtcatgttggattagagcccagtctaattacatcattttaacttgactatttctgtaaaggcactattttcaaataaggtcacattctgaggtaccggggttaggacttcaatatattaatacctttctgtggggacacagttcaacccatagcaaagtactttgcccaggcttgggtacagagtgaacrctcagtaaatatttttcttaccaaagagcctcgtctatcaaagcagagctcagtcctgaggaacaagactgacagctttggctcagcaaggctcacattactcaattatacattcagctctggaggaaggtggcctctgtgttctcagagaacatcatcaatattgtgacactccaacatgtgtcagccactgggtttcccagggctccttctctggggatccttctgaagttggaaaattatcctccaatcctgggtgatctgagcgatggcctgcccagaggtgggaggggagaggatcagagtgtcaaagctgtcaggggcctcaaattctatctcatccaagtccctcatttcagagatgaggaaactgaggcccagcaagggggagccgtctgcttcagctcacttagtaaatgtgaggcatagccaagctcagaatcctgttttctaatttccactagctgctctcttaatcatagtgatgtcccactgccagcattgttgttggttttgttttgtttttggtactttctacaaagattctttgaatttctccacctgtgcaatgggacaggtgctctaggccagctctgactaacagaaatacaaagtgagcttcataggtaattttaaattttctagtgtctacattaaagaattaaaaatgtgggtacaaagtacactcttcagatgatggctacactaaaagcccagacttcaccactgtacagtagatccatgcaccagaactgaacttgtaccccctaaatccataaaaagaaaaacattgaaaacagataaggttagttttaacaatgtatttatcccagtatatccaaaatgttattttaatatgtagtcaatatatgattgtcaatgagatacttcacattttttcttattgaattttgaaatctcgtatatatttaacagcatatctttttaaaaaattattttattttattttactttaagttctgggatacatgtgctgaacatgaaggtttgttacgtaagtatacgtgtgccatggtggtttgctgcacctatcaa

SEQ ID NO: 208 - DNA, 900 bp, Homo sapiens
ggtccccatattggtttctgctgtgttctctgaaaagtgaattgtctctgtatttgtggaggcttcagaagtgagtatctcacctgagaagctacttgcacttggtaaggagctggtcacaagttctgagtgtgtgtccaacatgtctatggtcttcctcctgccagaggtgagaagggaagtcacagggagagcagaagtggggctacttcctgatactgcggaataaagagatgaatgtgaggttattgcaggtaaaggcactggggaagaaggagaactggtttcttccacagagggagggctttgccatgacacgcccttagtacttctgctcatagtagtggtctcctctgagtgtggaaatctctgagtcacaggtgagtgagtcccttcccaggaagctgtgcttgatgtgtccagggtaagggtagcctgtgagatagtccctataggacctgtttggttggtgatggccatttctgtggatcctgttacaaaaggaaaagtggagagcctggtgatggtttctgtggagatgtagggtgacattttggaatgatcaggccctgagatggttgttctgctggaagtgataacttctgtcctggagacctcagtagtagtagtagtgggcacttctgaaaggacagtgctggtctctgtcacagtgttgatctcctcagacgtcctggtgtcccttaatccaggaatcaaagaggatgttgattcagtctgaattctagtctcaaagaaggcaggagttgatgtagaaacacttgtatcccccatggcgaaggtgrtacccattggagatgtggctttggatgtgtgtgaatcagctgggacagaagattgtgattcatgtccagaaatggaggtccccacgttggccactgc

SEQ ID NO: 209 - DNA, 583 bp, Homo sapiens
gagacggggtcttactatgttgcctaggctggtcttggactcctgcattcaattgaccctcctgccgcgacctcccaaagtactgggattataggctttagccactgtgcccagcctaaaacttttgagaaagaatgcttcttgttgattgtctcccctctctattactttagtgtctggcatatagtaggtgcttgaaagcacctgtttagtgcctaagccaggggctgacaaccttactgtaaaggcccagatagtggattatctgaggctttgggggccatgtgctctcttgcaaccatgcaaccctgccrttgtagtgcaaaagcagccacagacaatactttatttataaactctgaaattggaatttcatataattgtcatgtaatgacgtattattccttttgtctttttcccactaactatttaaaatgtaagaactagctgggcgcagtggctcatgcctgtaatcccagtactttgggaggccgaggtgggcggatgacctgaggtcaggagttcgagaccagcctggacaacatggtaaagccctgtctctactaaaaatacaaaaattagc

SEQ ID NO: 210 - DNA, 1214 bp, Homo sapiens
agtgtgaaaattaatacatggtatatttggggagacagcaagcactttaaggcatagtttcaagtagggttggggcttaagttgttkaagtgagagggattttttttttccttaaggctttctacacgatttagattgtaaatctttggaggatagactgctataccaccaagctttcctcagagaaggagatcaaaaacattgggagatttaaatgtaataaactaatacagaactataaagtgtgtgtgtgtgtgagagtgtgtgtgtgggcctgtgcacttgctaatttcacttccctttccttgtcctgtccactctctggtatatataaataatgaactgattaaaacactcacagaagggaaaaggagataaggaggaagaagaaaagtttatgttcattctaaaccctcaggtgctgtgatttcaggagggaagaagctgtttataagtaaataaatatacacacacatataataattgtacttcacatatatataataattgtacttcaagatagcgtgaatacttgcaatgatacaggttaaataccattagagtgataaaaccaagggactacaggatctcagagaaggaaaacctcaccttcagctattgtgattagagattgagaagtagcatttgaattgggtcttaagcacagatagaaatttagttgaggtcatagtagtagtagaatagtgccaggtactattctgaacactttaatattctaattcaattgagcctcacaatgaaccttgtgatataggtattattgttcttgtcattattattatacccattttccaaattagaaaactatggcctagagcagtcaagggacttacccaaagccaaagagttagtaagtaataaaaaggggatttgaacaacggtagtttcggcttcagtccagttaactagctaactaccactcacaagaaacaggacagagggccttctaggagaaagaaatgtctttgggggccaaaaagagttcatatttggaaagggcaaggtgagttcaagggagtgactaaactcagttaaggggataggatctgtgagtattgagagatgacaaccctgctttgttttgttttgttgacacagaatatcactctgttgcccatggggaaatgcagtggtgcagccttggctcactgcaaccctgccctcttgggctcaagcaatcctcccacctcagc

SEQ ID NO: 211 - DNA, 1214 bp, Homo sapiens
agtgtgaaaattaatacatggtatatttggggagacagcaagcactttaaggcatagtttcaagtagggttggggcttaagttgttgaagtgagagggattttttttttccttaaggctttctacacgatttagattgtaaatctttggaggatagactgctataccaccaagctttcctcagagaaggagatcaaaaacattgggagatttaaatgtaataaactaatacagaactataaagtgtgtgtgtgtgtgagwgtgtgtgtgtgggcctgtgcacttgctaatttcacttccctttccttgtcctgtccactctctggtatatataaataatgaactgattaaaacactcacagaagggaaaaggagataaggaggaagaagaaaagtttatgttcattctaaaccctcaggtgctgtgatttcaggagggaagaagctgtttataagtaaataaatatacacacacatataataattgtacttcacatatatataataattgtacttcaagatagcgtgaatacttgcaatgatacaggttaaataccattagagtgataaaaccaagggactacaggatctcagagaaggaaaacctcaccttcagctattgtgattagagattgagaagtagcatttgaattgggtcttaagcacagatagaaatttagttgaggtcatagtagtagtagaatagtgccaggtactattctgaacactttaatattctaattcaattgagcctcacaatgaaccttgtgatataggtattattgttcttgtcattattattatacccattttccaaattagaaaactatggcctagagcagtcaagggacttacccaaagccaaagagttagtaagtaataaaaaggggatttgaacaacggtagtttcggcttcagtccagttaactagctaactaccactcacaagaaacaggacagagggccttctaggagaaagaaatgtctttgggggccaaaaagagttcatatttggaaagggcaaggtgagttcaagggagtgactaaactcagttaaggggataggatctgtgagtattgagagatgacaaccctgctttgttttgttttgttgacacagaatatcactctgttgcccatggggaaatgcagtggtgcagccttggctcactgcaaccctgccctcttgggctcaagcaatcctcccacctcagc

SEQ ID NO: 212 - DNA, 567 bp, Homo sapiens
agctctaggctggtcaaccattatgaatccctggggtcaagcacaccaccacagtatctggggtatcaagaggtggctccaacttccaaaagaatgaaactagaatactccagagaaggcagccagtgtgttctaatcttctcaactagactagaaactccttgagggcagtcttggttctctaaatttcctaaggtagtgcctagatcttaatagtggccttattaatatttattttatggaagaatgaacatgtggatggatggatatgtggtaggtgggtgggtggatggatggatggggttaccctaaaacttaaagtataataataataaaataaaataaaataaaataagaaaaattagcagaaataagactaccagtatctaagatcataaagagtagagaaaatagtaaataaaagcttgtttactgaagagtagctcaggagaaacttcattaaaayggcaaatggagaaaatataagtatagcattactttacatagcaaaaggacagtttagagagcctactcacttgaaggtagggcgagcataatactttctcc

SEQ ID NO: 213 - DNA, 646 bp, Homo sapiens
aaaaataaagaatacaactatggggccaggcacggtggctcacgcctgtattaccagcactttgggaggctgaggcgggcagatcacaaggtcaggagatcgagaccatcctggctaacacggtgaaaccacgtgtctactaaaaataaaaaaaaaaatcagccgggcgtggtggtgggcgcctgtagtcccagctactcgggaggccgaggcaggagaatggtgtgaacccaggaggcggagcttgcagtgagccgagatcgcgccactgcactccagcctgggcgacagagcgagactccatctcaaaaaaaaaaaaaaaaaaaaaaaaaagaatacaactgtggttaccaactttaaggtaggaccagggaaagaaakaaatactgtgtgaacagagagccaggagaatttagggtcatgaaaaccaaaagatgatagcaaggtcgtcagctttagagttgctggattagggatttagtacagttatcaagttactggtgtaattttaatgagtagcctttataaggaaactagaatctgatcacttggagctacagaaaaaaatagcataaaattttgcttaaaataagtttgtagtctagtgttcacatagatacttaagagctccagaggtcacatgggc

SEQ ID NO: 214 - DNA, 768 bp, Homo sapiens
tgcatccattgaaaagcaggcctcattcttctccttaaaagatacgtcatgttaaataatgtatcaaaatgtgtaatgtacttaccttgttttgattaattgggtatcaataaaaattataatgataatgcaaatcagaagattttttaaatagttaagccttgaggtcactgaaaattaaatttttatttatatttcaattttcatacatatttctgtttcaaaaaattatgatgtcataaggactttcaatcaaaatatattaggctaaaatttgggagagaaaatgaattggagaggaaggaggaacttctaactatttaaaaaagaacatgttcatctttttagtgtagatatgtaggcatcaattcctcatgatagtcacattccactggacacactttaaaatgtagtatgagttttaaatgtcaatatttatgatatgccaggaattatatcatttacaactattaaatgtataaaacttttagatatttgaaatttagatayagagataacatttttaagtgttggaagggtacatagtttttcaaagttattgtacagaacacaacagcaaacaaacctacattaggtcagtagttatatgttaatgaagcaggaaatttccccgaccccttcgtgggcgggaactggagtgcacgggcgctggacccaggcaggagcttcagccagggtgaattccactcactcaaacccactgcgttctacccctcgtgggacggggagcgcaggtgggtggtgcag

SEQ ID NO: 215 - DNA, 1535 bp, Homo sapiens
tattcattctgacttcttttctgcatgtatctatcatttgtattatttatataactgaagtgagacacactctcataagcacaaattaacaytgacctttttactcagatctctgaaactttaacccatttaaaattttaatatctaaaaataaatttaacaaaatcaaaatgctcttattaaaaggatttaattatttcatcaatatggtatttatttggcccagtaaccattaagagataatagatatttcttttgctaatatagcatgaatataatgaatgaatgacatttagaaagtaattaacaacatttccacagttaatatctttttccatatcataaggatcatgtctcttgatctgccctcatgatgtgtgacattcttattttataacatatgtatcattgcttttcaacagtcttccattatctcacttttacagttcaaattattcatatcacaaatgcagagacatgagacagggttgtagaaatgcctattcatggtagtctaccatgaaggtcataactcagtttcattatatctttatttaagaaccaggcatgatttttatatccatgaatcagattaatttatccatcatgcttggtatttattttaaaacaaataatatcaccattaaaaaaactagtcactttctaatttcatatctaatttcacatgttgctgtcttgctcctttttaataatttacaagaattctattatcctctaataacagaacctttaattttccatgtttgataaaatcatttgatattaactattttgggccaaagctgttttaattgccttctgtcctttaaataatttattttaattgaatttttgtcatagctgaaagagaaactgcacattgcattataccctcctataatccataaacagtttgggcaaaggtctactcatggaagctcacttcaattgctagattttttctatattacatgtatgctggagttgtatttctttattcctttattttattcattgaaaaactatttgtgactactaaaatgaaattggtgttaagtgcttggtacactgtaatgaacaaagtaaattagctccttactctcatggggcttatacttgaaaagcataattaaaacttgaatatattccctggaaaaaaaaatagagacaccaacagaaaacaagaggagtctgtttaaaattaaagcggctggggacaacctgtccaagatgataacatgcaagagaaaacagctcatgaaagagcctggaggtaaaaagagtgtgattatcttcatagtgtgtgaagatgacaagtgtggtgaaggagcccagtgtgttctgagccagtaagggaagaagacggtggcaggaaattcagttgaagaatgaacaggggccagaactgaaagagtcttgtaggtgtctgtcactgtttgttcagataaaacttaaaataatttccttaggagcttaagttttccctctttatgttctgttctttgctaatgaaacaaatattactcttggagcaa

SEQ ID NO: 216 - DNA, 1265 bp, Homo sapiens
tgcatcccgggccctgtctttcacaccagcctcctggctcccctgctccccagttctcctcccataaccccatctccactttggagctcagggcctggccctaagctgattcacgcagtttccaagcaaacaacaagctttgccacctctgtgcctctgccagtgccgtgacccctgcctggggtgcccttccttgctgccctggacaactcctcctttccttccaaggtccagatcacgtctcacctctcctgtgacaccccaacacctcctctcccccagagcaccacaggctgctccctccccggaccgagcacccgtgtaactgtgcatctcacttgggtagcatctagcacatcttgggggaccatctgctgtctccttagtgtctgtgtagacctggggtgtcgtactatcatcctgggggcctggactgctgcctggagggttctgaggctgtgcctggcctagtggggcatgggctgcttaatgacatcttacagcatgcaggaagggcgaagtgcagctcctggatgggctgttgccatggtctggcccccatggtgctcagacttgccagagcatctgaatctctgggagtcctgttcaacctgggtccccaggcaccactgccagggattctgagacaggaggtctgggatgccccagaacttgcrtatcaaacaaactctcagggatggccagtgccacgggtctccaggctgggaacatggatcccagtccaggctagctgcctctgtagccctcgggagcccattagaaatgcagaccctccccctgcccagatccactgcacgagaatctacatgtctacgagattccgggggcacctgtctgtggagtttgaggagcacagccttagatgctagtccccggtgtgggcaccatgcaccactccttctgcatttgtgtcactacctgcttctgcacgtaggaggcacctcaaatgccatttagaatggatgctcagtaagccaaatgtggcctcctttttcccttttggaaaggaaggtccttctttctcaaaccttgtgtctagaatgttccccaatgaggggaggatgtctcactaaaaacactgaaaggacattgcttatacactggccttctgtagagagcctctggagcctcgaggaagtgtagctcctaacgcagtcggctgcactgactcaattatacatctattggaccttcgcaagtgcagagctgccactgtcacttctgatcgtaacaacccaaatgca

SEQ ID NO: 217 - DNA, 568 bp, Homo sapiens
tatttattcaatgaaattatatataacaatgaaaataataaatattctccccacaataactttgccgaatatgtgmtgctattggtggtactgccacttgtttgtgccttccaaatcctgattaattctattgtgtttgagtcccattttaaaagagggaaaagaaaagtccattttttttccctcctggactcaagcgatcctcccacctcagcctccccagtagatggggctacaggtgcacacaccacatctagctaatttttgtattttttgtagatagagagttttgctatgttgcctgggctggtctggaattcctgggctcaagcaatccacctgccttggcctcccaaagtgctgggattacaggcgtgagtcaccacgcccagctatcactatatactctgtactactgcctttatttctgatgggagggaagttccattttgactcagcttttaaaaaaataccctatgaagagattcaccagctcagctttgttgagacccaatcctctgcttacctttacaattttacaaaccatgtggaccacttgaataaatca

SEQ ID NO: 218 - DNA, 568 bp, Homo sapiens
tatttattcaatgaaattatatataacaatgaaaataataaatattctccccacaataactttgccgaatatgtgctgctattggtggtactgccacttgtttgtgccttccaaatcctgattaattctattgtgtttgagtcccattttaaaagaggraaaagaaaagtccattttttttccctcctggactcaagcgatcctcccacctcagcctccccagtagatggggctacaggtgcacacaccacatctagctaatttttgtattttttgtagatagagagttttgctatgttgcctgggctggtctggaattcctgggctcaagcaatccacctgccttggcctcccaaagtgctgggattacaggcgtgagtcaccacgcccagctatcactatatactctgtactactgcctttatttctgatgggagggaagttccattttgactcagcttttaaaaaaataccctatgaagagattcaccagctcagctttgttgagacccaatcctctgcttacctttacaattttacaaaccatgtggaccacttgaataaatca

SEQ ID NO: 219 - DNA, 568 bp, Homo sapiens
tatttattcaatgaaattatatataacaatgaaaataataaatattctccccacaataactttgccgaatatgtgctgctattggtggtactgccacttgtttgtgccttccaaatcctgattaattctattgtgtttgagtcccattttaaaagagggaaaagaaaagtccattttttttccctcctggactcaagcgatcctcccacctcagcctccccagtagatggggctacaggtgcacacaccacatctagctaatttttgtattttttgtagatagagagttttgctatgttgcctgggctggtctggaattcctgggctcaagcaatccaccygccttggcctcccaaagtgctgggattacaggcgtgagtcaccacgcccagctatcactatatactctgtactactgcctttatttctgatgggagggaagttccattttgactcagcttttaaaaaaataccctatgaagagattcaccagctcagctttgttgagacccaatcctctgcttacctttacaattttacaaaccatgtggaccacttgaataaatca

SEQ ID NO: 220 - DNA, 603 bp, Homo sapiens
ccttaaatttttctcaaactctataatcaaggggaaaatgtttcattttgttttgcttttttgagacaggcttgcctataatggagtgcagtagcttgaccatagctcactgtagcttcaacctcccaggcacaagcgatcctcctgcctcagcctccaagtagctgcgattacaggtgcatgccaccatgcccaacttatttttttccttttttttttttttttttttttttgtttgatagaaacagggtttcaccatgttgctcaggctggtctcaaactcctggactcaggcaattcaccagcctcagcctcccacagtgctggggttacaggagtgagccaccatgcccagttaaaaatacattttttattwaaaaaaaaaaaaaagaatattccttatatttcctttatattttttaaactacatacccaaaataaagcatatcaaaaactgtaaaaaaaaaaaaaaaaaaaaaaaaaaaaccctaatatcagatattccaaacacaacaataccataatttaatcacttaaaatcttactcaaaactaaatcaatgatcttttaggccaggtgtggtgactcatgacactaatcaca

SEQ ID NO: 221 - DNA, 603 bp, Homo sapiens
ccttaaatttttctcaaactctataatcaaggggaaaatgtttcattttgttttgcttttttgagacaggcttgcctataatggagtgcagtagcttgaccatagctcactgtagcttcaacctcccaggcacaagcgatcctcctgcctcagcctccaagtagctgcgattacaggtgcatgccaccatgcccaacttatttttttccttttttttttttttttttttttttgtttgatagaaacagggtttcaccatgttgctcaggctggtctcaaactcctggactcaggcaattcaccagcctcagcctcccacagtgctggggttacaggagtgagccaccatgcccagttaaaaatacattttttattawaaaaaaaaaaaaagaatattccttatatttcctttatattttttaaactacatacccaaaataaagcatatcaaaaactgtaaaaaaaaaaaaaaaaaaaaaaaaaaaaccctaatatcagatattccaaacacaacaataccataatttaatcacttaaaatcttactcaaaactaaatcaatgatcttttaggccaggtgtggtgactcatgacactaatcaca

SEQ ID NO: 222 - DNA, 1341 bp, Homo sapiens
gcatgtcttcacttatccatctttgcatatgtatctattagttatttagaataagttcctggaagtggaattacagaatcaagaataagcacatttaaaagccaggcggatgtccaagaagctcctaaaaagctgcatccatttccatctgccgaccccgtgtgggtgtgcccgcctcctcaccctgacagcagggtgttgccacacttgtaaatccctgccgcctggcagttggcctgtgcctcgagcaagctggtgtcatggattgtgagttaggatggacagctgtttgcattttttctttggctgattgccagtgtatattattttaaaattttaaatggatttgttttttcctcattgatttataagagctctttctatatggaggatatttactccttgccatatacccattgccatttttctctctgttaactgattcatttcatcagagttttcatcttgtttcaaaagaaagtccccaggccgctcctccctgcaggcagctcctggacaggggtcagtccccccgccatgtgcctgccttgctgatgaagccagggtgaggccccgggcagcaggggctcctgaccacctgggaagaatcggcactccctgctggcatctggaacagaagcctattggcctggggacccgagcattccgtggggcagggctatgaaggaatcgtctctgtaaatcttcagtgtcctcatttctcccctcctttatctcacaaggcctcttggccgagcccagtctcccccgaggaatcctctctggcacacatcatttgtcatctgctttgttctgctactcaatgtttggaattccaggctcactgagaagtcatctgttggggagaatttggggctggttgactctgttgtcagtgacaccgccagatggggctgactccagatggacggggttggccagggtcgatctgggccaacagtgccagcctgtggctgcttcccgggcaggggccatctcatgggtgcctgaggggtgaaaacttggggtgttcgtgtcaccttggctggggcacaggaaggccccacacgttagctgttggtgaggagcacccacacccaggggagcactcacacccagaggagcacccacacccggggcccctctttcctgggcattcggttcctcagcgacaccggcttggtgctgggacccgtgatccacaggcacagatctgtcttcagggatctcactgtgaagctggccatgttttattctttttttttttttttgagatggagtctcgctctgtcgcccagactrgagtgcagtggtttgatctcggctcactgcaagctctgc

SEQ ID NO: 223 - DNA, 746 bp, Homo sapiens
agtgaaataagctaagcaaaacaaatgttgtatgagtccacttatggaaggtacctagaagagtaaaatcatggagacagaaagtagaacaggggttaccagggacagtggagagttaatgtttaatgggtgcagagtttcagtttgggaagatgaaaacatcctggagatggatggtggtgacagatacacaacattgtgaatgtacttaataccactaaattttaaaaggtcacttcaaaatggctgaaatggtaagttttgtgtatgtatattttataacaattaaaaaagaagacataaagttaggcacttttctggggtaataattatagcccagccaccctgtagctagcacttatgcgtgggtgaatggaggcattgctgtttccatttccagatgtggaagctgagaggcataagtatgtgatttgccaaagccacacatcaattgaacctgggattgaatcctgctctttctgactccaaacctacaagggtccatgttgctgacatcagtgtggatcaygtcacacccccccgctgaccccctttccagggaaggctttggggcagtgtccacttaccagcctcaaagaaaaggaaactgatgagaaaactgttgagatcctgttattgatcaaaatccaatatgagttttttcagttcacacttagcaaaagaaagaagatattccttttcctaaatattaaattttgatgaagcaagacaactgtgcacagaga

SEQ ID NO: 224 - DNA, 558 bp, Homo sapiens
ttactgctatccaagaggccatgcttcatacaggcaaagaataagaattcaaaatacatgacacacatgttttattgtatgtgtataggttatttctgaaaggatacctaaaaaggcttatttttactacatactctttgcactttaaaatttttataccatgtgtaagaaaaggaaaaaaaaggtcattccagtttaggatatacacagacacctcagaaaatatttagaatacatcttcatgactgggaaagcaggggagtttaatgatacattttcccagttcatattttcctatttttcccccttccactgtctatttcaaaggggtggtggcagggaggaaatatatatttacatcctctgggacacagcaggtagcaatctgccctcttagagtcctagactgacagttctactctaagaaaagcacatgaaccatctgatgatctggtttgaatagtatagctaactttkacatgggagttttagaatgcagggtgaaaaaaattatctgaagggcaccgtatgaataatgaacagaattatcaactttga

SEQ ID NO: 225 - DNA, 1025 bp, Homo sapiens
ctgatgctctcgctcccctcacactcctgaaacaggccgcggtgtgtgttgtttcccatcatgtgtccacgtgttctcgtcgttcagctcccacttatcagtgacaacaggcgatgtttgggttttctgttcctgcgttagtctgctgaggataacgccttccagcaccatccatgtccctgcaaagaggctgacaagtcttaaaggtgcggcagctccatctagcaagcttcccggcccacragatgtttgccacgtgcacagagcccttctgttgaacatgctcagagatgttgaggagaagaaacattgaggatgctctactcttgtttatggccatttacaacatttccatttaaaaattagttttccaaattttgttctgtaatgatgaaatcgttcgctgtacagcggggacctggcactgcaccctgttccctggagctttagtgcgcacccacgggcacacatgtatcagaacgcgcgctgtgcagagtgaagtcagcttgattaggtggcacggccaacacctctctacccgcctcatggagttcgcaagccattttaacagtggaacgggattcctggccatttttgttccctcctttgcaatgtgctgttttagttttttctaaattctgtatgtgggacacacattacctttgtaatcccattttgtggttaaaacaataatgcttcttcaactctgttttctttttttgagacggagtctcgctctgttgcccaggctggggtgcggtggtgcgatctctgctcactgcaacctctgcctcctgggttcacgccattctcctgcctcagcctcccaagtagctgggactacaggcgcccgccacgccaccatgcccgactaattttttatatcgtttttctagtagagatggggtttcaccgtgttagccaggatggtgtcgatctcctgacctcatgatccgcctgcctcggcctcccattgtgctgggattacaggcgtgagccaccacacccgtcctacatcttcaact

SEQ ID NO: 226 - DNA, 572 bp, Homo sapiens
tgtaaatttgagttcattgtagattgtgcatattagccctttgtcagatgagtagattgcaaaaattttctccctttctgtatgttgcctgttcactctgatggtggtttcttttgctgtgcagaacctcgttagtttaatccgatcccatttgtcaattttgggttttgttgccattgctttyggtgttttagacatgaagtctttgcccatgcctatgtcctgaatggtattgcctaggttttcttctagagtttttatggttttaggtctaacatttaagtctttaatccatctgagatttcttaaaacatggaaacattcttttctgaaatagtgcagaattaacatcatagaattttatgttgtcatttcagaattctcctattacacatcaacttattttaccaatattcaaaaacagtgttgacatttttaggaaacaatgattatattctagtctttaaacacacagcaagtaaagctcaattgaaatgtacttcatgcaatttgcagagagggaaacagcaggctaggctgtatcctaacgaatgtggataaagtaacagcct

SEQ ID NO: 227 - DNA, 638 bp, Homo sapiens
tacaatcctacatttgcctgttaatcaacagctgactgatttatatggcttttttcttatcatgtcagccaaggaccaggaatgttggcaccaccaaggatggtattataaatgtagaatcatgagttcataccagatctactgaatcagaatctgcattttaacaagatccgcacataattcatttgcaccttaaactttaaaaagcaggactttatagtaccaaggaagatatccacaagaggttgacactgttttagatttcttgagttatatgctaaatgtttgtccctcatatgrtaagcaatactatttaaaggcaaagaaagcttaaatacatggaagaaacttcaaatctacaggaaaatgatgtgactgattcataagtcgagcataacaatattgatagaaatctaagtccaaattcatttaaaagctttttctgtaagctctatttaagtattaaatggactctagtgataagaaagcattgtgctataatttgaccacatttttttctttcataatagtagataaaatcatatcttcccacagatggaacattaactttggtaaaatacagacaataataccagttcattgtaccacaaattcatcagaaataatgaaaatcataa

SEQ ID NO: 228 - DNA, 754 bp, Homo sapiens
aaagactttatacagatgagagtggaaagaggagagtgcagcagaaatacgctgtgatgtccttctcccccaccaccacttccaagcctggctgttgagatgtgcccagtgtcaaaagaattggggattaaaacaccaaagcctaaatatcagacttgccaattattttacttatatttactttgaaaccctgccagtctaaagaccgtcttcaccagaagacttctgtggctgggaaaaatctctcaaggcaatgaccagtgtagtccagtcgaaaatgaaatgggaaattgaaagctaggcctgaagctgaataatacagtgcaaaattttcaattcagggtcagtacacagtaatattttatgcctcaggacagggcttaagtattaaggacagaaaaagagtcactaatgtttaatacatacagagacagcagcacgctaggccctatggccaggacccctacatcacagaaccgtggaggaccctattcacattatcagctatgaatagtgtccctcctccagggtyacacaacacacatgacctgcagagcccaaaacaggcttttctcagggagataccaaacacaaaacaaaaaccagggaaaacacagtctcaagtcaattaccaagcaagggaaagagaaaggtccacatgcaaatgacaactaggggagggggtagttataattgctctgcatgaattgagaatggaaccactgcccagtttactaagcatgctcacatgcat

SEQ ID NO: 229 - DNA, 716 bp, Homo sapiens
tgcattgatttgcctcacaagacatggactctgattcatcacagcattgtcccaatgtgtgcatcatggcacatccacaaagagtatctgcccttttagctcctggcgccttgacttataaggctactatagtgatgctgtagttatagccttttaagcacctactttctcatattctggcaacagcatcacacttttcctttagggaaccaccgctcccactctcaatccatgtagtaagaaactgtcttcttcatgtaagttccagcagtggagtagatccaggcttaaccaatcagcatatctaacttcaatagccactgagactgaatkatagatagttgcatgcccatttcagtacatggagaattgattcttggattgttgccaaaattacttgggggaaaaaagacttttgattaaggttattcaatggatatgatacaaacctgcagctgctgagaggcacccaggaagagatgcccaaaaacttacaagggatgtgaaggacctcttcaaggagaactaccaaccactgctcaaggaaataagagaggacacaaacaaatagaaaaacattctatgttcatggataggaagaatcaatattgtgaaaatggccatactacccaaagtaatttatagattcaatgctattcctatcaagctaccattgactttctttacagaattagaaaaaaaaaaactactttaaa

SEQ ID NO: 230 - DNA, 506 bp, Homo sapiens
tgcactgcttagagatgatcacaatctctttgatccttctcacacaaaacttcacctcatatataggagcagtaaggtaatagtttcagtggaatctgctgtctcttgtgatgctctgaaatttggatcttttgcctgaactaacatcttaggagggcttcagtcagttcaccattcgtaagtggatttatttcttcatttcgtgcactaacttgggtccaagtgaacctttatttatttatttacttacttacttatttacataaacctacttgaaaagatatatgaggaagcttataataaaaatcacaagtatttttaaacccaactataaaacaggagcacaaatgcagttatacttaaacctaagtagayccacccaaatttttaatgattttttttttactatataagttcactgatgaattttccatctgaaactttatataaagcaacttaacagatgctatctttataacaccattataataaaggctcttctatgt

SEQ ID NO: 231 - DNA, 586 bp, Homo sapiens
cattttgtctgaaggaaaaaaaaaggaggaaataaattttttgaaaaaggtttatatttacagagagtgcctaacgaactagttaacattcttactatcaggaaagcctaaaccattcataaataaaccattttaaaccacctttacccacatgcagcactctttctttcagctccctttagcaatttgaagtacaggagattaaagtcctttggaaatttccaaggtcagacctcaactaaaataggattaagggggtaagggcgggggggagacaaaaatgaagagaaaggtcttattcccttttcccccttctcctaactatctgaaataaatcggaagttatttctcgaaatcctcctttcccctggccagtggcagctcttcaaaascttctgagactgtttaaaatttttcctatcccttcctccccccattgtaagaaaaacaagtagagtgaggaagggaagttaaaaggttgacgttagggtcccttctaggcaatactccagggagcactgtgacattaagaacttttgctgaaagcagctgctagtttgatcattactgaaagaagaaaaattct

SEQ ID NO: 232 - DNA, 1310 bp, Homo sapiens
ttttggattttatatggcattaaaatgacaggtggtttcatctaggtcaatttaaataaacttttacaaaacaacttaggagctatttgtctccattctgggaccgtgatggtggtgtgtgacacacccagaggaaagttctctgcccaaggttctgaagagctgggtgaatgacttcctcactcccttctctgggttgtggcctggaggatcttctatggcaacagtgttggtttccacctgagatctagtttgggtatttggtatcctacctccaggtgccaagtgtggctaaggctcctgaggagatagccagggacctagggattcccaaccctcttggttctctggacaacaactctgccctttagttgtgactgagttgtcccttctgaccttacatctggccctcaatgttgtagtgggaaggcctgggggctttcaagccacaaggatgcaaatggcagctctgccacttaccagcttggtagctgggtgaatgacctgatctttctgaccctcagatcctttatttgtaaattcagttgacagccatttttacctaatcacattataaaaggctttaaaaaaaacgaaagatcatagattcttaattcaaggacaccatcaatgtatcattccttcaaaaaatattcaagtgatacctatgggctggatgctatttaagtgccaaagatacagcagtgaataaggtggacaaagccccaccttttgggagtgtaccttctggtttagggagtcagacaagaaagaaaggataagtattacaaaggcaactaaagcaggatcaggagtgcttttataaataaggtagctatggaaggcctccctgatgaagtgacatttgagcagagacatgtgggacatgaggacgcagtacatgagcatattggagcaaaggtgttctaggcagaagagactgcatgtgcaaaggccctggggcgggtcakgcttggcatattcagagaacagcaaggagccccgtatggccaaagcagagtgaatgacaggaagagaggtggaagatgaggtcacagaggtcacaggagcctgatcatgttaaccacagtaaggattctactctgtataagacaagatcaatgggtgggttttgcataaaggagcaatctaatctgacttcgatttcatgaagacaactctggtaattgtgtggagagtaaactatgagggcacaggtggaggaagcagggccagttatgagattactgcaataataataattggcaccaagttattattgatgttttagagaaacaaaaaatacgata

SEQ ID NO: 233 - DNA, 1310 bp, Homo sapiens
ttttggattttatatggcattaaaatgacaggtggtttcatctaggtcaatttaaataaacttttacaaaacaacttaggagctatttgtctccattctgggaccgtgatggtggtgtgtgacacacccagaggaaagttctctgcccaaggttctgaagagctgggtgaatgacttcctcactcccttctctgggttgtggcctggaggatcttctatggcaacagtgttggtttccacctgagatctagtttgggtatttggtatcctacctccaggtgccaagtgtggctaaggctcctgaggagatagccagggacctagggattcccaaccctcttggttctctggacaacaactctgccctttagttgtgactgagttgtcccttctgaccttacatctggccctcaatgttgtagtgggaaggcctgggggctttcaagccacaaggatgcaaatggcagctctgccacttaccagcttggtagctgggtgaatgacctgatctttctgaccctcagatcctttatttgtaaattcagttgacagccatttttacctaatcacattataaaaggctttaaaaaaaacgaaagatcatagattcttaattcaaggacaccatcaatgtatcattccttcaaaaaatattcaagtgatacctatgggctggatgctatttaagtgccaaagatacagcagtgaataaggtggacaaagccccaccttttgggagtgtaccttctggtttagggagtcagacaagaaagaaaggataagtattacaaaggcaactaaagcaggatcaggagtgcttttataaataaggtagctatggaaggcctccctgatgaagtgacatttgagcagagacatgtgggacatgaggacgcagtacatgagcatattggagcaaaggtgttctaggcagaagagactgcatgtgcaaaggccctggggcgggtcaggcttggcatattcagagaacagcaaggagccccgtatggccaaagcagagtgaatgacaggaagagaggtggaagatgaggtcacagaggtcacaggagcctgatcatgttaaccacagtaaggattctactctgtataagacaagatcaatgggtgggttttgyataaaggagcaatctaatctgacttcgatttcatgaagacaactctggtaattgtgtggagagtaaactatgagggcacaggtggaggaagcagggccagttatgagattactgcaataataataattggcaccaagttattattgatgttttagagaaacaaaaaatacgata

SEQ ID NO: 234 - DNA, 926 bp, Homo sapiens
gcattttctttgttactagaaaaaatctgacagagtttaatggctatttatygttccactatgaggatgcttcattatttactaatcatttccctgttgttgatattttcttatatccaagtttttgccactgtaaacaatataatattgatcactatgagggcatcagacacaaaactttatttctttacttaggataatttccttggtcggcattttacatatctgaattactaaatcagtgggctttatattataaaggcttctgatatatgttgtccatttgctctatataaaaagtagttgttagtttacattcatgctagccgtctatctcctttagtctctaagttttgttttttaagtctataattagaaaacaaaatgtaacaaaacaaaacaaatacaaactcttcctaggaaaattccaatctgctattttgtgaagaggctgaaattaaactggtttctacatgatccatacttcatgtgtcttctttcatcagcagatagcattttctttaatctcaaggttggggtaagggggcctttgacatgaatctctctgatatactcttaagtaagaaccaatctttgcaggcctatgtgaaattgtcaagcatggaggaaggaatgagaatttgatgggcacctattgtcaataattttattctttaacttttctctttttgtctcatgattctctgctctgcacactttcaattccaaacactgttagctgggtgttgtagtcccagctacttggtaggctgagtcaagaggattgcttgagcccaggagtttcaagctgcagtgagcaatgatcacacaactgtacttcagcctaggtgacagagtgagactctgtctctaaataaataaaaaataaaaataaaaataaaataaaactctaaacacttgagata

SEQ ID NO: 235 - DNA, 926 bp, Homo sapiens
gcattttctttgttactagaaaaaatctgacagagtttaatggctatttatcgttccactatgaggatgcttcattatttactaatcatttccctgttgttgatattttcttatatccaagtttttgccactgtaaacaatataatattgatcactatgagggcatcagacacaaaactttatttctttacttaggataatttccttggtcggcattttacatatctgaattactaaatcagtgggctttatattataaaggcttctgatatatgttgtccatttgctctatataaaaagtagttgttagtttacattcatgctagccgtctatctcctttagtctctaagttttgttttttaagtctataattagaaaacaaaatgtaacaaaacaaaacaaatacaaactcttcctaggaaaattccaatctgctattttgtgaagaggctgaaattaaactggtttctacatgatccatacttcatgtgtcttctttcatcagcagatagcattttctttaatctcaaggttggggtaagggggcctttgacatgaatctctctgatatactcttaagtaagaaccaatctttgcaggcctatgtgaaattgtcaagcatggaggaaggaatgagaatttgatgggcacctattgtcaataattttattctttaacttttctctttttgtctcatgattctctgctctgcacactttcaattccaaacactgttagctkggtgttgtagtcccagctacttggtaggctgagtcaagaggattgcttgagcccaggagtttcaagctgcagtgagcaatgatcacacaactgtacttcagcctaggtgacagagtgagactctgtctctaaataaataaaaaataaaaataaaaataaaataaaactctaaacacttgagata

SEQ ID NO: 236 - DNA, 632 bp, Homo sapiens
ttggtttctgttaagtttgaaatttctattacatattctggtggaaatgaaaaataaataccaattccaaactagagatatacattttggagatatcagtatattggtgaatttcttgagactacctagagttagtgtcggtagagaaaagttttcagatttgattcctagtacatgttaaggtttagaggctgaagacattggttagaatgagtaaaggagcatcatgtaagagtggccaaggaggtaggaagaaaaccaggagggaatgaggttttgaaagccaagtaaagagagagtctcaaagtgggaatgaccaatctgtgagatctgctagagttgaggactgagaactgatgtttgcgttagcagtgtaaaagtcattgatgaccttgacaagagcagaagtagataatggaaatctgattaaagtgtgtttttgaactctcttgagagatgaggaggaaaagaattgtagtcggtgagcatagactactctttctgggtattttgtagtcagggggagcagaaaaactgttaaaactacaaagggatgtgggatcaagaggggggacaactttgaaycatatataaaaatgtgctctaaaagagttcttaaagttactgagtct

SEQ ID NO: 237 - DNA, 2191 bp, Homo sapiens
actggtktgtctctttagctctttgcacactaaatgctgcttatcacatgggcattgagtgagctcataaaagcccctggaagcaggcaacatcaatcctctggcttccagctccctcctctgttgcagtgaggccacatttggctgctgcacttgacagaatcagttttcattggctaaaactgttttttgcttcagagctctcaaaactgccttgggaaaaacaaaacaacaacaaaaaacgtggtctgtttttccctttcatgcagcttttgggacagcccaacattactggcttgtgtgtgtgtgtatgtacatacatacatacatacgtacatatatatatatttatttatttattttagaagagccagttaaaaaattatctttatagatactagaaagttatttgttacttaaaaaaaaaaggaaaaaaatgaattgaaaatatgtcagatcattcatagtgcattcatcaacagtagcagctccctaacccttagaatcaatgtactagtgatgggccactatatcaattttaaactatcagaagaagaaaagaagtaaagaggacctcagtaatctgattaagtattgcaggtgagagagagcagatcaacatgaacagcaattccattttgattcagtgccccttttcatctgaagaagtgaagtatttcaaaatatttgaaactccctcctggtagaaagttgcttagtgaaagatgctgactcatttctgtgaatgacgatattggatattgtaatctgcattatttagcccgttgtgtgatattaatccatattttaaaaagaaaggagaggagatgagagagaagggaagagcagagaggagaaatggagatgtagaagtgaaggaaggctatatgcctcaggtggagtaacttagaagcttgcagcataaccagaaacgtatgctatttccagatttctcatgcaaaacacaagttataaaaataggattttattcaccaggatgaatatgcagattgtcagaaaagcaataactttattgaaagcccttgctatggatgaaagctcctgatctagttctcttattttttcactgggatgcattgacatctacatgaaaacccattcaatagacactgttaacatttatatattctgaaaagcaaaaacatgggcatcatactcttagtttctgaaacagttccattccttaaagtcatgtaagtccaaaataaatcaagatcagaaccgagaatgttatggtccagattcctttggcctatttcctgaatgaattaagcttagtgcatttgtatgaattgttctgtcaatcttcatttgttcaaattttgtgccaagaaatattttagtgttgaactactgtatggtactgaataaggcatttctctctcccctttaagcttgcaatcaagtgggtacaaacaaaaacaaatcataaacatataaataaataagatccatacattaattgggcagtgtttagtgcagttaacaaaaacactctagatactttaaacagaagagtttgaaacgaaagttaatagagaaatacagacaaaatggttcaaaaggctgaacaagtgaaagtcagagccctgccactggagctcatatgttcaaagtccctccagtgttgtgtaaccacattcaaagagctagtgttgagccacagttgcctctagcatccatgaaactagagagaatacactgaaacacaaaatagcgtcttggtcttcttatctcaacaaccttgtttgtcagcgtaagcaaggcaatagcctgtacttcacttgtgtttttcaaaagttacttaaaacttaattttgattgagaattctagtgcaaagaagtctggtaagtgtagattttttagctcaccagtgtctgtggtatagaaaggcagtttagagggagggtagagtggaggttgagtgaatcaattcacataacctatcatactgcagattaagataaataatataaggaagtaatataaatgacatgacagaaaataaaatgtcagtggtagtagcttactatgataggctggtcagagagggctctttgtgtagctgacatttgattgtagacctgaagaaaggcactgatgttagccatctgaagagctagagggaaaaaaacccacaaagtaatgaacaaggggaaagacagcatt

SEQ ID NO: 238 - DNA, 2191 bp, Homo sapiens
actggtttgtctctttagctctttgcacactaaatgctgcttatcacatgggcattgagtgagctcataaaagcccctggaagcaggcaacatcaatcctctggcttccagctccctcctctgttgcagtgaggccacatttggctgctgcacttgacagaatcagttttcattggctaaaactgttttttgcttcagagctctcaaaactgccttgggaaaaacaaaacaacaacaaaaaaygtggtctgtttttccctttcatgcagcttttgggacagcccaacattactggcttgtgtgtgtgtgtatgtacatacatacatacatacgtacatatatatatatttatttatttattttagaagagccagttaaaaaattatctttatagatactagaaagttatttgttacttaaaaaaaaaaggaaaaaaatgaattgaaaatatgtcagatcattcatagtgcattcatcaacagtagcagctccctaacccttagaatcaatgtactagtgatgggccactatatcaattttaaactatcagaagaagaaaagaagtaaagaggacctcagtaatctgattaagtattgcaggtgagagagagcagatcaacatgaacagcaattccattttgattcagtgccccttttcatctgaagaagtgaagtatttcaaaatatttgaaactccctcctggtagaaagttgcttagtgaaagatgctgactcatttctgtgaatgacgatattggatattgtaatctgcattatttagcccgttgtgtgatattaatccatattttaaaaagaaaggagaggagatgagagagaagggaagagcagagaggagaaatggagatgtagaagtgaaggaaggctatatgcctcaggtggagtaacttagaagcttgcagcataaccagaaacgtatgctatttccagatttctcatgcaaaacacaagttataaaaataggattttattcaccaggatgaatatgcagattgtcagaaaagcaataactttattgaaagcccttgctatggatgaaagctcctgatctagttctcttattttttcactgggatgcattgacatctacatgaaaacccattcaatagacactgttaacatttatatattctgaaaagcaaaaacatgggcatcatactcttagtttctgaaacagttccattccttaaagtcatgtaagtccaaaataaatcaagatcagaaccgagaatgttatggtccagattcctttggcctatttcctgaatgaattaagcttagtgcatttgtatgaattgttctgtcaatcttcatttgttcaaattttgtgccaagaaatattttagtgttgaactactgtatggtactgaataaggcatttctctctcccctttaagcttgcaatcaagtgggtacaaacaaaaacaaatcataaacatataaataaataagatccatacattaattgggcagtgtttagtgcagttaacaaaaacactctagatactttaaacagaagagtttgaaacgaaagttaatagagaaatacagacaaaatggttcaaaaggctgaacaagtgaaagtcagagccctgccactggagctcatatgttcaaagtccctccagtgttgtgtaaccacattcaaagagctagtgttgagccacagttgcctctagcatccatgaaactagagagaatacactgaaacacaaaatagcgtcttggtcttcttatctcaacaaccttgtttgtcagcgtaagcaaggcaatagcctgtacttcacttgtgtttttcaaaagttacttaaaacttaattttgattgagaattctagtgcaaagaagtctggtaagtgtagattttttagctcaccagtgtctgtggtatagaaaggcagtttagagggagggtagagtggaggttgagtgaatcaattcacataacctatcatactgcagattaagataaataatataaggaagtaatataaatgacatgacagaaaataaaatgtcagtggtagtagcttactatgataggctggtcagagagggctctttgtgtagctgacatttgattgtagacctgaagaaaggcactgatgttagccatctgaagagctagagggaaaaaaacccacaaagtaatgaacaaggggaaagacagcatt

SEQ ID NO: 239 - DNA, 549 bp, Homo sapiens
gaaatcagaaaagagctttaaggcagtataatgctcctctagagaagaggcagctgtgagtagtaaggtgggtgctcagaacaggacaggggaagagctgcagcatccatctggagcagcctcgttttgtataggcacaagggtggcactcaatgagtccttctgctttttccagtgcaagaaagggaaaaagaagaagatacaccttgaaacactactccacagcattatatttttctatttagtttttgtatttgtgtatttgatttccataacacaccagaagtcactttacaacaccttgagtaaagcaaggtttctcagtttgtartctgtgtgtgaccatgcagtgtgatttaccagatttgccttataaatgttaatgcctctcctttgactttcaaaaatgactcaattcaaacaacaaattgtgtggtcacccctccatgaaccatctgtatcatattgtagatcaactaaatcagaatacatgtggctggtgctgagggcccaggacctgcattcaacagaaccgtgcagctaatctct

SEQ ID NO: 240 - DNA, 1076 bp, Homo sapiens
atcctcattaatagtcattactatgtaattttttcttatagcttttgtagtgagcataaagtggtatctcattgtggttctgatttgcatttctctggttaatgaagttgagcattctttccatatrtttattggccatttagatgtctttcttggaaaactgcctatttggtttctttgtccatattttaaattggattatttgccttttactattgagctgttagaatttttatatatttcaaatacaagctcctcttcagatatatggtttgcaaaaaaaatatgactggctgcagatttttcttatgtattaacaattatcacatagtgccaagattagttgtgattagtgtcactagtgacacatcagtgaatattctgaacccagttactgggtgagttcagtctccttttggtatttatttcttgtgtttgaaatgaacagtagtaagtgaatgctagaataaagttgggagcaacagctgtcctttctttgcattataattactcctccatataagacccataaaaagccctaactctaacattaagtccctgacactttgcataaccacaaaatctcttatggagactagagcactggagaattacagtccccagaaatgaatttccctcttcttctgtctcttgaagggcctgtcactaaacttcatcaaggtgtgaaaattgtcagaatcaaaatggtgttactaatgaaaacatgttactaatgttactaaggaaaacaacaacaacaacaaaaattgacaattagagctggagaagtccatgaaaacagggttctcatgcttgtgtgcctgataacaaaaactatcacaaaaggctgaaaaaaaccacaaccttacacacaggtcattgcaaccttaaacaaaaaatatttctaaaaggacatctgcccagcaactgcctgtccaaccttgaactcgtagcacccttgttattgatttttgtagctaaggacaattatttcaaaacaattatgtaatcttcctcatttattttcctttagaaacatttgtcttcctttacctctctgcatacacacgtagttt

SEQ ID NO: 241 - DNA, 1076 bp, Homo sapiens
atcctcattaatagtcattactatgtaattttttcttatagcttttgtagtgagcataaagtggtatctcattgtggttctgatttgcatttctctggttaatgaagttgagcattctttccatatatttattggccatttagatgtctttcttggaaaactgcctatttggtttctttgtccatattttaaattggattatttgccttttactattgagctgttagaatttttatatatttcaaatacaagctcctcttcagatatatggtttgcaaaaaaaatatgactggctgcagatttttcttatgtattaacaattatcacatagtgccaagattagttgtgattagtgtcactagtgacacatcagtgaatattctgaacccagttactgggtgagttyagtctccttttggtatttatttcttgtgtttgaaatgaacagtagtaagtgaatgctagaataaagttgggagcaacagctgtcctttctttgcattataattactcctccatataagacccataaaaagccctaactctaacattaagtccctgacactttgcataaccacaaaatctcttatggagactagagcactggagaattacagtccccagaaatgaatttccctcttcttctgtctcttgaagggcctgtcactaaacttcatcaaggtgtgaaaattgtcagaatcaaaatggtgttactaatgaaaacatgttactaatgttactaaggaaaacaacaacaacaacaaaaattgacaattagagctggagaagtccatgaaaacagggttctcatgcttgtgtgcctgataacaaaaactatcacaaaaggctgaaaaaaaccacaaccttacacacaggtcattgcaaccttaaacaaaaaatatttctaaaaggacatctgcccagcaactgcctgtccaaccttgaactcgtagcacccttgttattgatttttgtagctaaggacaattatttcaaaacaattatgtaatcttcctcatttattttcctttagaaacatttgtcttcctttacctctctgcatacacacgtagttt

SEQ ID NO: 242 - DNA, 1534 bp, Homo sapiens
tgcccttcttgccaacaaatacattttaacttaaagatggaaaatacagaatgtttggaaaattcttgtgacagtcactctaacgaaggtatcatccttgcttgttgttgtcaccagtgaatgtatcgtacatgaggtagaaagttgtgactaaaaactacctctggtccacctactctgttccagaggaagtaatacttccttccctactttgaggaagtcattcagttttgataccatgctttgcatgtaaatctctctctattggatcctcatccaagtggtcagagggatgcttgtttggttgttaaaagaaatttttgaaaaataaggtagagagcagaattattttagataacatctgaatgcctgggagagaaaataaaggcacagttatctctctgcttttgtctccgtctcttggtgtcctgaaatatccatctcattataaagaaaagaatcaaattaaggaataaacacaagaagagtcatcatttctaacattgccaagtcctaagacagcaatatgctctactaaattatatatttttaatttaatttctttaaaagtaaaatttgctattttgatgtcaaaaatacaaaacaaatacaaaaatgtttgttacaaggatgtctcattcaagttgtaaatagaggtggacaaactgagtttttttcctttcaatcacattgattattttcttctactttatttttactaaattgaatgccttgatcttgagtgtttcttaaagttcatcttaaaaatgaaacaattttgtttttattcctttgcatagtcagaaagtttttagagggagaaaaagtataaaatctggcattgaagggtagcctccctcaaagacatgaataatgttgtattttaaacaggatgatctagatgtgaaaaggccttaaagggtagagggatgccccaaatcagaaggcttttggggggtctcccaagaaggtcagaagcattgaatgtgtaataagcgggggccactacagcaaccattatcttccctctgacagagcggctcactgacctggcatgctggcaaatggagaggaaaactctccaccgagatgtaaattccccatactggtccctcatgaatatcttgtctccaggattcaagccagtgacctgggaaaacaaggttcctccccaatcaaaatgacagggcagagctggtttcttgttaggaagactacaaggtgtgtaaaaaaattatgatttctgagggaaaaaaaatgagatgtcacacagagcaaaatattactttcaaatggtcctctgcagttcttttgaatggcagctgttaagaattcaattgtgtgtatgasacactggaatccagaatggaagttctgttggggggcaggaatgaatagaaattttcaatttaaatactcatttgagattatttgaatatctgtcattctttttagcctaaaggttaattcttgaagaaataatttccattagtaacacaaattccaaccttgtcaagtcctcttatgtaatgca

SEQ ID NO: 243 - DNA, 616 bp, Homo sapiens
gcatgaactgcaaatgtactttgctaaatgaaggaagccagataagagtagcacaatcatttggaagatctgggacactcactgggtaccatctacatactggtattgcagcattttatcagtaataatgcacattccattgtatgtcatttgaacattggccctactataatgtttaatttattaacawtatagtagtttccctctttgttgggaacaagccccccaaaatctggccatatactggccccaaaactggccataaacaaaatctctgcagcattgtgatatgttcatgatggccataacacccacactggaaggttttgggtttaccagaatgagggcaaggaatacctggcctgcccagggtggaaaaccacctaaaggcattcttaagccacaaacaatagcatgagtgatctgtgccttaagaacatgctcctgctacagttaactagcccaacctattcctttattcctttaattcggcccatccctttgtttcccataagggatacttttagttaatttaatatctatagaaacaatgctaatgactggtttgctgttaataaatacgtgggtaaatctctgttcgaagctctcagctctg

SEQ ID NO: 244 - DNA, 616 bp, Homo sapiens
gcatgaactgcaaatgtactttgctaaatgaaggaagccagataagagtagcacaatcatttggaagatctgggacactcactgggtaccatctacatactggtattgcagcattttatcagtaataatgcacattccattgtatgtcatttgaacattggccctactataatgtttaatttattaacaatatagtagtttccctctttgttgggaacaagccccccaaaatctggccatatactggccccaaaactggccataaacaaaatctctgcagcattgtgayatgttcatgatggccataacacccacactggaaggttttgggtttaccagaatgagggcaaggaatacctggcctgcccagggtggaaaaccacctaaaggcattcttaagccacaaacaatagcatgagtgatctgtgccttaagaacatgctcctgctacagttaactagcccaacctattcctttattcctttaattcggcccatccctttgtttcccataagggatacttttagttaatttaatatctatagaaacaatgctaatgactggtttgctgttaataaatacgtgggtaaatctctgttcgaagctctcagctctg

SEQ ID NO: 245 - DNA, 616 bp, Homo sapiens
gcatgaactgcaaatgtactttgctaaatgaaggaagccagataagagtagcacaatcatttggaagatctgggacactcactgggtaccatctacatactggtattgcagcattttatcagtaataatgcacattccattgtatgtcatttgaacattggccctactataatgtttaatttattaacaatatagtagtttccctctttgttgggaacaagccccccaaaatctggccatatactggccccaaaactggccataaacaaaatctctgcagcattgtgatatgttcatgatggccataacacccacactggaaggttttgggtttaccagaatgagggcaaggaayacctggcctgcccagggtggaaaaccacctaaaggcattcttaagccacaaacaatagcatgagtgatctgtgccttaagaacatgctcctgctacagttaactagcccaacctattcctttattcctttaattcggcccatccctttgtttcccataagggatacttttagttaatttaatatctatagaaacaatgctaatgactggtttgctgttaataaatacgtgggtaaatctctgttcgaagctctcagctctg

SEQ ID NO: 246 - DNA, 655 bp, Homo sapiens
gccaaggaggagcctccaccaggcaggccagagtggcatgcaactgctggcacccagcggctaccacattcccacccagatgctgcctgagctttgggcacwccccttcccacaactgtccccttgctttccccctcctcctgggctatcatcaggctgtagcgaaagcatcagaagctccctggggatatgtctgaaaccccttggctgggataatcagcaccagaaaagcattaaaaacaggaagccacagggataattgacaggcattgctgcaaacacctggggtgggggtgtgctcagaatagggacagaataaggagaggcagcgtccaggattggggaagaataacacaggactgttctggggatgtggggatgtgtctcatcataaggtcccattcattatgttccactaggttctcccaatatactaaagctgagatcataaactgtcatgacaaagaacaggtcatctgtactttctctgaaagcctcatgattagacagtagaatagcttagaagagtgacataatgtttagaccctttttttctgtttcttgcccagagttctttcacaacctctagatgatatgaaaatggacacaacacatggctccaaaatcccagagtactacagaattcttaaaccca

SEQ ID NO: 247 - DNA, 655 bp, Homo sapiens
gccaaggaggagcctccaccaggcaggccagagtggcatgcaactgctggcacccagcggctaccacattcccacccagatgctgcctgagctttgggcacaccccttcccacaactgtccccttgctttccccctcctcctgggctatcatcaggctgtagcgaaagcatcagaagctccctggggatatgtctgaaaccccttggctgggataatcagcaccagaaaagcattaaaaacaggaagccacagggataattgacaggcattgctgcaaacacctggggtgggggtgtgctcagaatagggacagaataaggagaggcagcgtccaggattggggaagaataacacaggactgttctggggatgtggggatgtgtctcatcataaggtcccattcattatgttccactaggttctcccaatatactaaagctgagatcataaactgtcatgacaaagaacaggtcatctgtactttctctgaaagcctcatgattagacagtagaatagcttagaagagtgayataatgtttagaccctttttttctgtttcttgcccagagttctttcacaacctctagatgatatgaaaatggacacaacacatggctccaaaatcccagagtactacagaattcttaaaccca

SEQ ID NO: 248 - DNA, 1814 bp, Homo sapiens
ttttgagaagtggcagtaaccatccacattctataatcttgtaattactcaagtgtaatgagaatataggagtatttagaaataggcagagtgtttcttgtaaattccatctgtatcagtacttcataaaatggaggtcatgcaccctagacagctgtcattggataagcttcatgaagttcatgtccaaaattatatccaaaattgtaagtgtgtgtgtgcattgtctcaatctgtttgtattgccataaaggaatacctgaggctgggtagtttataaagaagaggtttgtttggctcatggatctgttggctgtacaagaagcatggcaccaacatctgcttccagtgagggggctgccttcactcatggcggaagataaaggggagctgaaatgtataacgattacttggcaagaaaggaagaaagggggaaggaggaggtgctaggctcttttcaagaaccagttcttgagggaagtaagagcgagaactcactcacttcttggagtggcacaaagccattcatgagggatctgcccccaccagccaaacaccttccacaggccccacctccaacagtgagatcaaattccaacatgagactttgtggagcccaacaaactatatccaaaccatagcatgcatttttctggggagagggtctatcactttcatcaggatctcaaaatagttttggacactgttaattcaaggctttcccttatcacattagcttttaagccccattcagacatagtgctatggcgtcagccctgggccrgtaagaggaaaaccaaggctggtcctggctctgccaatgcccagcatggtggccttagggaaacagttgaaagctctctggacctgtttctgctcttcagttcataggcaatgagtgatctctaagacccctagagctaacaagacatcccaagacaatttccctgaaaaaggacctgctaaggaagaagagggcagcttcacttgatgcttttggattctttcctacaaaagaagtataatattcaccttaaataaatccatatctaactgctaacaattactaccttaataaatattaactgggtgctcacgatgtgacagtcagcagtgatgaacttttcatgcagtcgcctaagacttggctgttactgagtagctcgccccaacactgcaaataactctagcaggtaaagtagacagtaaaagtatcaacaactaagagaatggcacagaggaccaaagaacaagtggttgatcacccaatgggtagaataggcgttgtgcagatgttgaagtggaaacatagtactctgctatgataaccaggttgatctggctaatctgtcctgttgggtcagggctcactccttcttcgccttccagaattgcatgatcagttaagagaacagttttccttcctggaggaaaatgtttctttaaagatttggaagtagctgcactctggctcagaacctctaaaccagctctgacaggaatagagagccataaacaaacaaaaagctagcgaacacagatccttaatggaagagaagccatataatgaataatttggacccagggatgctctgaccataattcgtcacatgctcaaaggtttcaatggaggaagtaagattttataaaagctttgaattagagatgaaacacaagacaaagtactaaagagaaagaggcttttagcacttaagagaacagaaaatatgatattgatcatttcacttcttgacccatacatgttcctcttaatgttagcaacttttatattgatactctgcctttcatatgca

SEQ ID NO: 249 - DNA, 1814 bp, Homo sapiens
ttttgagaagtggcagtaaccatccacattctataatcttgtaattactcaagtgtaatgagaatataggagtatttagaaataggcagagtgtttcttgtaaattccatctgtatcagtacttcataaaatggaggtcatgcaccctagacagctgtcattggataagcttcatgaagttcatgtccaaaattatatccaaaattgtaagtgtgtgtgtgcattgtctcaatctgtttgtattgccataaaggaatacctgaggctgggtagtttataaagaagaggtttgtttggctcatggatctgttggctgtacaagaagcatggcaccaacatctgcttccagtgagggggctgccttcactcatggcggaagataaaggggagctgaaatgtataacgattacttggcaagaaaggaagaaagggggaaggaggaggtgctaggctcttttcaagaaccagttcttgagggaagtaagagcgagaactcactcacttcttggagtggcacaaagccattcatgagggatctgcccccaccagccaaacaccttccacaggccccacctccaacagtgagatcaaattccaacatgagactttgtggagcccaacaaactatatccaaaccatagcatgcatttttctggggagagggtctatcactttcatcaggatctcaaaatagttttggacactgttaattcaaggctttcccttatcacattagcttttaagccccattcagacatagtgctatggcgtcagccctgggccagtaagaggaaaaccaaggctggtcctggctctgccaatgcccagcatggtggccttagggaaacagttgaaagctctctggacctgtttctgctcttcagttcataggcaatgagtgatctctaagacccctagagctaacaagacatcccaagacaatttccctgaaaaaggacctgctaaggaagaagagggcagcttcacttgatgcttttggattctttcctayaaaagaagtataatattcaccttaaataaatccatatctaactgctaacaattactaccttaataaatattaactgggtgctcacgatgtgacagtcagcagtgatgaacttttcatgcagtcgcctaagacttggctgttactgagtagctcgccccaacactgcaaataactctagcaggtaaagtagacagtaaaagtatcaacaactaagagaatggcacagaggaccaaagaacaagtggttgatcacccaatgggtagaataggcgttgtgcagatgttgaagtggaaacatagtactctgctatgataaccaggttgatctggctaatctgtcctgttgggtcagggctcactccttcttcgccttccagaattgcatgatcagttaagagaacagttttccttcctggaggaaaatgtttctttaaagatttggaagtagctgcactctggctcagaacctctaaaccagctctgacaggaatagagagccataaacaaacaaaaagctagcgaacacagatccttaatggaagagaagccatataatgaataatttggacccagggatgctctgaccataattcgtcacatgctcaaaggtttcaatggaggaagtaagattttataaaagctttgaattagagatgaaacacaagacaaagtactaaagagaaagaggcttttagcacttaagagaacagaaaatatgatattgatcatttcacttcttgacccatacatgttcctcttaatgttagcaacttttatattgatactctgcctttcatatgca

SEQ ID NO: 250 - DNA, 1014 bp, Homo sapiens
cattcctagtttttctctgagagtgcaagccattttactttaaaagcttgaaaacaatccttcacgcaactgaatcttggctggggttgtgtgggatgatgcagcaaaggctgtaatgaacgattccgacatcccagaacagtgtatgcctgacagagcaatgtatacaaacccgttcttggcttttattgggctgcaccaagcgtacaattctccagtgagcccaggagttagaaagtgtcaattacaaagaaatggctggcagattgaatgaatattggtgtgtaattaccacagcatccaccagcagcaaagactccagaatagtgcacacaaatattagtgtcctttccctgaataaaacacccatctttacactgtgtgatatcaatgcctaacagaggtgacgaggcagggtgcaggcaatttattttgccagccacatgtgacccaagatgttactcatcactgagcaacaaccgcttttgccaaaagcattattttcaaaaatttaagagaatcccagctctcttttggccatcctagagcccctttctcctctagctttacagtccaaaagaaatatagtcagggcatgcttttaaacagttgtgagctgtcaagccatgagctttcctagagtcacttttactcatggacaaaaatggagaagctgatagatatcctggctcagatatttataatgttgttacactgatattttctttcagtaaaaccttcagagtgtaagctcccaaacttgatcgctttgtgactgcattgcaggtggcaccagcaattcaacagttttgcatcaactccttccgttgttcaaagaagagascaaaaagagtattatcacctttcttgcacagtgatgaggttctttgctgagctacaatccttctaaaacagcatcttttcacctttttacgaagtcaggcactccttggaaaatctgaaaaagagttatatgctcttgccagaaaaaaaaagtttaagaaatgtaataat

SEQ ID NO: 251 - DNA, 2773 bp, Homo sapiens
tggcctgctcctaaatttctctatcatttgagcatttgagaaataggtttcctaacgttgccatagacctactgaatcaaagtcttcagaagcagggtccaggaatctacatattgaaagctcccatgaatttctaaaatcctgccagtttgagaaccactaagttcacagttctgaatgtaaagcatgaagatggtaaagtcgatgtacacccatggccttcctgctgttggtgggtagttgcttattttcactggttgcttgtttttgttgaaaactaacacctcttggtgaactagagggttagatgttaccgatgggtgttttgattcattttgattcaacgacctttaatacagtacattggttctcagatttcaatatgcattagaatcatctggggttttattaaaatgcagattcctgggccccatctgttactataactcagtaagtcatatgtaggaagatgaaattaacatttttaatagcaccatagatgctctgaagtgcctgttgaagtaatgctgctgtagtaagtgcagtgtgttctaagatcctaccttgcatttgtgctttaagaagaaccctaatattcacgctcttatttaatctttacatgttgggaggtaagataggtatcartacccctacatggcagatgaagttcaaaaatgtggcaaatattaaataccagatcgagtaatcaaaactaataccatatccattgctcctcccagaaatgaaaataaagaaaaaaatactgaaaaattataatgtgctgaccaaatcttaaatcagacatttacctgtctaatgatcttcagaaattactttcaaggaaaatctagaggaaagttgaataggttgagtgtctgaaacaaaatccaaatctaaattctccctctcaattcaacaaacaattttagggaatctattttatactagataccatggtaagtattaataaaactccaaagtggaatttatcaaaaaaaattgttaaccaattattaaaagtatgaggagtattgaaaaatattgggagaggtgttatgggctgaatatttatgtctcccaaaaagtcaaaagttgaaacctgtattagtccattttcatgtttctgataaagacatacccaagactgggcaatttacaaaaaaaaaaaaaaaaaagatttattggacttatagttccacatggctggggaggcctcacaatcatggtggagggcaaggaggagaaagtcatgtcttacatggatggcggcagagaaaaagagagcttgtgcagggaaactccagtttttaaaaaccatcagatctcgtgaaacccattcactatcacgagaacagcatgggaaagacctgcccccatgattcactcatctcccactgggtcccttcccacaacacgtgggaattatgggagttacaaaatgagatttgggtagggacacagagtcagccaaaccatataaaaacctaattttcatgatggcactatttggaagtggcacctctaagaaaataagtaaagttaaatgaggtcataaggatgagggtctcatccaataggattagtgaccttagaagagatgccagagttctctccctcctatgcatgcaataagaaaaggccacatgaggacatacaaagatagtgaccatctacaagccagaagagaggcctgttcagaaaatgaatttgccagcaccttcatcatggacttctaccgtccagaacaatgaaaaaattaatttctgttgtttaaaccatccagtttgtggtgttttgttatacagaggacatgaataatataggagggaaggcctagacactaggggctatggttgaatttagaagtgtgtggtgttgggcctaaaagtacgacccaatattacgtgctgccttgacatctggaataaccagaaagacctcaaacagcctagctgcaagttcctttccccactctactcccacagataagatcctgcagcaaaacagcccgacttatcaagaaactaggtataaatcctacttattccacaggagtggccttcagttcccttctagcccatggaattattcaaacaagccaatcacaccctcccatgggaactaggggtcactccaacctcttgatactacaaagcctgcttcctgtagcccacacttattcactttgttcccaagcacaaccccatgtggccctgcaaggcctgtgacattctcctccctcaagttgcaagtatgtggaattaataaactgttgtcatgtcacctctccagtatcgggtactgcatgatcagctatctccatagttacagaataggaactcctccctcaccaatagggtgaagaggaaaagattaaaacacattgatagggctggatctacctccaatatcaaaagattcaaattaatagaataatcttttatcattgtttaattacaatatttttcgaaaatgccattgaaaatcatattctccagccagatttttagagcaggggtcctgaaccagtagaggtggacctcttttcacatattaaaggaggtcttccaaataagttacgttaaaattgggcaatgtcacgctttactttcatttccaagtgattttggctaacccatttgccatatatttctctgtgaatttttaatccatttcactctaaaaaaaaaatctcataatctgtaaacaaggatggataaataccagaaaatctctgtaaggaagaaaactgtgtagcaagtaatttaaaaca

SEQ ID NO: 252 - DNA, 2773 bp, Homo sapiens
tggcctgctcctaaatttctctatcatttgagcatttgagaaataggtttcctaacgttgccatagacctactgaatcaaagtcttcagaagcagggtccaggaatctacatattgaaagctcccatgaatttctaaaatcctgccagtttgagaaccactaagttcacagttctgaatgtaaagcatgaagatggtaaagtcgatgtacacccatggccttcctgctgttggtgggtagttgcttattttcactggttgcttgtttttgttgaaaactaacacctcttggtgaactagagggttagatgttaccgatgggtgttttgattcattttgattcaacgacctttaatacagtacattggttctcagatttcaatatgcattagaatcatctggggttttattaaaatgcagattcctgggccccatctgttactataactcagtaagtcatatgtaggaagatgaaattaacatttttaatagcaccatagatgctctgaagtgcctgttgaagtaatgctgctgtagtaagtgcagtgtgttctaagatcctaccttgcatttgtgctttaagaagaaccctaatattcacgctcttatttaatctttacatgttgggaggtaagataggtatcagtacccctacatggcagatgaagttcaaaaatgtggcaaatattaaataccagatcgagtaatcaaaactaataccatatccattgctcctcccagaaatgaaaataaagaaaaaaatactgaaaaattataatgtgctgaccaaatcttaaatcagacatttacctgtctaatgatcttcagaaattactttcaaggaaaatctagaggaaagttgaataggttgagtgtctgaaacaaaatccaaatctaaattctccctctcaattcaacaaacaattttagggaatctattttatactagataccatggtaagtattaataaaactccaaagtggaatttatcaaaaaaaattgttaaccaattattaaaagtatgaggagtattgaaaaatattgggagaggtgttatgggctgaatatttatgtctcccaaaaagtcaaaagttgaaacctgtattagtccattttcatgtttctgataaagacatacccaagactgggcaatttacaaaaaaaaaaaaaaaaaagatttattggacttatagttccacatggctggggaggcctcacaatcatggtggarggcaaggaggagaaagtcatgtcttacatggatggcggcagagaaaaagagagcttgtgcagggaaactccagtttttaaaaaccatcagatctcgtgaaacccattcactatcacgagaacagcatgggaaagacctgcccccatgattcactcatctcccactgggtcccttcccacaacacgtgggaattatgggagttacaaaatgagatttgggtagggacacagagtcagccaaaccatataaaaacctaattttcatgatggcactatttggaagtggcacctctaagaaaataagtaaagttaaatgaggtcataaggatgagggtctcatccaataggattagtgaccttagaagagatgccagagttctctccctcctatgcatgcaataagaaaaggccacatgaggacatacaaagatagtgaccatctacaagccagaagagaggcctgttcagaaaatgaatttgccagcaccttcatcatggacttctaccgtccagaacaatgaaaaaattaatttctgttgtttaaaccatccagtttgtggtgttttgttatacagaggacatgaataatataggagggaaggcctagacactaggggctatggttgaatttagaagtgtgtggtgttgggcctaaaagtacgacccaatattacgtgctgccttgacatctggaataaccagaaagacctcaaacagcctagctgcaagttcctttccccactctactcccacagataagatcctgcagcaaaacagcccgacttatcaagaaactaggtataaatcctacttattccacaggagtggccttcagttcccttctagcccatggaattattcaaacaagccaatcacaccctcccatgggaactaggggtcactccaacctcttgatactacaaagcctgcttcctgtagcccacacttattcactttgttcccaagcacaaccccatgtggccctgcaaggcctgtgacattctcctccctcaagttgcaagtatgtggaattaataaactgttgtcatgtcacctctccagtatcgggtactgcatgatcagctatctccatagttacagaataggaactcctccctcaccaatagggtgaagaggaaaagattaaaacacattgatagggctggatctacctccaatatcaaaagattcaaattaatagaataatcttttatcattgtttaattacaatatttttcgaaaatgccattgaaaatcatattctccagccagatttttagagcaggggtcctgaaccagtagaggtggacctcttttcacatattaaaggaggtcttccaaataagttacgttaaaattgggcaatgtcacgctttactttcatttccaagtgattttggctaacccatttgccatatatttctctgtgaatttttaatccatttcactctaaaaaaaaaatctcataatctgtaaacaaggatggataaataccagaaaatctctgtaaggaagaaaactgtgtagcaagtaatttaaaaca

SEQ ID NO: 253 - DNA, 2773 bp, Homo sapiens
tggcctgctcctaaatttctctatcatttgagcatttgagaaataggtttcctaacgttgccatagacctactgaatcaaagtcttcagaagcagggtccaggaatctacatattgaaagctcccatgaatttctaaaatcctgccagtttgagaaccactaagttcacagttctgaatgtaaagcatgaagatggtaaagtcgatgtacacccatggccttcctgctgttggtgggtagttgcttattttcactggttgcttgtttttgttgaaaactaacacctcttggtgaactagagggttagatgttaccgatgggtgttttgattcattttgattcaacgacctttaatacagtacattggttctcagatttcaatatgcattagaatcatctggggttttattaaaatgcagattcctgggccccatctgttactataactcagtaagtcatatgtaggaagatgaaattaacatttttaatagcaccatagatgctctgaagtgcctgttgaagtaatgctgctgtagtaagtgcagtgtgttctaagatcctaccttgcatttgtgctttaagaagaaccctaatattcacgctcttatttaatctttacatgttgggaggtaagataggtatcagtacccctacatggcagatgaagttcaaaaatgtggcaaatattaaataccagatcgagtaatcaaaactaataccatatccattgctcctcccagaaatgaaaataaagaaaaaaatactgaaaaattataatgtgctgaccaaatcttaaatcagacatttacctgtctaatgatcttcagaaattactttcaaggaaaatctagaggaaagttgaataggttgagtgtctgaaacaaaatccaaatctaaattctccctctcaattcaacaaacaattttagggaatctattttatactagataccatggtaagtattaataaaactccaaagtggaatttatcaaaaaaaattgttaaccaattattaaaagtatgaggagtattgaaaaatattgggagaggtgttatgggctgaatatttatgtctcccaaaaagtcaaaagttgaaacctgtattagtccattttcatgtttctgataaagacatacccaagactgggcaatttacaaaaaaaaaaaaaaaaaagatttattggacttatagttccacatggctggggaggcctcacaatcatggtggagggcaaggaggagaaagtcatgtcttacatggatggcggcagagaaaaagagagcttgtgcagggaaactccagtttttaaaaaccatcagatctcgtgaaacccattcactatcacgagaacagcatgggaaagacctgcccccatgattcactcatctcccactgggtcccttcccacaacacgtgggaattatgggagttacaaaatgagatttgggtagggacacagagtcagccaaaccatataaaaacctaattttcatgatggcactatttggaagtggcacctctaagaaaataagtaaagttaaatgaggtcataaggatgagggtctcatccaataggattagtgaccttagaagagatgccagagttctctccctcctatgcatgcaataagaaaaggccacatgaggacatacaaagatagtgaccatctacaagccagaagagaggcctgttcagaaaatgaatttgccagcaccttcatcatggacttctaccgtccagaacaatgaaaaaattaatttctgttgtttaaaccatccagtttgtggtgttttgttatacagaggacatgaataatataggagggaaggcctagacactaggggctatggttgaatttagaagtgtgtggtgttgggcctaaaagtacgacccaatattacrtgctgccttgacatctggaataaccagaaagacctcaaacagcctagctgcaagttcctttccccactctactcccacagataagatcctgcagcaaaacagcccgacttatcaagaaactaggtataaatcctacttattccacaggagtggccttcagttcccttctagcccatggaattattcaaacaagccaatcacaccctcccatgggaactaggggtcactccaacctcttgatactacaaagcctgcttcctgtagcccacacttattcactttgttcccaagcacaaccccatgtggccctgcaaggcctgtgacattctcctccctcaagttgcaagtatgtggaattaataaactgttgtcatgtcacctctccagtatcgggtactgcatgatcagctatctccatagttacagaataggaactcctccctcaccaatagggtgaagaggaaaagattaaaacacattgatagggctggatctacctccaatatcaaaagattcaaattaatagaataatcttttatcattgtttaattacaatatttttcgaaaatgccattgaaaatcatattctccagccagatttttagagcaggggtcctgaaccagtagaggtggacctcttttcacatattaaaggaggtcttccaaataagttacgttaaaattgggcaatgtcacgctttactttcatttccaagtgattttggctaacccatttgccatatatttctctgtgaatttttaatccatttcactctaaaaaaaaaatctcataatctgtaaacaaggatggataaataccagaaaatctctgtaaggaagaaaactgtgtagcaagtaatttaaaaca

SEQ ID NO: 254 - DNA, 2773 bp, Homo sapiens
tggcctgctcctaaatttctctatcatttgagcatttgagaaataggtttcctaacgttgccatagacctactgaatcaaagtcttcagaagcagggtccaggaatctacatattgaaagctcccatgaatttctaaaatcctgccagtttgagaaccactaagttcacagttctgaatgtaaagcatgaagatggtaaagtcgatgtacacccatggccttcctgctgttggtgggtagttgcttattttcactggttgcttgtttttgttgaaaactaacacctcttggtgaactagagggttagatgttaccgatgggtgttttgattcattttgattcaacgacctttaatacagtacattggttctcagatttcaatatgcattagaatcatctggggttttattaaaatgcagattcctgggccccatctgttactataactcagtaagtcatatgtaggaagatgaaattaacatttttaatagcaccatagatgctctgaagtgcctgttgaagtaatgctgctgtagtaagtgcagtgtgttctaagatcctaccttgcatttgtgctttaagaagaaccctaatattcacgctcttatttaatctttacatgttgggaggtaagataggtatcagtacccctacatggcagatgaagttcaaaaatgtggcaaatattaaataccagatcgagtaatcaaaactaataccatatccattgctcctcccagaaatgaaaataaagaaaaaaatactgaaaaattataatgtgctgaccaaatcttaaatcagacatttacctgtctaatgatcttcagaaattactttcaaggaaaatctagaggaaagttgaataggttgagtgtctgaaacaaaatccaaatctaaattctccctctcaattcaacaaacaattttagggaatctattttatactagataccatggtaagtattaataaaactccaaagtggaatttatcaaaaaaaattgttaaccaattattaaaagtatgaggagtattgaaaaatattgggagaggtgttatgggctgaatatttatgtctcccaaaaagtcaaaagttgaaacctgtattagtccattttcatgtttctgataaagacatacccaagactgggcaatttacaaaaaaaaaaaaaaaaaagatttattggacttatagttccacatggctggggaggcctcacaatcatggtggagggcaaggaggagaaagtcatgtcttacatggatggcggcagagaaaaagagagcttgtgcagggaaactccagtttttaaaaaccatcagatctcgtgaaacccattcactatcacgagaacagcatgggaaagacctgcccccatgattcactcatctcccactgggtcccttcccacaacacgtgggaattatgggagttacaaaatgagatttgggtagggacacagagtcagccaaaccatataaaaacctaattttcatgatggcactatttggaagtggcacctctaagaaaataagtaaagttaaatgaggtcataaggatgagggtctcatccaataggattagtgaccttagaagagatgccagagttctctccctcctatgcatgcaataagaaaaggccacatgaggacatacaaagatagtgaccatctacaagccagaagagaggcctgttcagaaaatgaatttgccagcaccttcatcatggacttctaccgtccagaacaatgaaaaaattaatttctgttgtttaaaccatccagtttgtggtgttttgttatacagaggacatgaataatataggagggaaggcctagacactaggggctatggttgaatttagaagtgtgtggtgttgggcctaaaagtacgacccaatattacgtgctgccttgacatctggaataaccagaaagacctcaaacagcctagctgcaagttcctttccccactctactcccacagataagatcctgcagcaaaacagcccgacttatcaagaaactaggtataaatcctacttattccacaggagtggccttcagttcccttctagcccatggaattattcaaacaagccaatcacaccctcccatgggaactaggggtcactccaacctcttgatactacaaagcctgcttcctgtagcccacacttattcactttgttcccaagcacaaccccatgtggccctgcaaggcctgtgacattctcctccctcaagttgcaagtatgtggaattaataaactgttgtcatgtcacctctccagtatcgggtactgcatgatcagctatctccatagttacagaataggaaytcctccctcaccaatagggtgaagaggaaaagattaaaacacattgatagggctggatctacctccaatatcaaaagattcaaattaatagaataatcttttatcattgtttaattacaatatttttcgaaaatgccattgaaaatcatattctccagccagatttttagagcaggggtcctgaaccagtagaggtggacctcttttcacatattaaaggaggtcttccaaataagttacgttaaaattgggcaatgtcacgctttactttcatttccaagtgattttggctaacccatttgccatatatttctctgtgaatttttaatccatttcactctaaaaaaaaaatctcataatctgtaaacaaggatggataaataccagaaaatctctgtaaggaagaaaactgtgtagcaagtaatttaaaaca

SEQ ID NO: 255 - DNA, 546 bp, Homo sapiens
cagccccctctgtattatatcgtttccccgtgactttaccgtttttcccacaaaaggtcgaacatacttcgcacttattccccttcctttaacttccgctatgggactagcgttggccaataaatgaaagcggaaatgaaggcgcacctttacaggctttgctgcttccactcgtgctctcactctatgtgcctgtgcctggccacgccgagagcttcccccagacagcgctggctcctttaccaggatctcagagtaaccaggagccccgaccccctagagaagccacgtgccgctgaggctcagaagcagatggcccagccaaacccagcccagatcagccacgycccagccaacctggaggctcccgggctgaggaaccgctgactgctgcgtgtccaaccccgaggctcctagctaagaaaccacccactcctgtaagctgcgcgattcgtggtttcgtgttacacagtagaatcgtgaccctagtcacctgatgcacaggcatcttctttaacaattttttggggagttgtcaacctgagt

SEQ ID NO: 256 - DNA, 638 bp, Homo sapiens
acgattacataatgctccaagagtcaaggagccccactaaaaacaacgcagacttgtagtctctaggccaatggttgtcaaacataaatgagcatcacagtcacctggggaatgattaaaatgcagatttctgggctgtctccagaggatctgatgcaatggatttgggttggagtctgagaatctgtatttcttttttttctttttgagacggagtcttgctctgtcgcccaggctggagtgcagtggcgagatctcagctcactgcaacctccgcctcccgggttcaagtgattctctagcctcagcttcccaagtagctgggactatagatgcatgccaccacacccagcgaattttttgtatttttagtggagtcagggtttcaccatgttagccaggatgatctagatctcctgacctcttgatccacccrcctcagcctcctaaagtgttgggattataggcatgagcccggccgagaatctgtatttctaacaagctccaggtgatgctggcactgctggttcctgaaccacacactctgcaaagcactgctctaggctacctgagcaccaccacgcagtttttcatgattactgtgatggttattcttaagtatccacttgactgtgcca

SEQ ID NO: 257 - DNA, 1276 bp, Homo sapiens
tgcatgttaaaatttcaaaatcccttctcaataacaaaatttaggaaaatataggaaaggtagagagaaggacagttttggtgtatgtattagttcattctcacactgctataaagaactacctgaggctgggtaatttataaagaaaagaagtttaattgactcacagttccacatggctggggaggyctcaggaaacttacaatcatggcgaaaggcaaagggcaagcaagtacatcttaccatggcgaagcaggagagagagagcaagtgaaggcagaagtgccacacttttaaaccatcagatccagatctcataaaaactcacttactatcacgagaatagaatgggggaaatctgcgcccatgatccaatcacctcccaccaggaacctcccctgacatgtggggattacaattcaacatgagatttgagtgggggcacaaatccaaaccatatcagtgtttgcctcctgtttttcctccatgcgttgatttctttttacatagttatcgtcaccctgctgtacagttttgcagcttggttttcacttaacctcatcataagcatctttatgtgttatcacatcctttttcataaacatttcaaatagttgcccaatcgtccattaagcagaggttctctggttaattatatttaatttcttctagtgagatgcttgggtgatttaatttttttatattgtaagtaacttagcaataaaaaactttgtgtctaggaaattacatatttaggatttcttttttcttggagaaattcccagaaaaaaagttgaaaagtaaagccttcttctttattataaaatgagtatattcttattataaaaagttattaaaatctgagaacatgaatttttaaatgtgataaatttgcataaacctacacacaaataggtgtgtgtaaaaactcatgaaatctgaataaggtctatagtcaagctaacagcattgcactgatgtcaactttctgggtttgatgctgtacaatattatgcttctgaatgtattcattcatactgttgtgagtagttggagaacctttgttctcattagactatcatattccattgtgtgtctataccacacaagatgtaaccattggaagaatctgggagaaggatacatggggttttctgtattatttttccaaattacagtgagtctgtgattattttaaaataaaaggttaaaaaatatgagagagagaaggaaaaaaaagcccatcactcaagcacaaaccctgttaaagttttga

SEQ ID NO: 258 - DNA, 1276 bp, Homo sapiens
tgcatgttaaaatttcaaaatcccttctcaataacaaaatttaggaaaatataggaaaggtagagagaaggacagttttggtgtatgtattagttcattctcacactgctataaagaactacctgaggctgggtaatttataaagaaaagaagtttaattgactcacagttccacatggctggggaggcctcaggaaacttacaatcatggcgaaaggcaaagggcaagcaagtacatcttaccatggcgaagcaggagagagagagcaagtgaaggcagaagtgccacacttttaaaccatcagatccagatctcataaaaactcacttactatcacgagaatagaatgggggaaatctgcgcccatgatccaatcacctcccaccaggaacctcccctgacatgtggggattacaattcaacatgagatttgagtgggggcacaaatccaaaccatatcagtgtttgcctcctgtttttcctccatgcgttgatttctttttacatagtyatcgtcaccctgctgtacagttttgcagcttggttttcacttaacctcatcataagcatctttatgtgttatcacatcctttttcataaacatttcaaatagttgcccaatcgtccattaagcagaggttctctggttaattatatttaatttcttctagtgagatgcttgggtgatttaatttttttatattgtaagtaacttagcaataaaaaactttgtgtctaggaaattacatatttaggatttcttttttcttggagaaattcccagaaaaaaagttgaaaagtaaagccttcttctttattataaaatgagtatattcttattataaaaagttattaaaatctgagaacatgaatttttaaatgtgataaatttgcataaacctacacacaaataggtgtgtgtaaaaactcatgaaatctgaataaggtctatagtcaagctaacagcattgcactgatgtcaactttctgggtttgatgctgtacaatattatgcttctgaatgtattcattcatactgttgtgagtagttggagaacctttgttctcattagactatcatattccattgtgtgtctataccacacaagatgtaaccattggaagaatctgggagaaggatacatggggttttctgtattatttttccaaattacagtgagtctgtgattattttaaaataaaaggttaaaaaatatgagagagagaaggaaaaaaaagcccatcactcaagcacaaaccctgttaaagttttga

SEQ ID NO: 259 - DNA, 1276 bp, Homo sapiens
tgcatgttaaaatttcaaaatcccttctcaataacaaaatttaggaaaatataggaaaggtagagagaaggacagttttggtgtatgtattagttcattctcacactgctataaagaactacctgaggctgggtaatttataaagaaaagaagtttaattgactcacagttccacatggctggggaggcctcaggaaacttacaatcatggcgaaaggcaaagggcaagcaagtacatcttaccatggcgaagcaggagagagagagcaagtgaaggcagaagtgccacacttttaaaccatcagatccagatctcataaaaactcacttactatcacgagaatagaatgggggaaatctgcgcccatgatccaatcacctcccaccaggaacctcccctgacatgtggggattacaattcaacatgagatttgagtgggggcacaaatccaaaccatatcagtgtttgcctcctgtttttcctccatgcgttgatttctttttacatagttatcgtcaccctgctgtacagttttgcagcttggttttcacttaacctcatcataagcatctttatgtgttatcacatcctttttcataaacatttcaaatagttgcccaatcgtccattaagcagaggttctctggttaattatatttaatttcttctagtgagatgcttgggtgatttaatttttttatattgtaagtaacttagcaataaaaaactttgtgtctaggaaattacatatttaggatttcttttttcttggagaaattcccagaaaaaaagttgaaaagtaaagccttcttctttattataaaatgagtatattcttattataaaaagttattaaaatctgagaacatgaatttttaaatgtgataaatttgcrtaaacctacacacaaataggtgtgtgtaaaaactcatgaaatctgaataaggtctatagtcaagctaacagcattgcactgatgtcaactttctgggtttgatgctgtacaatattatgcttctgaatgtattcattcatactgttgtgagtagttggagaacctttgttctcattagactatcatattccattgtgtgtctataccacacaagatgtaaccattggaagaatctgggagaaggatacatggggttttctgtattatttttccaaattacagtgagtctgtgattattttaaaataaaaggttaaaaaatatgagagagagaaggaaaaaaaagcccatcactcaagcacaaaccctgttaaagttttga

SEQ ID NO: 260 - DNA, 1276 bp, Homo sapiens
tgcatgttaaaatttcaaaatcccttctcaataacaaaatttaggaaaatataggaaaggtagagagaaggacagttttggtgtatgtattagttcattctcacactgctataaagaactacctgaggctgggtaatttataaagaaaagaagtttaattgactcacagttccacatggctggggaggcctcaggaaacttacaatcatggcgaaaggcaaagggcaagcaagtacatcttaccatggcgaagcaggagagagagagcaagtgaaggcagaagtgccacacttttaaaccatcagatccagatctcataaaaactcacttactatcacgagaatagaatgggggaaatctgcgcccatgatccaatcacctcccaccaggaacctcccctgacatgtggggattacaattcaacatgagatttgagtgggggcacaaatccaaaccatatcagtgtttgcctcctgtttttcctccatgcgttgatttctttttacatagttatcgtcaccctgctgtacagttttgcagcttggttttcacttaacctcatcataagcatctttatgtgttatcacatcctttttcataaacatttcaaatagttgcccaatcgtccattaagcagaggttctctggttaattatatttaatttcttctagtgagatgcttgggtgatttaatttttttatattgtaagtaacttagcaataaaaaactttgtgtctaggaaattacatatttaggatttcttttttcttggagaaattcccagaaaaaaagttgaaaagtaaagccttcttctttattataaaatgagtatattcttattataaaaagttattaaaatctgagaacatgaatttttaaatgtgataaatttgcataaacctacacacaaataggtgtgtgtaaaaactcatgaaatctgartaaggtctatagtcaagctaacagcattgcactgatgtcaactttctgggtttgatgctgtacaatattatgcttctgaatgtattcattcatactgttgtgagtagttggagaacctttgttctcattagactatcatattccattgtgtgtctataccacacaagatgtaaccattggaagaatctgggagaaggatacatggggttttctgtattatttttccaaattacagtgagtctgtgattattttaaaataaaaggttaaaaaatatgagagagagaaggaaaaaaaagcccatcactcaagcacaaaccctgttaaagttttga

SEQ ID NO: 261 - DNA, 1217 bp, Homo sapiens
gaagaagttctgtgatgtgtgaactgtgagtttactcaaacaagtccaactctttataagacataggtagacgtcaggtctggaatggaagagccaacagcagtagaaggccaggtccagcttccaagcccccaccagggctctctcaggaaggctgtggctgctgccctggcgctggatggggaatccacaatggggcacaggaaaaagaagaggaaagagtcacgcccagaatccatcatcatctaccgctcagacaatgagaaaacagatgaggagcccggagaatcagaaggtggagatcagcctaaagaggaggagggagatgatttcctagactatcctgtggatgatggtaagtctctctagcccacttgtttaaagccatgggaaggaaaccaaaagggcatcttccagaacagacaggcatatgctcactgtcctatttcttcttggtgatacatttcttcttgcaatattaccaccttttatttatttattttgagacagagtcttgttctgtcacccaggctggagtgcagtggcatgatgtcgcctcactgcaacttccaccttctgggttcaagtgactttcctgcctcagcctcctgagtagctgggactacaggcatgtgccaccatgccgggctagtttttgtatttttagtagagactgggtttcaccatgttgtccaggttggtctcgaactcctggcctcaagtgatccacctgcctcagcctcccaaagtgctgggattataggcatgagccactgacctggtgcaatattacagtcttcattcaacaaatggtcagtatttactgagcacctattacatttttttctagatgatacagaaatctccaccctttcagaattcctaatgaaatggaagaggctgatttatacgcaaaaaytggtaacacaagcagactatgctaactacttaatgtatgtaaaataaacaataattgttgactttcatatgaataaagaaaattatgagaaaatttgccagaagaaaatcatatggcaaattatgacaacaatgagatatagtattccttcacatgtaggcttgccaaaaattgggtaaaatgtgattacatcaatatgagcaaatggatatacttcatgcaccttagtgaaagtggaagccgcttcaaccactttgtggaggaaacttgtcaacgtttattaaatatttagtaaaat

SEQ ID NO: 262 - DNA, 1087 bp, Homo sapiens
  misc_feature (1)...(1087): n = A,T,C or G
aatataaaggagaggaatttccaaggatatttctgaggctattaatgtgacaagtacattaaagacaaagcaggtaaagctcttttactctagtttataaggaaattgttgctctgttccatggtttaaaaaaatcacatccggccrggcgtggtggctcatgcctgtaaccccagcactttgggagaccgaggcaggtggagcacctgaggtcaggagttcacgaccagcctgcgcaacatggtgaaaccccatctctactaaaaatataaaaaatcagccaggcatggtggtgagcacctgtaatcccagctacttgggaggctgaggcaagaaaattgcttgaacctgggaagcggaggttgcagtgagccaagatcacatcactgcactccagcctgagcaacaaaagtgaaattccgtctcaaaaaaaaaaaagaaaaatcagatccttgtacctgatctaacagtactgacagttttacaccaaacatgccagtaatacaggtaaaactcaaactcgtaacgatctgaaaactgaattactagatgttaaatactgacattatataatatgaaagaaaaataattaaaatgatatttggcttaaaagtaagcaaatgttatttattcactcaggatatgtcatacctaatttttcataacataagtcatatgcctgaggaccctgtgcccatatctgtgtgatctaaatatagttttggctagaaaccatatgagtgtgtctattgnnnnnnnnnnnnnnnnnnnnnnnnnnnnnnnnnnnnnnnnnnnnnnnnnnnnnnnnnnnnnnnnnnnnnnnnnnnnnnnnnnnnnnnnnnnnnnnnnnnnttaaaaagaacacaatatagaacttgtaggggaaaagtctactttttttaaagcaatcactctaggaagctaaaatagcaatacaaattgatttcaagaatgggtagttttctaatagcgggtgaatataaaataaaaagctctgtttataaaaatgaatttcttttcattttctcataacactaaatggatataaaaacaataaaaggttcacaatattaaaacagatttcccc

SEQ ID NO: 263 - DNA, 558 bp, Homo sapiens
tttctttacaaaactaatctttagaaagcttttatttaatgaggtcttcacattgagtcaaaaatctgtctcccatcataactaaccattggtcctagttctttctatcccttgggaacataaacaaattcaaactcaaagatttacctcctgtgagaagtcttctggccttgccaatttccctgcccctctgttccaataatgctttgtgcttttctttattagggaatcaatcacattatattctaatcattatttacttgtgttatctccctactcgtctacaattttcttgagaacagggaatgtttttcatttctgtatcccaagcgcctaacagtacagacatccaawaacacatccagaagtattcaataaatagctgctgactgattaaacaaatcgattcatcttgaaggcagctaaataccatcagttccttcagtgtttctcatacgaaatattttcgtggcccttcctattcatggcatttgtcttctgaacccaatttaatatgactttatcctttttgatgcaggatactcagccaaatgtcac

SEQ ID NO: 264 - DNA, 1198 bp, Homo sapiens
ccttgttgctgctgcttttaaagtgtcctaaaaccaaaaatgaaacttgcygtgtgacctgatcagcaagaaggagggtgaggctgtgacccctctcttagtgtgaggatgacatttctcctaatgccctaggctttttgttccttttcattcttttgttctccaggccattctgctggcttattttgggcttacagtcaattacaatccttaaatctttttcacatgaacttttggcaagctgggactaactccatgggtgattagagctgagggcttcttttttgttttttttgcaacttacgtacttaacctgtatcaccatgttcttgatgttggcatttttttggttttgttttgtgggtatttttttatttttgtattttcatcctattagccaatttatttttgtagaatagtagaatttggaactagaagtgattttaagagtactgcagtttgtttccttcgatactgacacaacagccctcgggaaactgacctggagcgatgggtgctaaaaggagatgagattttcttcctcatatgctaggagcctggacagataaaggtgtaaacaaaaatgttagcagagggttaggcactggctacgaattcagacttggaaacttcgttgtctgtgcaacttcatactgtttcattcttgtcctgtatagtatttctttgatttccttcatctgtaaaagcaggaagaaaatatttgccactcagttctgttttttaggtatcaaatgctaggatacaacctgaggtttctttccccgccccctcacaaagtatagatcatttgttttccttccagccctgggctcagtacacagatggtttctcttcaccttttgggttgcggttttctccaggttggtgctgatgatatgataaagctcagcacagaaggccttcaggtccagtaccctggccttgacctccccataggctgtcttatctcacttttgcaccaacgcctggtaatccattacatgggtctccttggaggccttggccacagcatccccgtgttctgagaagtatttggaaatggttgtctggacggcttgcactttggtcttaactgcattcaccctctccagcaccttctcctggattgctaccccaaatcatttgcatcctcagtcttggggatcaggtgctggatccatgtgatcaccagaatgca

SEQ ID NO: 265 - DNA, 1272 bp, Homo sapiens
tctgtgtctctctccaggctttttccagggactccccggggtcagtctcctctccccactggaacggggaaactgggattggcctagacccggcagtggagtcccaggtgccctgcctgcccggctgactccgcccagggaggcctcccacagaagctcctccagactccacctgttacctcccccactcctctcacccaaggctgtgctgtggccaagtcagttgtttagtctacactttctgtttagtctacaccatggctacctcaaggcccagtgaaggtgtgtagtataaagcaaaatcaaatccatatttcagttttccttaaaaagtgaccttcatattctggccagaagaacagaatggttggttggatatattttgagttttcatgggtttttgttttcctgcctcttgttatactttctgaaattggcttttagtctaaacaggtttttttttttttttttttttttgggcaatgtgttttcctccaaagagtaagaataataggcctcatggctgggtcgtgttctacagtttgtgaatattttctcaacctttgtcaaatttcatctttacacatcctgtgtgaaattgggcacgtgccgttatttccaacttagaggggatgaatgagcccttaagagcttgagttctctgcccacattgcgagttactcagtgccagaaggagttctggaacccaggtctcctcagtctccataccacatcccttctagggcaccatgttgcttctgtgtttcttggctctgcccactccatgccagcacaactctccccacccctgctttggtggaatcatgttcctttggggtagatcacaccagccagaggcaactgctctcagcttagcagatggtactcatcacattattcttgaagccttgggtcaggagcctgccccacccatctgcatccatttgtccagccctcagacaattgccactgttttcatgtctattctttgactctctatcctgggtagacaacatggactgcccagcatcctgtcttctgtctggggctcccactgtcgtcctgaccacgctgggggctgccagtgacactgggaaactccygagggacccccttcaggcttcacatcatctgctccctccctagcatcccagcctagaacactttccagccatcagctgcattccccagtgaggcgtgcagcctctcccatgataggagggcttcagccgaaagaacacttcaacaggcccagaaacccaggagcaccat

SEQ ID NO: 266 - DNA, 461 bp, Homo sapiens
  misc_feature (1)...(461): n = A,T,C or G
atnnnnnnnnnnnnnnnnnnnnnnnnnnnnnnnnnnnnnnnnnnnnnnnnnnnnnnnnnnnnnnnnnnnnnnnnnnnnnnnnnnnnnnnnnnnnnnnnnnnntttttcaaatattttctacccggtggcacccacagttggttggtggaacctgcggttgggggagcccatggatgtgaagggctgatagtatgagaaaactcagaggtgcagagttggagagcacatcggggagaatgtcagcatgggttaaaaaagacacactgtggttggagatgatcacatgaatggccacttcaraaatgaatgggtctcatcctcaaagcaggctctcctgggcactgcttgggaaggtgctaattggagcttcaggcaacaataataaggggatacaggtggggatcctgccatgggcgtagcttactttctctggactcttctgggtcttaaggccagtttcc

SEQ ID NO: 267 - DNA, 1259 bp, Homo sapiens
  misc_feature (1)...(1259): n = A,T,C or G
gcatacccacacacaaacatacatgcacacgtggatatgctgtgggaaagaaatagatttccttaaattctgcacgcatttttaaaataaagcctgagatttctgagatattttctatctgccactggcatatgaccccycaaccctatgggtacaacatcaccttcccgacatttgaaagtcaccctgctgggcagaaggggccctagaggctatcttggatacatgaagaccaaatggctgttcttggcttccttggtgctcaagaaaaagtccagccacttcctgtttcaagagctgcccctttctctagggcacactgcccctccgagtacctgttccccagccccaggagctcccctgatgctatgaaggaggagcagcactaaagagactgcccgccccatccccaccacaatctgtagtcacaattgtgtctactgtgggcttaatcttgggccccacttttgagctgggaatgtaggaaaaaatcactaacttagacaggccagagttcaaatcatggccctctcttatcatgcaaaggcctcaggcaagtcacctacttctctgagaccagatatgcaaattgcaaattgggatcctaggacctaaatcgttggtggttgggaagttatggggaaaagtcctcacatatcctcaagtgcctatccaccccacctttctcttagtcttgattcctccaaaatattaggttacctttctttctaatttttacctgacaaggcacagcataatgaaaactgaaactggttggccatcagcagacatgactttgagactaccatactcaacgctgactatcaagtcatgtatataaaccatgcctcagtttcctcacctttaagagaggagggttgaaatagatattgattatatcagcctccatagattgcatttctgtagtgttccagtcatttcatagatgccatttaatttatattaattcagtatcctacaagaaggtatcatcaggctttactctatgaaaaggagtggggtgcagcactcaagaacatgcgctttgagctaagactgcttgacttcagccccctgctctttnctcagctgttttttgatctaagacaagtaatctaaccgctttgtgcctcagtttcccttctgcccaacctaaggnnnnnnnnnnnnnnnnnnnnnnnnnnnnnnnnnnnnnnnnnnnnnnnnnnnnnnnnnnnnnnnnnnnnnnnnnnnnnnnnnnnnnnnnnnnnnnnnnnnnt

SEQ ID NO: 268 - DNA, 669 bp, Homo sapiens
tttcttgatccacactagaaaactcgcttttgaagtggtttggaaagctctaaaagggacgtgtttcatgctattggtattgctgycaaaaagaaaagattctgcttttcatcagctgttgatttttgctctctgtatttctctagcatctgttgctggtggcccttgttatgctaacaagtagatagtgtagctgcataagcagaacagaaaagactctcctggattctcagttccaggctggcctgggaataggcttagggatgtttcaatgcttcaatgcaggtgagctggagatctgtggcaattcttttgacatgaggctggacattctttatagcttccccagacacaggaatttgcagggcttgaaaaagaatcactggcaggaggttcattttctttattgctacctccccagccataaaactaaaagctttttacctaaatcaggttagccatcttgtgggagtaggagatcatttctttcagtctttcccgattgcattctagtcctaggatggtttgaacggtccgtttgaatttgaagagctttctagttgacgcttctcatcccctctccaaccagtcttatttggtgtcatctgcctttccccttcctccctaccaaacctcagagtcttgaaacaaaaatctttgtattgtaaa

SEQ ID NO: 269 - DNA, 669 bp, Homo sapiens
tttcttgatccacactagaaaactcgcttttgaagtggtttggaaagctctaaaagggacgtgtttcatgctattggtattgctgtcaaaaagaaaagattctgcttttcatcagctgttgatttttgctctctgtatttctctagcatctgttgctggtggcccttgttatgctaacaagtagatagtgtagctgcataagcagaacagaaaagactctcctggattctcagttccaggctggcctgggaataggcttagggatgtttcaatgcttcaatgcaggtgagctggagatctgtggcaattcttttgacatgaggctggacattctttatagcttccccagacacaggaattkgcagggcttgaaaaagaatcactggcaggaggttcattttctttattgctacctccccagccataaaactaaaagctttttacctaaatcaggttagccatcttgtgggagtaggagatcatttctttcagtctttcccgattgcattctagtcctaggatggtttgaacggtccgtttgaatttgaagagctttctagttgacgcttctcatcccctctccaaccagtcttatttggtgtcatctgcctttccccttcctccctaccaaacctcagagtcttgaaacaaaaatctttgtattgtaaa

SEQ ID NO: 270 - DNA, 669 bp, Homo sapiens
tttcttgatccacactagaaaactcgcttttgaagtggtttggaaagctctaaaagggacgtgtttcatgctattggtattgctgtcaaaaagaaaagattctgcttttcatcagctgttgatttttgctctctgtatttctctagcatctgttgctggtggcccttgttatgctaacaagtagatagtgtagctgcataagcagaacagaaaagactctcctggattctcagttccaggctggcctgggaataggcttagggatgtttcaatgcttcaatgcaggtgagctggagatctgtggcaattcttttgacatgaggctggacattctttatagcttccccagacacaggaatttgcagggcttgaaaaagaatcactggcaggaggttcattttctttattgctacctccccagccataaaactaaaagctttttacctaaatcaggttagccatcttgtgggagtaggagatcatttctttcagtctttcccgattgcaktctagtcctaggatggtttgaacggtccgtttgaatttgaagagctttctagttgacgcttctcatcccctctccaaccagtcttatttggtgtcatctgcctttccccttcctccctaccaaacctcagagtcttgaaacaaaaatctttgtattgtaaa

SEQ ID NO: 271 - DNA, 669 bp, Homo sapiens
tttcttgatccacactagaaaactcgcttttgaagtggtttggaaagctctaaaagggacgtgtttcatgctattggtattgctgtcaaaaagaaaagattctgcttttcatcagctgttgatttttgctctctgtatttctctagcatctgttgctggtggcccttgttatgctaacaagtagatagtgtagctgcataagcagaacagaaaagactctcctggattctcagttccaggctggcctgggaataggcttagggatgtttcaatgcttcaatgcaggtgagctggagatctgtggcaattcttttgacatgaggctggacattctttatagcttccccagacacaggaatttgcagggcttgaaaaagaatcactggcaggaggttcattttctttattgctacctccccagccataaaactaaaagctttttacctaaatcaggttagccatcttgtgggagtaggagatcatttctttcagtctttcccgattgcattctagtcctaggatggtttgaacggtccgtttgaatttgaagagctttctarttgacgcttctcatcccctctccaaccagtcttatttggtgtcatctgcctttccccttcctccctaccaaacctcagagtcttgaaacaaaaatctttgtattgtaaa

SEQ ID NO: 272 - DNA, 1196 bp, Homo sapiens
tgcattgtgtcatgtcatcaaactacagcagtggctctgctggactggattttttaaatgaataattggtggtcttcttcctgtcactctcatctctgctcttctatgccttggctagtttgttctcctacacagattggccttggtgccagggactgggctggtggtagctctggggttatagcacctgggagaggcagatttcttcctcccagctttactctatcagaatgcaacaaatgggtcatgtgtccttccttgaagcaaacactggctgctgggatggacaatatgattgaccttgccaaggtcatcatgtctcctgtggtcagggaaagtaaggtctgctgatggaaaaacctatctagagcaaatgctttgaaggcacaaacagtccactacagtccaccccttcactccatgatggacacgcaatggacatgcccacatacatctttactcccattaatttgcttataaaaatcttatctaacatgatccactgttccataggtagccgaatgtgcctatccttaccctaaggtgaagtcayccaaagtcctatcacatccaacttcaagcccagcatttctgcagcatgagcattcctccccttcaggtcttggggtggccaaagagaaatgaaacttcctcaagtgtaagatggttggaggacagacctgggctttaatttgaagtgagatgctacaagctgtaggaacttgggcagatgacataggttcccattgcattttgaaaagaggaaaagcggaagtaacatgagtagttaccagtcagaacatacaccatatgcccaaactaagatttgcttctaaggtaaacagatagaagagtcactatgatcagttgcctcatctctaaaatgggttcataagaagtttgtgaagattgaatttttaaaaaatgagacatggcccacagtaaagtagatagcacgtagtaggtgttcaatacatgatagttttgtctcctctgtttctgtctttgtctctctctctctcacacacacacagacacacaacctgttgatctgctgacaaaaacttcaggccaccaaaataaaccaaactttaccccctctcttcccttccctctctctcccaccctactccatcatccctccttccttcctttccttcctgctctttctccctccagctccctgtatttttccc

SEQ ID NO: 273 - DNA, 1196 bp, Homo sapiens
tgcattgtgtcatgtcatcaaactacagcagtggctctgctggactggattttttaaatgaataattggtggtcttcttcctgtcactctcatctctgctcttctatgccttggctagtttgttctcctacacagattggccttggtgccagggactgggctggtggtagctctggggttatagcacctgggagaggcagatttcttcctcccagctttactctatcagaatgcaacaaatgggtcatgtgtccttccttgaagcaaacactggctgctgggatggacaatatgattgaccttgccaaggtcatcatgtctcctgtggtcagggaaagtaaggtctgctgatggaaaaacctatctagagcaaatgctttgaaggcacaaacagtccactacagtccaccccttcactccatgatggacacgcaatggacatgcccacatacatctttactcccattaatttgcttataaaaatcttatctaacatgatccactgttccataggtagccgaatgtgcctatccttaccctaaggtgaagtcatccaaagtcctatcacatccaacttcaagcccagcatttctgcagcatgagcattcctccccttcaggtcttggggtggccaaagagaaatgaaacttcctcaagtgtaagatggttggaggacagacctgggctttaatttgaagtgagatgctacaagctgtaggaacttgggcagatgacataggttcccattgcattttgaaaagaggaaaagcggaagtaacatgagtagttaccagtcagaacatacaccatatgcccaaactaagatttgcttctaaggtaaacagatagaagagtcactatgatcagttgcctcatctctaaaatgggttcataagaagtttgtgaagattgaatttttaaaaaatgagacatggcccacagtaaagtagatagcacgtagtaggtgttcaatacatgatagttttgtctcctctgtttctgtctttgtctctctctctcwcacacacacacagacacacaacctgttgatctgctgacaaaaacttcaggccaccaaaataaaccaaactttaccccctctcttcccttccctctctctcccaccctactccatcatccctccttccttcctttccttcctgctctttctccctccagctccctgtatttttccc

SEQ ID NO: 274 - DNA, 618 bp, Homo sapiens
tgaatgggcttagctgagttgcaataaaactttatttacaaaaacaggcagtgggccagatttggcttgtgggccatagtttgttggcctctattctagaccattccaagctgggtccaatatttcctctgggatgagagtaaccaatttgtcctggtttgtgtgggactcttccagttttcgcactgaaagtccagtatcctaaagaaacatctcagtttcagacagtcaggatgattggtcaccctatctgggatctggaggcccctactttctcttatctctgcattgctctggtagtgacattcaaccgtctccaccataaggaggaggaggagaaagaataggaggaagaggagttattgtttattatggcttccagcatgaaaggcactgtgtgaaggactttgccaaattactttgtttgatccttacaacaatccagtgaggtgaggctgaagttccttccagtaaagggtaaagtctggactggaacccagcttcatctgcctccataacccaggttctcctacttctacctcagattgtaagcycattgaagacagagctggggtctctcatttctgtatcttcagtgcccagcacagagtatgatgc

SEQ ID NO: 275 - DNA, 577 bp, Homo sapiens
ctaggctgcctattttcagaccttctgcctaaaattatacctgtgcttttaacatctgcgagtttgttcagcagccgtcctaagtagaagcttctggcaagayagatttgggctgttacagaaggtgagggaggcgggggcagggggatacaccgggctttggagcactgcaaggcaaaggcacttggaaaaatgagcacgcatcatccaacactctgctcagagctggcaccaactgctgaatcaacactcggaaggtgcacggcacaagcacagttcagtcctgaggagcagggagaagagtgatcttaaatgttcagagatggtttctgtttggaagctcacaggtatgttcacacccctccacccacacacttgtttatacccctagagacactcagacacaccctcagagatgtgcatgcttagaagcacacacatacacacagacatgcacaaaagttacactgctgtacaaacaggcaaacacgctcagaaaaacacacatgtacgcccagagatgtgcaaaaagatacagtacaacaccactcagaaattcactcatacgtgagacaaa

SEQ ID NO: 276 - DNA, 577 bp, Homo sapiens
ctaggctgcctattttcagaccttctgcctaaaattatacctgtgcttttaacatctgcgagtttgttcagcagccgtcctaagtagaagcttctggcaagacagatttgggctgttacagaaggtgagggaggcgggggcagggggatacaccgggctttggagcactgcaaggcaaaggcacttggaaaaatgagcacrcatcatccaacactctgctcagagctggcaccaactgctgaatcaacactcggaaggtgcacggcacaagcacagttcagtcctgaggagcagggagaagagtgatcttaaatgttcagagatggtttctgtttggaagctcacaggtatgttcacacccctccacccacacacttgtttatacccctagagacactcagacacaccctcagagatgtgcatgcttagaagcacacacatacacacagacatgcacaaaagttacactgctgtacaaacaggcaaacacgctcagaaaaacacacatgtacgcccagagatgtgcaaaaagatacagtacaacaccactcagaaattcactcatacgtgagacaaa

SEQ ID NO: 277 - DNA, 577 bp, Homo sapiens
ctaggctgcctattttcagaccttctgcctaaaattatacctgtgcttttaacatctgcgagtttgttcagcagccgtcctaagtagaagcttctggcaagacagatttgggctgttacagaaggtgagggaggcgggggcagggggatacaccgggctttggagcactgcaaggcaaaggcacttggaaaaatgagcacgcatcatccaacactctgctcagagctggcaccaactgctgaatcaacactcggaaggtgcacggcacaagcacagttcagtcctgaggagcagggagaagagtgatcttaaatgttcagagatggtttctgtttggaagctcacaggtatgttcacacccctccacccacacacttgtttatacccctagagacactcagacacaccctcagagatgtgcatgcttagaagcacacacatacacacagacatgcacaaaagttacactgctgtacaaacaggcaaacacgctcagaaaaacacacatgtacgcccagagatgtgcaaaaagatacagtacaacaccactcagaaattcactcataygtgagacaaa

SEQ ID NO: 278 - DNA, 601 bp, Homo sapiens
gaaattaccttttgatttcttaattacattgtcctcacctgcagctcaacccgcctaggagaggcgctcgccgagctcgattctccgggtgccataaattaggacgccagtcgccggcgaacgctgtggggcttccagtataccttccagcgcacgccgcagctatttttatctccctcagcacctcggcacctcggaggagcttctgctaattcactaccccgacaccgtctcatctcccctgcaaccaaacccaagtctrttcccaggcgtaggggagttgggctctcacagacctgggttccaaacccagcctctgccaggccctgactgtgtgaccctgggcgagggcatccacctcttagagcctcagtttccccatctgtaacatgagaataaaacatagctcccatttgtctggagggtaaggcttaaaggaactgcgccttgtgaaggcttagtcccactgactctgattcattcgtttcgtgagttcaccttgagtgcctactgtggatctagtgctattctaggctttgcagataaagagatgaacaaaacagtgtctgacttcttgaagtgagcaatggctatgatttat

SEQ ID NO: 279 - DNA, 624 bp, Homo sapiens
cgcacgctctgagcaccatcatttcatgaaagaaaggatattttagccccagtaaaatataacagagtaacagagaagggtcagtaagcagatatcacttatttttattttttaattttttatttttttagagatagaatcttactctgtggcccaggctagagcacagtggcatgatcatagctcacagcagcctcaaactctgaagctcaagcaatcctcccaccccagcctcctgagtagctgagactacaggtgcatgctaccacaagcagctaattttttttaaaagttttgtagagatggggtctccctatgttgctcaggctcatctcgaactcctggcctcaagccatcctcctgtcttggcttcctgagtctctgagattacagatttcattttaaataccagctctgaaagcctggggcattgggtagagaaggatgctgaggccatctctgggatgcccacaacggagcagttggtggaggtgggagcacaggtgtgctatacagttgccattcttgcaaaatatgccccataaatgctgggcaaacarataagtggcatttgcctgctgaatgtgtccataatatgctggctgtctaagagaacaagtacag

SEQ ID NO: 280 - DNA, 1253 bp, Homo sapiens
ctttaacttatattttcaaaaaaatctttttatcctcacctcaatgatttttaatccctatttttataaatgargaaactgagacatagggaaattaggtaaattgcctgcgaatttttgttgggacaagctaggattaaaatctaggccttctgatgacacatttaatatttttccttacataatgctgcctatatataatacgagactgcttcagttaaaaaaaaatcaagtatacaaaaaataacacttttctcattttgtattacaattttatcttttacgaccagttgttttggctggaggaaagcagagtaacacatcaaggattggggaaggagcagccacttgatccttggtcaccgatcaacagaggctgctctagaggcatccattgtccttgtgtgcatggcctccacgccaggagctctctgcagctcctgtagcattctcattttgctaccttcttgccccagtgtggtggtttcatcacaacgctgcctgagattccacctgcccagtacccaacagagccacttcttctctgtggtctttctacctccctggaggcacaagagggtcccaggagagggtcccagatctcctctactcgggaagcacagctttcccatcctcttgtctcttctcccagcccaggtgggggtgctctaactctcctagtcttctaccagctgtgggcctttgggcaggtaacttaatctctctgtgcctgagctccttcacctttagatggagattgattctacaataaatatttatttgttcctaatctttgccaggtattgttctgaacgctagagatatagcagtaaataaggctgggcgcggtggctcactcctgtaatcccagcactttgggaggccgaggcaggtggatcacaaggtcaggagatggagaccatcctggtcaacatggtgaaactccatctctactaaaaatacaaaaatcagccaggtgtggtggcccacgcctgtaatcccagctacgcgggagtgtgaggcaggagaatcgcttgaacccgggaggcagagattgcagtgagccgagagcgtgccactacactccagcctggcgacagagcgagactccatctcaaaaataaataagtaaataaatagagatatagcactaaataaaatcagacaaaaacaaatcttcatggagcattctaacaatattagtaataactctctcataagcttttacagaattaaatgagtacacagatatg

SEQ ID NO: 281 - DNA, 1253 bp, Homo sapiens
ctttaacttatattttcaaaaaaatctttttatcctcacctcaatgatttttaatccctatttttataaatgaggaaactgagacatagggaaattaggtaaattgcctgcgaatttttgttgggacaagctaggattaaaatctaggccttctgatgacacatttaatatttttccttacataatgctgcctatatataatacgagactgcttcagttaaaaaaaaatcaagtatacaaaaaataacacttttctcattttgtattacaattttatcttttacgaccagttgttttggctggaggaaagcagagtaacacatcaaggattggggaaggagcagccacttgatccttggtcaccgatcaacagaggctgctctagaggcatccattgtccttgtgtgcatggcctccacgccaggagctctctgcagctcctgtagcattctcattttgctaccttcttgccccagtgtggtggtttcatcacaacgctgcctgagattccacctgcccagtacccaacagagccacttcttctctgtggtctttctacctccctggaggcacaagagggtcccaggagagggtcccagatctcctctactcgggaagcacagctttcccatcctcttgtctcttctcccagcccaggtgggggtgctctaactctcctagtcttctaccagctgtgggcctttgggcaggtaacttaatctctctgtgcctgagctccttcacctttagatggagattgattctacaataaatatttatttgttcctaatctttgccaggtattgttctgaacgctagagatatagcagtaaataaggctgggcgcggtggctcactcctgtaatcccagcactttgggaggccgaggcaggtggatcacaaggtcaggagatggagaccatcctggtcaacatggtgaaactccatctctactaaaaatacaaaaatcagccaggtgtggtggcccacgcctgtaatcccagctacgcgggagtgtgaggcaggagaatcgcttgaacccgggaggcrgagattgcagtgagccgagagcgtgccactacactccagcctggcgacagagcgagactccatctcaaaaataaataagtaaataaatagagatatagcactaaataaaatcagacaaaaacaaatcttcatggagcattctaacaatattagtaataactctctcataagcttttacagaattaaatgagtacacagatatg

SEQ ID NO: 282 - DNA, 679 bp, Homo sapiens
aatgttattcatgatataatgactacagacacttttaaattttacagactccctttaagtttaatctgcatcattgacattccttcatcattttcttaagtctagataatcaacagaatgagaaatcaaaccctgatttgcaatgttggttgatttccaagaagtaaatacccccactagggccaattttgtkgtatccctgaacatggaattgggaagagcagcacaccattgtgtagtagtacttctgccatatagatgcagaacatcatctcaagaacgtagatcatcaatataagtgatgagttgtgagtattacctttctcagtataatttacttaattgcaactttgtattttaaattttaataataactgtatttaacaactggctccctgaatccctgaaaatttaacatttgagagctggtaggagccagttccaacacacccattgccctctttcctaacgagggtaaaagtctcctctttgggtgagtgagtacctttcgtcaccttgcccctcctggacacacaggtctttgttgctcacactgcctccagcagaaaacccacacacagaggctcctttctttcctgaatctcataccaagatgctgtggggggtttgacatggatcttgcctaagccttattactcacatgaatcatgacgtttaa

SEQ ID NO: 283 - DNA, 679 bp, Homo sapiens
aatgttattcatgatataatgactacagacacttttaaattttacagactccctttaagtttaatctgcatcattgacattccttcatcattttcttaagtctagataatcaacagaatgagaaatcaaaccctgatttgcaatgttggttgatttccaagaagtaaatacccccactagggccaattttgtggtatccctgaacatggaattgggaagagcagcacaccattgtgtagtagtacttctgccatatagatgcagaacatcatctcaagaacgtagatcatcaatataagtgatgagttgtgagtattacctttctcagtataatttacttaattgcaactttgtattttaaatttyaataataactgtatttaacaactggctccctgaatccctgaaaatttaacatttgagagctggtaggagccagttccaacacacccattgccctctttcctaacgagggtaaaagtctcctctttgggtgagtgagtacctttcgtcaccttgcccctcctggacacacaggtctttgttgctcacactgcctccagcagaaaacccacacacagaggctcctttctttcctgaatctcataccaagatgctgtggggggtttgacatggatcttgcctaagccttattactcacatgaatcatgacgtttaa

SEQ ID NO: 284 - DNA, 590 bp, Homo sapiens
gaagatgaatgctgaatttgggagctgtagaatttagtttaacttgccttgaaagagatttatgatcatgggatatgatgctttgtctcccaayggctctgccgttaaccgttcacctcttgtctttgtgaatccaaagaggtaacttgcaaggtggatggggcaagaaacaaggatgttgaagtttgtttggcaagtcaacagaaccaaaccaaaccaaaaaataactgcttatctgggcctgtgcaagttaaagtaatttgacaaagaaccacgttctgtcatgtgtacgttatttaggctcttgcgtcatttttttctgtatcaagattttcgagaatattttaaaaagtggagagctgttctagcacagttggtgctgcattgttgaagccaggcatagccattgtatttgaacctgttttctatcatgacctctgaaaatccattcccagaaaactgattgcttaggtcctgtggttacacccaaaggagatggtggctagaaatgagggctctgtcgtagccgtggtactgaaagatgcttccttgatggaatgttgccagacacgatttaaaaaattaaaagg

SEQ ID NO: 285 - DNA, 785 bp, Homo sapiens
gcattcaaaacatgcctctcaatgcttaaggtacaaacttgggtggggaagtagggagacggaattagcagtgattgaaaacttttaattttgtgccactccaggaaaaagtgtgcccaaaaaaagccaacccagcatgaaatcgtcatgccataaacactgggttgaattttaattgttaaccttcaaaaggacgttttttttccttttctgaatttgatttgggcatgtgccatgacccaaaaagcctctttaccttagatttgtcttttggtttggggtggttttttttttttttttttcatttatttttagaaattgggatatcagaacctatcaaaattttgccatggggaacaggagttttctcctcaagcagaaaaaaaattcatagtgtggggtgagtttgtgatcccgagaactgcaccctggccccatgcaaagtcaggcagttagctttcagcattccctgctccccagacttttctctgagtcccccttgaacaagagcagcatagtgcaaagagcagaggctgctaagccaacccaacttgagttcaaatacaggctctgccacttactcaccaggtgagtcccttaacctctctgacctcagttgccccacccagagaggtaggaaagatttactgtggtcacagctgtgacttcgttcccttgccctctgtagctgctgttccatcttttctccagcacagctgacccgtacctgccaagcccatccagtctctaggaggttcctgccctctgcccatccatgrctgaca

SEQ ID NO: 286 - DNA, 742 bp, Homo sapiens
ggaactggttgaatcctgtgtgtctctgaagttttaaaaccagtttaaatctcaagactagtattatagaacagagtattttagttttgtttatctcagtcctaacccatcctctctatctttcatgagggccatcctccaacattaagagcatccatcctcatgttttacaagraagtgtgttctttccctaggagcaattctatttctagtcattaagccagcatttttgctttctctccagtatatgtacagatttttaatggaaatattctggagcagtatgccaaaatatgttaacataagacttttgtgggtgtcaagagtctcttaactctttatttaactttttattctcatatttatattttacattatattatacatctttctgtaatacattttagttatatatttataagaaaaaataattataagaattaaagtctaaatgatggtgattcttttaaaaatctgaaattaaaaatttcaggcatttataaattcttcaattttcaaatatatgttatatatatcatcctttaggagtccacctgagataatcatttttctaaaatttataatctctgctttaaatcaaatcagtaaaaagctacaaaattcagttctccagcaattttttttatttcagtgattaattcatttatttgtttaactagtacttattgatctcttgactatgtatttgaaactcttttagacactgggcatacacacagta

SEQ ID NO: 287 - DNA, 742 bp, Homo sapiens
ggaactggttgaatcctgtgtgtctctgaagttttaaaaccagtttaaatctcaagactagtattatagaacagagtattttagttttgtttatctcagtcctaacccatcctctctatctttcatgagggccatcctccaacattaagagcatccatcctcatgttttacaaggaagtgtgttctttccctaggagcaattctatttctagtcattaagccagcatttttgctttctctccagtatatgtacagatttttaatggaaatattctggagcagtatgccaaaatatgttaacataagacttttgtgggtgtcaagagtctcttaactctttatttaactttttattctcatatttatattttacattatattatacatctttctgtaatacattttarttatatatttataagaaaaaataattataagaattaaagtctaaatgatggtgattcttttaaaaatctgaaattaaaaatttcaggcatttataaattcttcaattttcaaatatatgttatatatatcatcctttaggagtccacctgagataatcatttttctaaaatttataatctctgctttaaatcaaatcagtaaaaagctacaaaattcagttctccagcaattttttttatttcagtgattaattcatttatttgtttaactagtacttattgatctcttgactatgtatttgaaactcttttagacactgggcatacacacagta

SEQ ID NO: 288 - DNA, 742 bp, Homo sapiens
ggaactggttgaatcctgtgtgtctctgaagttttaaaaccagtttaaatctcaagactagtattatagaacagagtattttagttttgtttatctcagtcctaacccatcctctctatctttcatgagggccatcctccaacattaagagcatccatcctcatgttttacaaggaagtgtgttctttccctaggagcaattctatttctagtcattaagccagcatttttgctttctctccagtatatgtacagatttttaatggaaatattctggagcagtatgccaaaatatgttaacataagacttttgtgggtgtcaagagtctcttaactctttatttaactttttattctcatatttatattttacattatattatacatctttctgtaatacattttagttatatatttataagaaaaaataattataagaattaaagtctaaatgatggtgwttcttttaaaaatctgaaattaaaaatttcaggcatttataaattcttcaattttcaaatatatgttatatatatcatcctttaggagtccacctgagataatcatttttctaaaatttataatctctgctttaaatcaaatcagtaaaaagctacaaaattcagttctccagcaattttttttatttcagtgattaattcatttatttgtttaactagtacttattgatctcttgactatgtatttgaaactcttttagacactgggcatacacacagta

SEQ ID NO: 289 - DNA, 635 bp, Homo sapiens
ctgttattctggttttttgtttgtttgtttttgttttgagacagggtcacattatcttgtccaggctggtctcaaatttctgggctcaagtaagtgatccttctgctttggtcacccaaaacaggtgtgaaccactactcctgacctcatatgattctaatatcagcaaacataaaattgacaccattttgaaacattcaaatttgggggctttcccaaagcattgtatttagggctaacatccttctgtattctactctttaagtctcacctcccaggtcycattttgtaaaggatggaactactgctgttcatgaaagttagttaatgtctaagcagaagttgctaagaagattcctatgttggtttgtctgtcatttttattgcatagttatgtataaaatggttgacaacatgattgagcacaagccaggcgaaaagaaaaatatttgttgaatgggtgaataaatgatgtgattttacagtgtttacataaggaagtgtttgcttctaaagcttcaaatccccctaaataaatatgatcaaaacacaatagcaattatctactatcattccttgttatttgaaggattaattagctacaaaatgctacattgatatttcaaatacaggaa

SEQ ID NO: 290 - DNA, 635 bp, Homo sapiens
ctgttattctggttttttgtttgtttgtttttgttttgagacagggtcacattatcttgtccaggctggtctcaaatttctgggctcaagtaagtgatccttctgctttggtcacccaaaacaggtgtgaaccactactcctgacctcatatgattctaatatcagcaaacataaaattgacaccattttgaaacattcaaatttgggggctttcccaaagcattgtatttagggctaacatccttctgtattctactctttaagtctcacctcccaggtcccattttgtaaaggatggaactactgctgttcatgaaagttagttaatgtctaagcagaagttgctaagaagattcctatgttggtttgtctgtcatttttattgcatagttatgtataaaatggttgacaacatgattgagcacaagccaggcgaaaagaaaaatatttgttgaatgggtgaataaatgatgtgattttacagtgtttacataaggaagtgtttgctyctaaagcttcaaatccccctaaataaatatgatcaaaacacaatagcaattatctactatcattccttgttatttgaaggattaattagctacaaaatgctacattgatatttcaaatacaggaa

SEQ ID NO: 291 - DNA, 1226 bp, Homo sapiens
tgcataaaacaaagaaatgagtgatgttgtatataggttgagtagcccttatctaaactgcttgggaccaaaagtgtttcagatttcaaacagtttccaatttgggaatatcgacattaccctatgggtatgatgcaggacttttctttacattttaaacagtatctttacagagcatggaataagcaaacagtgagtaatgcaaggaggtcttgttcccatgtgggacactgtgagggacctgctgttggcatgcccagcctgctcagatgcctttgtaggattgctggcataggagaatttgggcatgctcaaaaatgctctatcacagctacaggtgttttgggagggtcttttttcccttgtggaggtacactaaataaactgtgtgctgtatgcctgtgttttgactgactgtgacctgtcacatatggtgtggtgtgaaattttccacttttagcatcacgccagtgctcaaaacattttaaattttgaagcatttcagatttcgaatgtttgtattagggatacccagtcccatattgtgaggaaagaataaacactgtcaaggtaagaaaatatgtaacaaaatccctcccagtttagaatggtaaaatcttgaagacacgacgaaagaagaaaatctataagtagatatggaaacatttattttcatttatttattaaaaggtatttagtgaatacctactaaaggaaaaagtaatcacaataattttattcagtatagagtttccaaaagggatctaaaaaatggctttctgtagtttcaatcccattcataaaagccatatgtagatatgaagaatgtcccaaagatttttttcttcaacaaacaatgctccatggtcatagaaaacagtaacagaaaagcagatcacaggtttaccttaacattaatgtaaatgcacagattatctctagagcccaaccaggtcagatattccataatgtcagagtctgtgatgagcttttcccaaaatgtattctatccagataaaatgattcttttctaaatttagtttctggggtatgtttgaaatatttgttgctacattattaagcagggctttttctttttaatcttttctgttatgctgctatgatttgactatcctttagcaattattaagccctggaaggctacaaaattaacaaactgtattaaraacaaagagcaacattttttcgataggcctatctaaaga

SEQ ID NO: 292 - DNA, 1227 bp, Homo sapiens
tgcatgaataaactaaatatagcatttccaaataaggccctggacgactagccctatcacctctctgacttcatctcttgtgactctagttacactggaattctggttattccctgaaaaagcccacctcagagccccagacaccatgtgtagtgtgcaggagccctggagggacacagaggccaaggaactgagagcctgcagggcctgtggggaggggtgaggaggccactccacagggtaggaccacaggcctgacaaggtatccagtaccagctgttccccatgtgtagaatgttttccctactgacagctgcatggatggctctcactcattccacaggtctctgcccaaaataccacctcctccgagaagccttccatgaccaccctgtgtcaggtcactacctaaccatttatactcttattttttcttcctggctgttattaccacttgacattatatattagatatatgatatgatattaggataggacagtacagtataatataacttcccttcagatgtgtatgcaggaagatttgaggggagaatccatcagcctgcagctagctaaccacttcacctcattctaatagattaacattctgggtcctattttatacataagtacaacccaagattctttatcctacactttctagagcattgtttttggatgcacagggaatccaaacttaacatataaattggaaatgttatttaagcatgtattttacaaacaaggagagtaccaccaaacaagtaaaggtctgaaaaagatccagatatacatttgaaaagagagaaactatggtattccttcagaagaacaaaaaggatatgactttgaggccataaaacttttaaggaatttttttcagttgagtttgtaacttttagaatacatgatatgaagattgtatggttatgggcaggctggcccccctaaccagtaagccaaagcacaagtcaaacatctttgatttgttccatcatctgactcttactcaagcctgccactgtctagcccagaatgggaggggtggactttgggcaatggcacaccagtcttggtgtttacttgtcttctgcctgtctcycccccttgaatggcagtccattgctgtagtttgctaggcctcccaggaaggcttttgatatggtttggctgtgtctccacccaaatctcatcttaaattgtagttcccataattcccatgca

SEQ ID NO: 293 - DNA, 897 bp, Homo sapiens
tctgttctgcgctgctccgcagtttgctgtagccatggctcaagggcaccctctggtaatgaggcggggaagaaggaggggaggcgaggggtgacatcgtgggagactgtgtttcctgcttcaaagaaccagatcagagttcagaggcgctcactcaagcctggcgttctgagctgcagtcaggaagcataacgcaactctactgctggtgacccagctggtttatttatggggggaaatgttttctcaaaaatgcagcatggttaaacagcagtgtctgaggattcaaraagtctcccagagaataaaatctcatcagtgctgagttacctaaattactaaaaccagcctgaaacacttttggttattccaataatattttcctttggaaaatgaaagacactgatcacatgaaataacattcatacccgctcccaattgtgatctctctgtggatagatttcattttcattcattaataaatttatttcctggatttatacttatcaagtcttccagcaaatgtgaatattaaaatatatatttctaaatgcttaatacttaatattcttggagcttaccatgtcaaagtaaaatgctagctttttttttttaacaatgagagactgcaaaacaattcattataggtaaaccattccaaccagcttactcccaaacactaagatgaaatcttaacaagctacaatttgaatctcaattcaaatatgaacctgatgtagaaccctaggcaaagtaagcaaccttatctgctggtgagtttcctctttcaaaaaaaaaaaaaaaaaaaaaaactttactagtagactggtaactttggagtattcaagtaccaagaaaacagtgcttttttttgtttgtttgtttgtttgagacagg

SEQ ID NO: 294 - DNA, 1053 bp, Homo sapiens
tttttgttttttcttgctgttgttcttttgagacagggtcttgctctgtcacccaggctggagtgcagtggtgtgatctcagctcactgcagcctggacctcctgggctcaagttatcctcctacctcaacctcctgagtagctgagaccacaggcatgtgcctccctaccaasctaatttttttgtagtgacagtgtttcaccatgttagccaggcaggtctcaaactcctgagcttaagctatccacctgcctcagcctcccaaagtgctgggattacaggcgtgagccaccgcacccagcctcaaatctgaacttttaagtttaacgtttaatgggaataaaagcaaacttagtcatttatttgaggctgtgtttttccaaagttaaaattataaaacaaagtgttatattattttcccatagagcacaattgccaaagacgagtcaggactgtttaaaaagggtggtgatagcctggaaaatatgtaaatgtatcccctttaccagttagttgaattcctttctaatcactagattcatagaatactgttacctgatttcagcagattccctaccaatgtttatccttgaaatataaatattaatatttagtgaaaagaaaatattatagagaagttgagtttattttcagtgcacttaatatttctatctcattttctatagaataaatccaatgctgtattgaaccaggtcttttgaataattatgattagaatgatcactattaatgttatacttagaaaattttcttgattttatataaactccaatgtgtctaatgtatctgatttcaattccaattaaattttgccttagtgaagacattgggaaattaataaatccagataatttaagtgtaaaacaaaactaatatttaacacaaaacaaacctctcctaagtaaatttcaatttatttttaaagcaattttttaaaatgaagtggaagcccattctttattgattgatatatacagatgcacttcaacttaccttcttataaacccatcattaagttgaaaatattataa

SEQ ID NO: 295 - DNA, 1053 bp, Homo sapiens
tttttgttttttcttgctgttgttcttttgagacagggtcttgctctgtcacccaggctggagtgcagtggtgtgatctcagctcactgcagcctggacctcctgggctcaagttatcctcctacctcaacctcctgagtagctgagaccacaggcatgtgcctccctaccaacctaatttttttgtagtgacagtgtttcaccatgttagccaggcaggtctcaaactcctgagcttaagctatccacctgcctcagcctcccaaagtgctgggattacaggcgtgagccaccrcacccagcctcaaatctgaacttttaagtttaacgtttaatgggaataaaagcaaacttagtcatttatttgaggctgtgtttttccaaagttaaaattataaaacaaagtgttatattattttcccatagagcacaattgccaaagacgagtcaggactgtttaaaaagggtggtgatagcctggaaaatatgtaaatgtatcccctttaccagttagttgaattcctttctaatcactagattcatagaatactgttacctgatttcagcagattccctaccaatgtttatccttgaaatataaatattaatatttagtgaaaagaaaatattatagagaagttgagtttattttcagtgcacttaatatttctatctcattttctatagaataaatccaatgctgtattgaaccaggtcttttgaataattatgattagaatgatcactattaatgttatacttagaaaattttcttgattttatataaactccaatgtgtctaatgtatctgatttcaattccaattaaattttgccttagtgaagacattgggaaattaataaatccagataatttaagtgtaaaacaaaactaatatttaacacaaaacaaacctctcctaagtaaatttcaatttatttttaaagcaattttttaaaatgaagtggaagcccattctttattgattgatatatacagatgcacttcaacttaccttcttataaacccatcattaagttgaaaatattataa

SEQ ID NO: 296 - DNA, 657 bp, Homo sapiens
atgttacattgacagatgtcttctgaatggcttacttttttttctccctaagtattcaaatcttctaattttatctgtttattactgaaatgtcaaaacatttgcttctagataccctgtgtgaacattcatctccaaagggtctcctagtaagtgagaagtcagtggtttgggatatacaggtctttttgattagagaactaagtatttccatgggctgttttctgaaaatggagttaggttcagtcttttattcccactttaatttaaaattagacagttatttgacaaattttctattaagtcaaacacttcattaaagaagagtactaaagatcatcttggcaaaaaaagcttttatatctgttcagcttagagttctaatcttatagctaaatgtttcttaaggttttttttttttctaaaagagatcactttttaatgaatgagtgtaactttttattaagacaattattttcattaaagaagtatatgaaaatggttaagtaaaatcaaatggctccaaaartcttaacagtgaaaacaacagtcctgccagttgttctttccagaggcaagcacttttcattctcttagtttttcctgctggtagttaccttcatggattttttccagattattattttttttggtttt

SEQ ID NO: 297 - DNA, 1150 bp, Homo sapiens
ttagagttgtaattctttttttttgtccagaattttggtttttaatacctcttgttggataaaaggacattgtttttcattagcttgtcttcaaaagacagagaaataagataaattaccttaaagaaattaaatagaaaattaagggaacatgtaccaaggtggttttagactctcctcagtttctttgaaaaaaggagggcttaatcttactaagtgtccttggtgacatttatagatgttgtctctgtgctctttaatgaggaacttgcagtcatttagttatagactttaagtctggcagaacgtaaatacctcccgatgaagtagtttcaccttcagtagtattctgaaatattttcttaaaattctgtatttggaggaaaaatatactttcctaaaatataaactggagtatgacttctgtcaaggtttgaaggccatctggctttcttttacatggcaaattatcagtgccagaatacaggtcactcccaagagagtgtgggcatgtagaacctatgatgcacgctttggtaaagatacactactttcattatggagctgattttgtggtagcacagtgactgtaaaagttcaaactgaatattaaaactaaatgtaccccaaatgaaagatacacaccaactttgttttaaaagaaacagtatttattaagaaattatatgttgaattctcctacrgtctgtgaagatggtttcttccatttccacagcacaagacaacagctaagattatctggaaaacactggcaatgcttgggaatggagagttcctaggaacaggaggtgaaatgacatgatgtatgcactaatttaaacttttggatccaagggcaagacagtcttttccttggcaatctagtccttacttgtccatggaatctcatacccagactgaagtaataattggatcatttagttcagtagagcggagcatgctcaacttaatcacagatcaaaccaacagttctttaactattatatcacatctgaaatatctgcattctttattaataaaaagggtgcttatacagggcagaaatataactttttcaagtattttatcattatgatctgaagtactttaaactataaattataaataaattataaaaactagcataaga

SEQ ID NO: 298 - DNA, 394 bp, Homo sapiens
ttgtcaaccctcttttatagatggaaaaactaaagccagtgaaggcacaggtaagtggcttgctcaaagtcatgggactttgaatatgcttctgtcagactgcaggcagagctcttgtttctaacagttaagccatccaacctccaggagagattttgccttaatggcagagttcgttaactacaataaaaatgattgaaatcaagtgagatggcaagagtagcaagtctgaaataagaggggacacttattacaaagggatcagaactcttgaagaggagggattccaggtggaaagctggaagcagagatacctgcttattacactttcyctcacatcaaaggctgagtcatatcccatttctgttgagaacagatggccagtggacatgca

SEQ ID NO: 299 - DNA, 1104 bp, Homo sapiens
agaattcgcaattgcaaaatcatagaaccaacccaaatgcccaacaatcaaagagtggataaagaaattgtggtgtatatttatatgatggaatactaatcagccataaaaagaaacaaattaacggcgtttgcagtaacctggatgagactggagactattattctaagtgaagtaactcaggaatggaaaaccaaacatcgtatgtgttcactgataagtgggagctaagctatgaggatggaaaagcataagaatgatacaatggactttggggacttggttgggtgggaaggttgggaggggggtgagggctaaaagaccacaaatatgatgcagtgtatactgcttgggtgatgggcgcaccaaaatctcaccaatcaccactaaagaacttacatcttctcactgaaaaaggcagcagagagctacatacatgcttttatttttttgagacagggtctcactttgttgcctacgctggggtgaagtggtgcgatctcggttcattgtagcccggacctgctgggctcaaatgatcctcccgcctcagccccccaggtggctaggactagaggcacggcaccacggccagctaatttttgtaattttttgtagagatgatgtttcaccatgttgtccagcctggtctcgaactcctgaactcaagtgagtcgcccaccttagcatacatacttttggacaatcttatttaaaataattttcttgagggaacagaaacatttagctataaattaaaatatccattcagcagaatcatttgggttgcctttcacaccactttacttttaagacataagcartatcttatgtgtgccatgctaattttcccactttgagcattggctgagcgatacagtatttttttttttttttggagagattttctcagggttctaataatcagtgctaaactgttgataaatttaaaacaaagattacttagggtctgccttttaaaacagaagtatgcaataaaaaaggaattccatctcataatagccaggagaacagtaaaggctgcacagaaactacatgaagtgaggcgtgaagagaagctatttcaggccttttgacttgagg

SEQ ID NO: 300 - DNA, 604 bp, Homo sapiens
gcaccacagcacctggctaattttttgtatttttagtagaggtggagtttcaccatgttggccaacctggtcttgaactctgacctcaggtaatctgcccacctcagcctcccacagtgctaggattacaggcgtaagtcaccgcgcctggctgtgagtgatatttttatcagtaaatggttattagtttcctacaggaagagactaaaggattaggtataaacatgtattcatatctactcaaataattcctgtataagtactcatgaggggcagaataatttcagacatcagatagcatccattgaactcttgcggctgccttatcatcaagtaacctacatctctcctcaatgctgttagcagcacttagcagctcaattcttgatctccatttgtacttagactttagagtctctttaaattgaataaaacaacatagcctgaactttggttatctataagagcaaaagactgaaaacaatccacaagactattaattaagcctttcccaagtatatttgcaattttctaaaacaaaacagcaccatatgtctgataaggacctaccttagaggagttgttaaaytaataaagcaaggta

SEQ ID NO: 301 - DNA, 1922 bp, Homo sapiens
tggttgcaagtccaaacaatttcatgtaacaggctttcacaaagatggcctgatatgagtctaatgacctttcttacaatgaattacgcagattggaggatatttactcaacaaatttacttccaaccttcccctccatattctcaacacatacacatagccttttattactattattattattttcttgagacagagtcttgctctgtcgcccgggctggagtgcaatggtgtgatctcggctcactgcaagctccgcctcccgggttcacgtcattctcctgcctcagcctcccgagtagctgggactacaggcgcctgccaccacgcctggcttattttttttgtatttttagtagagacggggtttcaccatgttagccaggatggtctcgatctcctgaccttgtgatccacctgtctcggcctcccgaagtgctgggattacaggcgtgagccaccacgcccggcctattattattatttttaattccaaaactggatggagaatgtgggaatcgaaaaattgtgcaagttgtagagcctgggtctgaggtttcccttgaaactgtcattggtcttccagaagaccagctatcccagatatattaatagtagaatcgaagggccctgagatacctgacttcagaaattcttgagttcccaaagcctgcataaagctggaggctcccatgcatgaagcttggagggccggtatgtgctcatgagagaggcagagggagagtgttttccagaatatcaatctagggtcctagcaacccctgctcaacagtgtttcttcctttcctcagcaaatccaagtggatcccttctttgtatgatggttttggggtctgtcttttccatagattctttctgccaagtctggtcttcattgatgcagttaattaataaatctcatctattttaatttaatgcttgaatgagtggctactcatgcgaggtattggtctaggtatgctcggtagggctgcaaagatgaaccaaatttagattcttccccaagaagtttacagtctaccaggagagaagtcaagtatagctggggatgggaagggatgcaaatagacacaccgttactatagggtgtgttaagatagaaggagacaaaatgtaatgaaagaagacaggaggaaatggccccagtaactccttctcataaggggcagagaacccctgaaaaggcagtttctagtttgaaggttctctgagatacgtaatgtcttcttgagccaggataaatctgctttgggcttttatttctatttctttcctagcttctggaaaaagggctatcatggaggatgttgacagcaggtttaaaatgggggggcatggtttgggggtttggtgagccccacccatagatgtgaagccagaaggaggaagcccagtgctggtatggcttcctgctcaagaagatgccagagcctctgagcaggagtcatggtccaaggaggcttgtgactctcttgtttaacttacagctttaaaggaaataacgtctttgtagcaaaagtccaccaggatttgcatttgtatttctaaaaacagaggaagaatacacaaaaacctgttgayaaatattgatagcagcttcatttgtaatagccaaagactgggaataagctagatgtttctcagtgggcgaatggttaaataaactatggtacatctatatcactgaatactgctcagccataaacaggaatgagttactggtgcatgggacaacttggatgaatctcaagggaaatgtgctgagtgaaaaagtcaatccaaaggattacatattgtatgatttcatttatataaacaataacacatggtagagatggagagcagattagagatggatggggttagcaatgggagtgtggggtgggagtgaggtggatgca

SEQ ID NO: 302 - DNA, 633 bp, Homo sapiens
tttgctgtttttgttcaggttttttactgtgggggttggaggagtcaacaaaaataatttgtgttgaattttgttgaacttstgctgaacaagtctgcagttcttaacaggccaaagttgaggcctagtcaaaaagaaggcccagaggagcctgagtagggtttgatcaaggtgagaacctcctctaattcagggaaagaagagacactcctctttcccctgaacaatataaatccttttcttccttgatcaccttttgttcactaaaaaccaactgagccatttattgggacttggtagtggatgaattttgctggatggtgagagtgaccaggcatttaatgggggacatttctatggaaacaaaaagggaaacaaagatgaatggttggagcagactataaatccattttctgagtccagagggcagccagttgagatttctaggtgttgagctctatgtttctttagatggtggaatgaggatagcagtggcaaccgatggatttcttcgtttgtagtttgaatgtttgtggtgatagcatagacagtgttgcagtcacggttatttccctgaacagagcctggaagatacagaagtgtcagtggacttttttccttttttttttttta

SEQ ID NO: 303 - DNA, 537 bp, Homo sapiens
gccactgcacctggccccagtttcaggtatttctttatagcagtgcaagaatggactaatacagcatacacagcaagaaattgtgacaatgccagggaaaggactaaaatgtcagaaatcattgcttcaagtcggaggatcttagctctggttaagcgctggaatcacctggagtgtttcaaaacatatcagtgtctgagcctcatctctacaggttcacactggcattaaattacattaattaatttttattttttgtagaaatagggtctcactatgttgtccaggctggtcttgaactgagctcaactgattctccagccttggcctcccaaagtgcagggattacaggtgtgagccaccatgtcaggctcacaytggtattttattaaacattcccctcccccgacatcccctcaaaaccccagagattctaatatggagtcaggtttaagaaccattgtcctaaaccaatatattctttcctatggttgatttccactacaatttccactgtggttgaaagttatttcttat

SEQ ID NO: 304 - DNA, 1302 bp, Homo sapiens
tgctgcctgccccttttccagcttctcatcaaaaaataaacccagtaatgttgcagcttctccttattcttaatttttaacccaacagttttacttctatacacacataaatttagagagagagatttaaaatatagttcttctaagcttcgaaactttgaacaactggagatgctagaaagataatattttcttttatttaaaaaatcaactgttattgagatgagactttcatacaattttaatttttcaattttgaactttggttcctaaattcaacaaaagttaagacaagacatagaaggacattgcagctgtcaattttctcaattcataaaataccagtaagaatggtatctgatctcaaagaaataaatacacaagaaagatgtgaattaccttgtcaaaagagcctgagcaatagcgacatatatagatacagcttagctaaaataaggcttagctaaaagtaccgggaaagagatacaataggaagtgttagtcatgaagtaaacctggcttatggcgcttttatgtgaaattttatgactgtgttagttaggcttttttggcaataagtaacaaactcagctcacacaagttaaagcataactgaaactttattggctcaggtaactgtgagggttgtcggggaagctcacaggaaccaagatagttacagttgccaggtctcaagtgctagaaccaaaattcaacatggccaggactctttctttgatctgcccttattcatgctggactttattttgcagaggaagttagttcctccaataaaaatgatgcttgggaacatgttctaggtaagtagctccaatggaatgaagttttctatgtcaatgtctgtccactaaagtcctgtggagagctctgaataggytctgtttggtttcgagatgtctactctggcattagtgtagctggtggaatggaagactcattggccaaggtgagtcatgtgaccaatgaatggataaggagaagaaattttgttgttagaactgtaatgaagggaaaacattctggccatctaaaaatgataaatgcttaagtgttttgctttaactttggacaagataagcttgtatgagtctcagtttccttgtctgtaaattagttataaaatttgccaactaagtgtaccagaaaaattaaaagtaacgtgtaaaaattcctagtaaattgcagaatttaataattcctaatacaattgcagtagttacagacttcaataaatgtgagttccaaccactatctgtatgtcttagtctacttgggctgcaa

SEQ ID NO: 305 - DNA, 590 bp, Homo sapiens
tgaaaataatttacacacacacacacacacacatatacatcatatatatgtatatatatgtagtttacttaatttgcatttttaaaacctatgaaataaatactatcatccagaaaaattttaagtgaggacatgtgcacacacacctgcacacacacaccacacacacagtacacactgcaaacacaggagaagtgatttattcccaagtcacatacctatgatgtggcggaggtggggctggagctcacactgtctgtctctgtggttgatacttacagctattatgcccatggctgacacaatgggtgctcaggtgcctgagagaagcacagtaaactcacatggccaccatgggatatttttaattttaaatttgmgaagctccatgtgatgaatttcttttgcaaaatagtacacatattttactttagactgcaccatgctcctgttgatttgaaaccatgttgtcaggatttgccatgatacaaaacaaataccatgtgaaaatcactgtgaaacagggtgtgagggtgttggcatcctgtctgattccaaggcttcagaaattgagaagtgcccaacaggca

SEQ ID NO: 306 - DNA, 1331 bp, Homo sapiens
gcatcatctgtaaaatcccttaaaaagcacaaatataaaaattttatgaaaggctgattcctcatttttaagggaaaaagggaaactgaaagcttgcctatccatgtttataaatgaaaaaagtgtcaatttactctctcattccacatacatttactaaatgcctactatgtgccagggtctaaccaggaagaacagaaaagatgaacaagacagctcagcaggataaatgctgcctgtaatagagacatacacaaaacattagagaaacaaacagaaagcaatactaattgtctgggacaacctggaaatgtttccctaataaggtgcctattacatacggacacaaaagagggacaaagtacaggacttgagcagctgaggacatttagatgacacaattttgatagaatgccacctttataacataatgtaacatcattttacctttatggctttaattccctttctaaaaaatcaggttcaagaaggttaagagtttttctaggatcacactggtagaaagttgcaaagcagagagactgctggtcttctaagggctcaaactgcttttcattacaccacagatatgaattggttgcagaccacttacattgcaagtgcttttttctgtacttaataaatacaaaatatcatccttgttattaccatgattacaactactataaatcctcccttgctgacaagccaaatggctaacttcaggtgtttatatgatctgccgcactagcctttcacataagaaggattacataataagtgcatatatcacaagtaggaattcaagtgtcttcttcacgggctaaaagaggcacacaagaccaaaagccagcaatccctcttcaaacctacattgctatattaatgttataatttatctctttaaggttaaaaaaaaaaaatcttaccaaggagatgcacttattttttaaacctgtctgtctatacccaaataaaaaaaaaattatgaccaaacaatgccccattttgtccaaacatattccccacaccactaccacatataagcctctctaaaacttacactgaaaattctgaaacatgaagatatttgtttacctaaaaatctgatctttagcagaggaaacaacaaaatattaatttcaaacaatattttccttaaaagggaatacatggcaacttctaggtctagttattgygtaatcctcctctccttctattctttcttactatgcccatccctgaccatacatactattgcaagcaatgacgcccattcttaatcattatcacctgggcaagcataatgtttttcacacacaaggcagaaa

SEQ ID NO: 307 - DNA, 1598 bp, Homo sapiens
attaaaatttttattttgctctcctgatttttacacggtaatttgccttcaggagaaaccatgctgacactgtcctgggtgttttcaggcctttgcaaatgaggctgagacctggttccaggaacgaatatacttcaaaggaaacagtaccacctacaacacctgtcatcaaaaaagacagtgggccaatcaaaaaacctaggtcaaaagagcataacttgggcaagatgctggttaaattcaatgaataaagcagaagagtaaagatttcaaggagaagtcttgctcagaatttaggargtgactctggaaaatcttgtacagatgtcaagcttgactgggattatgcagcggacagaactggcaggaactaaggaagaagtatcaaagccccagaaggtgcctatagaataaagcagaatatatcaggggaaaaaaacaaagagagaaaaatctggccaagttagctaaaggtggcagttgaaaggtgaggagagataagggaaagagcagcaaagtaaaggcctagggctgatctcatggcaactggcaacaagagagacctaggggtgaatgtcagctggaagaacgtaggagcccaaacagctgtgcggacgaattccaggtcttggatggataaaactataagtcacatcaacgagcaggtgtgcatctgaagctaaggatgtgtctatcagctgactcaggtaagaatggctcaggtactgtgcaagactgagtttgcagatagggggcatcagtggacctgactgtgcccagctagggaaagccaaaggcacagaaacaaaaagagggtgaagagacagcagtaaatagaataacacaaaactgtttctgaattataatatgtgtacttggtagagactacaaaacaaacccggaatatgaaaatgtggatttatccaaaagacaaaattttattgtatttttacccaaaaaagatccctaataatattaacaataaatttaaaacttcctaaagtacaaaattataaatatactattattaaagcaatgtaagactagatacataggaaaagaccataaggaagtaaaacaggttattacagattctgggtttatgaattttcatattttatctccaaagttctattatacaattatatattacttttaaaatttaaaaaataaaaaatattaacaataaaacttgtaatagtaagcatgcctattaccttttgaattatttgatttaaagtaatttctacttataaaatattcttaggtaaagagcaaggtatgtacataggcttttacctattgaagtccttataaaatctcctaaagttagtaatccctacatctaatttatccataactataaggtacagtttaaactaaggagatcatctcaagttttctttttataaaaatccctttatttgtaaatacataaggaatatatgctaacattgccttttcacagtagtaggaaaaggttaaatcaaaggaatcattgtggtgtgcgtgcaatgcaaattatatggcaaacagtgccagagactggttttaaagggcaaaaaatcatgtcatctccatatttgtttaaaacccca

SEQ ID NO: 308 - DNA, 1133 bp, Homo sapiens
caaaaaaattagctgggcatggtggtgcacacctgtaatcccagctactcaggtggctgaggcaggaaaatctcttgaacccgggagacagaggttgcagtgagctgagatctcaccactgcactctaacctgggtgacaagagtgagactctctcagaaaaaaaaaaaaaagtgaaaataaaacaaggaaccagaaccaagattcttcaattcacagtttgaataaaattatggaaatagtctctcctaaggtatgtagaatttcagtaaaccatgctctatctagtcctccctctcaattacttctgattttctgtatcatatacatatctgcatacaagaggaatactttaagctctattctctaagaaaggaggaaagcatgatgagcatagggctaaatttagccagccagctgtgttttgtttggcctgcagagtatttaacatttgtttttatctgaatgccttttaggtgggacctggaccttccccaaacccagcaacttccagttgtcttaatccaactagatttacccatttatattaccttcctaatctttgtaatctttggtttgtacctgctgtaagaactttcgtcgcagacataatgtgaatataagagcctagaggaaaagcttggcattgtggaattgagaggaggggaacttgagaggtgagccatccctgtctaagactctgacgtagggcagcttttctgccctctccagtggtgcacacttttgtcttcttccataggaagtccatggttaccttatttctccattctccatgcccacatctctcactgaaacctgtatctaaataaggttccaatacttattcatgggataaatgactacccaaaactaaacaaaactggcttaccttaaaccccaaataaactttcattatataagcatcaccaagcaaatggggtactcagaatcatcatacactcagcttggttgtctgcatagaagcttctctctttttttttttttttgagatggattctcacactgtcgcccagggtggagggcagtggcgtkatctcagctcactgcagcctccgcctccagcgttcaagcaattctcccgcctcagcctcccgagtagctgagattacaggc

SEQ ID NO: 309 - DNA, 1133 bp, Homo sapiens
caaaaaaattagctgggcatggtggtgcacacctgtaatcccagctactcaggtggctgaggcaggaaaatctcttgaacccgggagacagaggttgcagtgagctgagatctcaccactgcactctaacctgggtgacaagagtgagactctctcagaaaaaaaaaaaaaagtgaaaataaaacaaggaaccagaaccaagattcttcaattcacagtttgaataaaattatggaaatagtctctcctaaggtatgtagaatttcagtaaaccatgctctatctagtcctccctctcaattacttctgattttctgtatcatatacatatctgcatacaagaggaatactttaagctctattctctaagaaaggaggaaagcatgatgagcatagggctaaatttagccagccagctgtgttttgtttggcctgcagagtatttaacatttgtttttatctgaatgccttttaggtgggacctggaccttccccaaacccagcaacttccagttgtcttaatccaactagatttacccatttatattaccttcctaatctttgtaatctttggtttgtacctgctgtaagaactttcgtcgcagacataatgtgaatataagagcctagaggaaaagcttggcattgtggaattgagaggaggggaacttgagaggtgagccatccctgtctaagactctgacgtagggcagcttttctgccctctccagtggtgcacacttttgtcttcttccataggaagtccatggttaccttatttctccattctccatgcccacatctctcactgaaacctgtatctaaataaggttccaatacttattcatgggataaatgactacccaaaactaaacaaaactggcttaccttaaaccccaaataaactttcattatataagcatcaccaagcaaatggggtactcagaatcatcatacactcagcttggttgtctgcatagaagcttctctctttttttttttttttgagatggattctcacactgtcgcccagggtggagggcagtggcgttatctcagctcactgcagcctccgcctccagsgttcaagcaattctcccgcctcagcctcccgagtagctgagattacaggc

SEQ ID NO: 310 - DNA, 491 bp, Homo sapiens
tttgtgttagttaaaatggaaagtataggcataactcctttctttactcttccattcaagaactagtctatgtttgtaaggaaggcaggttctcctttaaaaggaaaagaaatgggctaggcacaytggctcatgcctgtaatcctagttctttggaaggctgaagtgggaggattgtttgatgccaaccattcaagaccagcctgggcaacatagtgagactttctgtctgcaaaaaattaaaagcatggtggcacatgcctgtaattctagctacttgggaggctaaggagggaggatctttgaacccaagaggttgaaggtgcagtgagctgtgattgaaccacctgcactccagcctggataacaggtgaccctatctccaaaaaaaaaaaaaaaaaggaagggggaaagaaatgacacacaagagagcagagaactggacattaaatcaagctaggctatggggaagtgaaaataagttagttgga

SEQ ID NO: 311 - DNA, 699 bp, Homo sapiens
agatggtaatcaatgaagaccagaaataaccaggacaacattgggtgtgtgtaggtagtgatggcatcaatctttataccaatttataattgtaatatgcctagcacctttttttaaagctttattgcaatcatcactaccccaaaaagaaacacaatacccactagtattccctccctgtctcctagtcctcagcaaccactgatctactttctgtctctacagattgcctgaatgtaaaattctggacattttacataaatgaratcataccatgtgtgctttttgcgtgtgactggctttttccattaagcataaagattttaaggtttatccacattgtagcatgtatcagtacgttattcctttttatgactgaataaaattccattctatggatataatacattttatttatccatgtatcacttgatggacatttaggtaaaacaacctaaattttaaaccatttttaattattatgtataatgcttctctgaacattcacgtacaagtttttgcatggacatatgtttccatttctcttgggtaaacccctgggaatagaattgctgcatcttttgtttaaccctttgaagaactaccaggttgttttccaaaccagctataccattttccattcccggtatatgagagtactgatttctccgtatcgatgccaacatttgtgtgtttttc

SEQ ID NO: 312 - DNA, 1584 bp, Homo sapiens
tctttgtcttctgctttttgttattgatgtcccaaattacatcgctatatattatgtgcccaataaataggttaatacttgttttttgcatttgtctttttaaagtgcagaaaattattaataaaaatggaattataagtgaaaattacaataatactaccttataattgcccatgtatttatctttaccagagatcttcatttttttcatatggcttcgagttaattcaaatatagatgtatttatttaaggcatgtttcctaccaccagcactgggcacatgttcagattggcaatcagatccataagtctcaatggctttaatttagcactgcatttacttagctgtacagagaatgaagaacagaaaatacagtatacccaacatcttacagctcactgggaggcccagcagtacccatgcacatagtttctcatcccttcactcacccacatgcagagcgtgcacagtgactagagatgagacgaagagccaggcgtggtggctcacacctttaatcccagctctttgggaggtcaaggagggcagatcatgaggccaggagtttgagaccagcctggccaacatgacgaagcctcgtctctactaaaaaccaaaaattagccgggtgcggtagcacgcgcctgtagtcccagctacttaggaggctgagacaggataatcacttgaaaccgggaggcggaggttgcagtgaacggagaccacgccattgcacttcagcctgggctacagagcaagactccatctcaaaaacaaaaacaaaaacaaaaacaaaagaggtgaaggtgtatgtggttcatattgacagagggaagtccccgccttggtttcccatgagtcttttatattctccttgtgatgaaggctccaggcttgtgtgcattcccagggcaggaacagtcccacagaccaagggcttcacagtaaacaaagtaggtgaccagttcccaacatacattattccacattgaacttgatacatttccaaggaaacagtgttgtgagaaggcggcctaggtctgttcaggatctaggcccacaattaattaatactttactcacagcattcaraagggaaaaaagaataatatatacacgtatggccaggcatgctggttcacgcctgtaatcccaacactttgggaggctgaggcgggtaaatctcttaagcccaggagtttgagaccagcctgggcaacgtggcaaaaccctgtctctacaacaaataaatacataaataaaattagctgggcatggtggtgtgagcctgtggtcccagctactcgggaagccaaggtggcttcaacccaggctgggttgaagacgatgtagaaatgtctgcctgacaatcatatatacttaagataaatgggaggatactcttgatatagactcccccttaggcaacattatattgtgatcattctttgtatctgtctctggatgatatttgatgacacggattttaatggcagcttgtattcctttgtctaatgtttcataatttacttggctaatctctactatgacatcttaagtattacaatttcaactactataa

SEQ ID NO: 313 - DNA, 1584 bp, Homo sapiens
tctttgtcttctgctttttgttattgatgtcccaaattacatcgctatatattatgtgcccaataaataggttaatacttgttttttgcatttgtctttttaaagtgcagaaaattattaataaaaatggaattataagtgaaaattacaataatactaccttataattgcccatgtatttatctttaccagagatcttcatttttttcatatggcttcgagttaattcaaatatagatgtatttatttaaggcatgtttcctaccaccagcactgggcacatgttcagattggcaatcagatccataagtctcaatggctttaatttagcactgcatttacttagctgtacagagaatgaagaacagaaaatacagtatacccaacatcttacagctcactgggaggcccagcagtacccatgcacatagtttctcatcccttcactcacccacatgcagagcgtgcacagtgactagagatgagacgaagagccaggcgtggtggctcacacctttaatcccagctctttgggaggtcaaggagggcagatcatgaggccaggagtttgagaccagcctggccaacatgacgaagcctcgtctctactaaaaaccaaaaattagccgggtgcggtagcacgcgcctgtagtcccagctacttaggaggctgagacaggataatcacttgaaaccgggaggcggaggttgcagtgaacggagaccacgccattgcacttcagcctgggctacagagcaagactccatctcaaaaacaaaaacaaaaacaaaaacaaaagaggtgaaggtgtatgtggttcatattgacagagggaagtccccgccttggtttcccatgagtcttttatattctccttgtgatgaaggctccaggcttgtgtgcattcccagggcaggaacagtcccacagaccaagggcttcacagtaaacaaagtaggtgaccagttcccaacatacattattccacattgaacttgatacatttccaaggaaacagtgttgtgagaaggcggcctaggtctgttcaggatctaggcccacaattaattaatactttactcacagcattcagaagggaaaaaagaataatatatacacgtatggccaggcatgctggttcacgcctgtaatcccaacactttgggaggctgaggcgggtaaatctcttaagcccaggagtttgagaccagcctgggcaacgtggcaaaaccctgtctctacaacaaataaatacataaataaaattagctgggcatggtggtgtgagcctgtggtcccagctactcgggaagccaaggtggcttcaacccaggctgggytgaagacgatgtagaaatgtctgcctgacaatcatatatacttaagataaatgggaggatactcttgatatagactcccccttaggcaacattatattgtgatcattctttgtatctgtctctggatgatatttgatgacacggattttaatggcagcttgtattcctttgtctaatgtttcataatttacttggctaatctctactatgacatcttaagtattacaatttcaactactataa

SEQ ID NO: 314 - DNA, 1942 bp, Homo sapiens
ttttaatatattcacaaggtttgtgcataggattttgtgtgaatactggttttcattcctcttggataaagatttaatttggcattacccttccagacaccattctgtgttttcatacgtatatatgtatgacagtctgaccttaggcagagtagcattttcaaaattttacatggggaaactttctagagttaaagtcattttatttttctgttctgtctggttttatctgcgtgttatttacaatctgctgcgtaacaaattactacaaacttagtaccttaacacatatttatttcacagtttctgtgggtcaggagatcagaaatggttctatttcaaggtctctcacagggctgcaatcaagatgttggcatggctggggtctcatctgaaggctggactggagaatctacttccaaacttatgtggtagttggaagagtttagttcctcaaggctgctaaactgatggcctgtgttccttgcctctgggatggtagcttgcttcaacaaagtgtgcaagcagagaagacagagagagtccrctagcaagatagaagccacaatctcttgtaatctatcatttttgctgtattctactggttaaaaataactcattaggttagcctactggctctgaaggggaagagattatacaaaggcatgaatttctggaggagggaatgagggcaaagaactctgaaaagtctctcttccacaatctgaagaacttctagaaagtagaaggaagcgatattgcttagggatggacaacttggcactggttatgtgttccaagtgaggtaaccttgttcccaggaataaagagaaccagatgactgtaaacatttccctaaactgaaatgcactgttgtatgttcacctgcaatgaatggtgtaagctgaatataagatttttgacaaaataaaaattttgctgtgttctcagatctggcaggctcctgcccttgtgcaaacaatgttcctggtaactattcatctccttaggtaaataagaattggagaaaagctgtgcttagatagggtgcatttgctcttgccttggaaggttgttttctgataaggttctatatcctctgcaaatcaaatcaggcacttacagtgtgagtatgcattctcttcctgccagtctggagatgatcaaaaagcctataacaggcttggcctattttcctattgggttgctgggctttttttctttatttacttgtagagagttttagacctctgtgtatgtatggtgtacaagtgacaatattcagatctgtaaactgtaacccagtctgggagcaaagaagatatagaaaaatgacttttacttccggcttgagtagtaaaattgagattcaaattttgcatatagaagtactatatggctaacttatttggggagcaaagctgacttaccataagtctatctcaaatagaaatgaaacactcaatttgtgaaatatgctgagttttaatgcgtgtgggggcagggtgaattaacatttgtgatgcaaggagaagagcaatctatacttaccactgtctatttgacattgtttggggactactgctacactctaagtcattttaccttataacgcagagttgtaacacgctactctgagcagctcatgacatctgcttgaaatttaagttgggcccctagtatgtgtttattataaagattttgatgctgcttttcagagttgggtaacctactttaccccctaagctaatgtttcccaaatacacccaaacccacagaaaggaaaactattcatcattaactcacagccaacatcataaacattttatatctagagctgatgatacagtcaggtatttaccaacactcatgtatatatgtagagtgtcaagaaataattgcttatccttactagattcaacattagccttactagattcaa

SEQ ID NO: 315 - DNA, 1942 bp, Homo sapiens
ttttaatatattcacaaggtttgtgcataggattttgtgtgaatactggttttcattcctcttggataaagatttaatttggcattacccttccagacaccattctgtgttttcatacgtatatatgtatgacagtctgaccttaggcagagtagcattttcaaaattttacatggggaaactttctagagttaaagtcattttatttttctgttctgtctggttttatctgcgtgttatttacaatctgctgcgtaacaaattactacaaacttagtaccttaacacatatttatttcacagtttctgtgggtcaggagatcagaaatggttctatttcaaggtctctcacagggctgcaatcaagatgttggcatggctggggtctcatctgaaggctggactggagaatctacttccaaacttatgtggtagttggaagagtttagttcctcaaggctgctaaactgatggcctgtgttccttgcctctgggatggtagcttgcttcaacaaagtgtgcaagcagagaagacagagagagtccactagcaagatagaagccacaatctcttgtaatctatcatttttgctgtattctactggttaaaaataactcattaggttagcctactggctctgaaggggaagagattatacaaaggcatgaatttctggaggagggaatgagggcaaagaactctgaaaagtctctcttccacaatctgaagaacttctagaaagtagaaggaagcgatattgcttagggatggacaacttggcactggttatgtgttccaagtgaggtaaccttgttcccaggaataaagagaaccagatgactgtaaacatttccctaaactgaaatgcactgttgtatgttcacctgcaatgaatggtgtaagctgaatataagatttttgacaaaataaaaattttgctgtgttctcagatctggcaggctcctgcccttgtgcaaacaatgttcctggyaactattcatctccttaggtaaataagaattggagaaaagctgtgcttagatagggtgcatttgctcttgccttggaaggttgttttctgataaggttctatatcctctgcaaatcaaatcaggcacttacagtgtgagtatgcattctcttcctgccagtctggagatgatcaaaaagcctataacaggcttggcctattttcctattgggttgctgggctttttttctttatttacttgtagagagttttagacctctgtgtatgtatggtgtacaagtgacaatattcagatctgtaaactgtaacccagtctgggagcaaagaagatatagaaaaatgacttttacttccggcttgagtagtaaaattgagattcaaattttgcatatagaagtactatatggctaacttatttggggagcaaagctgacttaccataagtctatctcaaatagaaatgaaacactcaatttgtgaaatatgctgagttttaatgcgtgtgggggcagggtgaattaacatttgtgatgcaaggagaagagcaatctatacttaccactgtctatttgacattgtttggggactactgctacactctaagtcattttaccttataacgcagagttgtaacacgctactctgagcagctcatgacatctgcttgaaatttaagttgggcccctagtatgtgtttattataaagattttgatgctgcttttcagagttgggtaacctactttaccccctaagctaatgtttcccaaatacacccaaacccacagaaaggaaaactattcatcattaactcacagccaacatcataaacattttatatctagagctgatgatacagtcaggtatttaccaacactcatgtatatatgtagagtgtcaagaaataattgcttatccttactagattcaacattagccttactagattcaa

SEQ ID NO: 316 - DNA, 1960 bp, Homo sapiens
tgcatcctgtgtaaatactggagttcttgtctcagaagcacagggtatcatggaaattggagttgaaagctggggaactgatggaacgtctccatgaggagcaaataactggagccatgggttggtaccaagatgttccctctgccttctactttcgatagaaactaagccagtatggcatggggctctgaaaatgggctgaggggaacattggtagcctccactaaccccctgcccctacgctgttcctgaagtcccaggcagttaagacgtccacagtgaacggcacttaatcaaaagttcagacacagtgaaaattcaggaatataagacaatgtaaaacactatcagagaaatgaggcaaagaatgatataaaaaaggtaatatcatgttcaagtctttgaggaagatttccaggttgaaaccaagccatagcttttagtatattttcattttaggttaggcaagaaagttagcgaactttgtcctcaaacctaggaccatttaaaaaagtgacaataaagaagacgaagaaatcatgaagagagtataaatttatgaaaatataacatttggccaggmgtggtggctcatgcctgtaatcccaacactttgggaggctgaggcaggcagatcacgaggtcaggagattcagaccatcctggccaacatggtgaaaccatgcctctagtaaaataaaaaaaattagccgggcatggtggtgcgtgcctgcagtctcagctactcgggaggctgaggcaggggaatcgcttgaacctgggaggcggagattgcagtgagctgagattgcaccactgcactccaaacctagtgacagagcgagactatctcaaaaaaaaaaagaaaatataacatttaaataagtcatttaggtttactgggctagttagtgatttgttagctatgataatgtttttattagtgggaaaatgttattttatagagatgcatactgaagtatttaatggtggaatgtcatgatatatacaatttactgaaaataactgaattcggctttaaaataatctgacaaggatagctagtggccttgcacagtggcaggacagatctattaggagcagcaaagtacaggggaaaagcatgtacttttcagacagctatgagtttgaattttgttccaccatttaccagcttcaatttttctcttaaccagtgatgagattaaataatgtatgtagagcccagggcctgggtcataagaactcctcaacaagcagtatgactatattctgaggggtgatttatcagtgagccagggtggaaatacctcatttgagtaatcctcaactgttctgcaacattcctagatgtttctggtgtctactttaaacaggaaaaacttcccatgccactttgccatctccacctgaaaactgtttagtagttcagtactataaatatcagttgaataatttaaattcactggttatctttagaattcaaagactcacacccattttttatttaagcatatgtgaacaatgatttgtgaacatctctctagtttctaaatctattacggtttcttaggaaaagtaggaattaagaaataatctttatgtaataggtgtaaaagaagtattttggctggatgcagtggctcacgcctgtaataccagcactttgggaggccaaggcaggtggatcatgaggtcaggagatcgagaccatcctggataacatggtaaaacctgtctctactaaaaatacaaagaaattagccaggcatgttggcgggcacctgtagtcccagctacttgggaggctgaggcaggagaatggcgtgaacctgggaggtggagcttgtagtgagccgggatcgtgccactgcactccagcctgcgtgacaaagcaagactgtctcaaaaaaaaaaaaaaaaaaaaaaaaggcaatatttctcaccatcaggaatctaa

SEQ ID NO: 317 - DNA, 1960 bp, Homo sapiens
tgcatcctgtgtaaatactggagttcttgtctcagaagcacagggtatcatggaaattggagttgaaagctggggaactgatggaacgtctccatgaggagcaaataactggagccatgggttggtaccaagatgttccctctgccttctactttcgatagaaactaagccagtatggcatggggctctgaaaatgggctgaggggaacattggtagcctccactaaccccctgcccctacgctgttcctgaagtcccaggcagttaagacgtccacagtgaacggcacttaatcaaaagttcagacacagtgaaaattcaggaatataagacaatgtaaaacactatcagagaaatgaggcaaagaatgatataaaaaaggtaatatcatgttcaagtctttgaggaagatttccaggttgaaaccaagccatagcttttagtatattttcattttaggttaggcaagaaagttagcgaactttgtcctcaaacctaggaccatttaaaaaagtgacaataaagaagacgaagaaatcatgaagagagtataaatttatgaaaatataacatttggccaggcgtggtggctcatgcctgtaatcccaacactttgggaggctgaggcaggcagatcacgaggtcaggagattcagaccatcctggccaacatggtgaaaccatgcctctagtaaaataaaaaaaattagccgggcatggtggtgcgtgcctgcagtctcagctactcrggaggctgaggcaggggaatcgcttgaacctgggaggcggagattgcagtgagctgagattgcaccactgcactccaaacctagtgacagagcgagactatctcaaaaaaaaaaagaaaatataacatttaaataagtcatttaggtttactgggctagttagtgatttgttagctatgataatgtttttattagtgggaaaatgttattttatagagatgcatactgaagtatttaatggtggaatgtcatgatatatacaatttactgaaaataactgaattcggctttaaaataatctgacaaggatagctagtggccttgcacagtggcaggacagatctattaggagcagcaaagtacaggggaaaagcatgtacttttcagacagctatgagtttgaattttgttccaccatttaccagcttcaatttttctcttaaccagtgatgagattaaataatgtatgtagagcccagggcctgggtcataagaactcctcaacaagcagtatgactatattctgaggggtgatttatcagtgagccagggtggaaatacctcatttgagtaatcctcaactgttctgcaacattcctagatgtttctggtgtctactttaaacaggaaaaacttcccatgccactttgccatctccacctgaaaactgtttagtagttcagtactataaatatcagttgaataatttaaattcactggttatctttagaattcaaagactcacacccattttttatttaagcatatgtgaacaatgatttgtgaacatctctctagtttctaaatctattacggtttcttaggaaaagtaggaattaagaaataatctttatgtaataggtgtaaaagaagtattttggctggatgcagtggctcacgcctgtaataccagcactttgggaggccaaggcaggtggatcatgaggtcaggagatcgagaccatcctggataacatggtaaaacctgtctctactaaaaatacaaagaaattagccaggcatgttggcgggcacctgtagtcccagctacttgggaggctgaggcaggagaatggcgtgaacctgggaggtggagcttgtagtgagccgggatcgtgccactgcactccagcctgcgtgacaaagcaagactgtctcaaaaaaaaaaaaaaaaaaaaaaaaggcaatatttctcaccatcaggaatctaa

SEQ ID NO: 318 - DNA, 1243 bp, Homo sapiens
cttcatttcatacagccacagttattaatactttgctaagggctacccagctgctaaaaactgctgttatctcatactgagaatgctagttctatacctttgctctcaggctgtgaggaaggggtgctagtccaaaaggccatgggattagatttaaaaaggctaaaattaaatcctagaaaataaagaatatttcattttttaacattttaggaaacaaaatgaatatgcttttaaaacataaaaagccagaatccctcaatttataccaccaatctgtcttacatattcatttatccctgtagtttcattctttgctcctttaatacatgagcaagactgacatacaacacataaaatgagaacatctcaatatcatattttttttttttttttttttttttttggagacaaagtctcagtcactcagtcaggctggagtgcagtggcatgatttcagctcactgctacctccatctcctgtgctcaagcgatcctcctgcctcaacctcctgagtagctgctaattataggcacgcaccaccaygcccggctcatttttgtattttcagtagaaacagggtttcaccatgctggccaggctggtctcgaactcctgagctcaagtgatctgcccacctcaacctcccaaagtgctggcattctaggagtgagccaccgtgcccagcctcaatatcatgttttctgagtgacaaaagaaacagaacaaatgaaaatgaacactttaaaaaaagactcacgttaatgcgcatgattcaagcatgagtccgtacactgtaccaagttcttttgctctgccctagcatgatagaagtatcttccagttactgaaatgtctttaactaagttctcttgctctttgaaacctcaccgtgaacttattaagggagaaaaaaaattgctcaaatattttgggggtgttcacaaagcatcgtttatatcccaacattagtatcccacaaagagtctgcatcaagctaaacattaaaagaaagaaaaattgtgcttaactttaacaacaaagtacctacccttttctggtgttttaaatgtgtagttgattgaagattcttccattggaaaggaagcagagagatttttgactttgctatctgaagactgttcgatatcagagttctttgacagttcacattttttaggttccactttgctttcagatccactctgggctactgaactagtttcactgttgttacttttc

SEQ ID NO: 319 - DNA, 1243 bp, Homo sapiens
cttcatttcatacagccacagttattaatactttgctaagggctacccagctgctaaaaactgctgttatctcatactgagaatgctagttctatacctttgctctcaggctgtgaggaaggggtgctagtccaaaaggccatgggattagatttaaaaaggctaaaattaaatcctagaaaataaagaatatttcattttttaacattttaggaaacaaaatgaatatgcttttaaaacataaaaagccagaatccctcaatttataccaccaatctgtcttacatattcatttatccctgtagtttcattctttgctcctttaatacatgagcaagactgacatacaacacataaaatgagaacatctcaatatcatattttttttttttttttttttttttttggagacaaagtctcagtcactcagtcaggctggagtgcagtggcatgatttcagctcactgctacctccatctcctgtgctcaagcgatcctcctgcctcaacctcctgagtagctgctaattataggcacgcaccaccatgcccggctcatttttgtattttcagtagaaacagggtttcaccatgctggccaggctggtctcgaactcctgagctcaagtgatctgcccacctcaacctcccaaagtgctggcattctaggagtgagmcaccgtgcccagcctcaatatcatgttttctgagtgacaaaagaaacagaacaaatgaaaatgaacactttaaaaaaagactcacgttaatgcgcatgattcaagcatgagtccgtacactgtaccaagttcttttgctctgccctagcatgatagaagtatcttccagttactgaaatgtctttaactaagttctcttgctctttgaaacctcaccgtgaacttattaagggagaaaaaaaattgctcaaatattttgggggtgttcacaaagcatcgtttatatcccaacattagtatcccacaaagagtctgcatcaagctaaacattaaaagaaagaaaaattgtgcttaactttaacaacaaagtacctacccttttctggtgttttaaatgtgtagttgattgaagattcttccattggaaaggaagcagagagatttttgactttgctatctgaagactgttcgatatcagagttctttgacagttcacattttttaggttccactttgctttcagatccactctgggctactgaactagtttcactgttgttacttttc

SEQ ID NO: 320 - DNA, 513 bp, Homo sapiens
attggtaaaaggatgcactaaccagtcaatggaatagaaataaacccacatatatatagtagtactcttttcgcaagagtactacagcaattcaatgaggaagaacctaaacataaaagctaaaattaaaaaacttctaggcaaaaacacaggaaaaatagttttgaccttatgttagaagattatttgctacataggatacaaaatgttcaaatcactgaagaaaaaaagtaaaaaatatctgcttccatccaagtactaaccaggcccaatcctgcttagcttctgagatagtcaagatcyggcatgttgagggtggtctcagggtacaaaatcaatgtgcaaaaatcataagctttcctctacaccaacaatagacaagcagagagccaaatcatgaattaactcccattcacaattgctacaaagagaataaaatacctaggaatacagataacaaggaaagtgaaggacctcttcaatgagaactacaaaccactgctcaaggaaata

SEQ ID NO: 321 - DNA, 620 bp, Homo sapiens
tgcattctctgaacatgtagcaaatgatgatgaaagactctgaagataattgagccgatgagaataaaaacctrtgcaaacttttaaaaattattgataagccccatttcagtatatcattatagataattgaaagttcattctcaaagtgtaagaaagttctgttcaatgtggtagttgtgagataaactctgtaaatcttactagtaatgagatgttatgtttagcaatgattaagaattgttattggcaaattctggaaaagaaattattttcatgatatgtttgtatctgtagattaatatatataagctatttacacagtactcagtatgtgaaattgtaatgtaattgacaaatacacaaaaaggttactaataccactagtcatttctacacttttatgtcttcccatcagtggcaaactaaatccttatgctttcaacatttttctacttagcatcaatatatccttcacacacaaaacattctgccttcaaaaaatacgccaatcctttaattagaaattacagacaattttctgtttgttcattcttgttcatatttctgacacttggtgatacggtctggatctttgtcaccacctaaatctcatgatc

SEQ ID NO: 322 - DNA, 1248 bp, Homo sapiens
tgcattaattcataaagttctttgcagtgaagattcttggtttacactggttgttttatactgaaagacctgtcaacttaaatatgactgtgatgtatattttctatttattgtttcacctagctagtgacctatgataggccttggtgccaaatattctgcccaaatgaaaacaagatgcaatacagactcactttaaattagaatcaagaaacacggaaagaatgagacactggacaatgagatctacccatgtaaagttatggattaaattactgaagaggccatgagtaaagccacgtatgaatgaggctgttctataaggaagaatagtgtttgttaaaatgagtacctgctatgtgctgagtattgttctgagcacttgtttgcaggtaaacaagaacatttaccaagtaaggtgcatgttaacaagtaaacacattcaaaattttgtggaagaacattttaggcagcataaacaacaaatgcaaagatcctaaggcagaaactaaaaaacgaaagaacagccactcgtttacaagcaaacgagaacatttactggaaaacacaccttaaagaggaaagaatggtatagctatagtttagtgagtgagaggttatcagagaccgggggtataggaggatgagctcaatttctaaatcaaaaccagtaaagatttttaagaagaagttcatgtgatgtgatatgtgactactttggctgttgtatggaccatgggttgcaagcctaaggctaggaggatatctcagtgggaaacaaaagaaagcaatatgtattttttgcctcaaatatggcaaataggaaagattatgagtaggycaagtagatgacaggatccatgtagtactgttttgcttttgtttatattttttagaactgaggtatctttcatgtatatgtaggctaaaataaaggagaattagataaggagagttaaagaagcagagatagaagagtaaagatacagaaaagtgtctaatgatctaagatccttgttgaggtgtctacaattaaatttaagaagtgctggctcttgtcaggccccatgttctattggagttgtctcaagttgggctagaaattggaaaaaaaatgcacatcatagattaatggtagagttttattgaaaaaaggagaatctggcatgactgggatcagcaagacaaagatgtaaaagggcctcttgactcattatcattctacagtgcagcatgccaggagcaggg

SEQ ID NO: 323 - DNA, 979 bp, Homo sapiens
tgagccatcgtgcctggcccatagacttttttcttttttttaacacctattggattgctaaaattacttatgtttaaatattttaactcctctgtggaaggacactactttgatttgttatgttcactctgactgatatctgaggctggcctcaggggtctgcagatctagtcctactcagccatttaagtagytgcataatcttgggaagatttttaaactatttcattagatagggattttcatatataggtatatagatattgatatatttagatggttaaatgcagccacagggactgcaaatattcttttctactattttataatattttatcatatatgtctgaataatttggtcacagaactttattttcttgagttattacagattcctctctattagttacatatctcatgcagtgctcttgggtatatctttctaatatctactaaagtccactgcctatcatcttcactgtgacagctatcatctcagtcatcattatcatcagcttgaaatttctgtttgctttttaactttctatcttctccattagaatctatgctctacaaaagcaaaccctgtccttgttacgattctattccttgtgcctaggacagtacatgaaacacattaaaatgaaatgataaaaaagagtagtttatctttcacaaaaaaagtgcaatgtatggcatattctcacaagcagaattaaactttgtgtttgagatgtttacttttttagtggatcacttatctatatatttcaaaggagaaatgatgtctctaccaggattttatttttttaataaacaatgtttttcatattccattacacagacacctatgacttcacattttctatataacatgatatcagtcaaaactattttaaaatacttaacttgaataaccagagacaaacatttaaatttcaaagtagaatcactatctttcacttatttctctaaactg

SEQ ID NO: 324 - DNA, 979 bp, Homo sapiens
tgagccatcgtgcctggcccatagacttttttcttttttttaacacctattggattgctaaaattacttatgtttaaatattttaactcctctgtggaaggacactactttgatttgttatgttcactctgactgatatctgaggctggcctcaggggtctgcagatctagtcctactcagccatttaagtagctgcataatcttgggaagatttttaaactatttcattagatagggattttcatatataggtatatagatattgatatatttagatggttaaatgcagccacagggactgcaaatattcttttctactmttttataatattttatcatatatgtctgaataatttggtcacagaactttattttcttgagttattacagattcctctctattagttacatatctcatgcagtgctcttgggtatatctttctaatatctactaaagtccactgcctatcatcttcactgtgacagctatcatctcagtcatcattatcatcagcttgaaatttctgtttgctttttaactttctatcttctccattagaatctatgctctacaaaagcaaaccctgtccttgttacgattctattccttgtgcctaggacagtacatgaaacacattaaaatgaaatgataaaaaagagtagtttatctttcacaaaaaaagtgcaatgtatggcatattctcacaagcagaattaaactttgtgtttgagatgtttacttttttagtggatcacttatctatatatttcaaaggagaaatgatgtctctaccaggattttatttttttaataaacaatgtttttcatattccattacacagacacctatgacttcacattttctatataacatgatatcagtcaaaactattttaaaatacttaacttgaataaccagagacaaacatttaaatttcaaagtagaatcactatctttcacttatttctctaaactg

SEQ ID NO: 325 - DNA, 1231 bp, Homo sapiens
gcattaggaaaatgcaaaagcaattaagtagaccaagggtctaacatgaatatgaaacccttattttcctggcactaccatgtacaaactacccttatgtcatgccccactggttttgtaccaagtgaaaaaatgatcttgccaacttaagtctttctatgtgttcattgcaccaacccactactctcatgctcatgactatttttttaggggtgggttgtgacatacaaatgaacatactctttctttccccctctcatttttttaagggaaaccaatcaaaaaacaaaaaccaaaaaagcactataataacaacaaatgtcctttgtgtgtattgcaggaatagaaatgctatatgcctaaataaattagttgacagtaaatgaacttctccagagccatgaagtctatttcagacaccagcagaggctgtgtgtggagaaatagttaaagacctacaatgtgcttaggcctcagcatggctttattcatttataatgcttattattttagcttatggtcttagtttccagtattcttccacgaaactgcattactccccagttcacaaacaaggacactaacacacactataattttccacttccttgttctgcttccattgtcactaggactacctagtgacaggttgttcctccagaagacccatgccacccccatctcactaaccaatcctagccctttttgagatttagaaatcctgtctcaaagatgacctcttccaagaagcccttcctacttttctctaactggtcgtctcccacatttcaacctccagatttgaactgttgatgtagacagttatggaatttaccttactctaccttgaaaggatttttttttcttcccaaactatttagcagtgatcgaactttctaaaattcaaggtaattttccaaagtttaacaaatattttgtttatttctcatttgctttttaaatgatttctatagcaagggaaactaatgtcagagtttgtctgagattgtgggagggggaaagtttctattcaattttgagtggctgagtgccttctgagaaagcatcatcaatttcaagcctcttatccagctaactgaacagtataatgtcttctggatggttttgtctcaattatcaatgtaattgccacarttcttttcttcagtaggttaatagagatttggcctatatatggttattattaaagtcaacgattaaaaatacaaat

SEQ ID NO: 326 - DNA, 1865 bp, Homo sapiens
gcaagagaggaaggaagagagagagggaggaaggtgccaggctcttcttaacagccagttgtcatgggaattaagagtaagaactcactcactattccgaggatggcaccaagacattcatgaggaacctgtccccgtggcccaaacacttcccatcaggtcctatctataacattgggaatcaaattttgatatgagatttggaagcgacaaatatccaaactctatcaaggactttccctgggctgctacaggcatggcctatgataactattaacaaatacatgtggtgctttcaaggaggagctcagttcttctcctttcaactacttaagctctacccaagcatccatcttcacattcagtgcttgagaacaagcttgacttgcagttgctgccaactgagacaactcctccagagattccatcttaaaaaggacatgtttttctcaatagcatcaacatcatcttcattcatgtcttggcacttctctaggaaagcatgtagcttaatactgtacagaaatagactggcctcccactggacataggagacatcttggtcactccctcaaattcctcttggctccaaccagtgctgtagaggatttgaccatcttcaggcagttgcagctagacagtaactcactttaggcctgtgccaaatatttctcgcttttttgccttgagtcttctctgatgttgcagcatggaaatcccagaaactggcctggaactcctgtatgtttaacctggaaattcagggagtgcttgggaccattcttgactactggggaacagaagccattggtaaatgcctccctctttgatcctctggatagatggtctgagccatatttgcaaggatcttcagaaggtcttggtgggctcaaacaccagttgcctacagtcaatcaatagtcttcatatcaactccttatactggctttccctccttcccatttccactatccttgccttgcagtcctgctccctaaggtcacattcagaaattaactacactcaagcaaacctttgtctcaggctctaatttcagggaaacccatgataaggtacattgatacaaggatccaaattggaccctttgagtctcgtgttaagatgccaacttttccatctctgtatcatctgttttctggaaagtaagaatctcctttcagtatcattgagttgtctaccataggacccttgtggaaaatcttcagaaagaaataacatatgaaatgtggttgagaggaaataaccttgacgggaataaactaaagggtgtgatgactgtattaggatcctgagggggaaacagatggcatactcaaatcaggataatttgaggatggcttatagacaaagggacctattccaaagatgtaggcagtgtgcaggggaamcataagagtacagcaggagcccaggttagcagctgacggtccctttaggttagagttgtcatatcaatacaggatgccccattaaatttgaatttcagataaacaatgaataatctcttagcataaatatgacttaattattgcatgggacatccttatttttaaaagttcattgtttatctagaattcaaatttccctggccatcttatatttgtatttgctaaatatgacatctttattttagactcaaagggaagggagaagacgagagaacttgtaaagagagagtcatatagagtaggctgctctgagacatgcggtaagcttctatctagggatataaggtaattccaattcaagtcaaccacacagggaaggaaccagagaataaatactgagatctccatctcttttctgcctctggtctcctgccagggctcatcactgactgaacc

SEQ ID NO: 327 - DNA, 1865 bp, Homo sapiens
gcaagagaggaaggaagagagagagggaggaaggtgccaggctcttcttaacagccagttgtcatgggaattaagagtaagaactcactcactattccgaggatggcaccaagacattcatgaggaacctgtccccgtggcccaaacacttcccatcaggtcctatctataacattgggaatcaaattttgatatgagatttggaagcgacaaatatccaaactctatcaaggactttccctgggctgctacaggcatggcctatgataactattaacaaatacatgtggtgctttcaaggaggagctcagttcttctcctttcaactacttaagctctacccaagcatccatcttcacattcagtgcttgagaacaagcttgacttgcagttgctgccaactgagacaactcctccagagattccatcttaaaaaggacatgtttttctcaatagcatcaacatcatcttcattcatgtcttggcacttctctaggaaagcatgtagcttaatactgtacagaaatagactggcctcccactggacataggagacatcttggtcactccctcaaattcctcttggctccaaccagtgctgtagaggatttgaccatcttcaggcagttgcagctagacagtaactcactttaggcctgtgccaaatatttctcgcttttttgccttgagtcttctctgatgttgcagcatggaaatcccagaaactggcctggaactcctgtatgtttaacctggaaattcagggagtgcttgggaccattcttgactactggggaacagaagccattggtaaatgcctccctctttgatcctctggatagatggtctgagccatatttgcaaggatcttcagaaggtcttggtgggctcaaacaccagttgcctacagtcaatcaatagtcttcatatcaactccttatactggctttccctccttcccatttccactatccttgccttgcagtcctgctccctaaggtcacattcagaaattaactacactcaagcaaacctttgtctcaggctctaatttcagggaaacccatgataaggtacattgatacaaggatccaaattggaccctttgagtctcgtgttaagatgccaacttttccatctctgtatcatctgttttctggaaagtaagaatctcctttcagtatcattgagttgtctaccataggacccttgtggaaaatcttcagaaagaaataacatatgaaatgtggttgagaggaaataaccttgacgggaataaactaaagggtgtgatgactgtattaggatcctgagggggaaacagatggcatactcaaatcaggataatttgaggatggcttatagacaaagggacctattccaaagatgtaggcagtgtgcaggggaaccataagagtacagcaggagcccaggttagcagctgacggtccctttaggttagagttgtcatatcaatacaggatgccccattaaatttgaatttcagataaacaatgaataatctcttagcataaatatgacttaattattgcaygggacatccttatttttaaaagttcattgtttatctagaattcaaatttccctggccatcttatatttgtatttgctaaatatgacatctttattttagactcaaagggaagggagaagacgagagaacttgtaaagagagagtcatatagagtaggctgctctgagacatgcggtaagcttctatctagggatataaggtaattccaattcaagtcaaccacacagggaaggaaccagagaataaatactgagatctccatctcttttctgcctctggtctcctgccagggctcatcactgactgaacc

SEQ ID NO: 328 - DNA, 596 bp, Homo sapiens
atgtattactttaaccaacaacttgacatatggttggtattaaaatctttgttcctggatacaggagagccaagagtcattaggtggatatattttaggagatgagagtgcatctgaaattactgtctgctactgagtgagcatccagatttaggagggcaaagagagaggggccaagtattatcttttatattcaaatgattcctgttgttttgcagagaaagtggaggttggcccaggttaaggttgctggaagtctatttctcagagcaactgggtgtagagcagcctgtgagagaccttataattatattctctgaggacttcccctaccactctttamggttgaagaaagtaaatccaacagggtggaaggcaaaatgaagaaagcatatagattttggtaaatttgcctttcattagtaaaaacgacaaggcagtgtctggttcttcaaatccagtaaagttttcttcctaatttacatcctgacatcattaaaggcaaccatataataccttaatatcagtacagtatattcatactcttttaaatatttcttaaccaaatttggaacaatgacctggaagattcagta

SEQ ID NO: 329 - DNA, 608 bp, Homo sapiens
attggactctgttggttgtgtctttaggacctaatagcaatcatcagttgtgtgcttggtccgcaggggattctgctaagactgtcaggccatacagggtgtgggcctagttctgggagaatggttttcaatttgactcacacctggggctggtaaatcttcagtgggtgcatcacagagtagggcaacaaggctccctgagagttgagagaagggagtgggagcaaataggaggtaacccccctattccttaattttaaaaatgaaaaatcagagagctaagagtttggagttctaaggtaaagtccaaactggggcacatactcccacttgggtaaaaagaaggaaccaacctgcaaatcagaccaaaaccgcagatgcgcagctgggaaactagacacgaactcatcatatccaacactgaaagatagctcagatttctcttgcatggcctycaaagcaggagatggttctcgagcctcctatgaactagagcgcaatctcttaagaatgattatacaggtcagctgtggtggttcacacctgtaatcccagaactttgggaagttgatgcgggaggatcttttgagctcaggaattcgaggctg

SEQ ID NO: 330 - DNA, 1647 bp, Homo sapiens
gatttgacagaaagattgagtaattaatttgtaaccatctactaacaagatttgaaagatacaggtacttaatagtactttcagacacaggatttctgctctgaatttgcactcacccatgatttctgtgactttagggagtatcaaatagaaaatgctcctacgtaccaagttttcttccctggaggcaaaataaaataaataaactgaccaatttcttatatattatttctgaaatatgctatgaaggtattagcagatatttatatatttttctttttcttgcacaatttatagcatactatactcacaattctgtaccttttgttttgtgattctgtttttttaatatatcttggagcttactaatatttttggctgcatagtagtccattgtgcaacagtgtcttatttaaataatcctctctatggacattcagattgctctcagtcttttggtattataaacagtgctacaatgaataaccttgtacacatgtaacttcatacatatgtaagtatgtctgtaggataaacccgtagatgtgtgtttggatcttatagcaataaatgacactcctcatcctcacccaaattctaagccaattaggaaataagacaaaagaggcagacaggtgattaaaatgtcacttcattactggtgacagctgatgttgaagcatgttgcttacatttgcagataagagagcttcccaattctggatctctttccatttaatcataggcaatgttcttcaaacataggtctccccatgcaggttttaggaagatgatgggctgaatgcggccttcccagtttattctttacaaatttaacaattagaggagtcacccctcctttcttagggagaagcaagtgaggaggagaagagaggccagcagcattaaaccaggagagctacttcagcctggaagtacacatcaagaaacattcccgccctaacaaaatactctcatgttcaaaacggtcttcaattggtaattgtaatatatttttctcagttgttcaccagaaatgtgtcaatttacactccttccatgaatatgcacccaggcatataagaaaagttagcattagataaatgtttttcaattatccttggtctattcatgtctcactaccccagaggtttttcttgaattttcttacattattttgaaatataacacagcagaattttattttatttttgagacagagtctcactctgttgcccaggctgtaagtggagtagtgcgatcttggctcactrcaacccccgcctcatggattcaagtgattctcctgcctcagcctcccaagtagctgggactacaggcgtgcaccaccacgcctggctaatttttgtatttttagtggagatggggttttgtcatgtaggacaggctggtctcgaactcctgacctcaagtgatctgcttgccttggcctcccgaagtgctgggattacaggtgtgagccaccgtgcccggcccagaattttaattatagtggcttcatagcattttaatgtctggcagagactgtcaattgtcacagtatccattgctcccatcttcctgtttgaaaccagactctctgagctttcacccaggcctatggctgtccatctttgtgtgagtcat

SEQ ID NO: 331 - DNA, 1647 bp, Homo sapiens
gatttgacagaaagattgagtaattaatttgtaaccatctactaacaagatttgaaagatacaggtacttaatagtactttcagacacaggatttctgctctgaatttgcactcacccatgatttctgtgactttagggagtatcaaatagaaaatgctcctacgtaccaagttttcttccctggaggcaaaataaaataaataaactgaccaatttcttatatattatttctgaaatatgctatgaaggtattagcagatatttatatatttttctttttcttgcacaatttatagcatactatactcacaattctgtaccttttgttttgtgattctgtttttttaatatatcttggagcttactaatatttttggctgcatagtagtccattgtgcaacagtgtcttatttaaataatcctctctatggacattcagattgctctcagtcttttggtattataaacagtgctacaatgaataaccttgtacacatgtaacttcatacatatgtaagtatgtctgtaggataaacccgtagatgtgtgtttggatcttatagcaataaatgacactcctcatcctcacccaaattctaagccaattaggaaataagacaaaagaggcagacaggtgattaaaatgtcacttcattactggtgacagctgatgttgaagcatgttgcttacatttgcagataagagagcttcccaattctggatctctttccatttaatcataggcaatgttcttcaaacataggtctccccatgcaggttttaggaagatgatgggctgaatgcggccttcccagtttattctttacaaatttaacaattagaggagtcacccctcctttcttagggagaagcaagtgaggaggagaagagaggccagcagcattaaaccaggagagctacttcagcctggaagtacacatcaagaaacattcccgccctaacaaaatactctcatgttcaaaacggtcttcaattggtaattgtaatatatttttctcagttgttcaccagaaatgtgtcaatttacactccttccatgaatatgcacccaggcatataagaaaagttagcattagataaatgtttttcaattatccttggtctattcatgtctcactaccccagaggtttttcttgaattttcttacattattttgaaatataacacagcagaattttattttatttttgagacagagtctcactctgttgcccaggctgtaagtggagtagtgcgatcttggctcactgcaacccccgcctcatggattcaagtgattctcctgcctcagcctcccaagtagctgggactacaggcrtgcaccaccacgcctggctaatttttgtatttttagtggagatggggttttgtcatgtaggacaggctggtctcgaactcctgacctcaagtgatctgcttgccttggcctcccgaagtgctgggattacaggtgtgagccaccgtgcccggcccagaattttaattatagtggcttcatagcattttaatgtctggcagagactgtcaattgtcacagtatccattgctcccatcttcctgtttgaaaccagactctctgagctttcacccaggcctatggctgtccatctttgtgtgagtcat

SEQ ID NO: 332 - DNA, 727 bp, Homo sapiens
tactgactaccagagatatacaaaatactgtgcaaaagattgttactgttcaaagagcttacaaactaaatttaaaagaatagcaagtctgaaaaatagaagatagtcaaatatttgtttatgctaagaactgtttttaattttcagctttgatgtaaattgctagcttagttgtctttagttcaagcatgttaggaaatcctctttattcttaaatatagatacatgtctgcatatatgattgaattttagagccagaaagcatgtagagcagttgtgattagtagaaaatacactgacaagaagatatttgcatttatttcccaaagctgccagtaactagattttgtgacttaagtcatttaacctctccttgattagagcttcctgagccatgcacactggcactgcaaatcacagacaggcctagatacagatcccctcaccccttgctacatccaaaggtggcctgggtggctggagcctctgggccagaaccacctttgtccattttcctcagtgtgcctacagcatcgctttccatgtgtgccataacttgggaatagttgggatgtgttgcttaactcctttrcaccattagttatctgtgagaccatctattccacactcttcattttttaaaaagagacaataattatttttaactcactgaagtttaaaactacctagcatttctgattaaaaaaaatttagaaggaaaatttta

SEQ ID NO: 333 - DNA, 727 bp, Homo sapiens
tactgactaccagagatatacaaaatactgtgcaaaagattgttactgttcaaagagcttacaaactaaatttaaaagaatagcaagtctgaaaaatagaagatagtcaaatatttgtttatgctaagaactgtttttaattttcagctttgatgtaaattgctagcttagttgtctttagttcaagcatgttaggaaatcctctttattcttaaatatagatacatgtctgcatatatgattgaattttagagccagaaagcatgtagagcagttgtgattagtagaaaatacactgacaagaagatatttgcatttatttcccaaagctgccagtaactagattttgtgacttaagtcatttaacctctccttgattagagcttcctgagccatgcacactggcactgcaaatcacagacaggcctagatacagatcccctcaccccttgctacatccaaaggtggcctgggtggctggagcctctgggccagaaccacctttgtccattttcctcagtgtgcctacagcatcgctttccatgtgtgccataacttgggaatagttgggatgtgttgcttaactcctttacaccattagttatctgtgagaccatctattccacactcttcattttttaaaaagagacaataattatttttaactyactgaagtttaaaactacctagcatttctgattaaaaaaaatttagaaggaaaatttta

SEQ ID NO: 334 - DNA, 727 bp, Homo sapiens
tactgactaccagagatatacaaaatactgtgcaaaagattgttactgttcaaagagcttacaaactaaatttaaaagaatagcaagtctgaaaaatagaagatagtcaaatatttgtttatgctaagaactgtttttaattttcagctttgatgtaaattgctagcttagttgtctttagttcaagcatgttaggaaatcctctttattcttaaatatagatacatgtctgcatatatgattgaattttagagccagaaagcatgtagagcagttgtgattagtagaaaatacactgacaagaagatatttgcatttatttcccaaagctgccagtaactagattttgtgacttaagtcatttaacctctccttgattagagcttcctgagccatgcacactggcactgcaaatcacagacaggcctagatacagatcccctcaccccttgctacatccaaaggtggcctgggtggctggagcctctgggccagaaccacctttgtccattttcctcagtgtgcctacagcatcgctttccatgtgtgccataacttgggaatagttgggatgtgttgcttaactcctttacaccattagttatctgtgagaccatctattccacactcttcattttttaaaaagagacaataattatttttaactcactgaagtttaaaaytacctagcatttctgattaaaaaaaatttagaaggaaaatttta

SEQ ID NO: 335 - DNA, 552 bp, Homo sapiens
aaaatggaagggtcaagatgtgaataacctattccaggaagccaattggattaaagaaagaaagaaagaaaaaaaatatgcgaataacctagagaaaatggcaaagaaggggcttggagggtgtatgtgtgtgtgtggcaagggagaagggaggaacattctgatgtgtccctttgcagagattctcctacctgcccaggactgacccattcaccacatccaggcttttagtagagagataagaaatcatgggctcattttccacccccagcctgcaggtgtttcaggaggctgccaacctttttctggacctgttggggaaactgctggcccaaccagatgactctgagcagactttgcrgagggacagccttatggtaatctgctcccacttccagatttctgtgtctcctatcattctccgtgtttctcccatcccctttcttatgactatgtagggtcagatcaagttaatatgacaaacatttgttaaattcccaccatgccatatgccatgtgagtaagaaaaagtgcctgccttcaagggactag

SEQ ID NO: 336 - DNA, 622 bp, Homo sapiens
tctcattagcatataaaaagacacttatcacttacaagttctgaaggttttaggagccaggaaccaggggcacaccccaattatgtatttctttctttttttttttttttttgagaccggagtctcactgtgttgcccaggctggagtgcaatggtacgatctcggctcgctgcaacctctgcctcccgcgttcatgcaattctcccgcctcagcctcccgaatagccgggattacaggcacccgccatcgtgcccggataatttttgtatttttgtagagacagggtttcaccatgctgaccaggctggagtatttcttattatatcacaatatcacatcagcaaagccacgagttggacctattcatatgaaaaaggcgttcccctcttaccaccatctccttgttgctattttttactcagtgcgtgcactctgccacagctgtacccaaccccttcaatagtgtctttcctcctcctgaggccaatccaaaatcctccagttctttcatcctcccccacatcaaatcaatstctctcacaatgtcaactattatctgcagaagagtcattttgcagatttgtcgtctcaagtttcatgtctgcatcaccaactgcctg

SEQ ID NO: 337 - DNA, 679 bp, Homo sapiens
gtgrtgggttgaaggctcaggaacatctgaattcatctctttggaggtttgggggcaaaacaacagaagtcatcactctggctctgcccagatgccagccagccccttgatggggatgcggagagggcaaaggagagtgagcaaaagggtgctgttggggcagaagccctaggaattgggactccaggagtcctgcctgtcacagattccagcccacctccccccgaccccccaaccctataatgctctgcaggcactactgggccaactgattctggaatgggactgagtgcaggagggacaagggcttggggagtccagagatggcaaaagattctgcaagatctggctagagtgagtgctgcaggaggggtggggccagctgtgtatgtttgcaggaaaggtggggggtgggggcagaaaggccgcctgcgggggagaaggcttcttggcaaacgccccagtttcctgagctgatccctgctccctgccactgctcccaattctgttgtttcaataacatcatttttatccaccccacagagagactgtgtcttaggaaggggaggcgaggggcagggctagggcatgggggaggggtggtaatggagagaggctgggtctggaggcagcagggactagatttggggcgctccctcctcaggcagaggcagggcgg

SEQ ID NO: 338 - DNA, 679 bp, Homo sapiens
gtggtggrttgaaggctcaggaacatctgaattcatctctttggaggtttgggggcaaaacaacagaagtcatcactctggctctgcccagatgccagccagccccttgatggggatgcggagagggcaaaggagagtgagcaaaagggtgctgttggggcagaagccctaggaattgggactccaggagtcctgcctgtcacagattccagcccacctccccccgaccccccaaccctataatgctctgcaggcactactgggccaactgattctggaatgggactgagtgcaggagggacaagggcttggggagtccagagatggcaaaagattctgcaagatctggctagagtgagtgctgcaggaggggtggggccagctgtgtatgtttgcaggaaaggtggggggtgggggcagaaaggccgcctgcgggggagaaggcttcttggcaaacgccccagtttcctgagctgatccctgctccctgccactgctcccaattctgttgtttcaataacatcatttttatccaccccacagagagactgtgtcttaggaaggggaggcgaggggcagggctagggcatgggggaggggtggtaatggagagaggctgggtctggaggcagcagggactagatttggggcgctccctcctcaggcagaggcagggcgg

SEQ ID NO: 339 - DNA, 536 bp, Homo sapiens
ccaagccaaaggagagtggcctggtccctgagagactgaccctgaagctgggaagaagggagtgggggaggaggtgacacgggcaggtgtgggagaacacagagccttcatggccacagctgcagggcgtgccgggtgaggagtgaggggtcccagtgataacgtgtctgactgccttgctcagatgtgcctctgagggaatgagcctctcctccctgccttggccccttcactctcctttgtctattcattttgtttttctttctttatttctatttttatttatttatttatttagagcagagtctcgttctgtcgcccaggctggagtgcagtggtgcgatcttggctcatggcaacctctgtctccccggttcaagtgattctcctgcttcagcttcccaagtagctgggactacaggcacccaccaccatgcctggctagtttttgaatttttagtagaggtttcaccatgtttagtagaggtttcaccaggtttcaacaaggtttcaccgtgttggycaggctggtctca

SEQ ID NO: 340 - DNA, 262 bp, Homo sapiens
ttttatgtttgcgactttagtttttgaacagggagtaatggggggccagaagcacatctcatctgtggggcttaaaaacagtatcatgggccaggcgcagtggctcacacctgtaaccccagcactttggaagctgaggcaggcggmtctcctgaggtcaggagttcgagactagccaagccaacatggcaaaaccctgtctctactaaaaatataaaaattagcaaggtatggtggtgcacacctgtaatcccagctgctc

SEQ ID NO: 341 - DNA, 1190 bp, Homo sapiens
gcattccaccctcccatgttttttgaggctttattgtgaaaaagaggaaaaggcaaggtggctaacatttttcctttcccgtgccccaactaggcgtcccagatgttgtggaactgtccctggatctatagctcttcaccgtctctactttcttccttctaagagatcctgaaacctctgtcatggaaaagtaccacgtgttggagatgattggagaaggctcttttgggagggtgtacaagggtcgaagaaaatacagtgctcaggtgttgcacaaagagggataccttttgggtgggatttggtacccccaactccagtggaaaatggatctagaaggaatgtatttataccagtttgtattcctaaggtactgactccctcatacttcttatggagtataagctttgaagttggattatttgggtgcaaattccatctccaccgctttctagccctagaattatggacaaattacttaacttccctatgtctcaatttccttatctctagaatggggataagaacagcaactgattgatggagtttgaggattaaatatgttttcacattaaatcacttagtacagtgcctggctgttagtaaacaacaaatattattagtctctagcacaccatgtaataagagktaaaccacttgaactctattatttcctcttcattttttttttcctttcctttctcctaaatctcatcttgagtgctggtcaaatcagaacacttcttccagaaggggaaatgttttgcagatgctgtttcctcctgggatgaggaatggggaaagcctggataaggccagggtaccatggagaaaatggaagcgggagactaacagaaataataagagttactcaaacactctaaaatctgacttctggagctctgagattaaggctgaaattctagatcttttcagtagtgtgattaggcgttaacttttcaccttaccactgacaggtcgtggccctgaagttcatcccaaaattggggcgctcagagaaggagctgaggaatttgcaacgagagattgaaataatgcggggtctgcggcatcccaacattgtgcatatgcttgacagctttgaaactgataaagaggtgtgctttgacagttttgggccctgtctccccaagcacaagggttccaggaatttcccaacctcagaatgc

SEQ ID NO: 342 - DNA, 591 bp, Homo sapiens
tgagagcaaaaagcaatataaatttctcrgtttaagaagtcaatatgaagtccacagccagcacataggccagcctatcgggaaccaaaatagtttgtttgaaatgtagtatgcaaaaggatcactatcaacttgtgctttgctaacccggattttttgtgactcacgttttcagatttacaattggatctgtttttctgtcttctaatttttaactaggaaatcttctaaaatttgcccatcaaaattctgtaagcacctgacctaattagctagcttataacccaaaccatcattcttatcattcttaccatgacttttgcaccagaacacccatggacttactgatcagcctgtgagcaggccacccttgagaaaggtatcactcttgatccaatcaggggcagctcctgagcaaagtttcttttcttgcaggggccatgggtagaatttttctagctagaaacactggacacagagaaggatgattgccatgcctgtgtacactaaagctctattagaggtatcagctaggggaagacagggcatctgatgctgctgtgtcccctgacataacatacatatgcagca

SEQ ID NO: 343 - DNA, 2092 bp, Homo sapiens
tggaaggggaaaaagtctgaaaatatggcaaggtccttatgtatggaactttttagatgaaggatacagtgaatatgtagctcagttttcatctggtaattggatacctatatttttaacattcagtacatccttctcagaggaacatttgaggaagatagcatttctgtttctttgggaaatgattaagcatgcacttgtcctaattttctcagtctgcatgtggtaatgagcaaactcatccctgctgtactctgtaaacaatgcaggtattgatgcttataaaaattactgcactgcctttgagatcatgggatttcaccatccatattaacctttaagatgagggataacatttgtctttgcataagatggggaggagggaaaagaaaagaaccccaaacacatgagaggcactgacaagctgccaatgatataaataatcactgtgttgtagtttggaatgacattgcagaaaagcctttgtaataggggactgaaaagaaaaaaccaacacagtttaaattgaaaaacataagtatgttctaagaaataaaaacacagatcggttcagcagattccagtggaagtagtgtagatagggaaatatacctttaaacattgtcctgaaggacagccaacttaggaatgcagatcccaataacctattgcatgattttgaagaggagtctgggagaaatacagacgtatttaaacctggggactaatatttccattgtttaaatgtgctgtggatagccacaactatgtaattgctacttatatctccatttttagtcatgagaattaactctaacctcagcaggatgtggttggtatacagataattgtatttctttgctttcagagaggctttgaaaaattcctccatttggcctcagtcacttgtgcattacaaagagagggatgcagctttataaaaagtatcaaattggagaaatgatgccctcaaactcagatgttcctcatttacatgtagcatttttgagaaggtcctaagaataaatcatgcaggttatcattgacattttctggaaaggacacattttgatgacataaattggaagtacaagttaatcattaagtgaaattattatgcaagtgaaatggctaaatctccatgcatgaaatttgtttcagaaacttaaagccggaatacccccaaaacagtggccgtagttgtgatgttttacctartgcttgatcatgtgcctctctatgaaatactgcattcattttagaggtgctgatgccaagtagcaaaaacatgagccaagaaatgttattggaacatgctgtgatgagattagagcaggcaggattgaggggtgttgcagaaccaaattaaaatagcactagtggaggcaggtctgtgctggaaaatcaaagcagaaaattttctctcacaatgcaagaaattgctgagggaagagcaggagagagggctattccaaagtctcaatcatgagaacattttcccagtaccataaacataaatgccaactcaagctaattcaatgtgacaaaggttcctttgtcagccaaactagtcagactccagaaccttctcccaagcccatctgtgcacttccttataaagttcagttttagcaaaaactcctcagtgtcgatatctgattaccctcaatatctgactattaaattttcaggaattatgaaagtcagttgttaaacacaatcattatttcaaattaaattctgtaaatttccaactaaattaaatttaaaacagattcttaaaacccatcacttccttattaactcactacattttacttttattcaaattggccgtggtgggagtatctatattacagtaactagcaaaccctaaaatcagggtttagcttattgttttgttgattgtctagatttttttaagtgatggagaaaacagtaataatgcacatttaacttatgtgtgtcactctctagttttcacattgttaatggcacaaaaagttgaagaaatattctttcaatattaaaaaactttatctgactcaacaagaaagtttcttatgccattgataaacaaattttatatgca

SEQ ID NO: 344 - DNA, 2092 bp, Homo sapiens
tggaaggggaaaaagtctgaaaatatggcaaggtccttatgtatggaactttttagatgaaggatacagtgaatatgtagctcagttttcatctggtaattggatacctatatttttaacattcagtacatccttctcagaggaacatttgaggaagatagcatttctgtttctttgggaaatgattaagcatgcacttgtcctaattttctcagtctgcatgtggtaatgagcaaactcatccctgctgtactctgtaaacaatgcaggtattgatgcttataaaaattactgcactgcctttgagatcatgggatttcaccatccatattaacctttaagatgagggataacatttgtctttgcataagatggggaggagggaaaagaaaagaaccccaaacacatgagaggcactgacaagctgccaatgatataaataatcactgtgttgtagtttggaatgacattgcagaaaagcctttgtaataggggactgaaaagaaaaaaccaacacagtttaaattgaaaaacataagtatgttctaagaaataaaaacacagatcggttcagcagattccagtggaagtagtgtagatagggaaatatacctttaaacattgtcctgaaggacagccaacttaggaatgcagatcccaataacctattgcatgattttgaagaggagtctgggagaaatacagacgtatttaaacctggggactaatatttccattgtttaaatgtgctgtggatagccacaactatgtaattgctacttatatctccatttttagtcatgagaattaactctaacctcagcaggatgtggttggtatacagataattgtatttctttgctttcagagaggctttgaaaaattcctccatttggcctcagtcacttgtgcattacaaagagagggatgcagctttataaaaagtatcaaattggagaaatgatgccctcaaactcagatgttcctcatttacatgtagcatttttgagaaggtcctaagaataaatcatgcaggttatcattgacattttctggaaaggacacattttgatgacataaattggaagtacaagttaatcattaagtgaaattattatgcaagtgaaatggctaaatctccatgcatgaaatttgtttcagaaacttaaagccggaatacccccaaaacagtggccgtagttgtgatgttttacctaatgcttgatcatgtgcctctctatgaaatactgcattcattttagaggtgctgatgccaagtagcaaaaacatgagccaagaaatgttattggaacatgctgtgatgagattagagcaggcaggattgaggggtgttgcagaaycaaattaaaatagcactagtggaggcaggtctgtgctggaaaatcaaagcagaaaattttctctcacaatgcaagaaattgctgagggaagagcaggagagagggctattccaaagtctcaatcatgagaacattttcccagtaccataaacataaatgccaactcaagctaattcaatgtgacaaaggttcctttgtcagccaaactagtcagactccagaaccttctcccaagcccatctgtgcacttccttataaagttcagttttagcaaaaactcctcagtgtcgatatctgattaccctcaatatctgactattaaattttcaggaattatgaaagtcagttgttaaacacaatcattatttcaaattaaattctgtaaatttccaactaaattaaatttaaaacagattcttaaaacccatcacttccttattaactcactacattttacttttattcaaattggccgtggtgggagtatctatattacagtaactagcaaaccctaaaatcagggtttagcttattgttttgttgattgtctagatttttttaagtgatggagaaaacagtaataatgcacatttaacttatgtgtgtcactctctagttttcacattgttaatggcacaaaaagttgaagaaatattctttcaatattaaaaaactttatctgactcaacaagaaagtttcttatgccattgataaacaaattttatatgca

SEQ ID NO: 345 - DNA, 480 bp, Homo sapiens
ttatttaataattcatacatagttatatctttgagtaaccttataattagaatttgtataaatcgttttgctactaagatctttgtacaaaatactatttttctgttgtataatcactgagaatggagtgaaatggagtggacaaaacacagactttggagttaaatagaactggttttgattttcagttctgctccttatagcttgtaattttaagcaatgtatctaacttctcttgggccttggtttcctaaaatataaaataaaaatcactatggttactttgtagtactattctgagaataagaattaataactgcaaagtgtaatgtgcttagaacattccctgacacacaatgaatgctcattaaataacagttattatcaatattgttatgagtattaaacctgatattatatggttctccttrgggataatgggaaatatcccacggttggggtggggataggaagatgtca

SEQ ID NO: 346 - DNA, 1255 bp, Homo sapiens
gaacttgtatttgagaggttatgcattatgcaggcatatcaagctgatattttgcatgccaaatgtgtccttaaaaatatactgtctctgtgtcattcagcataaaacactgctgrctgtccttaacaacaatataattttaaaagattgatttcagacgctccaaaaattcacgagccaagaaaaactatcatagttgttcactttctccctaatgttaactgccgaaaagagcttctttttaaatatttttttcttccttgagactgaagagacataaaaataagtctggttttgttattagtacatggataaaatatgtattgaagaaaacacatctttaattttttaagagtctgtttttcattagcttatcttgatagtttaagttaatcattattttcagccatatatgatttagatattatgtcattaattcatgtacagtccatctgagtaatgattgtggttttctactttacaaattcatctacttcaccaagaaaccaagagagtcaaattccatgcaacatctggtttccattgaatgtaattgccatttgcagagttataatcatgtgttattgtaagggccacagtgtcaatcactctcctaatggggaaaattcaatgcctaaatacctgggagaacaagaagctgacttaaacaggtgcattcagacactaggttttaagtagaattctaacctacccatttaaataaatcattttaaggagaaacaatattctttccatcccctgtagcaagggaaagcataaaatccaggacttcaatctcccatgctcagttccagtactatatcatgtttaatctttttaaaaatgttcaaatatgcctatatcatagtgattccttatgttccatactctcatgggaactcccaaaggccaggcaggatttttgaaaactttctgggggaagggaccatcttctgattcttcctgccttacatcttctgattcttcctgtctttttttcttacgatgaaaataagccacacttgatttaagaaaatattaaaccattcaaactactaaagtcattatagctttttctagcccatggggttttttggggggataatcacataagaggttgaaaaaatcatgaagcaccgtggtagagagtgcaatatgtaagcactttatggcaaaagtgaaccacatttccttgacctcattctccattgtgtttacaagccaagccttgtttgaactggtaaatgtttggcca

SEQ ID NO: 347 - DNA, 1255 bp, Homo sapiens
gaacttgtatttgagaggttatgcattatgcaggcatatcaagctgatattttgcatgccaaatgtgtccttaaaaatatactgtctctgtgtcattcagcataaaacactgctggctgtccttaacaacaatataattttaaaagattgatttcagacgctccaaaaattcacgagccaagaaaaactatcatagttgttcactttctccctaatgttaactgccgaaaagagcttctttttaaatatttttttcttccttgagactgaagagacataaaaataagtctggttttgttattagtacatggataaaatatgtattgaagaaaacacatctttaattttttaagagtctgtttttcattagcttatcttgatagtttaagttaatcattattttcagccatatatgatttagatattatgtcattaattcatgtacagtccatctgagtaatgattgtggttttctactttacaaattcatctacttcaccaagaaaccaagagagtcaaattccatgcaacatctggtttccattgaatgtaattgccatttgcagagttataatcatgtgttattgtaagggccacagtgtcaatcactctcctaatggggaaaattcaatgcctaaatacctgggagaacaagaagctgacttaaacaggtgcattcagacactaggttttaagtagaattctaacctacccatttaaataaatcattttaaggagaaacaatattctttccatcccctgtagcaagggaaagcataaaatccaggacttcaatctcccatgctcagttccagtactatatcatgtttaatctttttaaaaatgttcaaatatgcctatatcatagtgattccttatgttccatactctcatgggaactcccaaaggccaggcaggatttttgaaaactttctgggggaagggaccatcttctgattcttyctgccttacatcttctgattcttcctgtctttttttcttacgatgaaaataagccacacttgatttaagaaaatattaaaccattcaaactactaaagtcattatagctttttctagcccatggggttttttggggggataatcacataagaggttgaaaaaatcatgaagcaccgtggtagagagtgcaatatgtaagcactttatggcaaaagtgaaccacatttccttgacctcattctccattgtgtttacaagccaagccttgtttgaactggtaaatgtttggcca

SEQ ID NO: 348 - DNA, 1102 bp, Homo sapiens
tcatttctggacaaattgggtgtcaatgtacaggtagttccatagtaagaagagtcscctggctttctccttgtggcaaccagacacaacaagacacccgtcagatcagatccctgccagtgttctggtttgttataactactatgatggcctttgaagaagccttgagtaattactccaatagttcttaaggtacagcaggctgctggaagtgtccagcattcctccaatctctatcgctgccctgacatgacacacacacacacgtgattactctccacctggtgtcataagagtgtcaactcttatgcccctttggactgagactctctctttcctgtggtcctaggagtgacatgtggaggcaataaagtttccttcagttttagccatttctggtgctttgttcactgcatagtgcacatttaattggaggaaaagaacctggccttagtctcatcttcacagactaaagcaaatgaaaccaaggaggccttgaaaaggaagggttggatatcatgtatggtatttggatagcttggtctggtagtatatgtcagatgggtcacaggaccaagactggaagcaagaagagagcttgcacagtgcctactgggcacgcagcagctatttagtaaatatttattgaaagaaggaattaattaattgtgtatgtccagttgtgaacctatggagaacctatctagaatggtggctttagaaaaaatgaagggaagagagattgctatagattgtctttctttaagagggaaaaacatagatgaacctgatgacagagcaaaggtgaagatggcactctggtttttgtcctgggaaacagaagtggggaagaatgcaatggggaagtaaagtgcttggaaaggtgactctgtgcctccagagtttgtctttatattcgccactatgacatgctatacatgtcaaatccaaaggtttgaaagttaaaaatgagagaaataaaaggagggttgttgtcctattcctgaaggaaacatgcagtgcttagataagcacctctgatcttaatccctttcatgacagcgtgatcccagcaagaattaaaatgtagcagagacattat

SEQ ID NO: 349 - DNA, 1102 bp, Homo sapiens
tcatttctggacaaattgggtgtcaatgtacaggtagttccatagtaagaagagtcccctggctttctccttgtggcaaccagacacaacaagacacccgtcagatcagatccctgccagtgttctggtttgttataactactatgatggcctttgaagaagccttgagtaattactccaatagttcttaaggtacagcaggctgctggaagtgtccagcattcctccaatctctatcgctgccctgacatgacacacacacacacgtgattactctccacctggtgtcataagagtgtcaactcttatgcccctttggactgagactctctctttcctgtggtcctaggagtgacatgtggaggcaataaagtttccttcagttttagccayttctggtgctttgttcactgcatagtgcacatttaattggaggaaaagaacctggccttagtctcatcttcacagactaaagcaaatgaaaccaaggaggccttgaaaaggaagggttggatatcatgtatggtatttggatagcttggtctggtagtatatgtcagatgggtcacaggaccaagactggaagcaagaagagagcttgcacagtgcctactgggcacgcagcagctatttagtaaatatttattgaaagaaggaattaattaattgtgtatgtccagttgtgaacctatggagaacctatctagaatggtggctttagaaaaaatgaagggaagagagattgctatagattgtctttctttaagagggaaaaacatagatgaacctgatgacagagcaaaggtgaagatggcactctggtttttgtcctgggaaacagaagtggggaagaatgcaatggggaagtaaagtgcttggaaaggtgactctgtgcctccagagtttgtctttatattcgccactatgacatgctatacatgtcaaatccaaaggtttgaaagttaaaaatgagagaaataaaaggagggttgttgtcctattcctgaaggaaacatgcagtgcttagataagcacctctgatcttaatccctttcatgacagcgtgatcccagcaagaattaaaatgtagcagagacattat

SEQ ID NO: 350 - DNA, 1102 bp, Homo sapiens
tcatttctggacaaattgggtgtcaatgtacaggtagttccatagtaagaagagtcccctggctttctccttgtggcaaccagacacaacaagacacccgtcagatcagatccctgccagtgttctggtttgttataactactatgatggcctttgaagaagccttgagtaattactccaatagttcttaaggtacagcaggctgctggaagtgtccagcattcctccaatctctatcgctgccctgacatgacacacacacacacgtgattactctccacctggtgtcataagagtgtcaactcttatgcccctttggactgagactctctctttcctgtggtcctaggagtgacatgtggaggcaataaagtttccttcagttttagccatttctggtgctttgttcactgcatagtgcacatttaattggaggaaaagaacctggccttagtctcatcttcacagactaaagcaaatgaaaccaaggaggccttgaaaaggaagggttggatatcatgtatggtatttggatagcttggtctggtagtatatgtcagatgggtcacaggaccaagactggaagcaagaagagagcttgcacagtgcctactgggcacgcagcagctatttagtaaatatttattgaaagaaggaattaattaattgtgtatgtccagttgtgaacctatggagaacctatctagaatggtggctttagaaaaaaygaagggaagagagattgctatagattgtctttctttaagagggaaaaacatagatgaacctgatgacagagcaaaggtgaagatggcactctggtttttgtcctgggaaacagaagtggggaagaatgcaatggggaagtaaagtgcttggaaaggtgactctgtgcctccagagtttgtctttatattcgccactatgacatgctatacatgtcaaatccaaaggtttgaaagttaaaaatgagagaaataaaaggagggttgttgtcctattcctgaaggaaacatgcagtgcttagataagcacctctgatcttaatccctttcatgacagcgtgatcccagcaagaattaaaatgtagcagagacattat

SEQ ID NO: 351 - DNA, 1102 bp, Homo sapiens
tcatttctggacaaattgggtgtcaatgtacaggtagttccatagtaagaagagtcccctggctttctccttgtggcaaccagacacaacaagacacccgtcagatcagatccctgccagtgttctggtttgttataactactatgatggcctttgaagaagccttgagtaattactccaatagttcttaaggtacagcaggctgctggaagtgtccagcattcctccaatctctatcgctgccctgacatgacacacacacacacgtgattactctccacctggtgtcataagagtgtcaactcttatgcccctttggactgagactctctctttcctgtggtcctaggagtgacatgtggaggcaataaagtttccttcagttttagccatttctggtgctttgttcactgcatagtgcacatttaattggaggaaaagaacctggccttagtctcatcttcacagactaaagcaaatgaaaccaaggaggccttgaaaaggaagggttggatatcatgtatggtatttggatagcttggtctggtagtatatgtcagatgggtcacaggaccaagactggaagcaagaagagagcttgcacagtgcctactgggcacgcagcagctatttagtaaatatttattgaaagaaggaattaattaattgtgtatgtccagttgtgaacctatggagaacctatctagaatggtggctttagaaaaaatgaagggaagagagattgctatagattgtctttctttaagagggaaaaacatagatgaacctgatgacagagcaaaggtgaagatggcactctggtttttgtcctgggaaacagaagtggggaagaatgcaatggggaagtaaagtgcttggaaaggtgactctgtgcctccagagtttgtctttatattcgccactatgacatgctatacatgtcaaatccaaaggtttgaaagttaaaaatgagagaaataaaaggagggttgttgtcctattcctgaaggaaacatgcagtgcttagataagcacctctgatcttaatccctttcatgacagcgtgatcccagcaagaattaaaatgtagcagaracattat

SEQ ID NO: 352 - DNA, 1824 bp, Homo sapiens
ctaaggcatggcagacaatgaagacaagtggacagatggagaagttggtaaggactgacaaaccttgtcaccagattagatatttatgtaattgtgggctgcatcaacaatgactcctagattttggcttgcacagttgaataggtgagggtgccatttactcagataaggaattctggaagagaaacaggtaaagaaaaatcaccagttcctcttgcacatgttgatacagcggtgcctttgtagcatctatgtggagacacagaatgggcagttggataaatgggacaaacgctcagaggaaaggtcagggctgcacatgtggagttgatagtcattgctacacaactggtaactgaagccatggacatgaatgaaattgaatgaagggaagggggatattcctgctgatggtctttctctgccttaactaccaagctatgggttcccagcaacaccttgatagctgccttctcaggaccccgagaatgtttttcactcagtcttgtcaggtttcttgccaaattacacaggagtgtgtgtgtgtatgtgagtgtgtgtgtgtatatgcatgtgtgtgtgtgtttgtgggtgtgtctttatgtgtgtatataggtaaagtctgtcctatagatctagaattgaaaagtcaccctagactgagttttgatttcattttctaacactcctgtctgcgaagattttcaaaatggagaaagtagagtagcttttcctggggtataacttgtttcctttacctttgactttttacaaagctcacaccttcttccttcaaggttccctactgcttgggactttaaaaacagtctgatcttgtttcwcatttcctcatagtttcaccacccacaaacaactggatagctgtactttttctttttccagcaaggtttactaggagttgaacacctactctttattttcccacctgccttggagtatgattctgattcccagaatgagcctattggttacaacacaacgtggttctggcactccatccccacaggtgcccaaacattctggtcctttgagagggcactatcacgggtctgcatctttcaatacgattgtatggctgggatttcagtgacttttggcttcttgatttgggttgtgtagatggagaaacattttaaagacgcttttctcatcatagtcctcaggcagccttcctgacttctctaaatgtctcagagaaaaggtagttttgcagtggccagaatgtggactttggaaaggtgagggtttctgtttgtggctggtaattagcttatcctctgctatgattctagggtctgcttttactgtctctcatcttgcagttctagattggaaaaaaatatattttactttgaatttggttaccaaccaagatagggtgagtgcctagtatctgctgggctcataccctggggataccaagatgagaaggaaagacgtggtccatgccctcgagatgcacatttgtgtagtagagaagacaggaagaagacaggaagaaagtgactgactctaaggtgatgtcatgacaaagatgataaggatgcaactaacctgaagagaataaaacattccactggtcatttaaaagttatatgcttttcatttttacttttgttttttttaattcaactttcatgttggatacaggaggttcatgtgcaagcatattacatgggtatatttcactcaggtagtgaacgtagtacccaataggtagatttttcaacccacaaatgcctccttctctccccactctggtataatggtcttcagtgtttattgtttccatctttatgtcca

SEQ ID NO: 353 - DNA, 1824 bp, Homo sapiens
ctaaggcatggcagacaatgaagacaagtggacagatggagaagttggtaaggactgacaaaccttgtcaccagattagatatttatgtaattgtgggctgcatcaacaatgactcctagattttggcttgcacagttgaataggtgagggtgccatttactcagataaggaattctggaagagaaacaggtaaagaaaaatcaccagttcctcttgcacatgttgatacagcggtgcctttgtagcatctatgtggagacacagaatgggcagttggataaatgggacaaacgctcagaggaaaggtcagggctgcacatgtggagttgatagtcattgctacacaactggtaactgaagccatggacatgaatgaaattgaatgaagggaagggggatattcctgctgatggtctttctctgccttaactaccaagctatgggttcccagcaacaccttgatagctgccttctcaggaccccgagaatgtttttcactcagtcttgtcaggtttcttgccaaattacacaggagtgtgtgtgtgtatgtgagtgtgtgtgtgtatatgcatgtgtgtgtgtgtttgtgggtgtgtctttatgtgtgtatataggtaaagtctgtcctatagatctagaattgaaaagtcaccctagactgagttttgatttcattttctaacactcctgtctgcgaagattttcaaaatggagaaagtagagtagcttttcctggggtataacttgtttcctttacctttgactttttacaaagctcacaccttcttccttcaaggttccctactgcttgggactttaaaaacagtctgatcttgtttcacatttcctyatagtttcaccacccacaaacaactggatagctgtactttttctttttccagcaaggtttactaggagttgaacacctactctttattttcccacctgccttggagtatgattctgattcccagaatgagcctattggttacaacacaacgtggttctggcactccatccccacaggtgcccaaacattctggtcctttgagagggcactatcacgggtctgcatctttcaatacgattgtatggctgggatttcagtgacttttggcttcttgatttgggttgtgtagatggagaaacattttaaagacgcttttctcatcatagtcctcaggcagccttcctgacttctctaaatgtctcagagaaaaggtagttttgcagtggccagaatgtggactttggaaaggtgagggtttctgtttgtggctggtaattagcttatcctctgctatgattctagggtctgcttttactgtctctcatcttgcagttctagattggaaaaaaatatattttactttgaatttggttaccaaccaagatagggtgagtgcctagtatctgctgggctcataccctggggataccaagatgagaaggaaagacgtggtccatgccctcgagatgcacatttgtgtagtagagaagacaggaagaagacaggaagaaagtgactgactctaaggtgatgtcatgacaaagatgataaggatgcaactaacctgaagagaataaaacattccactggtcatttaaaagttatatgcttttcatttttacttttgttttttttaattcaactttcatgttggatacaggaggttcatgtgcaagcatattacatgggtatatttcactcaggtagtgaacgtagtacccaataggtagatttttcaacccacaaatgcctccttctctccccactctggtataatggtcttcagtgtttattgtttccatctttatgtcca

SEQ ID NO: 354 - DNA, 1824 bp, Homo sapiens
ctaaggcatggcagacaatgaagacaagtggacagatggagaagttggtaaggactgacaaaccttgtcaccagattagatatttatgtaattgtgggctgcatcaacaatgactcctagattttggcttgcacagttgaataggtgagggtgccatttactcagataaggaattctggaagagaaacaggtaaagaaaaatcaccagttcctcttgcacatgttgatacagcggtgcctttgtagcatctatgtggagacacagaatgggcagttggataaatgggacaaacgctcagaggaaaggtcagggctgcacatgtggagttgatagtcattgctacacaactggtaactgaagccatggacatgaatgaaattgaatgaagggaagggggatattcctgctgatggtctttctctgccttaactaccaagctatgggttcccagcaacaccttgatagctgccttctcaggaccccgagaatgtttttcactcagtcttgtcaggtttcttgccaaattacacaggagtgtgtgtgtgtatgtgagtgtgtgtgtgtatatgcatgtgtgtgtgtgtttgtgggtgtgtctttatgtgtgtatataggtaaagtctgtcctatagatctagaattgaaaagtcaccctagactgagttttgatttcattttctaacactcctgtctgcgaagattttcaaaatggagaaagtagagtagcttttcctggggtataacttgtttcctttacctttgactttttacaaagctcacaccttcttccttcaaggttccctactgcttgggactttaaaaacagtctgatcttgtttcacatttcctcatagtttcaccacccacaaacaactggatagctgtactttttctttttccagcaaggtttactaggagttgaacacctactctttattttcccacctgccttggagtatgattctgattcccagaatgagcctattggttacaamacaacgtggttctggcactccatccccacaggtgcccaaacattctggtcctttgagagggcactatcacgggtctgcatctttcaatacgattgtatggctgggatttcagtgacttttggcttcttgatttgggttgtgtagatggagaaacattttaaagacgcttttctcatcatagtcctcaggcagccttcctgacttctctaaatgtctcagagaaaaggtagttttgcagtggccagaatgtggactttggaaaggtgagggtttctgtttgtggctggtaattagcttatcctctgctatgattctagggtctgcttttactgtctctcatcttgcagttctagattggaaaaaaatatattttactttgaatttggttaccaaccaagatagggtgagtgcctagtatctgctgggctcataccctggggataccaagatgagaaggaaagacgtggtccatgccctcgagatgcacatttgtgtagtagagaagacaggaagaagacaggaagaaagtgactgactctaaggtgatgtcatgacaaagatgataaggatgcaactaacctgaagagaataaaacattccactggtcatttaaaagttatatgcttttcatttttacttttgttttttttaattcaactttcatgttggatacaggaggttcatgtgcaagcatattacatgggtatatttcactcaggtagtgaacgtagtacccaataggtagatttttcaacccacaaatgcctccttctctccccactctggtataatggtcttcagtgtttattgtttccatctttatgtcca

SEQ ID NO: 355 - DNA, 1824 bp, Homo sapiens
ctaaggcatggcagacaatgaagacaagtggacagatggagaagttggtaaggactgacaaaccttgtcaccagattagatatttatgtaattgtgggctgcatcaacaatgactcctagattttggcttgcacagttgaataggtgagggtgccatttactcagataaggaattctggaagagaaacaggtaaagaaaaatcaccagttcctcttgcacatgttgatacagcggtgcctttgtagcatctatgtggagacacagaatgggcagttggataaatgggacaaacgctcagaggaaaggtcagggctgcacatgtggagttgatagtcattgctacacaactggtaactgaagccatggacatgaatgaaattgaatgaagggaagggggatattcctgctgatggtctttctctgccttaactaccaagctatgggttcccagcaacaccttgatagctgccttctcaggaccccgagaatgtttttcactcagtcttgtcaggtttcttgccaaattacacaggagtgtgtgtgtgtatgtgagtgtgtgtgtgtatatgcatgtgtgtgtgtgtttgtgggtgtgtctttatgtgtgtatataggtaaagtctgtcctatagatctagaattgaaaagtcaccctagactgagttttgatttcattttctaacactcctgtctgcgaagattttcaaaatggagaaagtagagtagcttttcctggggtataacttgtttcctttacctttgactttttacaaagctcacaccttcttccttcaaggttccctactgcttgggactttaaaaacagtctgatcttgtttcacatttcctcatagtttcaccacccacaaacaactggatagctgtactttttctttttccagcaaggtttactaggagttgaacacctactctttattttcccacctgccttggagtatgattctgattcccagaatgagcctattggttacaacacaacgtggttctggcactccatccccacaggtgcccaaacattctggtcctttgagagggcactatcacgggtctgcatctttcaatacgattgtatggctgggatttcagtgacttttggcttcttgatttgggttgtgtagatggagaaacattttaaagacgcttttctcatcatagtcctcaggcagccttcctgacttctctaaatgtctcagagaaaaggtagttttgcagtggccagaatgtggactttggaaaggtgagggtttctgtttgtggctggtaattagcttatcctctgctatgattctagggtctgcttttactgtctctcatcttgcagttctagattggaaaaaaatatattttactttgaatttggttaccaaccaagatagggtgagtgcctagtatctgctgggctcataccctggggataccaagatgagaaggaaagacgtggtccatgccctcgagatgcrcatttgtgtagtagagaagacaggaagaagacaggaagaaagtgactgactctaaggtgatgtcatgacaaagatgataaggatgcaactaacctgaagagaataaaacattccactggtcatttaaaagttatatgcttttcatttttacttttgttttttttaattcaactttcatgttggatacaggaggttcatgtgcaagcatattacatgggtatatttcactcaggtagtgaacgtagtacccaataggtagatttttcaacccacaaatgcctccttctctccccactctggtataatggtcttcagtgtttattgtttccatctttatgtcca

SEQ ID NO: 356 - DNA, 597 bp, Homo sapiens
gaaacagacatatttaaactaaatgcctcacaatcttccacccaaagacaaatactgtcatctacagactgtccccgacttaggagggtttaagatttttcacgatatgattgtgtgaaagtgacccacattcagtagaaaccatacttcagtacagaaatcaatacattacatgggatacatagcactttcttataaaataggatttgtgttacatgattttgtccaactgtaggctaatataagtcttctgaacatatttaaggtgggtgagcctaagctatgatgtgcagtaggttaaggtgtatcaaatgcatttttgacttgccatattttcaaattatgatgggwttatcaggatgtaactccatggtaattggaggggaacctatgtttttatattcattataagaattgatacgactctcttttttgttctttccccaaatctgacctcttcaccatgagacaatgctcctaaactgttgattagacacagggctattcactctctgggggaaggggtcaggaagacctaccccaaagagcttgggaaattgacatgtcagaatatacctccattatttttaaatggga

SEQ ID NO: 357 - DNA, 500 bp, Homo sapiens
ttgagagtaaaagcacaaaacacagagcctggctggagaaagcacaggtagctgaagtcagccaaggctgagttaagtgttcttcttagaaaagcggacaggccattccctgaaggcatcagtgcgggcaggagggaacctgcactttgcagttccaacacctcaggacacaattcctgctaacctgacccacaaaagaccaaaggacacacccaagatcctggaccaacgtcccacaaggatgccttcctggtttcttctctaagaatacgtcttaaaatgttccccaggaagctaactcwatattcctaatgtatggaccatggaaagaaaacaagtgtctcagtaggtttgttcaacaaatgtgcaaatgcagagacgaacaaagatgcccaaagtcaaggagcagctcagtcgcctccgacatgctcgggggccacaaccacctccaacctctgccctgttcacactttcctccacccagattcccctcttgccct

SEQ ID NO: 358 - DNA, 608 bp, Homo sapiens
tgcatttataaacttgacagatattaccagttgtcctctataaagtgaaactggtttatatcaccacagctaacatataaatgtctgttttctaccatattattaaattactgaactttatccatctgatggaaaaggagaaatctgattgtactttattttttatatttttaatatttttatgagacttcttggcatgttggccaggatggtctcaaactccagcctcaagcaatcctctcacctcagtctcccaaagttctgggactacaggcattagctaccatgcctggccctgattaccaccccaccccccccccccgccccctttttttttttttgagacaaggtctcactctgtcacccatgttagagtgtggtggygtgatcactgctcactgcagccttggcctcctgggctgaggtgattctcctgcctcagcctcccaagtagctgggaccacagacacatgccaccatgcctggctgatttttttaattatttgtagggaagtggtctcgctatgttgcacaggctaggctcaaactcctgagctcaagttatcctcccacctcggcctcccaaagtgctgtaattacaggactga

SEQ ID NO: 359 - DNA, 682 bp, Homo sapiens
atataaaaaataaactagatgttgtagtttattaatcgtttgttaatcattaggttaagacagatggtctcttgtttctaatattaaacttagaataaaactgttttttaaattattttaaacatcaaaatatttattcttttggcagggacttagtattaaacgacacttcaaattctttaaaagaaggtcttatagataccatcccttccttcatgccatttcctgaggctccactcaagtagttgtctttcactggtatttattttctcattgctacagatttgatttttgcttattggtcccagcttcctctgtgcatactttggctggattgttcacttgaaactggaagtaccacagtgcagccttcagggtttctttcagctagttaatgagtagtgtgtgtgtcacacacaagaccaatgtttgctccttgaaaattaacttcagttttataaccctgttaggaaaacttacaactgactccatttcttgaatcagacaataatagtgcccacaaggcattgcagggcccacactgggagcgagatcacagtgatagtttcttccttctttttatgagtgacacccaactgtaagcaatggttataggtaawgaagaaataattaaatctcagaacccagcattctcatttaccaacagccaacaagacagatg

SEQ ID NO: 360 - DNA, 1184 bp, Homo sapiens
ataatttcaacaagtcaataaatatggcttttaataacttgccagggttctgcaatggatatttgagtcaaagcaaaggatttaccttttttttttttttttagctagtaaaagtatttaaaaatatggaaatatgcttaagggatatggtatgactgaaaaccatgttaaaataaaaaaaattatttacatttcataaaaaggttatcctaatttttacttatctgcaattggttagagtagaaaatgtaatgtattaataatagtagctgtattagttcattctcacactgctataaatacctaggccgggcatggtggcttacacctgcaatcccagcacgttgggaggccaaggcgggcagactgcctgagctcaggagttcgagaacatcctggctaacatggtgaaaccccgtctctactaaagatacaaaaaattagccgggcgtggtggcatgcacctgtagttccagttacttgggaggctgaggcagaaggatcacttgaacctgggaggcggaggttgtagtgagtggagatcatgtgactgcactccagcctgggcaacagagcgagactctgtctcaaaaaagaaatacctaaaacttggtaatttataaagaaaagagatttaattggccatggttttggaggctgtacaggaaagaggcctcaggaaacttaaaatcacggctgaaggtgaaggggaagaagacatgtcttaacatagccacaacaggagggagaaagagaagcgggaggtgctaaacacttttaaacaaccaggtatcttgagaactcactcactatcatgagaacagcaagaagtaaatctgcccccttgatccaatcacctcccaccaggcccctcctccaaaactgaggattacaattcagcatgagatttaagtggggacacaaatccaaaccatatcagtagctaatagttgctcactgtgayagaatggtccttttggacaatgtttttaaaaccctagctatcaattttttttttttctaatccaaagacatagaagtaggcaaagcatagtgacatgttttacttcctttactttaaagatggagagttaggttactattttttaaaaaaatttaaagtttgaaaggcaaaaaaataaaaataaaataataaaataccaggaatttagagaaagtagaaa

SEQ ID NO: 361 - DNA, 1234 bp, Homo sapiens
tgcatattgatgtccacctcaggaactattgcaatatatctgtatttgagatcttgctatgtgctaggtactgttttccagttgtttccatagaatagatcaatcctttcaaaattctgtaaagtgttatccccatttaacagataagtaaatgaggtacatagaggatttaaaaaaaaaaaaaaaggctgggtgcgttggctacgcctgtaatcctagcactttgggaggccaaggcaggctgatcacctgaggttagggttttgagacaagcctggccaacatggcaaaagcctgtctctaccaaaaatataaaaaattagtcaggtgtggtggtgcatgtctgtaagcccagctcctcaggaggctgaggcaggagaatcgcttgaacctgggaggcggaggttgcaatgagcccagatcgtgccactgcagtccagcctgggcaacagagcgagacaccatctcaaaaaacaaaaacaaaaacaaaaaacatgcccaagattacatggttgtaagtaaagacaacaggattgaaagccatgcctttatgtagtctacttgccatttagactgcttgtctctatattaaatgtctccaaactattacttaatactcttagaaagtctgtgtatgctgtttaacattctgttttttccttctgttgttactctttgtggttgtaaaagcacctaccccctagccatttcctcctcttcagaacacatgttgatactgatatcctgtcattaagaaaaatagacaaagaagtgagttaaaactgtgaaaaatcaaagtcgtaggttctgagaaagaatttggggagggataatctaagggtgaaatatatgagcttaggtatttagcttttacgacatttattttggtggttcaataaactattttgcttatttctggcttttttcttatgttttggctatggaatctgctattatgagtggcttctgaatttgagttcttactcttactcctgcttacattgtgtaatataatgtaatttattttttaaaaagcttgccccaaagcaataaatatcctttcaatgtttgatatttccttttttaaaatatctgcttaatattttcataatgtacaaaaagagaaaatcaaaaatcttttggcattgagtrtctggtcctacttcaaggctattcaaactataaattacagcaaccatccatatcagcattctgtaaaaatacctttacagaa

SEQ ID NO: 362 - DNA, 2430 bp, Homo sapiens
ttgtcaggtgatttcatccttgtgcaaacatcgtagagtgtacttacacaacctaaatggtacagtctactactcacctaggctacrtggtggagcctattgctcctaggctacaaacctgtacagcatgttactgcactgaacactgtaggcccttgtaacacaatggtaagaatgtgtacatctaaacatatctaaacatagaaaaggtgattatgtcacactgccacgttaccatggctatgacatcactaggtgacaggacattttcagctccattgttttcttatggaaccaccatcctatatgtggtctgttgttgattgaaacataatgtggtatgtgactgtaaatcaattaatgttgaatacatgccatgcagagccctgtgtcgggttaactggccacatactgtagaaaagggaagaactgcccagggaatctcctcactttatgtaattcaataaaacttagtgctggaatttcttagttgccatgtatgttagatcactatttcacaagaaattcttcatattagaggtatgggcatctttactaagaactacaaacaatatctgaaagaaagtattaaggatagtaacataaggaagaaaaacactctgcaattttctgcctattggaagttctctctgagacagagaagacgatgactggtgtgacaccctttgccaaataaaatcatctggcttaagcctctgagcaagaataataatagctctaaacacactgcagatatcactatatagtagtaattgaattattaaattttaaatcagctcttccctattgtttgaagtcaaaataataaagaactaaaacataaaaatttctacaaattaattgataaagtgaaaatagcttatgacaatacactattttacatctagatattgtatgcattttgaatataattcatcctgtatgttaaattattttaatctgaaaatatatcgcattggttgaaaagtaagttctggcatttgaagtttttttttttttttttctcaagcgtctggcttttatttttgaactcatgtatcttccccttcctaaaacgtgacattttgaggtgactgaagaggatcagagaataccttatatgatatggtttgtgcagaattttctatccttacctcctatcatataattttctccctgaactgtaatcaaatcattaaatccccaaatcttttctttcatgttctctctacctggaatttggccaccccctcaccttgattaattcctaatttatccttgacattttttgaaatgtcattcttcagggaagtttttcccaactccttcagacagaaaagatcaggttttcttctaatatgacactgtaacaccctgaaaaatttcttcacacagtcttcacaatttagaacaatatctgcttgttctaaaatgtttctgattaaattgtgctaaatttctgtttcatgtttgcacttttcatccactttctcattaattttgtcaatgtttacatgttaaagactatgttgtctggttcatacaacctcatcgtacctgatattttcttgggaaatcattcctttgctcactaggtaatgtcccttgtcttgcattttgtttggggattttctttgtactatttaatagtatatataattaagacttctattataaaatttctatgttgttttagttcttttgatttaaaacataggggtggggaaatcaacccccatgcagtcaaaaatccatgtataactgttgagtctcccaaaacttaactattaacagcttactgttgaagccttaccgttaacagtccattacacatgttttgcattctttttctatatttctacagtaaagtaagctagagaaaaatgttattaagaaaatcataaggaagagaaaatatatttgttattcattaagtggaagtggatcatcataaaaatctttctttattctcgttgtcttcaagttgagtaagccgaggaggaggaggaagggggtcttgctgtctcaggggtgtcagaggtggcagaaaatttgtgttgaggaaacacacagttcaacccatgttgttcaagaatcaactgtacctaagttttgttttttgttttcttcaatggaacagttgggttgcatgtatttatattcaattgtgatcaccacatgtttgaacttcctgtccccttattttatgttttatttaccatacttctgtttttctctttgatatcttctgttggactggtaatgctccttgttcttctcattttaaaattctttttaattgagtaaaattttgtatcacttaagaataaggggaggctgaggcaggaggatcacttgaagccagaggttcaagactagccagagaaacagatcaagaccctgtctttacatttttttttttaattccaa

SEQ ID NO: 363 - DNA, 2430 bp, Homo sapiens
ttgtcaggtgatttcatccttgtgcaaacatcgtagagtgtacttacacaacctaaatggtacagtctactactcacctaggctacatggtggagcctattgctcctaggctacaaacctgtacagcatgttactgcactgaacactgtaggcccttgtaacacaatggtaagaatgtgtacatctaaacatatctaaacatagaaaaggtgattatgtcacactgccacgttaccatggctatgacatcactaggtgacaggacattttcagctccattgttttcttatggaaccaccatcctatatgtggtctgttgttgattgaaacataatgtggtatgtgactgtaaatcaattaatgttgaatacatgccatgcagagccctgtgtcgggttaactggccacatactgtagaaaagggaagaactgcccagggaatctcctcactttatgtaattcaataaaacttagtgctggaatttcttagttgccatgtatgttagatcactatttcacaagaaattcttcatattagaggtatgggcatctttactaagaactacaaacaatatctgaragaaagtattaaggatagtaacataaggaagaaaaacactctgcaattttctgcctattggaagttctctctgagacagagaagacgatgactggtgtgacaccctttgccaaataaaatcatctggcttaagcctctgagcaagaataataatagctctaaacacactgcagatatcactatatagtagtaattgaattattaaattttaaatcagctcttccctattgtttgaagtcaaaataataaagaactaaaacataaaaatttctacaaattaattgataaagtgaaaatagcttatgacaatacactattttacatctagatattgtatgcattttgaatataattcatcctgtatgttaaattattttaatctgaaaatatatcgcattggttgaaaagtaagttctggcatttgaagtttttttttttttttttctcaagcgtctggcttttatttttgaactcatgtatcttccccttcctaaaacgtgacattttgaggtgactgaagaggatcagagaataccttatatgatatggtttgtgcagaattttctatccttacctcctatcatataattttctccctgaactgtaatcaaatcattaaatccccaaatcttttctttcatgttctctctacctggaatttggccaccccctcaccttgattaattcctaatttatccttgacattttttgaaatgtcattcttcagggaagtttttcccaactccttcagacagaaaagatcaggttttcttctaatatgacactgtaacaccctgaaaaatttcttcacacagtcttcacaatttagaacaatatctgcttgttctaaaatgtttctgattaaattgtgctaaatttctgtttcatgtttgcacttttcatccactttctcattaattttgtcaatgtttacatgttaaagactatgttgtctggttcatacaacctcatcgtacctgatattttcttgggaaatcattcctttgctcactaggtaatgtcccttgtcttgcattttgtttggggattttctttgtactatttaatagtatatataattaagacttctattataaaatttctatgttgttttagttcttttgatttaaaacataggggtggggaaatcaacccccatgcagtcaaaaatccatgtataactgttgagtctcccaaaacttaactattaacagcttactgttgaagccttaccgttaacagtccattacacatgttttgcattctttttctatatttctacagtaaagtaagctagagaaaaatgttattaagaaaatcataaggaagagaaaatatatttgttattcattaagtggaagtggatcatcataaaaatctttctttattctcgttgtcttcaagttgagtaagccgaggaggaggaggaagggggtcttgctgtctcaggggtgtcagaggtggcagaaaatttgtgttgaggaaacacacagttcaacccatgttgttcaagaatcaactgtacctaagttttgttttttgttttcttcaatggaacagttgggttgcatgtatttatattcaattgtgatcaccacatgtttgaacttcctgtccccttattttatgttttatttaccatacttctgtttttctctttgatatcttctgttggactggtaatgctccttgttcttctcattttaaaattctttttaattgagtaaaattttgtatcacttaagaataaggggaggctgaggcaggaggatcacttgaagccagaggttcaagactagccagagaaacagatcaagaccctgtctttacatttttttttttaattccaa

SEQ ID NO: 364 - DNA, 1282 bp, Homo sapiens
gcatttcaaaaaggacactgattcaatagggtctaattattaatataatagaagggggaaattggtcgaaataaaagaaatggtgtttggtggcaccactgaacaataaataagatatttggtggtgagaaaaaaaatacagcaagtttagttgtgagaagttaaggtgatgaccttatctttcatattagtgaaatgcctgtggtgacatccagatactaatactcagctgtcacctagatattcggatcttgtattccaaggagaggttaggggaaagatgtccctccagcagtcatctcaaagaatgtacgttagaaacataatcagtcttgtaatctagttagatttttaggatgttcagcttgatgacatatttaaagtaaaaagatggaaaacttatttttatggccaactctcttatcttcttcccacagcacatttttgggctggaacagagaacgcaggcaccatctcccaggttttacacatactgagaacagaataatggacaatgattttcttttttttctttattctttttttttgagatggagtctcactctgttgcccaggctggagtgcagtggtgcgatctcagctcactgcaagctctgcctcccgggttcatgccattctcctgcctcagccttccgagtagctgggactacaggcgcccaccaccacgcctggctaatttttttttgtattttttagtagagatgggatttcaccatgttagccaggmtggtctcgatcccctgacctcgtgatccgcccgcctcggcctcccaaaggcctgggattacaggtgtgagccaccgcgcacagactggacaatgattttcttggagtcatcaacttcttgcccatcgccttaatattttgagaacagggatgcagaaaccattaaaaaaaaaacagtactcaaaatccttttatatactttgtgcaaaccctctactctggatgagaaatgattggaaagctcttaaaccttagaatttcaatgtcctttaaaatactgacttacaatcacaaaacccaaaaacctctgataattgaaaggtctttgtttttgttgttgttgttgtcggggacttgcaaatacttgtgaaaatctcatttgataaagaaaaggatactgtgaattaatgtaaattaatttatgattttaagtcaatttagcatttagcttcaaaaggactactatttttaattgcagggtggtatgctgcagaattataattttttttccagggtatacatatagttgcatgca

SEQ ID NO: 365 - DNA, 721 bp, Homo sapiens
aaaaaaaaaaaatagctgggcatgatggcacatgcctgtaatcccagctacttgggaggctgaggcaggagaatcacttgaacccgggaggtggaggttgtggtgagccgagattgtgccattgtactccagcctgggcaacaagagcgaaactccatctcaaaaaaaaaaaaagtgtcttttcatgtcctttgcccacttttattaaggctgtttgctttttgcttgtaaatttgtttaaggataccctatttaatcagtggtgatgggataactggctagccatgtgcagaagattgcaattagaccccttcctttcaccatatacaaaaattacctcatgatggattcaagacttaaatgtaaaatctaatactataaaaccccttgaaaataacctagagmatataattctggacatagtgcctgacaaatatttcataatgaagaccctaaaggtgtattttaagtgtttttaaaattaattaatcagaaaaaggggaaatgatgtatttgacggtgacaagtgaggtgagaagactgcatctagtgtatctggaaaaaaaaaaacaaccaagttctcagctgtgcctgaatatagtttcaaatatttagctctttgtctaactcaaatatggatgacatgaggctccaatacctctattgatggaaaattaagctccacactcattgtctctgaaacacaatcttggaaaatggt

SEQ ID NO: 366 - DNA, 965 bp, Homo sapiens
taaaacctatgtaccagtttctgttctagctactttatttttatgaacatatttaacacagcaacttttattaatacttttactgtataaggtttaaaatattacccagtctatttaggtgattagaattagatttcattgagataaagcacactgaaatagttccaagttttaaagtgaagtatacaatagccaagattaaaagcagtgtttttggcctggtgctgagactcacgcctgtaatcccagtactttgggaggccgaggcgagtgaatcatgaggccaggagatagagaccatcctgattaacatggtgaaaccccgtctctactaaaaatacaaaaaattagccaggcgtggtggcgggcgcctgtagtcaaagccactsgggagtctgaggcaggagaatggcgtgaacccggcaggcggagcttgcagtgagccaagattgcgccaccgccctccagcctgggcaacagagggagactccgtctcaaaaacaaaaaacaaacaaacaaaaaaacgctatgtttttaaattttactacccttgagatagaagttgtataatgcaaaatgtatgtgtataattcactgttttctttataaataaatacatctgtataaccattaccataaccaaaaactaaaacattactatttcccaaaaagttacattcagtttcttttagtccatcttcacataccactatcccaggcaaccaaatatctgctttatctaacaaggatcagatctgtatttggtagagattcatgtaaatgagagaatacaatatattctcttgggtgtctgtgtgtttatattcatccttgttattgcatgtgtcagtggcccatttcttattattttggagtagtagtccattggcagtttcttaaaaggctcaaatacgactatcatatcaatcagccactctatagtatttacttgtgagaaatgaaaa

SEQ ID NO: 367 - DNA, 965 bp, Homo sapiens
taaaacctatgtaccagtttctgttctagctactttatttttatgaacatatttaacacagcaacttttattaatacttttactgtataaggtttaaaatattacccagtctatttaggtgattagaattagatttcattgagataaagcacactgaaatagttccaagttttaaagtgaagtatacaatagccaagattaaaagcagtgtttttggcctggtgctgagactcacgcctgtaatcccagtactttgggaggccgaggcgagtgaatcatgaggccaggagatagagaccatcctgattaacatggtgaaaccccgtctctactaaaaatacaaaaaattagccaggcgtggtggcgggcgcctgtagtcaaagccactggggagtctgagrcaggagaatggcgtgaacccggcaggcggagcttgcagtgagccaagattgcgccaccgccctccagcctgggcaacagagggagactccgtctcaaaaacaaaaaacaaacaaacaaaaaaacgctatgtttttaaattttactacccttgagatagaagttgtataatgcaaaatgtatgtgtataattcactgttttctttataaataaatacatctgtataaccattaccataaccaaaaactaaaacattactatttcccaaaaagttacattcagtttcttttagtccatcttcacataccactatcccaggcaaccaaatatctgctttatctaacaaggatcagatctgtatttggtagagattcatgtaaatgagagaatacaatatattctcttgggtgtctgtgtgtttatattcatccttgttattgcatgtgtcagtggcccatttcttattattttggagtagtagtccattggcagtttcttaaaaggctcaaatacgactatcatatcaatcagccactctatagtatttacttgtgagaaatgaaaa

SEQ ID NO: 368 - DNA, 483 bp, Homo sapiens
gggacagggagaagataaaggcagacaatgaggaagaggcagagatgagggacagagatgggggaagcagcctccgcatgggggatataggtgcaggacggagccgaggatagaaaccctcgggcatccgttgtgctggtttttagatgcggttcctggggtttgtgaaaacagccgtcctcccaggcccctgctccacttccctaatactagcccctggagcagccgagcctggagaaacgaggacccgkcatggaaagaccccaggctcaaggaggcagagcacagccagggtgggggaccccagcccaccggggaaacccgcccggcccattgctgcgcacaggatctcactggtggtctcacatccatccttttgggaatgggatcaggcctggggggtcggcactgatgaccagcactcagggggaccgcctcagctgactgaggtggagacaggaaggaggagcgtggtggggccct

SEQ ID NO: 369 - DNA, 1147 bp, Homo sapiens
agaaaagacacgctcactcataggcttccagattcctttaacgctgtttctctgctaaggagagaggagaggaaatagcacctttgtgtgctgtgggccccactgcagagggggctggtgggggggctcmggacccacgagggtcaggagggaagaaggaattccccatgcagagacctccagcagcgcaccagacaggaccctgattctggatggcaacccactctgtgcttttggcagaagctgttcaagccctgcgttggtctaggaatcaagatatatgggtcttaatccatgctctgtggtgaattcagcttctgcggccaagcagccaccaagcctctctgggacttgctttcctcatcagccctcgccctggggcacacctgtccatgccaaccactgcactgggcatgggggatgcagagatgagtccagcatgaaccctttcctgaaggtctgggagttcagactttgcaggcagcaagtgagagggagaactccctggaggaagctgcacgagctgagtgtttacagataaggagatattcaggtttggaaaagcagtatcaaacaaaagcattctaggctgggtgtggtggctcatgcctataatcctaggaccttgggagatgaaggtgggtggatcccttgagccaggagttcaaggccagtctcggcaacatggcgagaccccatctacaaaaaacaaaaaaatgagccaagcctggtggtgtgtgcctgtggtcccagctacttgggaggctaaagtgggagtatccattaagcctgtgagattgtggctgcagtgaaccatgatcgtgctactgcactccagcctgggtgacacagcaagactctgtctcagaaacaaaaacaaacatacaacaagcagagacgcttcagaacgcaggaaaagtacaaacaaaggtttggagatatttaagcaactcttgtttgcatggaaactgcaggttatataaaggtagagaaggatggaaaatgggactaatttggggctcaggtttttgaaaaaaggaatattagaatggtctgtggatatcaatgcattatatggaacaaatgatagggtggatataataatgctttaacatttgtaaaatactatgcaaatgcgatgttgatt

SEQ ID NO: 370 - DNA, 1147 bp, Homo sapiens
agaaaagacacgctcactcataggcttccagattcctttaacgctgtttctctgctaaggagagaggagaggaaatagcacctttgtgtgctgtgggccccactgcagagggggctggtgggggggctcaggacccacgagggtcaggagggaagaaggaattccccatgcagagaccyccagcagcgcaccagacaggaccctgattctggatggcaacccactctgtgcttttggcagaagctgttcaagccctgcgttggtctaggaatcaagatatatgggtcttaatccatgctctgtggtgaattcagcttctgcggccaagcagccaccaagcctctctgggacttgctttcctcatcagccctcgccctggggcacacctgtccatgccaaccactgcactgggcatgggggatgcagagatgagtccagcatgaaccctttcctgaaggtctgggagttcagactttgcaggcagcaagtgagagggagaactccctggaggaagctgcacgagctgagtgtttacagataaggagatattcaggtttggaaaagcagtatcaaacaaaagcattctaggctgggtgtggtggctcatgcctataatcctaggaccttgggagatgaaggtgggtggatcccttgagccaggagttcaaggccagtctcggcaacatggcgagaccccatctacaaaaaacaaaaaaatgagccaagcctggtggtgtgtgcctgtggtcccagctacttgggaggctaaagtgggagtatccattaagcctgtgagattgtggctgcagtgaaccatgatcgtgctactgcactccagcctgggtgacacagcaagactctgtctcagaaacaaaaacaaacatacaacaagcagagacgcttcagaacgcaggaaaagtacaaacaaaggtttggagatatttaagcaactcttgtttgcatggaaactgcaggttatataaaggtagagaaggatggaaaatgggactaatttggggctcaggtttttgaaaaaaggaatattagaatggtctgtggatatcaatgcattatatggaacaaatgatagggtggatataataatgctttaacatttgtaaaatactatgcaaatgcgatgttgatt

SEQ ID NO: 371 - DNA, 1252 bp, Homo sapiens
ttctttggtcgtccccacccagaccagagttcatggggatcagttgcacctgggaggccagtaggtaaaagaaaggcaggaacaggggcagattccttgagaaaaccccaacaacaggggtgaaatctccctgggcgtgggctgaggctgactgtgaacctgggcctgccactggctcccaaaagtcacatgacctatctgcacctggctgtcctcaactgtggcatgcagagtaaatcccaycctgctggccacaaagtcgacagaaaggatcaggagccatttgatgtcagaaaggcttttgcaaaggggaaggccccgtacaaatgcgaggagttgttcaaacagggaaaaaaaaattaaaaagtagagtttcagtgagatcctcctccctttggtccccccgccccaccccgggaacatgactacttcaatcaaacacatttctgggtaaaacagtgcatgtttcagattctgtaatgatgaatttgcaacctcatttaaccactcttgaaaaagaccatgcccaacacagactcacctggtttctttgtgggaggaatccaaagacacattgtgcattgttctagttccaggctccagctacccttttgctccactcccctccccaggcactctgttcctaccatcctccaagttcaccagcagtcaaggtagagacctcttgttaaacagaacacgctctatttcaaggtatgcagactgcttcatttcacatggtatgagtcatgattcacagctccagaaaagaatcaaaagaattcattaaaacagtagaaaatgtcacatccagcatctctaatgttgatttttcctctctcatctggggaccagggacggaggggcaagagaagtgcctgcacataggcccatcagccatccttcctaggcccaggaattgggaaggcagggtataaggcaagttgggacagttgataaagagggaagatgttagagggaaatactccctactctgtctcacccaggacttgtcgaagttctcaatagattttgactgaaagggaagtccagctaactctctagtccaagaagcatttaagcaaagagaggctgagagcaagagaatgcatgctggtcagtaatggctgttgctgaagagacctagcttatggccagggccggatctccagtttgagtgatttatgcaaaataagaaagcaggccgggtgcagtgctcatgcctgtaatctcagcacttcgggaggccaag

SEQ ID NO: 372 - DNA, 626 bp, Homo sapiens
ctttttatgcataaggaaacaggtctagggtggttatgtgagtcagaatccattaccaaagttagaacttgaacttggtccttctgactccagggccctgttcaagcctcyatgccactctttccctcaaagatgtagtgagatgcacactgtgtcccattttaacatcctgggaccttgaatgactttgagcaaggtgctcctctttagcaagccttctggtgagcagagatgttctagcagctcaggcaaatgtgggattgaattctgggtctgccatctactagctgtgtgacatggggcaagtaacttctctgatcttcactttcctcaaacataaaatacgaataatgtatattacagggtttctctataaggaataattatattgtcaaagtgtatactatgtgttccttatagttgcaatagtaatagtgaatattactgttatgattttgaagatacaggagatacagttcagtcttatttgaaggagattcctggggactgatgggtgccccatgtctagatgggaatggtttgcctggctggcaaggtggcacagaagtggcatggtgccatatgtggcacccagctcaggaccccagaggttgcctctgtgggcc

SEQ ID NO: 373 - DNA, 626 bp, Homo sapiens
ctttttatgcataaggaaacaggtctagggtggttatgtgagtcagaatccattaccaaagttagaacttgaacttggtccttctgactccagggccctgttcaagcctctatgccactctttccctcaaagatgtagtgagatgcacactgtgtcccattttaacatcctgggaccttgaatgactttgagcaaggtgctcctctttagcaagccttctggtgagcagagatgttctagcagctcaggcaaatgtgggattgaattctgggtctgccatctactagctgtgtgacatggggcaagtaacttctctgatcttcactttcctcaaacataaaataygaataatgtatattacagggtttctctataaggaataattatattgtcaaagtgtatactatgtgttccttatagttgcaatagtaatagtgaatattactgttatgattttgaagatacaggagatacagttcagtcttatttgaaggagattcctggggactgatgggtgccccatgtctagatgggaatggtttgcctggctggcaaggtggcacagaagtggcatggtgccatatgtggcacccagctcaggaccccagaggttgcctctgtgggcc

SEQ ID NO: 374 - DNA, 626 bp, Homo sapiens
ctttttatgcataaggaaacaggtctagggtggttatgtgagtcagaatccattaccaaagttagaacttgaacttggtccttctgactccagggccctgttcaagcctctatgccactctttccctcaaagatgtagtgagatgcacactgtgtcccattttaacatcctgggaccttgaatgactttgagcaaggtgctcctctttagcaagccttctggtgagcagagatgttctagcagctcaggcaaatgtgggattgaattctgggtctgccatctactagctgtgtgacatggggcaagtaacttctctgatcttcactttcctcaaacataaaatacgaataatgtatattacagggtttctctataaggaataattatattgtcaaagtgtatactatgtgttccttatagttgcaatagtaatagtgaatattactgttatgattttgaagatacaggagatacagttcagtcttatttgaaggagattcctggggactgatgggtgccccatgtctagatgggaatggtttgcctggctggcaaggtggcacagaagtggcrtggtgccatatgtggcacccagctcaggaccccagaggttgcctctgtgggcc

SEQ ID NO: 375 - DNA, 1187 bp, Homo sapiens
tgcatcttatacaattatataagatatgcgttcctgaaaatcttctataattcaaaacatataacaccattttagagaaaaaatgatggctatcccrtgttaggaaaccatagatacaatttcaccaccttttaaattacatgattgtcggtcattttttttaaatttaggtttcctactattacacattttgtacataaagccaaactattgaaatatttgtatcatataatttccaaattgcataatttaagttcataaacagtggctctggtgtattttagggcctttcagcaacaataattatcatgccacagagcctgtttaagagcacagaaagtagaagtacacctgaaaagccttttaagggactagtataaccccgatatcaaagtgtaacaaagacaactcgaaagtcatacttattaatagagacgtaaaaatcctaagtagtagcaaacctaactcaataatacataatagaagctctccttaaaacttcttagccaggattaacaaatgctgtctgtcctgtctgccaacaatctgcctgaggtccagaaccactgactgtccacagctgttctaggatgcccactgcagctccagaagatgagctgggttgtactaatatggtaattggataaacaaagtatatatttaaaaacacatagaatttgaatataaaaaggaagggcattgtatctatgaaaactaatttaaggcttttgtgttttggtgaggttgtttgttgcaacaaggtctcactttgtcacccaggatagagtgcagtgatgctatcacggctcaccgcaacctcgtcctctggggctcaagcaatcttcccacctcagcctcctgaatagctgggactacaggcatgtgccaccacacctggctaatttttgtattttctgtagagacagggtttcactatgctgcccaggctgatctcaactcctgtgctcaagcaatttgcctacctcgacctcccaaagtgctggattacaggcaagagccaccacacctggcttgcttttgattttttttttaagtgatgaatatcaagtacaagtgagataacataaaaggtggaagggcatcttaaactttaagaggactctacactcagattttttttttgcaagtatcgttaagttctcatcaaattttaataaacctaaaac

SEQ ID NO: 376 - DNA, 1187 bp, Homo sapiens
tgcatcttatacaattatataagatatgcgttcctgaaaatcttctataattcaaaacatataacaccattttagagaaaaaatgatggctatcccgtgttaggaaaccatagatacaatttcaccaccttttaaattacatgattgtcggtcwttttttttaaatttaggtttcctactattacacattttgtacataaagccaaactattgaaatatttgtatcatataatttccaaattgcataatttaagttcataaacagtggctctggtgtattttagggcctttcagcaacaataattatcatgccacagagcctgtttaagagcacagaaagtagaagtacacctgaaaagccttttaagggactagtataaccccgatatcaaagtgtaacaaagacaactcgaaagtcatacttattaatagagacgtaaaaatcctaagtagtagcaaacctaactcaataatacataatagaagctctccttaaaacttcttagccaggattaacaaatgctgtctgtcctgtctgccaacaatctgcctgaggtccagaaccactgactgtccacagctgttctaggatgcccactgcagctccagaagatgagctgggttgtactaatatggtaattggataaacaaagtatatatttaaaaacacatagaatttgaatataaaaaggaagggcattgtatctatgaaaactaatttaaggcttttgtgttttggtgaggttgtttgttgcaacaaggtctcactttgtcacccaggatagagtgcagtgatgctatcacggctcaccgcaacctcgtcctctggggctcaagcaatcttcccacctcagcctcctgaatagctgggactacaggcatgtgccaccacacctggctaatttttgtattttctgtagagacagggtttcactatgctgcccaggctgatctcaactcctgtgctcaagcaatttgcctacctcgacctcccaaagtgctggattacaggcaagagccaccacacctggcttgcttttgattttttttttaagtgatgaatatcaagtacaagtgagataacataaaaggtggaagggcatcttaaactttaagaggactctacactcagattttttttttgcaagtatcgttaagttctcatcaaattttaataaacctaaaac

SEQ ID NO: 377 - DNA, 1195 bp, Homo sapiens
tgcatattttttttctgccacccaaataaagatttttatctgtgttgaatttagtgcacatggttgctttgtggttaaatttttttagagattttgctttgggtaaagaaataatattgttggatgggtggaaggtttcaatacagtgcttttttataagattgtatttggtgaccacataattgtgaatttcaacaacttaatcggagtatatgttttgctctaagaaaattataatgtgtatgtaataagtagataatggttctccatcctttctttcaacttcaagtgcatctttcacacaacctttaccctgatgtacatgttccaggtttctctagggtatgtatctagaggtggaattacgggttgtagatgatgcacatacttaactctactagacagtggcaaacttgtctatatttttaactcttgttgaatatttttaagttgaaaatactggataacatacatggtatggcagccaacacctttcccgcatgtaatatttttcaaattgcttttcaaaagaaagtacttatctttatgctgctattataaactgtgatgctgggtaggcagggaggagttgtgatagtgtttaaacaaaggtaattaacctttaaaggggagaataaacagaacattctgaattatttcgttgtccctgatggggatagcaatcatcatttaaataaacctttcagttgagcagtaacaagagagcaatctattaataaattgcttattataaattataagtgaatgctggctaaaaaaatcatgtagactaagttttcagtttgaatcttttattgctgtgataaaaatagatatgtttcaaagcatgtaagtgctttcacaaatagaatcagatttcaaattcaggagtatgtttctttttttcatcattataaattaagctccatcctctcatttccctcagtcttcttccatctaaaagcaaagtttacagtttacttcggatttcaggatcaggaataagtrtcttcagccttctaacaggccatgccttatgcctaggctgtcatacacattctaacatttaatttcatttaattcactatgttaatatttatttgctatacaagacaaggattctaaacttacgatttttaagtacgtcaagggatagcctgacgttaaaatctttttaaaaaattggtttgtggtg

SEQ ID NO: 378 - DNA, 685 bp, Homo sapiens
gaggtgctgggtttgtattgaattaagaaatgctttgattcactttaataagaataattcaccacgtgtctagcattctgttgtcaccttcccatagtcttagtaagtgtaggatttccctgcatctgtggcaccaaaaccctccttttcctaactgccaagacccttttacagggctgatatcctgacatagaaatggagtgtaaattcactccccaagaaggatttggtaaaaacacttggtccagtcatactcagaagttcctaagggtggcaggtgaatgggacatgtcctcatgagctagcaccattttctctcttctgcccaaatgtggactcagctaactcaacataatgcctgggaaacaaagatacaaaatgcgagcagaattttagagtttaacttattaaatctctcctggaatgtttcccaaggaaaaccaaagaccaggaataaagaaaaaatacaaaaatctatggccgtwcctagtgtgctagtcatgagctcttcagaataaacagcagtaacatgtactagaaatcagtgaataaatgccttcctttaagggtaagcctcaagggaaattacactttctcttaaaaatcaaagaacctccctgtgttggtaattgtcacagtcagcatcatctctggatggtgtgaaaatgggtgtggccgggacaca

SEQ ID NO: 379 - DNA, 685 bp, Homo sapiens
gaggtgctgggtttgtattgaattaagaaatgctttgattcactttaataagaataattcaccacgtgtctagcattctgttgtcaccttcccatagtcttagtaagtgtaggatttccctgcatctgtggcaccaaaaccctccttttcctaactgccaagacccttttacagggctgatatcctgacatagaaatggagtgtaaattcactccccaagaaggatttggtaaaaacacttggtccagtcatactcagaagttcctaagggtggcaggtgaatgggacatgtcctcatgagctagcaccattttctctcttctgcccaaatgtggactcagctaactcaacataatgcctgggaaacaaagatacaaaatgcgagcagaattttagagtttaacttattaaatctctcctggaatgtttcccaaggaaaaccaaagaccaggaataaagaaaaaatacaaaaatctatggccgtacctagtgtgctagtcatgagctcttcagaataaacagcagtaayatgtactagaaatcagtgaataaatgccttcctttaagggtaagcctcaagggaaattacactttctcttaaaaatcaaagaacctccctgtgttggtaattgtcacagtcagcatcatctctggatggtgtgaaaatgggtgtggccgggacaca

SEQ ID NO: 380 - DNA, 748 bp, Homo sapiens
acctggagatgagtcaaagccctaagtaattcacttgccatctaaaatggcagcaaatttaacatgtctcaagtcgtgttcttgatttcaacatcctaaaacctctctccctcaaaatattttgttatacttacctaagcaattaccacagagtagtgtcttaaacaacagaaattcattttttcacagtttcattgagatcatggtgtcaacaggttcagtgtttccttagcctctagacatctgccttcttgctatgtcctcgaaaaaggagctgccttggtgcatgtggatatttggtgtctctctgtgtatgcaaatgtcttcttcttataaggacacctagcagatgggactatgtgcccccataacagcctcattttaagttaatccacacatttctgttcttgccttcaaatatggtcatattctgagaaactaggagtgaagtctttcatcatataaataaggggaaacagaattcagcccatagcactacccagtgtcttctcagtccacgacagsagtttcttttttttgttcaaatatattggaatcacgcttgcctttctctcaccgaagcctggtccatgagcaaatccagtgggctcacctctaaatccctcgcaatatgaacacttgcatattccctactacagagctgtagttcatgccatgattctctctcaaggaggatgttaagaaccttaaccaggtcttgataacattcttgttacattccatatca

SEQ ID NO: 381 - DNA, 1234 bp, Homo sapiens
ttatggattattcctatctaccttgcatagtgatgtttcagatgccttagctcttctagtacttacaatagcactttgaggattttttgcatttatgttcacttttcaaaggtagaaataaaatcttaatatgattgaatgactttcccttggacatacacttcataggtaacagcataatgcaatgcaaggagagcgacagagtgagagagagagagagagagagagagagagaaatgagaaaatgaccttattcatgaaaacaatataaaatacctaggaacaaagagcaagaaatgcacagaattcagctgaagaagaatgatcaaactttaatgcagaatatgcactaaaatgtatatacatgtaaattkgtagggacatggatgaagctggaaaccatcattctcagcaaactatcgcaaggacaaaaaaccaaacaccacacgttctcactcgtaggtgggaattgaacaatgagaacacttggacacaggaaggggaacatcacacaccggggcctgttgtgtggtggagggaggggggagggatagtattaggagaaatacctaatgtaaatgatgagttaatgggtgcagcacaccaacatggcacatgtatacatatataacaaacctgcacgttctgcacatctatcctagaaattaaagtataataaaacatatatatatttaaaataaaaataaaaagtaaaatcttaatgtgatcgagtgattttccctaagacatacacttcacagggaacagcataagacaatgcaaggaaagagacagagagacacagagagagagagagagagaaatgagagaatgaccttattcatgagaacaatataaaatacctaagatcaaatagcaagaaatgcacaggattcagttgaagaagaatgatcaaactttgatgcagaatatgcactgaaatgtatatacatgtaaatttttgcacaggaaattgcaatattcaaataggactaattttccaggtgttctggtgaaaattgcaccacagtcccctcttcatgtctgatttcagctttgctcattcacaaactcttatttttctatttgtcattccatttccacagttttgttgtttattgtcatctcttctttcattctcttcatccttgggtattaatttcctctgtgcttctttattttaattttactgggacattaggaaagagcagaaatcagtccatgtttatgtgtt

SEQ ID NO: 382 - DNA, 1234 bp, Homo sapiens
ttatggattattcctatctaccttgcatagtgatgtttcagatgccttagctcttctagtacttacaatagcactttgaggattttttgcatttatgttcacttttcaaaggtagaaataaaatcttaatatgattgaatgactttcccttggacatacacttcataggtaacagcataatgcaatgcaaggagagcgacagagtgagagagagagagagagagagagagagagaaatgagaaaatgaccttattcatgaaaacaatataaaatacctaggaacaaagagcaagaaatgcacagaattcagctgaagaagaatgatcaaactttaatgcagaatatgcactaaaatgtatatacatgtaaatttgtagggacatggatgaagctggaaaccatcattctcagcaaactatcgcaaggacaaaaaaccaaacaccacaygttctcactcgtaggtgggaattgaacaatgagaacacttggacacaggaaggggaacatcacacaccggggcctgttgtgtggtggagggaggggggagggatagtattaggagaaatacctaatgtaaatgatgagttaatgggtgcagcacaccaacatggcacatgtatacatatataacaaacctgcacgttctgcacatctatcctagaaattaaagtataataaaacatatatatatttaaaataaaaataaaaagtaaaatcttaatgtgatcgagtgattttccctaagacatacacttcacagggaacagcataagacaatgcaaggaaagagacagagagacacagagagagagagagagagaaatgagagaatgaccttattcatgagaacaatataaaatacctaagatcaaatagcaagaaatgcacaggattcagttgaagaagaatgatcaaactttgatgcagaatatgcactgaaatgtatatacatgtaaatttttgcacaggaaattgcaatattcaaataggactaattttccaggtgttctggtgaaaattgcaccacagtcccctcttcatgtctgatttcagctttgctcattcacaaactcttatttttctatttgtcattccatttccacagttttgttgtttattgtcatctcttctttcattctcttcatccttgggtattaatttcctctgtgcttctttattttaattttactgggacattaggaaagagcagaaatcagtccatgtttatgtgtt

SEQ ID NO: 383 - DNA, 1234 bp, Homo sapiens
ttatggattattcctatctaccttgcatagtgatgtttcagatgccttagctcttctagtacttacaatagcactttgaggattttttgcatttatgttcacttttcaaaggtagaaataaaatcttaatatgattgaatgactttcccttggacatacacttcataggtaacagcataatgcaatgcaaggagagcgacagagtgagagagagagagagagagagagagagagaaatgagaaaatgaccttattcatgaaaacaatataaaatacctaggaacaaagagcaagaaatgcacagaattcagctgaagaagaatgatcaaactttaatgcagaatatgcactaaaatgtatatacatgtaaatttgtagggacatggatgaagctggaaaccatcattctcagcaaactatcgcaaggacaaaaaaccaaacaccacacgttctcactcgtaggtgggaattgaacaatgagaacacttggacacaggaaggggaacatcacacacyggggcctgttgtgtggtggagggaggggggagggatagtattaggagaaatacctaatgtaaatgatgagttaatgggtgcagcacaccaacatggcacatgtatacatatataacaaacctgcacgttctgcacatctatcctagaaattaaagtataataaaacatatatatatttaaaataaaaataaaaagtaaaatcttaatgtgatcgagtgattttccctaagacatacacttcacagggaacagcataagacaatgcaaggaaagagacagagagacacagagagagagagagagagaaatgagagaatgaccttattcatgagaacaatataaaatacctaagatcaaatagcaagaaatgcacaggattcagttgaagaagaatgatcaaactttgatgcagaatatgcactgaaatgtatatacatgtaaatttttgcacaggaaattgcaatattcaaataggactaattttccaggtgttctggtgaaaattgcaccacagtcccctcttcatgtctgatttcagctttgctcattcacaaactcttatttttctatttgtcattccatttccacagttttgttgtttattgtcatctcttctttcattctcttcatccttgggtattaatttcctctgtgcttctttattttaattttactgggacattaggaaagagcagaaatcagtccatgtttatgtgtt

SEQ ID NO: 384 - DNA, 1234 bp, Homo sapiens
ttatggattattcctatctaccttgcatagtgatgtttcagatgccttagctcttctagtacttacaatagcactttgaggattttttgcatttatgttcacttttcaaaggtagaaataaaatcttaatatgattgaatgactttcccttggacatacacttcataggtaacagcataatgcaatgcaaggagagcgacagagtgagagagagagagagagagagagagagagaaatgagaaaatgaccttattcatgaaaacaatataaaatacctaggaacaaagagcaagaaatgcacagaattcagctgaagaagaatgatcaaactttaatgcagaatatgcactaaaatgtatatacatgtaaatttgtagggacatggatgaagctggaaaccatcattctcagcaaactatcgcaaggacaaaaaaccaaacaccacacgttctcactcgtaggtgggaattgaacaatgagaacacttggacacaggaaggggaacatcacacaccggggcctgttgtgtggtggagggaggggggagggatagtattaggagaaatacctaatgtaaatgatgagttaatgggtgcagcacaccaacatggcacatgtatacatatataacaaacctgcacgttctgcacatctatcctagaaattaaagtataataaaacatatatatatttaaaataaaaataaaaagtaaaatcttaatgtgatcgagtgattttccctaagacatacacttcacagggaacagcataagacaatgcaaggaaagagacagagagayacagagagagagagagagagaaatgagagaatgaccttattcatgagaacaatataaaatacctaagatcaaatagcaagaaatgcacaggattcagttgaagaagaatgatcaaactttgatgcagaatatgcactgaaatgtatatacatgtaaatttttgcacaggaaattgcaatattcaaataggactaattttccaggtgttctggtgaaaattgcaccacagtcccctcttcatgtctgatttcagctttgctcattcacaaactcttatttttctatttgtcattccatttccacagttttgttgtttattgtcatctcttctttcattctcttcatccttgggtattaatttcctctgtgcttctttattttaattttactgggacattaggaaagagcagaaatcagtccatgtttatgtgtt

SEQ ID NO: 385 - DNA, 1234 bp, Homo sapiens
ttatggattattcctatctaccttgcatagtgatgtttcagatgccttagctcttctagtacttacaatagcactttgaggattttttgcatttatgttcacttttcaaaggtagaaataaaatcttaatatgattgaatgactttcccttggacatacacttcataggtaacagcataatgcaatgcaaggagagcgacagagtgagagagagagagagagagagagagagagaaatgagaaaatgaccttattcatgaaaacaatataaaatacctaggaacaaagagcaagaaatgcacagaattcagctgaagaagaatgatcaaactttaatgcagaatatgcactaaaatgtatatacatgtaaatttgtagggacatggatgaagctggaaaccatcattctcagcaaactatcgcaaggacaaaaaaccaaacaccacacgttctcactcgtaggtgggaattgaacaatgagaacacttggacacaggaaggggaacatcacacaccggggcctgttgtgtggtggagggaggggggagggatagtattaggagaaatacctaatgtaaatgatgagttaatgggtgcagcacaccaacatggcacatgtatacatatataacaaacctgcacgttctgcacatctatcctagaaattaaagtataataaaacatatatatatttaaaataaaaataaaaagtaaaatcttaatgtgatcgagtgattttccctaagacatacacttcacagggaacagcataagacaatgcaaggaaagagacagagagacacagagagagagagagagagaaatgagagaatgaccttattcatgagaacaatataaaatacctaagatcaaatagcaagaaatgcacaggattcagttgaagaagaatgatcaaactttgatgcagaatatgcactgaaatgtatatacatgtaaatttttgcacrggaaattgcaatattcaaataggactaattttccaggtgttctggtgaaaattgcaccacagtcccctcttcatgtctgatttcagctttgctcattcacaaactcttatttttctatttgtcattccatttccacagttttgttgtttattgtcatctcttctttcattctcttcatccttgggtattaatttcctctgtgcttctttattttaattttactgggacattaggaaagagcagaaatcagtccatgtttatgtgtt

SEQ ID NO: 386 - DNA, 1356 bp, Homo sapiens
gtgagaggggcctcgaattgactgagtgtttggtaagttagcagccatcgtcatcgtcatcatcatcatcatcatcacagaactggaaggtcttgcatctgaaaactctccatgccccatgccaagcctcttgtttgttcccagctgtgcggagatctgtctgtccacagggcagcacacacatacacacacacacaccatacacatgcacagaggtctgtctggctggctctctccctggccccctcaacaaagctctcttgtcaagctggccaggacgagaatattgatgagacagagggcaaccagggtacaaacagcctgctcagccgtcgtcctctgtgggacaagctgtcacctctccctggccccctctgaccttccatggcgctcccaggctccctccccagtggagcatccatgggtgagttttggggatgaggggtggcaaacctagggggaggcggggatggcgaagttcacgtggagacagagcctccctcgtgtgcacctgagtgtatacagctggtgctcccattgctggagcacctcccagtgcccgatcccatgccttatgtttcccaggtggggtctctcataagccccagacaaccacaggaatgggcattttgattctcaaggtacaggtgacgaataggctcagaggttgggtaaaagtgtccatgggagcaccaggtagtgaatggcagtagaggaaggtcagctcaggaatcctgagtcctttgaggacacagggtcagtggaaagggttgagcaggaagggggtgggagagcttgcctgcctggtaaccttcagaggtctcagatttagggttttgatgatatctccacatgaggttacccacgaagtcagggagttcagactgaaggaagacagcaattcactatcttacaccaccaaattaatttacactccagtgtcatgattgaatatggggggggggagatggatttggagctgcaactggtagggacaagatgacgaactctctagacctctgcatgttgttccatttgcttcacyaagaatgtatcaggctgggcgtggtggctcacacctataatcccagcactgtgggaggccaaggtgggaggatcacttgtgcccaggagttcgagaccagcctaggcaacatgtgaaaccctgtctctacaaaaaatacaaaaagtagccgggtgtggtggtgtgcgcctatagtcccagctacttgggaggctgaagtgggaggatcacttgagcctgggaaatggaggctgcagtgagccaagattgcaccactgtactccagcctgggtgacagagcaagactctgtctcaattaaaaaaaaaatgca

SEQ ID NO: 387 - DNA, 537 bp, Homo sapiens
cagcctcccccatctctaggcgtcccccaagagccatctttataaagtgctgcttttcatatgttgtggtcactcccccactcaaagacctccatggctccccagtacttcttgggaaaagtccatggctgtcattgctcagtggtgtgatcttggcccactgtactcgctgcctcccaggttcaaatgattctcctgcctcagtctcccaagtagctgggattacaggtgcgtgccaccacacctggctaatttttgtatttttagtactgatgaggtttcaccatgttggccaggctggtcttgaactcctgacctcaggcgatcctcctgcctcagcctcccaaagtgctgggattataggtgtgagccaccgcacccagccaaggcctctgagactctgagccaactgcctcctacagccttttctgtgctattcctgatctgcttgatkccatcttacccaactcccctcttcccacagagcccttgcacccctctctgcttaacactcagctcagatcctcagtgtcttca

SEQ ID NO: 388 - DNA, 1282 bp, Homo sapiens
tgcatgacctgtgtggtcacacaggacccctgtgctaagaaggacgcctgcctagaaggaccctgtacttggctcagtgctctctgttgccaccactttgaactactaaataagttttgggcagtgagtctcacggtttcattttgcattgagccctgccaatgacgaagccggtcctgactatagaaacaggtcaggcacacagtagacactccgtgagtatttgttgactgaatgaatgattcatatcatgatttagctccatgactttcttcctgcctctctgggcgccgtagccgcctctccccctccgtccctcccccacccttcccttttgaaagagtgtatactgatgtaagcggacaaggagaggagtcagtccggggatcagggagccgggagaagatcgcctgcagcaacggagaagacacaattactccagcaactgcccaccgaccgcagctcggagcctccacttaatgtaattgagtgtgaaggccggctggagacacaggcgcccctgctgccccctctccataatatagacactattggttgctaattggcgccagtaggctggtgctaattgtcctaatgcactctgcttgatggaggacgaggctgcgcaggacagaggcgggggctccttgggaaatggtgggggtggtgggcgcccagcgccagcagacactggtacagtgttcacaaaagttggaacaggctttaattttgcatcaagtatttaagcgggtttgggctggatattgagggggaggtggatcgtggagctttgcttgcggtaacccgcaaggggactggggaatagsccccctgccatccttatcaatgggttatccagacggctgtgtccccagcattgtctaattaattgtgtgaatttctaatagcccttttagccccctggctcctcccccaagcccccaacccccgcctcctccattcgagctgctccctcttgttctgcttgtttctgaacactgtgcttcagtgatgagacttgacatcagccacagagggaggcagcattgagcagagggaaatgcagggaagctggggatggccttgaactcatcacgtggtctcaagaaactcacctgtctcttctgggtctcagtttccccagcaagtgaccgttgggctagtgagtgttaaaatactgcatatcctccaactgtggcacccaagatcatcttagagactgtagaaatatgcacatatatttgaatatatagttaaatatattgctatgtttaaatatatg

SEQ ID NO: 389 - DNA, 1255 bp, Homo sapiens
aaatgagtttgacttctgtcatcagctgattttgtaattcactttgtttgcttttccttgtcataggatgtttccttagaagagggttttttttctcttgttcaggatgtggttatcagcagagrggtgtgtggtcagggaatgtggtggtagcgagtacacagaggaaagaatggcacagttccactgtcccccactcacctttcttcttgtgtgtggtcggtggctgtatgtgcacctaccatcatcacattacttagcaaacccagttgtcctgtggttccacttcatggaagaccctattctctgctctagcactgaaccctccagaagacattttaaagaatgctaaaatggggctaagctcataaattagccagcagtattatgttaaaaatcatccttgcttacttcccattgtctcttgactcttacaagtccaagagtatgcagagttttttgtttggggaacccagtagtgagaagcagtgtttttgatcctgttgtttgtttacaagatttgggggtccctagctttagtgctctggagctctcttaaaaaaatcagattcttggccagacgctgtgactcacgcctgtaatcccagcactttgggaggccgaggcaggtggatcacttgagctcaggagttcaagaccagcccaggcaacatggcaaaaccctgtgtctaccaaaaatacaaaacattagccaggcatggtggtgcatgcttgtggtcccagctactcaggaggctaaggtaggaggatcacttgagcccaggcagcggaggttgcagtgagctgcgattgcaccactgtactccaacctggatgacagagaccccatctcacaaaaacaagcaaacaaaaacatgagattcctggctctgtttctgaagtttctaactctgggtccagagtcagactcaggtatctgcatgttaacaagcacccaaggtgactcttatccacagtaaagtttgaggaccactgtcttagggaaccgccttcatttggctgaacgaactttagagcatcagcttttctaatcctacagtttccaaggacaagcagaaatccctatctgaccattttgatggaatcctcactcccaagaatacatgttcactgccctttctccacctcttttcctctctcctgtttcttctttccctctggctgcaaggtgccccacactcctgtggtctggaaggaatggagccatgtgcacacttaacttatttttcatgca

SEQ ID NO: 390 - DNA, 674 bp, Homo sapiens
gaatcctgctagttatccctgtggaggtgtcgggtatacagttggccgtgggtctgtcgctctggagagaagtcagctttctgtaatctttcagaaccttggctatgataagcaaggacaagtggggatgatttctcagctctgyccttttccaaatgtatgattgttttcccccaactccctctctatcctaataacctgtccctcccaccctcctccttaaattcatctttcttcccttggcactgtttttggaaaatccaaatcagagagctttactgctggctttgaggattagatgtgaatacaggcaaccaagaagaactcctacaagatcctgtctgggcccaagagcacaggcacctaaacagaattgtttgacactgcaaagcactcatccctgtatccttaaggtctggagctattgagttgtgtctccctactttaccatggtagcacccctcttagcttgtcctctgtgtcaagaccccttaacgcagagcccaagatttgcctactaaagaagagatgaaatattttctttcttatcaaacgctgattgcagcctccatgcttggagagatgataactgtgtatgtggcatgttccctatcctctggcaatcctttttaaaacctgtcctttccgaccatgcctctaagaggaaccatcta

SEQ ID NO: 391 - DNA, 602 bp, Homo sapiens
aaggaagaaaggaaggaaggaaggaaggaaaacctgcccacccaggatatcccttctgattaactcaaaaatcaactgacttgaaacaaaacccttcacctatacgagattccattggttaaaagcaagccacaggtcctgcccacacagaaggtaaagagattacacaggacataaacactagggggaagggctcaggcaggtaccctaggccctctacaccacacttcttggcaggatgggatatagtgaaaggcagtaggattgctcagaagtagagaacctgctctcttggactcaccaaagaatgaagatgaaagacaggtccaraaacaatatttgtattggacacaaagctatacttccttaagacagttcctagggagttttgagtttagggctcaggcaaggacaaatggcctctggctggagaagaagagggaaggctccgggcaaacctaagagaagggaacaaatccccggaggctggggaacagcaagtacctgttcccctagagcagtggtcaggaactccacacctgtgggagggaaaccatatgagtgaagtgggctgagaggaaatgaagagtggtgatgagggt

SEQ ID NO: 392 - DNA, 602 bp, Homo sapiens
aaggaagaaaggaaggaaggaaggaaggaaaacctgcccacccaggatatcccttctgattaactcaaaaatcaactgacttgaaacaaaacccttcacctatacgagattccattggttaaaagcaagccacaggtcctgcccacacagaaggtaaagagattacacaggacataaacactagggggaagggctcaggcaggtaccctaggccctctacaccacacttcttggcaggatgggatatagtgaaaggcagtaggattgctcagaagtagagaacctgctctcttggactcaccaaagaatgaagatgaaagacaggtccagaaacaatatttgtattggacacaaagctatacttccttaagacagttcctagggagttttgagtttagggctcaggcaaggacaaatggcctctggctggagaagaagagggaaggctccrggcaaacctaagagaagggaacaaatccccggaggctggggaacagcaagtacctgttcccctagagcagtggtcaggaactccacacctgtgggagggaaaccatatgagtgaagtgggctgagaggaaatgaagagtggtgatgagggt

SEQ ID NO: 393 - DNA, 1164 bp, Homo sapiens
gcatttgatggttgagagggcccattgagcctgttgggaagagtgtcagtctggggagccacctcagtgggtaaccgatggagcagatgactgatgacaccctccaacactgacattcttgattccttttggagatgtcaggcttccgttccttgcacattccttcttgccttcctcctgcacatatgaatgggatggagcacgtggacagctggcagcagtcccatttgccttgttttctctgttctaaaccctgtactgaaaaataagatagcttcttcctggggaataaaacagcagggattcgttggaagtttctgttatcaaaaaaaaaagaaactgaaaggtgataaattcctgtcaacagataaggcactggcaggactccagagcagaaacaacaccgtgccaccctggaaagagtggctgccagaaagtcgcaagagtaaaaatgtcacgtgcagggacgtgctggggtcgggtgggagaaaaactctaattggctacaatggaagaggcttaggctttcactgaggttaaatagggttctgggcagggtggggtcctttctcttgctgaataatgcacacattcctttcccttcatggttctcagggtttcatgtctcttggcctttgcacatgctatacccaattcctgggacccctcatttcctggcctccagatgacaaacttctaccatctcagagacctagctgaggacgtcacctctcccctgatcctgggctgggcagaactgaaggctcagttctcctctgtccccagagcactcggttcctgggtctattatagcacttaccacatggtattacaattactcaattgtgtgcccagctccctgcagttgcctggaagctccggaatggcaaggtctagaacagcactatccaatagaaatataacgcgagccacataaataattttaactttcctggcagccatgttaaaaacaagtcaaaaacaagagaaattaactttaataatataatattcgaaatagtaataaacatattactrtattactataaaataaatagtaacaataaaatatttggaatagtttaatttcaatatgtaattaatataaacaactcactgataagatattttacatttttctgtgctcaatcttcaaaattcatt

SEQ ID NO: 394 - DNA, 1233 bp, Homo sapiens
tgacaagacactcagccatttttatgtaaagcgatggagaccaactgatttctctgtcttcttgctcacaagttttagatgcaattgtcacatacacacaaaaatcatacgcagaacagcttgaatgaactgtgatcacagaactgaatttatcaacaggaaaacaggattgaaaaaagaagtttctcatccaaggtttttctgagactgcaaccaaggaggtggtgtgttgaatttttttccccttcctcctctgagagttcaaagctcggagctgaccactgcaaaggccactgtcacatttgctgaaaatcaaaccactgataccagcattgaaaatacaaatttgagaacccaagttgcttgcacatgatggagtgcataagagttaaaaatagaatccaccttgcctcctacctgcataataaacatgtaagtttcaagtgtttaatttgatattcacattaattaacaatacaacatacattatttaaaagacagcaaatgcacgaagaaaggagagacaccatctggtagcagagttttgttgttgttgtttttgtttttagggtttgtggggggttttggttttgttaaaaaaaaaaaggtaaaatcatattttgaatgtgatgaaaaacaaacatccagaagcaaatgaattggaaatgaaaggtgatgttgaaatatctaaggctgtaatgaggcaaaaacaagtcttcgctaccagatgatatggcatacagagcatttacatactcacatctgaaatactaggcaacgtgtaatgaattctagacacagcatgcacacacagcacaagcacggctaatcctgcctgccatcttaggctcgcagaagcaagatacgcactgcatgcagcacacgagcactggggaaggaggaggcaagggacagctcaccttaaatgcagtatctgattaatgttgtaagtgacattgcatatcagcctcagagtcttggttcaactgggtaggagggaacaaagaaaaatgtcatcaactggtgatgcaagatgagcccaatcactaaacactgtttagtaaactccaaattctgcaaccagacagaaggcatttcatacacttaagcagagctgctccacaatgaaygtgtccttctgcttctgagaatcaaacaatccttttgctaaggaagaaaataagctggaaagaacactctcatattctcttcctgaagaaagctttcaataca

SEQ ID NO: 395 - DNA, 1180 bp, Homo sapiens
tggaaaaagtcaggcttagagagaaactcttctaaagtcacaagtctggaaagtggcccagctaggttgtgaaactagatttatctgaccccggtctcctcattccattgtactaagctcatatgcacgtgaaaatgcgcagacacgcacatgtcatacaatagccatatggtaaaaggcaatggaattacattactgttagaaactttttgagtcaacagaaatgtattttttaaaggactcaattctattaagggatattctttaatttgtatgctgacaacagaatacagtgtatgactactatcaaaaccacatttaacagcctgaattttcataatcagaaatgtgttttgggacttgccggggacaaatttaagagtgattcttgatttgtgtaaatttgagtggtttaatttgtgtaaattaaaccacttaatattcatcatacacgtcatattaccttaaaaaggaaaacaccaacaatgtaactttgcacttgtsaatccaccagtcttcctaagctcatccctcaccttccacggtctgacatgcctggctccctccattaggaacccccttccgctggcttctggagttgcattcctccatggttcttccttactatcttgccagacttctatctgcttccctagatcttcctttcttttctcaaaaggctccatcctcaaccatttttcccctatattctctctcaaaaatctcttttcccatctcttgactttttcttataaaccaaagactcccaaatgagccctggccttcttgtggagcgcaaagcccccttctgcctgggagacagcatgcttcaacactgcaaacacagcacctctaaaatgtagctccttacctccttctgagtttcctccatgggtaccactgctctggaaatcgcagtgtcagctttagctgttccttcactgagacatcagattctgtcagttcttccctttgcatctattcctttcccatttcattgttatcatccatttcaggccttttctgcccctctttttccttggtgggttgtagtagcttaactggctttctggcctctagtttctgccctgcctctcctcccgatctccccccaagctactcacaagagcctggtcctgaagcacagccacaacactcccctgttcaagtacctttaatg

SEQ ID NO: 396 - DNA, 1180 bp, Homo sapiens
tggaaaaagtcaggcttagagagaaactcttctaaagtcacaagtctggaaagtggcccagctaggttgtgaaactagatttatctgaccccggtctcctcattccattgtactaagctcatatgcacgtgaaaatgcgcagacacgcacatgtcatacaatagccatatggtaaaaggcaatggaattacattactgttagaaactttttgagtcaacagaaatgtattttttaaaggactcaattctattaagggatattctttaatttgtatgctgacaacagaatacagtgtatgactactatcaaaaccacatttaacagcctgaattttcataatcagaaatgtgttttgggacttgccggggacaaatttaagagtgattcttgatttgtgtaaatttgagtggtttaatttgtgtaaattaaaccacttaatattcatcatacacgtcatattaccttaaaaaggaaaacaccaacaatgtaactttgcacttgtgaatccaccagtcttcctaagctcatccctcaccttccacggtctgacatgcctggctccctccattaggaacccccttccgctggcttctggagttgcattcctccatggttcttccttactatcttgccagacttctatctgcttccctagatcttcctttcttttctcaaaaggctccatcctcaaccatttttcccctatattctctctcaaaaatctcttttcccatctcttgactttttcttataaaccaaagactcccaaatgagccctggccttcttgtggagcgcaaagcccccttctgcctgggagacagcatgcttcaacactgcaaacacagcacctctaaaatgtagctccttacctccttctgagtttcctccatgggtaccactgctctggaaatcgcagtgtcagctttagctgttccttcactgagacatcagattctgtcagttcttccctttrcatctattcctttcccatttcattgttatcatccatttcaggccttttctgcccctctttttccttggtgggttgtagtagcttaactggctttctggcctctagtttctgccctgcctctcctcccgatctccccccaagctactcacaagagcctggtcctgaagcacagccacaacactcccctgttcaagtacctttaatg

SEQ ID NO: 397 - DNA, 1180 bp, Homo sapiens
tggaaaaagtcaggcttagagagaaactcttctaaagtcacaagtctggaaagtggcccagctaggttgtgaaactagatttatctgaccccggtctcctcattccattgtactaagctcatatgcacgtgaaaatgcgcagacacgcacatgtcatacaatagccatatggtaaaaggcaatggaattacattactgttagaaactttttgagtcaacagaaatgtattttttaaaggactcaattctattaagggatattctttaatttgtatgctgacaacagaatacagtgtatgactactatcaaaaccacatttaacagcctgaattttcataatcagaaatgtgttttgggacttgccggggacaaatttaagagtgattcttgatttgtgtaaatttgagtggtttaatttgtgtaaattaaaccacttaatattcatcatacacgtcatattaccttaaaaaggaaaacaccaacaatgtaactttgcacttgtgaatccaccagtcttcctaagctcatccctcaccttccacggtctgacatgcctggctccctccattaggaacccccttccgctggcttctggagttgcattcctccatggttcttccttactatcttgccagacttctatctgcttccctagatcttcctttcttttctcaaaaggctccatcctcaaccatttttcccctatattctctctcaaaaatctcttttcccatctcttgactttttcttataaaccaaagactcccaaatgagccctggccttcttgtggagcgcaaagcccccttctgcctgggagacagcatgcttcaacactgcaaacacagcacctctaaaatgtagctccttacctccttctgagtttcctccatgggtaccactgctctggaaatcgcagtgtcagctttagctgttccttcactgagacatcagattctgtcagttcttccctttgcatctattcctttcccatttcattgttatcatccatttcaggcctttyctgcccctctttttccttggtgggttgtagtagcttaactggctttctggcctctagtttctgccctgcctctcctcccgatctccccccaagctactcacaagagcctggtcctgaagcacagccacaacactcccctgttcaagtacctttaatg

SEQ ID NO: 398 - DNA, 1485 bp, Homo sapiens
aaaaaaactgaacgggacccaaaaacaatagacagataaggaggtttaaatgagtgaaaactactttttgttgtttatgtagtagtcttacaaatagattttagaacaattttccagcgataaattttttaattttactcaaataagaaagttgtttaagatatttactttaatattttaataaacatggcttttaaagggccatccgtgtgctaaaaagtatcagaattaaaatatttgcttgaggtttactaatgacaaaaatctcgtgtcagtattttaaagaaaggtaacagattaataatacagaagctgtgagagctactttggaaagtctcttcttaaaatgtccttttagaagtaagttaccatcagttgaacaccctaccttttacaccattagactagtgcatagcctggaagttagttatcttccagcatgggaggagtgttagtccaattgagaagaatatactaaatgctatcaactatttttgttattgcatctcaaagaatattaaggtttagtgcaattctatgcagaatcccaagcagacatgtttaacttggcaaataactctaaacttctgtaagataaaatgagcaagacaaacaagtagatttttgtgaggaacaaaatcataacatgaggaatttgtcttactagatgttaaaatttactataaaggtacaacaatcaaaactgtgaaacttaaacaggaatgaatagatcaaaggagtataatcaagaccccaagaatgctcacatacaaaaaactagtatatgctacatgtatgatcagtaagaaaatacataatcagcaaaaaaaaatgcataatacataagaaaatagctgataagcagaaaaagaactattccataatgatcctggaaaatgtatcaattatttgagagtaaaaaaacaaataattccaagtgtatcataaagttaaaaattaaaaatttgggggattcctctttcagttttggagccccccctctctgtctctgcacgggggagcttcttcctcctgccttctcccttgttttttgtctactaaactctctactccttaaamccaaaataaataaataaataaataaaaattcaaagcagaaaaataaaaaccaggagaaaatataaacaaacattttcaaagctttatatggaaaagttaagctttaagaaatggaaaactcacaaagaaaacaattactagatttaattatttgtaaatactatcaagaactgccagtatcaaaattaaaggtaaactctaaaatggaaaaatacttccaataaatatggattcagataatgtctttaagacataattaattcttatgaacctgagagcaacatatcacacaacaaattaaattgagaagaatcacaaatgagcagttcaccaaagaaaaaatttaaatgtttattaaacatattaaattggtcatctccctaagaaacaaagaatgtaattaaa

SEQ ID NO: 399 - DNA, 498 bp, Homo sapiens
tgtgctggatgccatgcttatccttgagcatccaagattagaatctagaatatatcagccaaaaaaaaaccaccttatttttatttatttttttattttttttgagatggagtctcgctctgtcgcccaggcgggagtgcagtggcgcgatctcggctcactgcaagctctgactcccgggttcatgccattctcctgcctcagcctcccgagtagctgggactacaggcgcccgccaccatgcccagctaatttttttttgtatttttagtagagatggggtttcactgtgttagccaggatggtctcgatctcttgaccycgtgatccacctgcctcggcctcccaaagtgctgggattacaggcgtgagccatcgtgcctggcacaaaaacttacatagatcgatttttttaaaaaaggtcaacaacccaattgaaaaatgggaaaacgatatataggaaagtcacagaacaggaaccttaaatggccaataaca

SEQ ID NO: 400 - DNA, 1397 bp, Homo sapiens
actgcaatgccactgtgaaggtgaggagcgcgtggccgaggcccagtctaggccagtagggccaggcagctccagggccatgctcttgggtcctagggtccacgtggtcacaggtggcccgtgcttgctgttgtcttcctgcagaggaatcaaaggtagattcttcatatggtggccagactctgtcctttcctgcatcacagcctcccatggttccctaccctcttaacacagatcacactcttaacacttccccacatggcccaccctctgcctgtggctctgacctgcctgtcacccccattcctacctcagagcatgcacacttgccattccctccctctgaatgctcttccagatttccctgaggctaactcatcttcagtgtctccattaaccagcactgtcaccaccaatctgcagtggcctccctagtacccacctgacttctggccctacctgccaccactggatgataatactttgttttcccagcactcaccgttctctgaaatgatcttgttttactgtttttaaaattcatacattgactcttccccaacttagaacgttggctccacaagcatgagccttcctctgtcygttcgcacagtgttagagccagtccagcacccaggggaggggctcagtagagttgtggtgaccagatgactgagcactagccatgccatcaactgccaaagaaaagggcaacctcataaggagaggcgaatatggcttagtataataatggaaattaaaatgcatcccctttgaggaattggtgctctacttgggggttcaaaggggaacacgcattttgtttttcagattccaaagtgctgcaaaggcttctatggacctgactgcaaccagtgtccaggaggcttctcaaatccatgctcaggaaatggacaggtgaatactgaagactggccttccataagtcaaatcaaacaataatttttagaacttctaaaccaaaatgtgatataatgccagctactcttcccaggaagcaaaagaaatgaccccttactaaaagaacagcaggtgtctgcagtagaaggatctgggtctgggatgggggatgggagagagagattccggtaatgttgcctctagtctgcttctctattgcgggctgcaggacgttgggtaactcaagaaggatctctgggcctcacgttcctcctgtgggagatatcagggttgacctgcattgatcttcaagactccttccagaactaagattttatgatagttaaaaaatagctctgcctcctgattgcttttttgaacctatgagcaaaacctagtgaaatgtaacagccgaaacttaactcatctagcttggaggcaaaagtagctgtggttcatacagggaaattatacat

SEQ ID NO: 401 - DNA, 1231 bp, Homo sapiens
tcaggctccctactgctgaggtgcggtggtcagcctgggatgaggccctgggtctgtcttcacagactaaagatagtgccttgacctgagcacagcactcaggctccgtctcaggtggccacagtaactttgcatagatccagtcttatcatctcrtgtcatctcctatgaagccaactatggcatgctggcagagctcagcgtgcatgcggtgactcttcgttggcctctgtggaatttgcaccgcaggacattcccagccccagacttactgcgactggtctcactaacgcacaagtagcccctgccggctttgctcacgggatgttgggatgttgtcctcagccagtgagacacagatacacactcacaaaccatcttcgtgaccacagtggggggttgctggtttaaagccagagacagtggaggagaaaggaagaccaaatccttattttttttgttgctgtttactgtctttctgttcaacaagctttcaatgaccccatctaggtgttaaggctacagaggtgacagtcccagttccctacctctagttcatacttcagaagtttcaatgtttctaagatatggtgttccttacaaaggcacagcatgctgggaaagaccttcaggcatcgtctgatcaaacttcatcctttttttttttttaaattgatgaagaaagcgtggcattgggaaattgagttgcttaaggccagaaaacttggaagcaatggagcccagcctcagctccgggctgtcagcccaagcccatgctgccatcccagtttgtttttcctgttacctaacagtcaaggggaatcatatttcctggtttagcaagcatcttcaatccactatttgcatgtctttcttctcatctctgggagcgaaacaaaaagagtaaaccttaaaggttttcacatccttcaccctaaatgaccacttacgcacattttaagttattgtcagcgatttgtgttttaaaatacaagccttgctatgtttagctaattctcctgggtgagagacatgattgattagaaactttaacagccgttcatggagagaagtataagtctttcaggatcacgcctctcacccagcctttgttgggaatggagaattgatctgggagccacagcacttctttcttccctggcagatgaaaaaaaaaaccctcgagatcatttgcaggccagccccgctcccatgttttttctctgaagag

SEQ ID NO: 402 - DNA, 1231 bp, Homo sapiens
tcaggctccctactgctgaggtgcggtggtcagcctgggatgaggccctgggtctgtcttcacagactaaagatagtgccttgacctgagcacagcactcaggctccgtctcaggtggccacagtaactttgcatagatccagtcttatcatctcgtgtcatctcctatgaagccaactatggcatgctggcagagctcagcgtgcatgcggtgactcttcgttggcctctgtggaatttgcaccgcaggacattcccagccccagacttactgcgactggtctcactaacgcacaagtagcccctgccggctttgctcaygggatgttgggatgttgtcctcagccagtgagacacagatacacactcacaaaccatcttcgtgaccacagtggggggttgctggtttaaagccagagacagtggaggagaaaggaagaccaaatccttattttttttgttgctgtttactgtctttctgttcaacaagctttcaatgaccccatctaggtgttaaggctacagaggtgacagtcccagttccctacctctagttcatacttcagaagtttcaatgtttctaagatatggtgttccttacaaaggcacagcatgctgggaaagaccttcaggcatcgtctgatcaaacttcatcctttttttttttttaaattgatgaagaaagcgtggcattgggaaattgagttgcttaaggccagaaaacttggaagcaatggagcccagcctcagctccgggctgtcagcccaagcccatgctgccatcccagtttgtttttcctgttacctaacagtcaaggggaatcatatttcctggtttagcaagcatcttcaatccactatttgcatgtctttcttctcatctctgggagcgaaacaaaaagagtaaaccttaaaggttttcacatccttcaccctaaatgaccacttacgcacattttaagttattgtcagcgatttgtgttttaaaatacaagccttgctatgtttagctaattctcctgggtgagagacatgattgattagaaactttaacagccgttcatggagagaagtataagtctttcaggatcacgcctctcacccagcctttgttgggaatggagaattgatctgggagccacagcacttctttcttccctggcagatgaaaaaaaaaaccctcgagatcatttgcaggccagccccgctcccatgttttttctctgaagag

SEQ ID NO: 403 - DNA, 1231 bp, Homo sapiens
tcaggctccctactgctgaggtgcggtggtcagcctgggatgaggccctgggtctgtcttcacagactaaagatagtgccttgacctgagcacagcactcaggctccgtctcaggtggccacagtaactttgcatagatccagtcttatcatctcgtgtcatctcctatgaagccaactatggcatgctggcagagctcagcgtgcatgcggtgactcttcgttggcctctgtggaatttgcaccgcaggacattcccagccccagacttactgcgactggtctcactaacgcacaagtagcccctgccggctttgctcacgggatgttgggatgttgtcctcagccagtgagacacagatacacactcacaaaccatcttcgtgaccacagtggggggttgctggtttaaagccagagacagtggaggagaaaggaagaccaaatccttattttttttgttgctgtttactgtctttctgttcaacaagctttcaatgaccccatctaggtgttaaggctacagaggtgacagtcccagktccctacctctagttcatacttcagaagtttcaatgtttctaagatatggtgttccttacaaaggcacagcatgctgggaaagaccttcaggcatcgtctgatcaaacttcatcctttttttttttttaaattgatgaagaaagcgtggcattgggaaattgagttgcttaaggccagaaaacttggaagcaatggagcccagcctcagctccgggctgtcagcccaagcccatgctgccatcccagtttgtttttcctgttacctaacagtcaaggggaatcatatttcctggtttagcaagcatcttcaatccactatttgcatgtctttcttctcatctctgggagcgaaacaaaaagagtaaaccttaaaggttttcacatccttcaccctaaatgaccacttacgcacattttaagttattgtcagcgatttgtgttttaaaatacaagccttgctatgtttagctaattctcctgggtgagagacatgattgattagaaactttaacagccgttcatggagagaagtataagtctttcaggatcacgcctctcacccagcctttgttgggaatggagaattgatctgggagccacagcacttctttcttccctggcagatgaaaaaaaaaaccctcgagatcatttgcaggccagccccgctcccatgttttttctctgaagag

SEQ ID NO: 404 - DNA, 1231 bp, Homo sapiens
tcaggctccctactgctgaggtgcggtggtcagcctgggatgaggccctgggtctgtcttcacagactaaagatagtgccttgacctgagcacagcactcaggctccgtctcaggtggccacagtaactttgcatagatccagtcttatcatctcgtgtcatctcctatgaagccaactatggcatgctggcagagctcagcgtgcatgcggtgactcttcgttggcctctgtggaatttgcaccgcaggacattcccagccccagacttactgcgactggtctcactaacgcacaagtagcccctgccggctttgctcacgggatgttgggatgttgtcctcagccagtgagacacagatacacactcacaaaccatcttcgtgaccacagtggggggttgctggtttaaagccagagacagtggaggagaaaggaagaccaaatccttattttttttgttgctgtttactgtctttctgttcaacaagctttcaatgaccccatctaggtgttaaggctacagaggtgacagtcccagttccctacctctagttcatacttcagaagtttcaatgtttctaagatatggtgttccttacaaaggcacagcatgctgggaaagaccttcaggcatcgtctgatcaaacttcatcctttttttttttttaaattgatgaagaaagcgtggcattgggaaattgagttgcttaaggccagaaaacttggaagcaatggagcccagcctcagctccgggctgtcagcccaagcccatgctgccatcccagtttgtttttcctgttacctaacagtcaargggaatcatatttcctggtttagcaagcatcttcaatccactatttgcatgtctttcttctcatctctgggagcgaaacaaaaagagtaaaccttaaaggttttcacatccttcaccctaaatgaccacttacgcacattttaagttattgtcagcgatttgtgttttaaaatacaagccttgctatgtttagctaattctcctgggtgagagacatgattgattagaaactttaacagccgttcatggagagaagtataagtctttcaggatcacgcctctcacccagcctttgttgggaatggagaattgatctgggagccacagcacttctttcttccctggcagatgaaaaaaaaaaccctcgagatcatttgcaggccagccccgctcccatgttttttctctgaagag

SEQ ID NO: 405 - DNA, 1231 bp, Homo sapiens
tcaggctccctactgctgaggtgcggtggtcagcctgggatgaggccctgggtctgtcttcacagactaaagatagtgccttgacctgagcacagcactcaggctccgtctcaggtggccacagtaactttgcatagatccagtcttatcatctcgtgtcatctcctatgaagccaactatggcatgctggcagagctcagcgtgcatgcggtgactcttcgttggcctctgtggaatttgcaccgcaggacattcccagccccagacttactgcgactggtctcactaacgcacaagtagcccctgccggctttgctcacgggatgttgggatgttgtcctcagccagtgagacacagatacacactcacaaaccatcttcgtgaccacagtggggggttgctggtttaaagccagagacagtggaggagaaaggaagaccaaatccttattttttttgttgctgtttactgtctttctgttcaacaagctttcaatgaccccatctaggtgttaaggctacagaggtgacagtcccagttccctacctctagttcatacttcagaagtttcaatgtttctaagatatggtgttccttacaaaggcacagcatgctgggaaagaccttcaggcatcgtctgatcaaacttcatcctttttttttttttaaattgatgaagaaagcgtggcattgggaaattgagttgcttaaggccagaaaacttggaagcaatggagcccagcctcagctccgggctgtcagcccaagcccatgctgccatcccagtttgtttttcctgttacctaacagtcaaggggaatcatatttcctggtytagcaagcatcttcaatccactatttgcatgtctttcttctcatctctgggagcgaaacaaaaagagtaaaccttaaaggttttcacatccttcaccctaaatgaccacttacgcacattttaagttattgtcagcgatttgtgttttaaaatacaagccttgctatgtttagctaattctcctgggtgagagacatgattgattagaaactttaacagccgttcatggagagaagtataagtctttcaggatcacgcctctcacccagcctttgttgggaatggagaattgatctgggagccacagcacttctttcttccctggcagatgaaaaaaaaaaccctcgagatcatttgcaggccagccccgctcccatgttttttctctgaagag

SEQ ID NO: 406 - DNA, 1165 bp, Homo sapiens
tgcatctgtagtcttagctacttgggaggctgagttgagaggattgtttgagcccgggaagtggaggctgcagtgagacaagattgtgccgtgcactccagcatgggcaacagagggagaccccatctcaaaaaaaaaaaaaaaaaaaaaaattttttttttttaaaagagttagcctttcttcttaagtatttatattagtatgaactcatgggtatttattttatcctgttactctcattatttatcttgctgttcaaattgtctcatcctcttttaaaatatttcaacccatctgtttcctgttaagctgcttttcctaatgagatgtggcccacggctaagtcactccctcagtgtcaccccccagccatagcacgtcagacactccctggtatgcagggcaggtggttgggagacctctgagcctttgtgtgagcaactaggtttcccgtttccctgaaactcactgaggcatcttcccaacaagggctgggctttttcctggaatgggcaggttgcagtcggaggagtcagtcctaattccacaggcaaagagttccaggaagggctgagcctggccaggtagccccagatcccccacccccacccctgctctccatcaggcatcctccctccagcaccaccaagctcatgctctgattgccccttcttgagtctggcagctcttgacagcctggtttttgatgggagagccctgggttggccctgcctcatcctctgtctcactgtttctttttcttttatttctctgtcttccttgggcaaaattcaccccattctggcttaactcatgagagagtcagtccagtccttctctagggccttaaaactttgaattcctaggctacaaacttgccctccaatttagaagcctggttagagcccacatttactcacttttatttgctgttatgccagaacctcagatcttcctaacatgctccattgacggcacaaaaggaaggaaatgatgctcctctcacctcttcyacttcctctttctgtgctgtccccagcctggcccccgctggccactcagactgtgttatctcctcttttgtacatctgcccaaggcacccttcagctaaggggttatgtataatcctttccccaactgccagtcccttgccttgctacaaa

SEQ ID NO: 407 - DNA, 1683 bp, Homo sapiens
caggctctagaacacatcggtaaaaccctatcaattattacaagttggaattcttccatccttcttggtaaatagcactcccctgagacccccacagtgcccccaccccctcgaccttcttctgatctggcaaaaaattggtcaatgcttgtgacagggagaccctctagggacttttccgagattctaactagtcagcaaacaggtcacaccactgaaatttgaatatcatgtacaatatgctttcttgttgttctttttaactctttccctgcattcctttggattgtttgaattttctttaataggagggtggtactagaattacagatgtatcaataaataccagcctactagtaccttttttcctgggttctgtctcccactggggtaccacattctgacaagccattccagctagagatctgacagcaactgtatttctctctaccagaatcatctttcaaatgctgtcagtagagatggattcaccaggaaactgcagggcctcttgcttgcatgggctccttacaaggccgtggtgggagaggctttaacaatgtttgacatggtaatatgtttttacagactttgcaaaagtaagcgattttaagtgcaaatgcagtcatgcattgcttaatgacagggatgtgttctgagaaatgcatccttatgtgactttgttgttgtgcaaacgtcatcaggtgtacttacacagaactagatggtagagcctactatatgcctaggctgcctggtatagcctatcgcttctaggctacaagccattgcagcgtgttacagtacagaatatgctaggcaattgtaacaccatggcaagtacttgtctatctaaacatgcctaaccacagaaaaggtacgggaaaaatatggtatgataatctgaagggaccatcatggtccagctcatctggcttctgtcctggggaggcaggtggaggcagaacccccgctgctagccagggaagagctgctagtccttcctgcccctgccgcctgcctgtcatgtgcccctgcctgaccatcakggtcccacatggtctgtcattgactgaaatgtcctcgtgcagcacttgactgtagttaagatggctggctctttccactctgatttcccctccatctcattgctccttgtgcccctcatgttggagtggtcataggcatttttaggatctggcttggcatgagacagctttatgtagtttacagtcacttctgtgtgtggttgcattactgctagtcttccagcgtaggaatggcttccaggaatattgttctgattcagccagcagggtcggagatgatatctaaataataaacatttccccaacacctgctttcagaaatatgtcagcagtggaggagaaacaagtatggagccagaaactagtctatggaaaactctctcccccatcatatgtatagagttttaagcatgtgagcctgttcacatccatgcctatttaaaatggaagttctctcctgtagagaacatactcaatagtgcaatatagacacttataacacacacatataaatatgtcttttttgagcaatttcagtaaatgtattttgttagagctcctgtgtagtaaggcagaactagaggagtattgcaaatagaagtatgcttttgtgtgaaatgagatgtcttatgca

SEQ ID NO: 408 - DNA, 505 bp, Homo sapiens
tgggaggcggaggttgcggtgagccaagatcgtgccagcctgggcaacaatagcaaaactctgtatcacaaaacaaaaaacaaaaaacaaaaamaaaaacactaaataattcatttagtatgggagagtgtgaggaaacagaaaattaaaaaaaaaatagaccagcaataatgtcactttttcatgaatttgttagttctttctgagctccacttacagttactttcccattcttccctgcacaccgtcaacacataaggactcaaattaagatgatgtatatgtttacactccaaaatttttaaagaaaaaggagagagagaaaaaaaagtaaaagaaaagaaacccaaaagggaaaatagctaaggtgaactggtgagtttctactcagatttcttattattgagtatgatgtattttgttttcttaacttatgtataatgaaaatggaagagaagaattataaatcatagttcatttttatgattagtacataaataaaatt

SEQ ID NO: 409 - DNA, 571 bp, Homo sapiens
tgccccctgcctctgcgagtacatgtttccctcctgttttttgtttattcatccagtttctattggcagataggagaaactacacacctacattyggatcttcttcatttcttaccccaaaggaagctttctgcatgcattgccctgcaccttattttttcccactgaacaatgttacctggagatccctccacactgacaacacagcaatctctgtggttctctgttggcaagggctgtgccatagttatttccggcatttgagtttttaaacccagacacctacaaataccatgccgattccgcagccagggctttctttgtatttgtttgtggaagccaaaggtgcaaggttcttccctccttttggatggccctactgtattccagttcctttccatggtctaatatgtgcctttcctgctacccatgtggccagcattactattcactttttgcatgggagaaaactgaggaaatgagaaatcagtgaagttggggatttgaacgcaggtcaatctgggcttaaaatccttcctcctcatatgtcacacttctggggaagatatag

SEQ ID NO: 410 - DNA, 593 bp, Homo sapiens
ggcttcacatgctgagggtgtgctataacccagccagtgtgctatgcagtgtacacgccaccatctcatttcatccttagcgtgtccttctgaggcaaatattcttcttacaaaccaaggccagcccaagtcacactgctagaaagtgacagagatgggcttcwaagacctgtctgcccaaatccaaacccacacccttgcccttgcagtctttgatctcccaaaggacaacattgctgtcaaccttcctgttgtccctctgcagcctggcgtccagtccgtgctccctgcctgtttatctccttaagatatgccaccactacccctgtagacaagcacagagcaggccccgggcctccgcctgcttacctgctgacagccccaccctgtggaattaacctcctttggccagcgcatggccctccgggctcctagtggactctcagcccagactccctgatcctgtactcatggagctcacaacctacaggtagaggccgacactaaacagagacatatcatcacaaactgccacttgtgctatgagagcagctagcagggaggtctgttgtgacccaaaggtgagggagggc

SEQ ID NO: 411 - DNA, 1196 bp, Homo sapiens
gctttatgtctagaatagtttctaaagcaataatttaaaatgtacacagccattgagctagaaggatgtccaccacaagattgtttataatagtgaaaaaaaaggaaacaacttcaatgtccagcaatgcaggatctgttgagagaaatatttaggacattcacatggagccattaaaaagtaaccactgatcagttttagttgagcttctttccggagcaaacccaggactctaatgcaagaagattcaaatttggagagatgagtggggaggagtggggaagtgagacaaggaaggagggcagccaataatgggcatgttttcaagccagctaccacagtggaactggagcctgatccctctggggaagcacagggatcaatgtaaaacacttgcctcaaagttatctcacccgagaggtgagggagctggggcttctgtacaccaatcccttcaatcattggttgagggctgctggggctggaacacagacaacaccgggtcccctgcatgctcagcctgccacagggcagccccacaggtccctgcagcaagagaaaccagacacaggcacaaagcacaggtgccagcaggtggaattgggaccagaagagcactgagtggcagggcaaaggggatgtgggtcgggcactgccgctgtctgctgcaatctgtttcctacaccgcagccctccacagccaggctaaatgaagacaaacttgtttctttacttcaggacacctcttgacatactaatgggcactggtgaatttccaagagcatttcagtgaatctattcgactgtacattgaatgtattcaaccgtacacctgccctgattttttatctccctaggtggacctatcagggtctcccagcacacagcgctgtcctgagcacagtttgggaaatgctgtcagagctgccttcatattagcacagaaaagtggagaaggcagattcttacggcagttgatccaaggtgctcccattttcttaatgcgcataaaacgagagtaactagccatttctcatctcggctttgacccttgagaagctttctcacccaaggaggcacatatgagagcactgaaaggcagtgttgcaatcacacacgtgcgcgcgcgcrcacacacacacacacacacacacacacacacagtggatgcaatcaaaaagtctatcacaagggaa

SEQ ID NO: 412 - DNA, 1189 bp, Homo sapiens
ggagtaattcattgaacataaacgtactgaacacctactataagccaagcactgtggcaagttgtagacatcccattaatttttaatttcttaaattattaatgcagcaatgctgctagagttataaacatgaatactgtaagaaacaagaacacagatcgatttgaagtcctagtggtcaccagtgattcttggaattccctttaaccatcagctcattggttaccctcacttcgtttttgtcactgaaactcctaatgagagatctaggaggcttctctgctatgggattaacactgaaaggacccttgaataattagaatgstttctggtacaagatagactcaaaatggactagtcctctgtagaattcctctacaataaatactattcttgagatctattagagaatttgtaatgtcataatgtcagggttttattttggctacaaattaaaaatgtacccaaaatatttaactaaactgacatcatagcagtagtgtcgtcaaagaccacgctgttcttcccatttgttcttacgattagttttgcactgactagcaggatcaactgtggcagtgatttgccttggaaagaattagcagaatcctaaatggaaaggctaaaattcttaatctttgaaaattttgaaaacactgaataaataaattttatatatgtaatttctatcaacaaaattgtaagtattagaaatacttcttaatttatggataatccatcaaaagagattaaccaacggcagtgctgtttttcttacagcttctaatgagaagactagaagtaagtttagcacctctgaaggacaaataacacaatagggaatctgctctgcaacagcatgtgaaatgttacctgggtggcatcttaatacgtgagacagtgggtatggattagactgagctcagggacctcaaagtaaaagctttcctgggaaggggaacatcacacaccagggcctgttgtggggtggggtggcagggggagggatagcattaggagatatacctaatgttaaatgacgagttaatgggtgcagcacaccaacatggcacatgtatacatatgtaactaacctgcacgttgtgcacatgtaccctaaaacttaaagtataaaaaaaaaaaaaaaaaaaagctttcctggaaattgttgctgctccccccttgtggt

SEQ ID NO: 413 - DNA, 1189 bp, Homo sapiens
ggagtaattcattgaacataaacgtactgaacacctactataagccaagcactgtggcaagttgtagacatcccattaatttttaatttcttaaattattaatgcagcaatgctgctagagttataaacatgaatactgtaagaaacaagaacacagatcgatttgaagtcctagtggtcaccagtgattcttggaattccctttaaccatcagctcattggttaccctcacttcgtttttgtcactgaaactcctaatgagagatctaggaggcttctctgctatgggattaacactgaaaggacccttgaataattagaatggtttctggtacaagatagactcaaaatggactagtcctctgtagaattcctctacaataaatactattyttgagatctattagagaatttgtaatgtcataatgtcagggttttattttggctacaaattaaaaatgtacccaaaatatttaactaaactgacatcatagcagtagtgtcgtcaaagaccacgctgttcttcccatttgttcttacgattagttttgcactgactagcaggatcaactgtggcagtgatttgccttggaaagaattagcagaatcctaaatggaaaggctaaaattcttaatctttgaaaattttgaaaacactgaataaataaattttatatatgtaatttctatcaacaaaattgtaagtattagaaatacttcttaatttatggataatccatcaaaagagattaaccaacggcagtgctgtttttcttacagcttctaatgagaagactagaagtaagtttagcacctctgaaggacaaataacacaatagggaatctgctctgcaacagcatgtgaaatgttacctgggtggcatcttaatacgtgagacagtgggtatggattagactgagctcagggacctcaaagtaaaagctttcctgggaaggggaacatcacacaccagggcctgttgtggggtggggtggcagggggagggatagcattaggagatatacctaatgttaaatgacgagttaatgggtgcagcacaccaacatggcacatgtatacatatgtaactaacctgcacgttgtgcacatgtaccctaaaacttaaagtataaaaaaaaaaaaaaaaaaaagctttcctggaaattgttgctgctccccccttgtggt

SEQ ID NO: 414 - DNA, 1189 bp, Homo sapiens
ggagtaattcattgaacataaacgtactgaacacctactataagccaagcactgtggcaagttgtagacatcccattaatttttaatttcttaaattattaatgcagcaatgctgctagagttataaacatgaatactgtaagaaacaagaacacagatcgatttgaagtcctagtggtcaccagtgattcttggaattccctttaaccatcagctcattggttaccctcacttcgtttttgtcactgaaactcctaatgagagatctaggaggcttctctgctatgggattaacactgaaaggacccttgaataattagaatggtttctggtacaagatagactcaaaatggactagtcctctgtagaattcctctacaataaatactattcttgagatctattagagaatttgtaatgtcataatgtcagggttttattttggctacaaattaaaaatgtacccaaaatatttaactaaactgacatcatagcagtagtgtcgtcaaagaccacgctgttcttcccatttgttcttacgattagttttgcactgactagcaggatcaactgtggcagtgatttgccttggaaagaattagcagaatcctaaatggaarggctaaaattcttaatctttgaaaattttgaaaacactgaataaataaattttatatatgtaatttctatcaacaaaattgtaagtattagaaatacttcttaatttatggataatccatcaaaagagattaaccaacggcagtgctgtttttcttacagcttctaatgagaagactagaagtaagtttagcacctctgaaggacaaataacacaatagggaatctgctctgcaacagcatgtgaaatgttacctgggtggcatcttaatacgtgagacagtgggtatggattagactgagctcagggacctcaaagtaaaagctttcctgggaaggggaacatcacacaccagggcctgttgtggggtggggtggcagggggagggatagcattaggagatatacctaatgttaaatgacgagttaatgggtgcagcacaccaacatggcacatgtatacatatgtaactaacctgcacgttgtgcacatgtaccctaaaacttaaagtataaaaaaaaaaaaaaaaaaaagctttcctggaaattgttgctgctccccccttgtggt

SEQ ID NO: 415 - DNA, 1189 bp, Homo sapiens
ggagtaattcattgaacataaacgtactgaacacctactataagccaagcactgtggcaagttgtagacatcccattaatttttaatttcttaaattattaatgcagcaatgctgctagagttataaacatgaatactgtaagaaacaagaacacagatcgatttgaagtcctagtggtcaccagtgattcttggaattccctttaaccatcagctcattggttaccctcacttcgtttttgtcactgaaactcctaatgagagatctaggaggcttctctgctatgggattaacactgaaaggacccttgaataattagaatggtttctggtacaagatagactcaaaatggactagtcctctgtagaattcctctacaataaatactattcttgagatctattagagaatttgtaatgtcataatgtcagggttttattttggctacaaattaaaaatgtacccaaaatatttaactaaactgacatcatagcagtagtgtcgtcaaagaccacgctgttcttcccatttgttcttacgattagttttgcactgactagcaggatcaactgtggcagtgatttgccttggaaagaattagcagaatcctaaatggaaaggctaaaattcttaatctttgaaaattttgaaaacactgaataaataaattttatatatgtaatttctatcaacaaaattgtaagtattagaaatacttcttaatttatggataatccatcaaaagagattaaccaacggcagtgctgtttttcttacagcttctaatgagaagactagaagtaagtttagcacctctgaaggacaaataacacaatagggaatctgctctgcaacagcatgtgaaatgttacctgggtggcatcttaatacgtgagacagkgggtatggattagactgagctcagggacctcaaagtaaaagctttcctgggaaggggaacatcacacaccagggcctgttgtggggtggggtggcagggggagggatagcattaggagatatacctaatgttaaatgacgagttaatgggtgcagcacaccaacatggcacatgtatacatatgtaactaacctgcacgttgtgcacatgtaccctaaaacttaaagtataaaaaaaaaaaaaaaaaaaagctttcctggaaattgttgctgctccccccttgtggt

SEQ ID NO: 416 - DNA, 604 bp, Homo sapiens
cggagataggctacttagaaaactcactcayagtatccaatgtttttagaaagtgtcatcacaaataattcctgagtttgacgtactaaaaaatagttgacaccttccaatgaagtcactacaggcatagcgcttttaagcagcttgtctggagcctcctcgagtgccttagagggtggatttgataatatggcctccttaattacggatcacaggtatgtgctcagagtccaataagtttttgcaagctttatcggtctaaaccctcctccatccgtattctcccgtttagaaaaacaagactgcaggagtaaccgtggggttttttctcttaacaaaacccctgccccacccacctcacacacaataaccttccattccagaactaaagctactgtcagagaaggacggcgggcggcagggccctggctggtgacccaggctaccggattccggacctcagaactgaggtgaactctctcacccggtcctagagtagtgtccaatgtccccgaaaggtactacgttctccaccaccgaaacccgagctctcgagccggcatggggggctctccctccggcagctgacttcgatcccgggtct

SEQ ID NO: 417 - DNA, 654 bp, Homo sapiens
tcctctaatcaaacctgcagcacccccaccccccagtctgattcctgtttcgttctacatgacctgttttcttcctgctggaagactttggaatctttcctttatgccaggtgctctggaatctccccaccacttctcctgctatgggtcttgccccatttattgtattgggtacttgataggcacttaaatccttaggttctggaatctgacagcctcactttggggctctgttagggagatgtggccgaggaggagcccgaggggcagctcttgccccttcctggggaaaggtgcacagaaggctgatgaggagacctgtggctttctcaccaattggcccatatgagttcttgccactgagtcactctcattatctccacttttctagggaggaggcctcgccaccatgcccagagcagcacagtgagtcagagatgaagctcttgtcccacctgccccaaccctcgagccctgcttcccaggtccgcrttcccaggcagcctgccacagccagtgccagcgagagagtggatcaggcttcaggatagcccagcactgaggacatctaaaacagtcttcatttatttatttattgttcatagtgtccaaaagttggaattaaagtgaatggctgaatcaattatggtgcat

SEQ ID NO: 418 - DNA, 684 bp, Homo sapiens
gcattttttattcaaaagataatgacaattatacactaagtgtacctattcggatwgttaaaattgcaaaaaggtctacttgaatgggagaacaacatggaaggatcctaggctggcgtacagcagttctaactcggcaggaacagaattgaggaggcacatggcctcctcccatgtcccagacatcctatgcttcttcccagatcccactaaggcctccaccaagacctccaaattacccccacagctcccagcctaaacttgtgtcccttagagtagccaagctcagccaaacagtcctgctgatctaagccacacaagaagtgcatgactgataagctcatgaaaactgttgcttattaatagcaggactctctaattggcttaattttagacaacagggcagtataatggaaactttcagaaagcagagagaggattagggacagggtggggaggacccaggcagagtaatctcacccaggctaactttagggcagcaccctgagctatttctgcttcaaggttctaagaggaatcaggcaacctgtgtttggattttctttgtgtggcaacagtcaccttggcaatgacagttgagggctgaggattagggaagggggtaatgttgggctggtgaaacaggctcagtgagaagcatttattgctacctgtactcagaaa

SEQ ID NO: 419 - DNA, 1293 bp, Homo sapiens
acataattttggtaggtatttccaaatgccactttgcattcccaccagcaaagtatgagagtgttgtttccccacaaagtacgttatcaaacttttggagtttattctgcctgtctgtctgtctgcctatctatctatccatccatccatctattgtatatctacttttgtcttttataaatgtagtatttcattgtgtggtctattttacttgcttttggtatattttttggaatttaggaagctatattttcatgtcttacagcaaacacacttgagattaaagtgcacaaaatgtccccacatctaaatttggagtggaagggaagaaaccacttttagcctcaggtttcagctgagatatccaacacagctttccagaaaccttgcttactgggagtcaaatggtgttgcttgcaaagattaataaaagcgatacttttttttctcatttagctatttagccagagatttttgtttaaattatcttaatgaggagtaggggtttgtggtgttctaaatctctaatatctaggaggaatcacctttccagggctgctgattttggtgtcatcagttttagattattaatgcctagagatcagacattagtctggcattattaatgccatagagatcagtgtagtgacatgcacatcatgcccaagtggacattgcttctcctatatgtggacattgtgtttatagtatttatagaggaagatgaggggtaaggtgatcttcttcatagaactgtctcatgccctggtatattgaatggctaccacagtgcatgccactgctgatggtcaaaacaggtttctgtatttttgcatctgtgtcatagatgcctgttctcctccccaggtcagagcacagccctggtatagtgctgccgtgagggctgaagtcaactatttagaggctgcagaaggcacagggattttctataaataacagtgaggtcagacctcataactgattcagtctcagatagccggttcacaagttcttgaaatttctccttcactttcaatcacaggaatatcttgacaggaagatctaaacagaacatgagaagtccatgatctttattgtccttcttgttaacctgatatatagctcatggtacagtagcaatcacttgtaaaaatgatggtgagacattaagcacttgctaaaaatgttcctaagatagggtagtaacatgaagtttataatcgtaccagctcagwttttgaactggaccaaagccatagcaatgtttatatggagggaaactaactttcaatg

SEQ ID NO: 420 - DNA, 402 bp, Homo sapiens
tgaggcaggataatcacttggacccaggaggcggaggttgcagtgaactgagccgagatctcaccactgcactccagcctgggtgacagaatgagactctgtctcaaaaagaaaaaaaaaaaaaagaaacaagactgatatcattccagtcttyacgaagctggctggctaatgcctacctttcagagtatggtcccggactagcagcactggcctcttcttggcacgtgtcaaaatgcagatttgtgggtcccaccttagaccaactgaatcataatctcacccaggggttcacattcaggtttcagaagcactgacctagtacatctaatttctaaaggtttgccacgaagaagggcggtctggaatttcaatttcacccatgacctacagacagaatca

SEQ ID NO: 421 - DNA, 637 bp, Homo sapiens
tttgaagtcataaattttgacaagaattgatactatggcactgtcataactttacaaaagatgacctgaactaacatgattttatgcttttaccagtggaactccctgaaatatattcagataatttgttattaaagcaaaactaagtttattgaaaccctgtgccaagaaagtacaccattttgacatacttttgcagtgtttcagcagggaagagtgagaggaagatttttcatgtttgtggagaatggcttaagagagttaaatgagtctttcaaagtgagtagctgattgaaattgagctaaactcagagcataatagtttagatagtctaagaaattgaaaaaraagttgatgccaagcatacaagaaataacaccaccaaaaaatagacctaaatacagacaaaattagattaaaaacaagaatatgttcaatgttaataaaagcaaaaggaacatagacatagttatggaggagttttgttttgttttaataagataaaaatatggttagttttatagcaatacacctggaaatctggatcaattctgtccactatagtcattactagtgacatgtagatattgaacacttgaaatatggtggatttgaattgatttatgctatatgtaa

SEQ ID NO: 422 - DNA, 362 bp, Homo sapiens
atgtcataatttagtgtgcattacttgagatatgcctccatgctcataataatatggagggatttttctcttaacaaaaatggttcatgtaatacccatttttctacaactgctcttttctrtatcaagtgcatattttcagatcaggatatattaatatgactcattcatactaatagctacaacatattcccaattaaaattgtaccttaacttccgcaacgatgtaccattcatctatttgcagatacctagattatgtccaggtttatgccattataaccgatggtaaaataaatcctattgtatatgttttatgttttatgttttattttataaaaattcctaaaagtgaagagggt

SEQ ID NO: 423 - DNA, 642 bp, Homo sapiens
ttgaataattaccaaaaccaacaacaaagaaagttttgaaactgaaaattgaccatagcttaacagtatattgcaatgaccaaactagggagttaatagagttgggatatttgtcctggcccaaatctcaagttgaattgtaactccccagtgttggaggtggggcctggtggtagttgtatgggtcatggggatggatccctcatggcttggtgctgttctcatgatagatatggtcgtttaaaaatgtatggtacctscctgaccccttgctcctgctttcaccatgcgatgtgcttgctcctccattcgtcttttgccatgattggaagctccatgaggcctccccagaagcagatgccagcaccatgcttcctgtactgcctgcagaatcatgagctgattaaacctcctttctttataaattacccagtctcaggtatttctttatagcaatgtaagaacagcctaatacaggacttttattgtgaacttttgtacagcaaaaggataatttgcaatcctgaaaaattccttctactttacttaccattgatcagtctttcaatggtatagggctgacatttggcttctttattttatatggattatgagcaaggaggagtcaaagaaagacaatga

SEQ ID NO: 424 - DNA, 651 bp, Homo sapiens
aaagctctcctgtctctttttataacttcattaatcttataaggactccaacttcatatctaatcacctcccaaaggccctttctccacataccactacattaagaataacagtttcaacatatgaattttgggaagacacaagcatgcaattcataacgatggggtttcttgagggaaaaaaatcaacatcaaatagtagctcactggaagccatagattagaacttcttctctatctctcatagtgccagtgctcagaaatcaccatttggttaactgatttcccgagtataataatgtagtcacaatccctttgagcrgacacatattactcgtgggcaagggtatagggaaataaatcaccttgtactctgatgctgaggatgttagggaaataccacactccagtgtttaggagccaggacccagaagccagcgttaacacctactagttttgcgacctgagtctctgaggcgacctcagcttcctcatccataaaacagggatgatggtaatgatagcagcatctattgcataccattattatgaggatgcaaaattcttagaatagtgcctgtcctatagtaagccctatggaaatgtttgttacatcaatgttcataccaccttccaggatgggatttgataa

SEQ ID NO: 425 - DNA, 658 bp, Homo sapiens
ggtatggcatgtcagcgtagttggggtatagggtacaaaatgtggcaagaggtgaggccagagagggtctggaccctgtagatggggcgggatgagaatgggtgagtctggatgggcagccacccacggcgatctcagcctgggctaagtgaccagtgggcagccccaaagcccgttaaacagaaggccaggtgtggcggctcatgcctgtaatcccagcactttaggaggccaaggcaggcagatcacttgaggtcaggcttttgagaccagcttggccaacgtggtgaaacctcatctctactaaagataccgaagattacctaggtgtggtggcaggcgcctgtaatcccagctactcgggaggcttaggcgggagaattgcttgaacccgggaggcggaggttgcagtgagctgagatcacaccactgcactccagcctgggcaacagagtgagactccgtctyaaaaaaaaaaaaaaaaataaaaataaacaggcagaaggcagaactgtggccgattggatttcagggtgcaagagaagtcatcatcccacagacgccccccaagctggggctcatgtccctggcacagagagagggcccacacccataagaggaggctctagaagatcccacaagaggggcccagagggca

SEQ ID NO: 426 - DNA, 701 bp, Homo sapiens
cagtgaaatttctcaggagcaaaaaccaaggctaaaatataatggtataacatcttcaaactgtgagaaaaaaattattgttaacctggaattctatacccagctgaagtatgattcatatgtaaggacaaaatacttttcagattaaaacaaattaggagtttttatttatgtgcagggtctcaaagaatgaactgtcagactatttccttcaagtaataggaaataaaacctgaaagaaaaaaataagtgtaagggacaaatataaaaaaaaattggcaaatagawggacaaatgtaaatgtgtgtgtatgttgtgtgtgtatgtgttgtgtgtgtgtgtgcatgtgtctaacacatcataggaaaactgccaaacattggaaacaaggagaaaaatattaaaagcaataaagagtgcattgcatataagagaatgtatataagatataatattgcatatgtgtactacatattgtttatatatacctacatacatatgtagatacatataaacacacatgtattatgtggtaataatgaaatattattagcttttaacaagttagctagaactgaaacactggtgaacaataacataaagtatggtgggaataggccagagataaagttttctaaattttttaaccatttaagttgaagatgaaaatacttattaattttagactccatcatcaagta

SEQ ID NO: 427 - DNA, 719 bp, Homo sapiens
tggggttacaggcatgtgccaccatgcctggctaatttttgcatttttattgtcgatcgattgattgatttttgagacagagtctggctctgtcacccaggctgtcgggcagtggtgcgatcttggctcactgcaacctccacctcccacctcagcctcctgaatacctgtctacaggcatgcacaaccacacctggctaactttgtatttttgtacagatgaggtttcaccatgttgcccaggctggtctcggacccctgagctcaagtactcctcaaacctgggcctcctaaactgctgtgattaatggtgtgagccaccgtgccctactcttacttgtgtgtttctgctcaaattttattaaggagcttttatggcctcgcctgtggtctgtcctggaggatgtttgtgtgtgtgacaatgtatattcttcaacatcttcgattccattttgggtgcctccatggggactgtgtgtccctgtactggaacscaagtgaagacttggctcagagtccatttgctgttctctagaaatccagcctaatcctcttgtgcaaatataatatatatctagtaggcattgctttttctttctggagacaaaacacaggaggattgccccttgatgaacaggactaacctgctgattctttgaagcaaggaactggaaatggtccttttagggatttatgctctggattccagaaaacacgca

SEQ ID NO: 428 - DNA, 536 bp, Homo sapiens
acatctgctacccactctgtgaattacccctcccaatgcaatgacttctcccactgaaactgatcttcttgtcttcccactgctgatgtaactacatttctgcatttttcaagttaaccaaccaggttcagcttagactgtgtggtacaactctagccaatggaggcagacacagtaacagtgacaagcagcgttaagagataataaaaacccctgctctgttttgttctttgtgctctttccattgctccacatgggagaagcacccttctgcagaagaaaatttgccttgctgagagatcctttgtctcagtgctggttcttctttgtagcactaagcatttgttttcaacaatgatgctatctataagagcaattaggagaagttacagcccttgtgaccactggctacatggcttctgggcagtaagcaattatgggatgagcttagaaacaatggctggttaacttttaactatgcctgcaacttttactctgtggtcctatgttaaytgttatataggtggtttcagcca

SEQ ID NO: 429 - DNA, 1238 bp, Homo sapiens
atgtaatcacagcactttgggagatgaggtgggaggatcatttgagaccagcctgaccaacatggtgaaaccatgtctttactaaaaatagtaaaaattagctgggcgtggtggtgaacacctgtaatctcagctacccaggaggatgaggtaggagaatcrcttgaacctgggaggcagagtttgcagtgagccaagatcgtgacactgcactccagcctgggcgacagagtgagactgtctcaaaaacaaacaaacaaacaaacaaaaaacaacaaaaaaagggaaagttaatggattcaaaaatacagttaaagagaatgtacaagattcaatattcagtagcacaacagggtgactatagttagcaataatttattgcatattttaaaataactagaacagtggaattggaatgttcctaacacaaagaaatgataaaggcttgaggtggtgtttgctccgattgctctaagttgatcattacacaatgtgtgcctgtatcaaaacatcacatgtactttataaacatatgctactattatgtacccataataattaaaaataaatttaataaagattacactgatcctctcaaaaacaaaagaagaaaaagaagaagtagaatgcagaatgcaagagagaggaatgaagtcataattttcagcacagggatgaatggggactcatggcatctactgacttctaaattagtctattgacttttaaattagtaccgttttattttatggtcacagaggataccacattttcatcttttaccacattttctttatcccattcaacactggtggacacccaacttgattccatgtctttgttattgtgaattgtgctgcaatgaacatatgagtgtatgtgtcttttcggtagaataatttagtttccttcgggtagatacccagtaatgggattgctgggtccaatggttgttccatttttacttcttcgaggaatctccaaactgctttccacagtgactgaactaatttacgtccccacaatggtatataagtgttcccttttctctgcagcttcaccagcatctgttgtttttttgactttttaataatagccattctgactgaacatcaacatttataaagactggcacatcagagtctcagccaggctccaaatgtaatttctggcatcaaaaaagaagtactgatggaaataatctgtagtgtgaatgatcagtatccacatctgatgca

SEQ ID NO: 430 - DNA, 1238 bp, Homo sapiens
atgtaatcacagcactttgggagatgaggtgggaggatcatttgagaccagcctgaccaacatggtgaaaccatgtctttactaaaaatagtaaaaattagctgggcgtggtggtgaacacctgtaatctcagctacccaggaggatgaggtaggagaatcgcttgaacctgggaggcagagtttgcagtgagccaagatcgtgacactgcactccagcctgggcgacagagtgagactgtctcaaaaacaaacaaacaaacaaacaaaaaacaacaaaaaaagggaaagttaatggattcaaaaatacagttaaagagaatgtacaagattcaatattcagtagcacaacagggtgactatagttagcaataatttattgcatattttaaaataactagaacagtggaattggaatgttcctaacacaaagaaatgataaaggcttgaggtggtgtttgctccgattgctctaagttgatcattacacaatgtgtgcctgtatcaaaacatcacatgtactttataaacatatgctactattatgtacccataataattaaaaataaatttaataaagattacactgatcctctcaaaaacaaaagaagaaaaagaagaagtagaatgcagaatgcaagagagaggaatgaagtcataattttcagcacagggatgaatggggactcatggcatctactgacttctaaattagtctattgacttttaaattagtaccgttttattttatggtcacagaggataccacattttcatcttttaccacattttctttatcccattcaacactggtggacacccaacttgattccatgtctttgttattgtgaattgtgctgcaatgaacatatgagtgtatgtgtcttttsggtagaataatttagtttccttcgggtagatacccagtaatgggattgctgggtccaatggttgttccatttttacttcttcgaggaatctccaaactgctttccacagtgactgaactaatttacgtccccacaatggtatataagtgttcccttttctctgcagcttcaccagcatctgttgtttttttgactttttaataatagccattctgactgaacatcaacatttataaagactggcacatcagagtctcagccaggctccaaatgtaatttctggcatcaaaaaagaagtactgatggaaataatctgtagtgtgaatgatcagtatccacatctgatgca

SEQ ID NO: 431 - DNA, 1118 bp, Homo sapiens
gcatatctgcaaattatgccttttaataatatttagtgccrggtgtggtggctcacacctgtaatcccagcactttgggaggcttagacgggtggatcacctgaggtcaggagttcgagaccagcctgaccaacatggtgaaaccccatcttaactaaagaatacaaaaataagccaggcatggtggcgggtgcccataatcccagctacttgggaggctgaggcaggagaatcatttgaactcgggaggcggaggttgcagtgagttgagatcgtgccattttactccagcctgggtgacagagcaagactctgtctcaaaataataataataataataatatttaggtcttctatgttcttatttttttctcactcccttaatgcagtgaaggaaagaagcctgcaaacacagagaatcagaagcaagagcatacagagagggtcctcatggtattaatctcaataccatttccaccattcttcattactgccatcgtttttacatggcaattattttctatttggtgcttagcgatttcaaaatggatttctgtcacttacaataagagcattgattatgacaatattccagttcactaatattttccctagctttagtacttgctaatctgtattttctctttccttcgataatttgttcttttccttttgaattaaatataatttcgcaaagcgcctcaaattacctgtgaaaggaagcaagctataaacctgaacataatatcaaataactccaaatataatactttttcccctctgctgcagctgcctgtcatggtagtctgtgatatatagaaaaggtaactcagtttctgtagtctttgattcaacattcaaaggaggctgtgatacattttttaaaggtttacttttaaaatggttaaaataagcagtttccaatggagtaaatactaagcctcagttatctggaaaatctacttatgtggaaaagtacatgctgggcgtggtggcaggtgcctatagtcccagctactccagaggcaggagaatggcgtgaacctgggaggtggagcttgcagtgagccgagatcacaccgctgcactccagcctgggcaacagagtgagactctgt

SEQ ID NO: 432 - DNA, 1118 bp, Homo sapiens
gcatatctgcaaattatgccttttaataatatttagtgccaggtgtggtggctcacacctgtaatcccagcactttgggaggcttagacgggtggatcacctgaggtcaggagttcgagaccagcctgaccaacatggtgaaaccccatctyaactaaagaatacaaaaataagccaggcatggtggcgggtgcccataatcccagctacttgggaggctgaggcaggagaatcatttgaactcgggaggcggaggttgcagtgagttgagatcgtgccattttactccagcctgggtgacagagcaagactctgtctcaaaataataataataataataatatttaggtcttctatgttcttatttttttctcactcccttaatgcagtgaaggaaagaagcctgcaaacacagagaatcagaagcaagagcatacagagagggtcctcatggtattaatctcaataccatttccaccattcttcattactgccatcgtttttacatggcaattattttctatttggtgcttagcgatttcaaaatggatttctgtcacttacaataagagcattgattatgacaatattccagttcactaatattttccctagctttagtacttgctaatctgtattttctctttccttcgataatttgttcttttccttttgaattaaatataatttcgcaaagcgcctcaaattacctgtgaaaggaagcaagctataaacctgaacataatatcaaataactccaaatataatactttttcccctctgctgcagctgcctgtcatggtagtctgtgatatatagaaaaggtaactcagtttctgtagtctttgattcaacattcaaaggaggctgtgatacattttttaaaggtttacttttaaaatggttaaaataagcagtttccaatggagtaaatactaagcctcagttatctggaaaatctacttatgtggaaaagtacatgctgggcgtggtggcaggtgcctatagtcccagctactccagaggcaggagaatggcgtgaacctgggaggtggagcttgcagtgagccgagatcacaccgctgcactccagcctgggcaacagagtgagactctgt

SEQ ID NO: 433 - DNA, 1118 bp, Homo sapiens
gcatatctgcaaattatgccttttaataatatttagtgccaggtgtggtggctcacacctgtaatcccagcactttgggaggcttagacgggtggatcacctgaggtcaggagttcgagaccagcctgaccaacatggtgaaaccccatcttaactaaagaatacaaaaatwagccaggcatggtggcgggtgcccataatcccagctacttgggaggctgaggcaggagaatcatttgaactcgggaggcggaggttgcagtgagttgagatcgtgccattttactccagcctgggtgacagagcaagactctgtctcaaaataataataataataataatatttaggtcttctatgttcttatttttttctcactcccttaatgcagtgaaggaaagaagcctgcaaacacagagaatcagaagcaagagcatacagagagggtcctcatggtattaatctcaataccatttccaccattcttcattactgccatcgtttttacatggcaattattttctatttggtgcttagcgatttcaaaatggatttctgtcacttacaataagagcattgattatgacaatattccagttcactaatattttccctagctttagtacttgctaatctgtattttctctttccttcgataatttgttcttttccttttgaattaaatataatttcgcaaagcgcctcaaattacctgtgaaaggaagcaagctataaacctgaacataatatcaaataactccaaatataatactttttcccctctgctgcagctgcctgtcatggtagtctgtgatatatagaaaaggtaactcagtttctgtagtctttgattcaacattcaaaggaggctgtgatacattttttaaaggtttacttttaaaatggttaaaataagcagtttccaatggagtaaatactaagcctcagttatctggaaaatctacttatgtggaaaagtacatgctgggcgtggtggcaggtgcctatagtcccagctactccagaggcaggagaatggcgtgaacctgggaggtggagcttgcagtgagccgagatcacaccgctgcactccagcctgggcaacagagtgagactctgt

SEQ ID NO: 434 - DNA, 1288 bp, Homo sapiens
tgcataattctattagaaaaaaaggaaagattgtatttgaaagtctcccatcataaatgtgtgttagcataatatatagcacagcaaaattatttttacgcattttaatacaatttgtaaaggctcattgaccaaaatattttaactggatgctgcaattaaaataatttgcagattttgcttgatttacagctacactaatgcaaggtcattaattcttgtaattatgctcatgccattctttattgcaggagagtatacatatagcacgtgattgtatgcaattattatttaaactactataaagaacatttcaccaatgaaatactgatgttttatatttctcaaagaatagggtaacaaaaatagtttgcaacatgagataaatccagaagttgtgaatattaaatagttgtggatttaaattttgttttctatgttgcactttttatatataatgctagaaggtacagacataggtttaattagtgataatgtgtctggaattggttccttccagtgggttctcggtctcgctgacttcaagaatgaagccgcagaccctcacggtgagcgttacagttcgtaaagatgttgtgtcaggagtttgttccttcacatgttcagatgtgtccggggtttcttccttccggtggtttcatggtctccccgacttgacttcaggagtgaagccgcagacctctgcagtgagtgctacagctcataaaggtagcrcaggcctgaagagtgagcagcagcaagatttactgtgaaaagcaaaagaatgaaccttccaaagctggaaggagccccaaacaggttgccgcggctggctcccctggccagctattattcccttatttggccccacccacgtcctgctgattggtccattttacagaccgctgattggtccgtttttacagagtgctgactggtgtgtttacaaacctttagctagacacagagcgctgactggtgagtttttacagagtgctgattggtgcatttacaaagctttagctagacacagagcactgattggtgcatttacaatcctttagccagacagaaaagttctccaagtccccacgtgacccagaagcccagctggcttcgcctctcaataacattgttaaatttataacctcaactagaaaggaggatgagcatagtccagctgaagaaagagctaaaatatcgatttagaactagtctacatattttgagaaaaaaacatttcattcaatttgctgttttatctaataactaagagtgatgctaatac

SEQ ID NO: 435 - DNA, 651 bp, Homo sapiens
actagagcatagaagttaacggcctaggctctaaagctagctgtccacgttgaatccaggctctctccttgccagctgtgactttggcctcgttacttgccctctctgtacttcagtcttttcacttgtaaaatgaggacaaaatatyagtaactgcttcatacagctgctatgaacatttcacagggtaacaaatgtaaagcacctatataacccaggtacttggcaaggaagaattcagtaagttttagctgtcatcgttagtgtcaagtgacctgtcagacatgacctgaagttttaagataaatgatgtcactttacagaaataatgggctgggaatggagtttctggctcaccccttgtattggtccattcttgcattgctataacgaaatacctgaggctgggtatggtggctcaagcatgtaatcccagcactttgagaggccaaggtgggaggatcacgaggtcagcagttcgagacaagcctgaccaacatagtgaaaccccatctctactaaaaatacaaaagaattagccaggcatggtggcacacacctgtaatcccagctactcaggaggctgaggcaggagaaacacttgaaaccaggaggcggaggttgcagtgagccgagattgtgccactgcgc

SEQ ID NO: 436 - DNA, 743 bp, Homo sapiens
aatgaatgactttagttaaagcgtcaaaagagtctcactaaggagatactaattatagctgttttcacgaagctctcagaaactccagcagggggctcattcattcctgctgagctgctacagaccctaagattatgttgtctacatcagccttagaaatttcccacaagcaacactcctcccacacccgccgaagtcatacaccagttacagtgggagggcaactgtgtaggtcactacaaagggaactgttagtttcatccccacattccccacaaacatttaaaataaaatcaaggcagggtgcagtgactcacttgtaatcccagcacttygggaggctgaggcgggcagaccacttgagggcaggagtttgagaccagcctggccaacatggtgaaaccttgtctctactaaaaatacaaaaattagccaggtgtggtggcgcatgcctgtagtcccagctattcaggaggctgaggaggaaagatggcttgaacccaggaggcagaggttacagagagttgagatcgtgccactgcactccagcctgggcaacagagtgagactctgtctcaaaaataaaataaaataaaataaaataaaataaaataaaataaaataaaataaaataaaataaaataaaataaaaacaagtggggcaggtgaagctcccttaattcctccctaggaaattctataaaggcagagtacaatttagaaaatcaaactggggctctggc

SEQ ID NO: 437 - DNA, 1139 bp, Homo sapiens
ccctgctcaccaactatcttaaaaacctgcctccaaccttcaggagactgatttgagtaatatttccatcttctggtgtggctaktctagcatcagttaaactctttctttgctgcaataccatgatctcagtgaactggttttgtctgtgcagcaggcaggaagaacccatggggcaactacactctgcttacgcttgaagaccatatggggtcactctaggacagctggaggactcagacactccatactacctagatttcctcccaatttcccagcacattaagtctacactgggaagcatacttctttcatttcaaatacttttctcttgataaatatttgaggaaagtttctggtgagtaaacttttattttttaaactttattacaaactgtcatacacattatcatttctgtccattcggtctccaaagacctctactaagtacacagtgttggcctacaattttctcttcttaggataaaaatatttaaaacttcatgaaaaaaatacacgtgcaaatgtaatcgaggctcttcactaattcaaaatgagtctttccaaattaataacagttaatgaagtgtgttatctttttaaaaaggatatgatatttaatgtccttttgtactaaaaaaaagttttttaaaataacaaaattagctgagtgtggtggtgtgtttgtctagtcctagctactgagaaggctggggcaggaggaggatcacttgattccaggagttcagagttacagtgaactatgaccataccagtgtactccagtctcagtgacagagttagaccatgtatctaaataaataaataaaccatagttaagcatataacctaaaacattatatcaatagtaggcctgaggcaaaaataaattgtccgaattatcagacacagagaagtaaataataatataatttagttaggtgattttatatttccttttgagataactattacataattaagaactagaaaaatagtcattcagtgaatactatacacatttttaaaaatactgtaattgtttgtaaattgccattgggttatgatgaaaaatggaaagggcaaaagacactggggaaagttaacagaccaaggatgagatagggtaccaaaaaatg

SEQ ID NO: 438 - DNA, 644 bp, Homo sapiens
tgcatttaaaaacaccatccatcaacctccaaagttattaaagtagatcaaagcacaattctatctctagaacagcaattctcaatcctgactgcacctcagactggcctggggagctcaaaattccaattcccaggcctcccttgggtattgagatataataggtttggatggggcctgagcaacagatacttggaaacgcttggcaggtgattttggaaggaagccagggatgagaagccttgctctacactgaaatgggcatgtcctgtccatgctcagccaacttttaaggatggcgtcttccatcactgcctttctctgcatcttctctctccaaaactgcctcttgcccactcaccactctcagttgctgtggwccctctctatctgccccctcttcttactctctctgctttttattgtgaggctcaacttagctgcttaggattcttttgttaattccctatgacccagattttgtcttgcaaatgagcgcaggtagctgagcttcccaggaaagttgaatacagcctcatcttctctcttggttatggtatcttcttcctcctcattggatcttgatgatcactggacttcctgttgtgactcacccctcagtgagggaaccagatcagaggaaa

SEQ ID NO: 439 - DNA, 574 bp, Homo sapiens
gggaaatctttytttcctctttctctcttttctgaagagtttagataagactggtattacttcctcgtaatggccttggtaagagttctctagtgtagccattagggcctggaggtttctttttggaaagatttacaatttctttaattgatgtagggctatcatttttttcttgtgccaattttggtaatttgatattggcataaaattgtttatattattcctgtttgccttttaaacgtatatagatgtcataatgcccattacacatcttaatatgtgacttttcttgatcagtctgtatagagatgtatctattagatctttttaaagaaccagcattcattctgttgtctctatcgtatgcttcactgatttctgttcttacctacttctgtctacttattttgggtttaatttgcttttctttttttagcttaaggtgaaagcttatatcactgatttaaacttttcttcttttctattataagcatttaagtatataaatttccttctaagctctaaaactaatgcatttcaaaattttgatgttttggcttttgtttagttgaaa

SEQ ID NO: 440 - DNA, 1174 bp, Homo sapiens
aagaatgtaggattggcttatgaaaagacagactaatgaaacagagtagaaaaagtccagagaaagacttgaatgcacatggggatttagtgcacaatgaagactgcatgccaaatcaaagttaagatggacttttaaataaataaatagtgttggggaaatggagtggcaagttgaaagaaaagaaagccagttctgtactcatgctatgttatggggatacagaaataggcccaaatggagcaacaatttgaatgtaaagaaatgaaatgataaaagtattagaaaacaacataggtgatatttattagaatcatgggaagacctttcttgcttaaattaaaaatattttttaattttttgtagtgatggagtctcattctgttgcccaggctggtctcaaactcctgacctccagcgatcctcccactttagcccctcaaagcactggaattagaggagtgagccatggagcctggccaagacctctctttgttttttttttttgttgttgttttttgtttttttaattgagacagagtctcgctctggagtgcagtggcrcaatcccagctcactgcaacctccgcctcccagattaaagcaattcttgtgcctcagcctcccaagtagctgggattacaggcgcctgccaccatgcctagcttattttttatatttttagtagagataagatgtcactatgttggccaggctggtcttgaactcctggcctcaagtgatctgactgccttggcctctcaaagtactgggattacaggcgtgagccactatgcccggcctggccaagacctttctaactataaatcaaagtctggatagttgcttggtttgttcattgcagcactattcacaatagcaaagacatgggatcaacccaaatgcccaccaatgatagactggataaagaaaatgtggtacatatacaccatggaatactatgcagccataaaaaggaactagagcatgtcctttgcagggaaatggttggagctggaatccattatcctcagcaaactaacacaggaacagaaaaccaaatactgcttattcttgcttacagatagaagctgaacaatgaaaacacatggtcacagggaggggaacaacactgtggcctgtcatggggggatggggaaagggagagcatcag

SEQ ID NO: 441 - DNA, 1066 bp, Homo sapiens
tcttgctgtttgagaaatttgaattctaccaattacagacaattctgtaattgtctataacaacagtaggaattgcacacttaaaatcattaaaatggcaaaatttatgttatatatattagttacaccacaataaagaaaaagaacakaaaaaggaagaaaaaaataaggctttttctctgagagagaaaaagagagacacagttttggttttccccccattggaatatggagttaagtgcagaccactcaagatacacaaatttctgaccagagcacttacaagtagcaattccaaaataaataccagtacaataaaaaagatgttatattcatctttatttatttatttaaaaggaaataaataatttcctgtaaaataaaaggatgaaagcagcttgatggcagcagatgtaaagaaggattgaggctggccaggcgtggtggctcacgcctgtaatcccagcactttgggaggctgaggcaggcagatcacgaggtcaagagattgagaccatcgtcgccaacatggtgaaaccctgtctctattaaaaatacaaaaattagctgggcgtggtggcgcgcttctgtagtcccagctactcaggaggctgaggcaggcgaattgcttgaacctgggaggtagaggttgcagtgagctgagatcacgccactgcactccgcctggcgagagagtgagactccatctcaaaagaaggattgaggctgctgagttaggacgacaaaggcaaaatgataaacacaaggcagaaggtgcttatgcacctccccctgcctccaggctggcccttgggcttgaagaactagaaacacaaacttgttatccctctttccagagttctcaaaatacaaggatgctaagtcatgctcacaaactcgccagaagctgaaatacacagcctagactaacacaaaactcccagcatggctgaaaatgcctagggccagaatagtccagtatttcccttcaggcaaagttgcacagcaaatcaaagttttagatttgtttttgacagggattcagaggaaaaggagatggtttaat

SEQ ID NO: 442 - DNA, 567 bp, Homo sapiens
ggtgacaacagaaacatcaggcatttatgcttgaggatataagagcaagattgggagaataattagtacacagtagtcttaattaggcaattattgacattccttttataaaaaccatggtggagaaattgaagaataatgatcacaackagttatttttaccatttcacaatctcttttagacttacctaaatcttctaagatgcacttccatctgtttcttacttcccttcgaacctgccgcagggtatggatatcatagttgagcttctgccactcctgcaggaaaataaaagtttagttttatttataccccttggcttaaacctctatctcattcccaaacttcatgttgcctaaacacctggctcttctcttttattaatcttcaaagcaagcctaaaagaagagaaggagatggatgagataaagttgataggaatactatcagctaccactgctggagaatctgctctgcaccaggtgatatggcaccttgcataaattatcttactgaaactcttcatattacatattctctcaatttagtgatctcacctgtaaagt

SEQ ID NO: 443 - DNA, 1332 bp, Homo sapiens
tgggatccacttcccagaccaatgacatcagaatcccttgaaggggttccaggtttgtgatccaatgacctaagccaactagcataacctattggttcagcgatgggcacattacccaactcaagccaaaagagaggcagtgaaatccatgaagcttctggagcaatcaggaatggtgttttctcttctcctgcacaatgtgatatgaaggtgcaaaatctggaaatgctctcatcactttgactagcctgagaagagccagattaagcaataagtaacagagaacaaagttgaaagaatcacagagatatagagcctatggatatcctgagactctgggtcaattctcatctgaagtcagacctacttcaggaactctgttgtcttagccaattccatttgggtttaaacaactggagttctttttctggcccttgcattggaaacactcatgttgtaaagcccactcattgagtatataaaggacaatatagataccacacaaaatattagtttcatattttcccacccttgccyccaggaaaaattttcagtgcatagatttatctagcagggaatagatagggcttacagtggatgcagtgttaatggctctgcccagatcccaatctttctgtcccagaagtgtcttaggcaatgacacagatataacagcagcccttgtctgtagccagggcttactttatggtgcctcccctgaattctgtccagcagagcaaagcctctgactctcatgagatgttgctataacaaaggaaagaggtggcttacatctaattggctaatttcttccaaagatccaagcaagaagtgtctaactatgattggcttaaccattcaactctcttatgaagacaggttgaatccttttggctggatctaatgaccagttcaaagttcacttttgattaaaaactttgagctaaaatcttttcacaatctgaagaccaaccattaagatgaccttgtcttttgtctttcttggatggtgaaaaaccatcttcagaggaagatgttcatactcaggctaaaatgatccttattgtatttgatctgtgtacaacacacacacacacacacacacacacacacacacacacaaaacaaccagaagagtattgctcaaatgttatagatgacactctggtgaagttatgtaacttgccccatgcccaaccgcaaacagcagctaagccagaactcaaatctaagtgcatcgaattccaaagcccacagactctataaaaaagaagaaacagaaaagaatgactattgttgtttcctcaaattatgcttcttttttcttatgca

SEQ ID NO: 444 - DNA, 604 bp, Homo sapiens
ttcaggagcccacggggttggggaatcgaagtattcctgcatgactgcagcacgtggtgtgcggagcaaggaaaatggagagacatgaagaagaaaaggtaacgtggggtcagactaaaagtagtgctggtgtccaagcttcattctgtgaactgcaacattatcaacaggattttgagccctgtcaggtctggattttagagaaataactctgggtgaaggaagaacaagaagatggcttaggagggtgtcacaatcaactgtcacacgggagtaggtgtaattttcaagccatgctctttgaggtcctggtgtcagggggccttgggaccacagtggggcagaagtagagaaagagatgggcagggcttctctggaagagatagaaagaagcccatgaaccaaccacaaccrgagcagcttctccattcaaatagtctttgttagagctagaaggaagattgtttgaggtacaggaaaaatggggttctactgctaaacaaatacataattttgaacattctgaaattatgattgagataaaagtaagcgaggttgagagcgagggaaatagcagtgagagtggaaatgaggaccgattcca

SEQ ID NO: 445 - DNA, 604 bp, Homo sapiens
ttcaggagcccacggggttggggaatcgaagtattcctgcatgactgcagcacgtggtgtgcggagcaaggaaaatggagagacatgaagaagaaaaggtaacgtggggtcagactaaaagtagtgctggtgtccaagcttcattctgtgaactgcaacattatcaacaggattttgagccctgtcaggtctggattttagagaaataactctgggtgaaggaagaacaagaagatggcttaggagggtgtcacaatcaactgtcacacgggagtaggtgtaattttcaagccatgctctttgaggtcctggtgtcagggggccttgggaccacagtggggcagaagtagagaaagagatgggcagggcttctctggaagagatagaaagaagcccatgaaccaaccacaaccagagcagcttctccattcaaatagtctttgttagagctagaaggaagattgtttgaggtacaggaaaaatggggttctactgctaaacaaatacataattttgaacwttctgaaattatgattgagataaaagtaagcgaggttgagagcgagggaaatagcagtgagagtggaaatgaggaccgattcca

SEQ ID NO: 446 - DNA, 620 bp, Homo sapiens
ttttttgtaacttaactaatgctttagacatcagtaggtagacgtaaatccttgaaaccttccacgtggtgactttcagttctcattgctgaatttgtttccagagatggaagaaattatattgtatgggaactttttttttcttttttttttctttttttttttgagatgaagtcttgttcttgtcacccaggctggagtgcaatggcgtgatctcactgcaacctccacctcctgggttcaagcaattctcctgcctcagcctcccgagtagctgagattacaggcgcatgccaccatgcctggctaatttttgtatttttagtagaaacggagtttcaccatgttggccaggctggtcttgaactcctgacctcaggtgatttgcccacttcagcctcccaaagtgttgggaatacaggtgtgagccrctgtgcccagcctttttttcatctcagtaccagcttttatttatcagattggtaaaaatgttagaaagtgtgcaatgaaatgggcattcttacagtcatggcaaaaaatataattatctttgactttctagaaagtagtttggctttctagaaacttgtttgaattctccctgtttaggcaggatgaat

SEQ ID NO: 447 - DNA, 2025 bp, Homo sapiens
ttgcaaacactgttgtacacagtggttccaaagattactaaattgccaaaaatggtcagaaattgaatctgaagtagttctcctaaatatttggtagtttatctttaacctgatttttatcttggaatgtactaaaagtataacactacctgaactgaacatgcttattttataaatatagtgtttagctggaggttagtgtatttgttattttagaaagagggcattttatttagttacccatttttacagttttaaaaatttacagttaaataaatggagtaaaaatgktactcttgcagcatggtaattttacttcttgccaagattctatgatccttaagtcatatttagaggtttaggatttttttccttccttgaatatataaagacaaaacagagtagagaaaagatgcagttttaaaactacattctgtaacagttaatttatttcacccttgatgtgacaaaatgaaaggtcaataccgtcagtcttatgcaagaatcatcaggtggaaagtttttgttttttcaaagcattttttttctcctaatttggtcccttatgtataggttgaaattagagttattaaattagccaagaaagagaattttatgtgtttttataaagcaagtaattttttattcaatagaccactggatacaaccaatattttttaagcatctgctttctggtaaactaggtattttttataaatgcatttaatcgtatgaatgaaaattactatatccattatcaaacaaagaaacctaggcaaaaggaatatacaatttttctaaaattatataataaatttggagcgtcagtgctaatacacataaatcctaactctagagttgtgacatttccctctgaactatgctcccgctacaataagataccagataatcaaatcagtatgtacaaaaccggagttcctattaagacattcctgatgtaaggcctctggaaactgtacatcctgaacctgtctgacactctctaaacaattgtaatatgacatagtatttaatgtcttatatggatgcaaaatatctttgtacatagaataaacactcattattgcaatagtactgttaattgaatgggatggttatatactgaccacataattaatagatgagaaaatggatgcaaagaaggcttagggttatcagtatagaatgaaaagggtaagaacattaagagactctcggaacatctgtcctccatccctgtttgaagaatcaagatatttctgcattaccaccacttaaccttacaaatatagctctctctctctctctctctgtctgtctctctctctgtctgtctgtctctctctctgtctgtctctctctctctctgtctctctctctgtctctctgtctctctctctctctctctctctcacacacacacacacacacacacacacacacacacacacacacagttttcttgatttcataacttggatttggacatggtaccagatggtactgagctctgttagttttggtaaggatctatagagaatatgtaaaacttcttcagaagttgtttaaagtatttacaggaagtattataagcaaatttgtgtttattatggctgacatttcaactttcaatttgtgtgaccatacacacttctaaaagttcatcataattttcttaatataaacttgtagtagttcaccgttgattaattgttacagtacatgcaaaaagataagtgcttggagatactgtggattggtgaaaattttgttcaatttttctccttttttatatagttttgaattttgttgcctctgccataatatgacatgggcataaggtttgacaatgaaggacatttaggtcaacagatccaagagccctaaaataaaactgtataacacttaaaaaggattccttcttttaccttcatttgcaaactgtgaaatgcaaaacaacaagtgtgccttagggataattttaatatttatctttcttcctttaagaactatttttttctgaat

SEQ ID NO: 448 - DNA, 576 bp, Homo sapiens
atatttgtctttctgggcctggcttgtttcacttaacgtaatgtcttccaggttcattcaggctgttatacgtaagattttgtttctttttcatgtctgaatagtattcaattgtatatatataacgtattttctttatccaatcatctgttgatcatttgttgatgatttcatatttcggctgttgtgaatagagggaaaggtatgtcaagcaaacattagggatatgtcattagcaattgtggggatggggtttagatatccgatcttgttaatcagatactcatgtgcatttggccttattgtctctaaatatttttgtaatgaggaaccaggagagggagagttttactgctgtacactcatcttcactacattggcaaygcaatctaatcccacacatggaaatcacaattatacaacatggtgccactcccactaaaaactagctctggggattgcagatctgtttattactgtagtctcattgctttacttctatttcttatcatccttttctttattcctgtgtctaactgaatgctgaacctaagactttgtgtctcactctttacc

SEQ ID NO: 449 - DNA, 699 bp, Homo sapiens
actctgctcaaatgctcagctgatccgcatcttataggatctacgacctagctctgtctgcctctcctgcttagctttatctacctgctcaccaactattctgcctttccctctccttggagccacaatcttggaggaagcctggtgtgtcacagatacacaataaatactatgggcggtaaccaagagtcctggtgcttgcgtttggaggtgaagaggggtagaggatcttggagaatgactaatgtcagtgaggcaggcatagacagamagccattccaggaaacactgggaacactaatgcgatcccctaggagctccccaaataccaactactactactaacgccttaggctgacaagtagggagagagagtaaaaagctccaggctcaactagcgccaccatcatctctctttcctcctcgtccatcccacctcccctcctgactgctgctcataggctaggaagagtggaatttggagctcagttgcctcctaatccagccaccacctccactgccctctcgcacacacatgcagacttcagccttgcatatggacacaaatctgtgatccggtgggtccacgttctctctttgtttcaggcctcatccaaagagtgttgtggcacaggtgcagcactggcggtgggagggaggggaggactggggcgagaggggcatgaggctctcatcagc

SEQ ID NO: 450 - DNA, 699 bp, Homo sapiens
actctgctcaaatgctcagctgatccgcatcttataggatctacgacctagctctgtctgcctctcctgcttagctttatctacctgctcaccaactattctgcctttccctctccttggagccacaatcttggaggaagcctggtgtgtcacagatacacaataaatactatgggcggtaaccaagagtcctggtgcttgcgtttggaggtgaagaggggtagaggatcttggagaatgactaatgtcagtgaggcaggcatagacagaaagccattccaggaaacactgggaacactaatgcgatcccctaggagctccccaaataccaactactactactaacgccttaggctgacaagtagggagagagagtaaaaagctccaggctcaactagcgccaccatcatctctctttcctcctcgtccatcccacctcccctcctgactgctgctcataggctaggaagagtggaatttggagctcagttgcctcctaatccagccaccayctccactgccctctcgcacacacatgcagacttcagccttgcatatggacacaaatctgtgatccggtgggtccacgttctctctttgtttcaggcctcatccaaagagtgttgtggcacaggtgcagcactggcggtgggagggaggggaggactggggcgagaggggcatgaggctctcatcagc

SEQ ID NO: 451 - DNA, 1199 bp, Homo sapiens
tgcatgaccaatccttcattttcaagtaatcacagtgtcattataaactctaaattcactcagaagtgacttcttatcagaagtaaaaaaacaaagtttataattttagatgcctttgccttcttatgaagacatatgcagaattccatctctgactcgtttctggaccctggaaataactggctttttatagcaataactcaagggactgaatataatttaaaagtaatatacccaatacaggttgagcataccaaattccaaatttcaaaatccaaaatctgaaatactccaaaatctgaaagtttttgagcaccaacatgatgctcaaaggaaatgtttattgtagcatttaggattttagatttgggatgttcaactggtataatgcaaatattccaaaatccaaaatctraaacacttacactcccaagcatttcagataagagatactcaaatcattaaagtacttattgagactattaggtgggtgctacaaaatcatttcccgacagaaatgtagggaatctcattctaatcaaattaaaactgtacatcaatgaaaaatacaacgttgaaaccgacaatccttcatccatggtaaatgaatgtcaatcaatttcccctcctgtgtctttgtttaaacgtctatgtaaagtctggagattttctgagcctatctctttggcaactcccactattttaattcacagtcctttcaagtccaagcaaatttctgagtttcacattgctctcctagttggataaatctttatatagaaagcacttacatttcagtaggagggtttagtcatttgtcaataaatgagatagctggttcaagcaatctaccaagtttatttctatgtgaaaatactgctagaagttagcaggtatacatgatctacatgattttaaattctttgtgaattctcaaaataaatctttagaaatatagtatactagaacatgtattataaaaattactttgcctgggtaatctaattcatcattgggcatacttagtatagccatatatacatacttataaacacaacttacaggtataagttgacataaatgaacataaactgacaatcaactaagaaggcaaagacatttaaataagcacattgtatttaaagagataaaaagctatcaactacctatcaaatgaatgttccaccagggggtgtagt

SEQ ID NO: 452 - DNA, 774 bp, Homo sapiens
cataattaggaaaattccccttctgtytaccccgcaagtcccacttggttcagatgggggcagacagcagagagcacttacttcacggaggaagcagaggctacccgctattccaacaggctttctatttctgatagaaacaaatccaaactgagctaatttgtgtacagctgcaggcaatataaacacggctatttagaattctttatagagtataggcctttgtactctatacttcatggaagttaataagtaggtgtcaaactctgaattaaaattcccagaagaggacacagcacaaaggacaataaaaatgatttttaaataatcatagggataaatagcatccacttctgacaaatgtaagtgctggcataaaatgttattaggctacagagattgtcttttgttcaggaagtatattttattctcctgcctcatcattcatcatcctaatgagccctcaaaatgtaaattaaatagcaaagacggattcatttgaaaagcatcttttcaaaaaaaaaaaaaaagctaggtgttaaaccattttttctacttttattctatatattgtttcattttttcattgaaaaaaagccctcagtacttgaacactttatggggtaagttcatgcaattcatattttcagtaaacagttcattcattctccagtactatgggattggtgatttgaaaagaaaaaaaaaatcgcattttaaaatggtatgccctgtaaatgatgtttgatccggaaaatctgagaaacctgtgca

SEQ ID NO: 453 - DNA, 774 bp, Homo sapiens
cataattaggaaaattccccttctgtctaccccgcaagtcccacttggttcagatgggggcagacagcagagagcacttacttcacggaggaagcagaggctacccgctattccaacaggctttctatttctgatagaaacaaatccaaactgagctaatttgtgtacagctgcaggcaatataaacacggctatttagaattctttatagagtataggcctttgtactctatacttcatggaagttaataagtaggtgtcaaactctgaattaaaattcccagaagaggacacagcacaaaggacaataaaaatgatttktaaataatcatagggataaatagcatccacttctgacaaatgtaagtgctggcataaaatgttattaggctacagagattgtcttttgttcaggaagtatattttattctcctgcctcatcattcatcatcctaatgagccctcaaaatgtaaattaaatagcaaagacggattcatttgaaaagcatcttttcaaaaaaaaaaaaaaagctaggtgttaaaccattttttctacttttattctatatattgtttcattttttcattgaaaaaaagccctcagtacttgaacactttatggggtaagttcatgcaattcatattttcagtaaacagttcattcattctccagtactatgggattggtgatttgaaaagaaaaaaaaaatcgcattttaaaatggtatgccctgtaaatgatgtttgatccggaaaatctgagaaacctgtgca

SEQ ID NO: 454 - DNA, 1068 bp, Homo sapiens
tcctccatgcctattcatggtttgatagctcattttyttttagtaatgaataatactccattctctggatgtaccagtttatttatccattcgcctactgaaggaaatcttggttgcttccaagttttggcaattacaaataaaactgctgtaaacatccatgtgcaggtttttttgtggatctaagtcttcaactcaattgggcaaatacccaggagaatgattgctatatcatattcacttttctcagcctcattttcttcactggtaaagtggagataacaatagtcccatagggggattgtgaagtttaattgagataatgcacatgaagcccttagcaatgcacccagcacataggcaatactcaactaatggtagcccatccttgttatcctattcaagagtaatgacaatacaaatgtgagagatggaaattcaagtattgaccgagggatatgacatatggaggtggcatagtcatgcgtcatctgtccatactccaagagggcacagggcaacaagaaatactagaagacagtcagggcaccactgctgccattgaggtgggatctggtcatctcctagggcctgtgaccctgagtcctgcagtcctgagctgccagggtaggggaggtggagatcaacccatggtcccacagtgaagtgtgtcccagctttagcaaaccaaggtatcctcccactgtgcattcctctcctccccaagcctgctcctccagcagctccccactcccctccttttgactcatctgagccaagccctgtccctaactagaaactcagaggtgatgaaaacaaagttttttcctcgcttcacttacttcctgtgaactcgcttaattgttcccagattactaggtcaccaggaggatttggtaccttggattttttttcttcttcttccttatgctttctggagacaacaagggtcacttggggtccagccttgtgtggcaagggtacgctgatcggatttctctggaatccatttctgtggtgtttcttgagtgaggggatggactgagtggcctgggtggtgtgtggctt

SEQ ID NO: 455 - DNA, 1221 bp, Homo sapiens
gcatgtgtggcaggatgggccaggccaagaagctgtgttttctaggcaatgagaccagagcctctgacctgcatccagcctctgatctgcatcccacaggacatatgaaattctgtttacgtcgtgggaggacacagatgttctgacacaggcatccacagatacagaagaatgaatccaaaggtagtacttgagcatctggggtcaaataagcctgaggaatctgaacggaaacaatccataatccaagaaacaagccttggtgataattaaaagatgatcagaggaagctgtttaagaatgtgacctgagaatctagagtcatgcaggcacatgagtagtgaggttaagcatcttttcagatgtttagaaactattattgagtgaccttggtggaaatggaagagtaggaaatttcaaagccttatctcttcacagaaacactgaaacaaagaatcaaaaackatcagaatcaacttcttggatatctatctggaaagtaatcaaaggtttacaggaactgaatgatcactgaatcgaggaaaagataacaagcatgtgagactttattttctcctcgtcccaatcccctacctggaaaaaggaaaaggaactgtcaaccaagaataccgtatctatcagaactatactcagaaataaagcaaaaattaagacattcacagagaaacaagagctgagggagttgttgctagtggacttgctttataagaaatgccaagagaagccattcaggctgaaataatggactctagagaataacttgaagtcatacaaagaaataaagtacactggtaaaggtaactacataggtaaataaataaaagtcagtataattgtattttaactcttctttcattcctatgtgccattatccaataattataaatctatgccaatgtatacacaatgtaaacataatgtaatttataacaataactacataaagaaggaggtctaaagctatatcaaagcaagttttggaatacaagttaagctaagtttgcaaaagaatggtattgaacatctacctcacaccatttaaaaaacttagctcaaaattgattaaaaacataaatataaaactaaatctataaaagtcttaaaggtgattatagggctaaatcttcatggactcagatttagcaatggtttcttacatacagcaccaaaagcatgagcaacaaaagaaaaatatattaa

SEQ ID NO: 456 - DNA, 625 bp, Homo sapiens
gaactattgccactttcatgctgaagtcatgcttcccaccaacttctctcatgtcattactaatgtagaagcattcctacaagtactgccaggacttttgcagtggatgactttgatgtaaaggtcccatataagcctggccaaaactttctttcaattctctttccttcccttcactctcttctaaacaagtttcagacctgcattatgatctgaagtttcctctgccttccctggttccctcytctttatcctttgtaatcgtttatcccaataagtatttttttccattcacatccagtcttagaggtaggcaaacacatacaagttatgccaagagtggtctaagaaacaggtattaagatagttttataagagattctattgctacatgccattttaagcagtgtaggatgtatggatacttcctggctcaaaatgggagctaatttttaaaggattctatactggtagaggagaatgcccctgcaaacaaaatggttcaagcatatggagataaataataaataatctctacaagaacagcatcctttggccagttacgactaggttgcattgaagtcctacaaagggacagtgaaaaagtgggagtcattaacaaaga

SEQ ID NO: 457 - DNA, 630 bp, Homo sapiens
taatcaacaattctactttttaacagcaaataataatgaaaatccaggaatcataaaagaaacttaacttacaaaataatcatctgaatattgcatgacttttccttcaagaagaatcttacatagtaattatttttctgtaccatggaaaggcaggaaataaacgtataagcatcattatcttatatatttaaaaaccctctcccatggatgcactcatgatgaatatcattgatatctttttctaaaagacaacaaaggaacaccacacatcaaaatttcagatrcatattatcttcaaatcaacaagtctacttttagaaatttatcctaaagatgtcataaaaatgtagacaggtgtattcccaagtatgtaagttgcagagtactttttaataatgaagaaaacaaccaccctataataaatactaagaaaccatttgagagaataatgtagaacacagttatgggcgtgggaatttggatgtttccaaatgaaaaaggagggtttttgaaagaatatatgtatgtttatgcctatgtgtgtttatgtgcatacttgcatagcaaaaacatgtagaaagatatttagcaaagtattaaatgggttatcactggttggtaagatta

SEQ ID NO: 458 - DNA, 580 bp, Homo sapiens
ggattccttgaagttgatgccacagcccatcgtgggtgacctgggtgtgtccccgcctcaggctgagctgacttccttgcctgtgtgggattgcccatctccygctgagtgtggagaatgttcttcaccctctgctccctgtcagtttgaggcagaagcatctgcacttgcagggcaggaagactttgtcttctggatcttggccagtgtgcctgggagctgcccatcccaggttccagttatcagcaccttctcctccctcgggtgatgtccagatacctctgggtctgtcccacttgactgggctgcctggctctcatttcagcctctggacccacccagctgcctcctgtgtgggatggagcccatgggtggtgtaaggggccaggcagcctgggccctgtccttgccagtcctcctacttgagaccttgggcaggctccttctcccctctgtgcctctgtttgcatgtagagggctgaagagcttagcccagtgcctgatacaatctgtgtgcgtgaccaagggaccagccaagcttgcccagggtctggaatatcatgggaataccagcccagcc

SEQ ID NO: 459 - DNA, 580 bp, Homo sapiens
ggattccttgaagttgatgccacagcccatcgtgggtgacctgggtgtgtccccgcctcaggctgagctgacttccttgcctgtgtgggattgcccatctcccgctgagtgtggagaatgttcttcaccctctgctccctgtcagtttgaggcagaagcatctgcacttgcagggcaggaagactttgtcttctggatcttggccagtgtgcctgggagctgcccatcccaggttccagttatcagcaccttctcctccctcgggtgatgtccagatacctctgggtctgtcccacttgactgggctgcstggctctcatttcagcctctggacccacccagctgcctcctgtgtgggatggagcccatgggtggtgtaaggggccaggcagcctgggccctgtccttgccagtcctcctacttgagaccttgggcaggctccttctcccctctgtgcctctgtttgcatgtagagggctgaagagcttagcccagtgcctgatacaatctgtgtgcgtgaccaagggaccagccaagcttgcccagggtctggaatatcatgggaataccagcccagcc

SEQ ID NO: 460 - DNA, 617 bp, Homo sapiens
gattacactcctattcatatctaactcttgtctcccagcctgggcggctgcggacaatggacgctcctaccataggcactccctccaagtcttctgaggcttgtcaaattgatattcacttcaaaccaacatcccatccctccttcgaaaaaaatatgatttattcacaaaaagaacttcaatatgatcccaagttcatataatacatttttgttcaaatatgtgtggtatgttttttatagcttcattgtatgaatgggttttttcttgagcataaaaaaatatgggctcactgtagatttggaaaataggggaaagtaaaaagataataaaggtctgtaatctaatctatataattgtatttcgtaacgggtacgttacatgtagttgcctrtattttggcctgatagagtagagttgtaggggagcagctctgccattcagtctctgcaatgctttagggcagcagctgggacctgcccacactacagccttccttccttcctaggctgcaggagaataagccaggcccccaggagtccttcccctgaataaaaccctgcagccgtccactgtggcatcacatgtgcctcacttacaaaagccaagtgcagcaa

SEQ ID NO: 461 - DNA, 584 bp, Homo sapiens
atgggagatttagaatgccaatttaccaacttcaagatactggtttcctctggaaggaagaaaacttgaaggaataggagacagggatacaaaagggaactttggctgtatctttattgttttatttcatttgtgttatgaagaaactggcaaaaagacagagacacagctgaaggcaaaaaaaagcaaaatattattatcttttaggaattatggtgagtaggtgtctgttatattaaatttctgtgctttttgtatattttaaatgtttcataatttgaaataatttgagggttgaytaaagccagccattactataaacttctgtatagtgatcatatatgtgaataatctcacaattgacataggtactggatttatagacaagagccaatacattttagttttatcagtaaactttatcagaagtattaacaaattgagaattatattggtagattcttagttataattctttacagattcctgaagaaggccagagttaacactagtatccactagataatttcaatatgtcactaaatggcagatatcaaagtccatatcatgattaattgttgcta

SEQ ID NO: 462 - DNA, 1101 bp, Homo sapiens
tgttttcctagttaatcctcagaatgacactgacagataataatgatatttaatatctattgggtacttaatgtatgacagacattgttataagcactttacatttatttcttcacttaatcctcacaagccttatgaagttagtggtatcatcacccccactttgcaggtgagaaaactgaggagcagagaagtaaagctgatctcaagggcttacagccaagtaacagcaaaatggaaccaaaaacagccaaaatggaaccaaagrtctggtttcaaaatctgtgcagtaacaagatggttcttattgaccttttaaagatgagaaaacggattctaagaaattaaacaatttgcgcctattgccaccccaatcactgagacctgaaacagaatgtacacccaagcctaattccaatgcttggaatgaccatgttgccaacaagcagaatctggaaataggagagagagggcacaacacgtgaaataagatccttcaaaagcaggagggagaacaacacaggcagagcaattagtctgttgtctgaaacacgtcagcaaatccaggaatatacaaatcacaggatggaaagaaacccttggaggccaacttgctgccctcttaaaacaccacaagcagagccagacaggtaaaaggtatctgtctctgcccaggaaagaagttcccagcccagggagaggtgggaagagtaatggaaataataaactataattcataacttttttttgctgtcactcatcacttgtgactgcaaaaagttctcaatccaaatagaataggttcctgcctcctcatgcaaacacctctctctgcaggctctcagagtaccaaggagatatttactccatcatcctcaccacaaaaaaaaaaaaaaaaaaggagaggagagatgcagggtttgatatatccagtggaactgccgctgacagacagcattccaacttgactttactcccaggaaagccgatgtattatggcaaggtgatgtctctccactccaccctagaatgtgagattcaattgtttggctgtttacccaaatactgggggaaaataagctcctgaatcctgaatcagga

SEQ ID NO: 463 - DNA, 1116 bp, Homo sapiens
cgctggctttaatgctgaatacaagatgtttttcaaggaaaagtttttaaaaagtatccttgctttgtagaaatcctggtgagaacacagaattcctttctcatgtgctataaataaaactccctggggggaatttctccttgtcaaagttcattctaactgaaatgtcttcaaaatatcaaaagaacttaaagagctaatgtcacttccccaataattttttaaaatttaacctaagcagtgaggagtgtttaaatagctataaaattcttctcaaatttcccatttccattcatctcattagcatcctttagtgaccttatcgtctacttcagaatttaacaattaggaagcacatgggctttctcagataatattctagagcttttaaaaaattggaagtattaaggaaataatatatttttaaaaggtgaaaagttttacgtcaatataatgtacagggcaattcttcttggttctccttcggcrtgggccttcacaggccatagtctactggttccatattcggatcattaaatggcagccctccgacttggaaacagtagctatgtcttgctttgctttgtaactctcacagcacagcatctgacacataataagtgcccaagcaatatttactgcatgatcagaaacttaagatttaaggataaaggcaggaaaaataacctaagacatttcagatcaaaactttgtttttctattaaaacaataaaaaaaaaaatccaaggaataagaaggcttttctgttttacacaagcactgagtaaaacattatgaagatagttttccaagtatcacacttttttctaatcttctactcataccttacaatagagatttgtatataagagacactttctgcatggggggtagatacattttgtttatctaaaaacatatactcacctactcatttgcagactcattagcaaaactcattgacttcaagctccatgctaaaatcagctgtgcacccttatctttctttcatcagaatttgagcctatgatttttacagatattaacatttttctcttgaaatgtaagttttgaatcactttaaaattgtcatgaaatatttgttgtaaaggttac

SEQ ID NO: 464 - DNA, 1116 bp, Homo sapiens
cgctggctttaatgctgaatacaagatgtttttcaaggaaaagtttttaaaaagtatccttgctttgtagaaatcctggtgagaacacagaattcctttctcatgtgctataaataaaactccctggggggaatttctccttgtcaaagttcattctaactgaaatgtcttcaaaatatcaaaagaacttaaagagctaatgtcacttccccaataattttttaaaatttaacctaagcagtgaggagtgtttaaatagctataaaattcttctcaaatttcccatttccattcatctcattagcatcctttagtgaccttatcgtctacttcagaatttaacaattaggaagcacatgggctttctcagataatattctagagcttttaaaaaattggaagtattaaggaaataatatatttttaaaaggtgaaaagttttacgtcaatataatgtacagggcaattcttcttggttctccttcggcatgggccttcacaggccatagtctactggttccatattcggatcattaaatggcagccctccgacttggaaacagtagctatgtcttgctttgctttgtaactctcacagcacagcatctgacacataataagtgcccaagcaatatttactgcatgatyagaaacttaagatttaaggataaaggcaggaaaaataacctaagacatttcagatcaaaactttgtttttctattaaaacaataaaaaaaaaaatccaaggaataagaaggcttttctgttttacacaagcactgagtaaaacattatgaagatagttttccaagtatcacacttttttctaatcttctactcataccttacaatagagatttgtatataagagacactttctgcatggggggtagatacattttgtttatctaaaaacatatactcacctactcatttgcagactcattagcaaaactcattgacttcaagctccatgctaaaatcagctgtgcacccttatctttctttcatcagaatttgagcctatgatttttacagatattaacatttttctcttgaaatgtaagttttgaatcactttaaaattgtcatgaaatatttgttgtaaaggttac

SEQ ID NO: 465 - DNA, 1116 bp, Homo sapiens
cgctggctttaatgctgaatacaagatgtttttcaaggaaaagtttttaaaaagtatccttgctttgtagaaatcctggtgagaacacagaattcctttctcatgtgctataaataaaactccctggggggaatttctccttgtcaaagttcattctaactgaaatgtcttcaaaatatcaaaagaacttaaagagctaatgtcacttccccaataattttttaaaatttaacctaagcagtgaggagtgtttaaatagctataaaattcttctcaaatttcccatttccattcatctcattagcatcctttagtgaccttatcgtctacttcagaatttaacaattaggaagcacatgggctttctcagataatattctagagcttttaaaaaattggaagtattaaggaaataatatatttttaaaaggtgaaaagttttacgtcaatataatgtacagggcaattcttcttggttctccttcggcatgggccttcacaggccatagtctactggttccatattcggatcattaaatggcagccctccgacttggaaacagtagctatgtcttgctttgctttgtaactctcacagcacagcatctgacacataataagtgcccaagcaatatttactgcatgatcagaaacttaagatttaaggataaaggcaggaaaaataacctaagacatttcagatcaaaactttgtttttctattaaaacaataaaaaaaaaaatccaaggaataagaaggcttttctgttttacacaagcactgagtaaaacattatgaagatagttttccaagtatcacacttttttctaatcttctactcataccttacaatagagatttgtatataagagacactttctgcatggggggtagatacattttgtttatctaaaaacatatactcacctactcatttgcagactcattagcaaaactcattgacttcaagctccatgctaaaatcagctgtgcacccttatctttctttcatcaraatttgagcctatgatttttacagatattaacatttttctcttgaaatgtaagttttgaatcactttaaaattgtcatgaaatatttgttgtaaaggttac

SEQ ID NO: 466 - DNA, 2261 bp, Homo sapiens
ttaaaacaaaataaccccattcccagaaaggaaatactgactttcaggactatttccaaagctgcctaaaactactctgagggaaaaaaaaatgcaaatcagtaatgaagtattggagcccacagttaaattaatttataggggctttaatgcaattaaatttcatccagactgtatctctaatggtggctgtgttttttttttacttaatagactttaaagcataattcactttcatttttgcaaaattatttaaatattacaaacatcacttttatacatatttccatggtgacacaatatatttgaagtctatttaatttacagatgatggggccaaaatgaaaattctttgaggaccatagatcttctataacatcacattttccagttccaagwtattaagtatataagttatcagtatttgaaagaatggagtcttgagaaagcaataaatattttaaatgatctgattgtgaaacttaaagaaaattaaaatccagagcaaggaaaagcatcagtaatacaaagagctaagatgtttagggttcataatttaagttaataaattattaggctctgaaattaaatttaacagatctttttcacagccaaattaaggaaatatttagagatgaacataagttatattccagccccaaatttcaactcaaattattcatatacataaaggataatgcatgaggtagctaagaatctcaaaatacattaacgtgactttgcagtcacaactaatgagcaaagctgtcaggataatttttcatgctctcaaacctagacatagaagatctatgctggaaagcatttaataataaatagctaactagtttaaaccctgaaagagacatgcagaactggtccaaagcgttcttagctgagaatatcagctaaattcagatgtcatttttgctacaaatgtgctgcacactggtgaaatatttgacaaaggagaagtagatgtaactatggaaatcataactttaattgacaacaacatgaaaattcagaaggataacaagcatcatggatggagaagacaattatgcaggagtaaaaaatcaaatatgagctgcagaatttaaaaaaaagagtctatttttcctctctggatatttcccactactttagaaagaagaagaagaaggatggaaagaatattcttcctgttaatgaaaataggacaaaggaacagccaggacattcctacctggtttccagatgaactgattatcctttttgccttccaaatgagctgcatgggacagcaagagagaaagcaatagaaagagcttcctcatgctcctccatacccagcaagtgactgttaggttgctctttggaaacatgcttcagatttttcagcctcttgacttgcctattcctaaaagagaaaaagaaaaatcaggtaagtttcttctgtaaagaaaagataacaactcattttgactgctagaacctttattatgatggtattgcaagtttttcattagcatgaagatagtacatataatatcaaccctgtgggaaaagctacaaaaagcaaatccacattctgtttttaccatgttttgtattattttttgtagtgaagtgtattcatgaatgaaatctaccactggatgataaaactacttatttccccaattgctttttattttatacttttggtaaaaaaagatcaatgtaacgtgataatattatcatggattctcacaggatccaaagtagttacttgattcccatagtagctctaaaaagaaaagaaacaaaagcctgaggtggttaactcatgtttatacttttggtaagaaaataagctttaatggtacacattattaaaagaaagtagtaaatatatgttatgttaaatgttaaatgtataccttttatttctctgaaataaaatcaggtaagtttcttctgtacaaaaaatcaagtaagtttcttctgtacagaaatgataaaaactgactttgactgctagaacgtttattatgatggtattgcaaattttctattgccatgaagatagtctttataatattaacatttgaaggtcagcagttaattagccaagttttcaatcctcacccactgaaggcctcatcaattctatggactccacagtctctgtgtcggtatattttattcttaaaagcagagttggcagataccttgtatattccctcccttctactcagacaaagtccatgaggagctcatgatttggagaaagagat

SEQ ID NO: 467 - DNA, 2261 bp, Homo sapiens
ttaaaacaaaataaccccattcccagaaaggaaatactgactttcaggactatttccaaagctgcctaaaactactctgagggaaaaaaaaatgcaaatcagtaatgaagtattggagcccacagttaaattaatttataggggctttaatgcaattaaatttcatccagactgtatctctaatggtggctgtgttttttttttacttaatagactttaaagcataattcactttcatttttgcaaaattatttaaatattacaaacatcacttttatacatatttccatggtgacacaatatatttgaagtctatttaatttacagatgatggggccaaaatgaaaattctttgaggaccatagatcttctataacatcacattttccagttccaagatattaagtatataagttatcagtatttgaaagaatggagtcttgagaaagcaataaatattttaaatgatctgattgtgaaacttaaagaaaattaaaatccagagcaaggaaaagcatcagtaatacaaagagctaagatgtttagggttcataatttaagttaataaattattaggctctgaaattaaatttaacagatctttttcrcagccaaattaaggaaatatttagagatgaacataagttatattccagccccaaatttcaactcaaattattcatatacataaaggataatgcatgaggtagctaagaatctcaaaatacattaacgtgactttgcagtcacaactaatgagcaaagctgtcaggataatttttcatgctctcaaacctagacatagaagatctatgctggaaagcatttaataataaatagctaactagtttaaaccctgaaagagacatgcagaactggtccaaagcgttcttagctgagaatatcagctaaattcagatgtcatttttgctacaaatgtgctgcacactggtgaaatatttgacaaaggagaagtagatgtaactatggaaatcataactttaattgacaacaacatgaaaattcagaaggataacaagcatcatggatggagaagacaattatgcaggagtaaaaaatcaaatatgagctgcagaatttaaaaaaaagagtctatttttcctctctggatatttcccactactttagaaagaagaagaagaaggatggaaagaatattcttcctgttaatgaaaataggacaaaggaacagccaggacattcctacctggtttccagatgaactgattatcctttttgccttccaaatgagctgcatgggacagcaagagagaaagcaatagaaagagcttcctcatgctcctccatacccagcaagtgactgttaggttgctctttggaaacatgcttcagatttttcagcctcttgacttgcctattcctaaaagagaaaaagaaaaatcaggtaagtttcttctgtaaagaaaagataacaactcattttgactgctagaacctttattatgatggtattgcaagtttttcattagcatgaagatagtacatataatatcaaccctgtgggaaaagctacaaaaagcaaatccacattctgtttttaccatgttttgtattattttttgtagtgaagtgtattcatgaatgaaatctaccactggatgataaaactacttatttccccaattgctttttattttatacttttggtaaaaaaagatcaatgtaacgtgataatattatcatggattctcacaggatccaaagtagttacttgattcccatagtagctctaaaaagaaaagaaacaaaagcctgaggtggttaactcatgtttatacttttggtaagaaaataagctttaatggtacacattattaaaagaaagtagtaaatatatgttatgttaaatgttaaatgtataccttttatttctctgaaataaaatcaggtaagtttcttctgtacaaaaaatcaagtaagtttcttctgtacagaaatgataaaaactgactttgactgctagaacgtttattatgatggtattgcaaattttctattgccatgaagatagtctttataatattaacatttgaaggtcagcagttaattagccaagttttcaatcctcacccactgaaggcctcatcaattctatggactccacagtctctgtgtcggtatattttattcttaaaagcagagttggcagataccttgtatattccctcccttctactcagacaaagtccatgaggagctcatgatttggagaaagagat

SEQ ID NO: 468 - DNA, 1214 bp, Homo sapiens
attgataggtcattagatatatttgtgtagatggtatgtcatggtattctgagtacagccctgatttatacttatggttctggcataatcattgataacacatacttttactctcagaagcgacacaggtagaatattaaattacacagtcactcatgatatgttgtaccatgtgaaaaattgcattgaaatgttgcrttgaaagttccctgtggtgtaggaagaaataactataggcaaaaagcaatctaagcaaataaaaaagcatgtttttaataccaaggagcactaaatattgtatagaaaagaaaatgtaattattgcttatcactgaaaaaaacttacatagatgcagaacacaaatacaaagtcactggtttaacaacaacaaatacacacacacacacacacacacacacacacacgatatgtatatacatacatatgtatatatattatacatataataaaattacattggacaatggaaaaaggaactgagggctattaaagatacattcaactataacagaaaatgccaactcagtttaaatttaaattttatatctctcataataagaagtttcgagatagggaagctacagccatggtactggcagggattgggctccacttctctatgaatgttaattcttctctctgctcttttggctttatgctcaggcagatagcaagatagttgcagaagttccagtgattgcattcaattatgataaagtccagacacagaaagcaaatgtactcttctgatacctcttataatctaggaaacctttcctggtagctccccagctaccttccctgaagtctctatgacaaggtttggttgcatatctacacctgcaaccaatcactgtcaaggagaatggactaccatgatgacagagtctcagacccagggtagacgttgggtaggcatccaacattatctgctgaatttgggataggaagtgctgaggggtagtgagagctatgttctcatccaccttggaagttagtagataacttcctaacatgatgaattaagatattaaaatataattatattatttagaaaagtggtggtcaataacagcagagataaaagcaaaagcagttgctctagcgaataggcagtaagtaaagaaacaaggattttgctttattttttaactttcatatggtcttttaatgttatttgatgtttaaacaat

SEQ ID NO: 469 - DNA, 1214 bp, Homo sapiens
attgataggtcattagatatatttgtgtagatggtatgtcatggtattctgagtacagccctgatttatacttatggttctggcataatcattgataacacatacttttactctcagaagcgacacaggtagaatattaaattacacagtcactcatgatatgttgtaccatgtgaaaaattgcattgaaatgttgcattgaaagttcyctgtggtgtaggaagaaataactataggcaaaaagcaatctaagcaaataaaaaagcatgtttttaataccaaggagcactaaatattgtatagaaaagaaaatgtaattattgcttatcactgaaaaaaacttacatagatgcagaacacaaatacaaagtcactggtttaacaacaacaaatacacacacacacacacacacacacacacacacgatatgtatatacatacatatgtatatatattatacatataataaaattacattggacaatggaaaaaggaactgagggctattaaagatacattcaactataacagaaaatgccaactcagtttaaatttaaattttatatctctcataataagaagtttcgagatagggaagctacagccatggtactggcagggattgggctccacttctctatgaatgttaattcttctctctgctcttttggctttatgctcaggcagatagcaagatagttgcagaagttccagtgattgcattcaattatgataaagtccagacacagaaagcaaatgtactcttctgatacctcttataatctaggaaacctttcctggtagctccccagctaccttccctgaagtctctatgacaaggtttggttgcatatctacacctgcaaccaatcactgtcaaggagaatggactaccatgatgacagagtctcagacccagggtagacgttgggtaggcatccaacattatctgctgaatttgggataggaagtgctgaggggtagtgagagctatgttctcatccaccttggaagttagtagataacttcctaacatgatgaattaagatattaaaatataattatattatttagaaaagtggtggtcaataacagcagagataaaagcaaaagcagttgctctagcgaataggcagtaagtaaagaaacaaggattttgctttattttttaactttcatatggtcttttaatgttatttgatgtttaaacaat

SEQ ID NO: 470 - DNA, 1214 bp, Homo sapiens
attgataggtcattagatatatttgtgtagatggtatgtcatggtattctgagtacagccctgatttatacttatggttctggcataatcattgataacacatacttttactctcagaagcgacacaggtagaatattaaattacacagtcactcatgatatgttgtaccatgtgaaaaattgcattgaaatgttgcattgaaagttccctgtggtgtaggaagaaataactataggcaaaaagcaatctaagcaaataaaaaagcatgtttttaataccaaggagcactaaatattgtatagaaaagaaaatgtaattattgcttatcactgaaaaaaacttacatagatgcagaacacaaatacmaagtcactggtttaacaacaacaaatacacacacacacacacacacacacacacacacgatatgtatatacatacatatgtatatatattatacatataataaaattacattggacaatggaaaaaggaactgagggctattaaagatacattcaactataacagaaaatgccaactcagtttaaatttaaattttatatctctcataataagaagtttcgagatagggaagctacagccatggtactggcagggattgggctccacttctctatgaatgttaattcttctctctgctcttttggctttatgctcaggcagatagcaagatagttgcagaagttccagtgattgcattcaattatgataaagtccagacacagaaagcaaatgtactcttctgatacctcttataatctaggaaacctttcctggtagctccccagctaccttccctgaagtctctatgacaaggtttggttgcatatctacacctgcaaccaatcactgtcaaggagaatggactaccatgatgacagagtctcagacccagggtagacgttgggtaggcatccaacattatctgctgaatttgggataggaagtgctgaggggtagtgagagctatgttctcatccaccttggaagttagtagataacttcctaacatgatgaattaagatattaaaatataattatattatttagaaaagtggtggtcaataacagcagagataaaagcaaaagcagttgctctagcgaataggcagtaagtaaagaaacaaggattttgctttattttttaactttcatatggtcttttaatgttatttgatgtttaaacaat

SEQ ID NO: 471 - DNA, 565 bp, Homo sapiens
ttttcaagatgggcttatcaggatgtaactccattgtaagtcaaggagcatctgtattaaaaacttcacaactgtaagctaagttgtaaaaatatcagattgaggctgactttcagagaggtataaactcctatctccctctcccacttctctccctcctgacttccaaacctggagatgacattcatgataagaattgaaagtgtctttataaggcaatcaaagggctttaacttgctgaccctccgttaggaagcagaaacaactgttgtgcagtaactagtgtcaaaaattgagctgttgacaaaaagttcactcctgccaaacttcctgcactcctaagcactagctgtgccctatcaatgtctgtcatcagtcagtcctcactayctacagtctacttgtttgaaccaaagtagacttcattccccagacgcaacattcactttggttcaagccaactgttctcagaaggaaacacctgttcctcagaaatgctaactcaatgtcctgcagtttgacaaaattaagccttttgctaggtacataggtgaccttatctgtt

SEQ ID NO: 472 - DNA, 1539 bp, Homo sapiens
taaaatcatcatttcctgcctgaagtctctacttgtgcagctgccttgctctgtgagcatgggtttccttagttttcttcattctctcagctcctggaaagccgtggatggtgaaggaggatattaggacctctcaggtgctttagcttcaccatgctggacatttatagttcaagtgagagaatgctttagtccactaacctagaaatgtttgtaatttatgtataaactacccttgagacactgtcatgttgttctcatgccatataggacaaaggaattgacaagggagcttgcagattttcctagactatgctttgaggagcaaagatcaagcatgcctcacactagagtttcctcatacacttgagggtatgcaccacacctacctcctttctactgcctgagggtcacccctggctgggaatatactccttctaactcatgtttctccctttctgtctccagcctctgctaatgagaaatggaagaactgtttttcctgtctggtaggaacttcttatcctccatcctcaatacactatggcttatagtaaaactctgtgatcagagttcaacatggttagttttgatatagaaatagggaatttgtagtaatrataataaaatctcagaatctttttctttagctacaaattctgacctttaatattattgtttcactatatactcattaattttagtctttgagactcagagtctggcattgaccttcttcctttaggcagagcccctcctctccatcctaggagacacttgacctgcacaatggagggtataaagggaaaaaactttcaaaaaaatgatcaatgcctctctttaacctattgatcacattattgtcttgacatgttttattttttcttcttccttttttttctgctggtttggtgctgcctgatggtcatttagatcttgttgtttatgttggtcttgctaattcatgattttttaaatcaaagaaattagtcatagacaaaggcatgtacttaagttgagtcaatgagcttcaaaatggtatcttttacacacaatttcaagtttatgcattcagtaagcatttattgagtaccagctatatgcctgacattgtatcattgtctggggatattaagttggaatgacatggatttttgccttaaaacccagtttagtaaaggaaatagatagaaaaataagtacaaggcagattgatagcatataactgagtatgcaaaagagtatcaaaaaagaggctgagcgtggtggctcacacctgtaatcccagcactttgggaggctgaggcgggcagatcacctgaggttaggaatttgagaccagcctggccaacatggtgaaatcctgtgtctactaaaaatacaaaaattagccaggagtggtggtgcatgcctgtagtcccagctactcaggaggctgaggcaggagaatcacttgaaccctggaggtggaggttgcagtgagctgagattgcgccattgcactccagcctgggtgacaagagcaaaactctgtctcaa

SEQ ID NO: 473 - DNA, 594 bp, Homo sapiens
ttcagtaaaccaggccctgtaccagacactaacattaaatgacaaaataaagcaataggactcacaaggaacgcagacatgatggtggtggttgtggctggattatgggttcatgggcattattttatcttgtcacttttgcgtaagtttgaagtttttcataataaaatatcattttaaaagaaaaaaggattccactgaaagcattctcgtcaaggttaccactgtgttgcttgtygctaaacatgtttaattctgctctgtcttcatttgccttgacaaatatctccttgaacaattgaaaatacttggcaaaaaaaaaaaaaaaaaaaggaaggaaggaacaacaagcagaggtcggggtaaggggcccacaccctctcctgttttcctcccatctctccagctgctgtttctccatcctcttcccttcctgagtctccttttccatttcccatcctttaaacatcggagttgtacatgcctgcatttctacccttcgtttcttctcacctggctcattctttctcactgttctcatctcttccccaggttttcaatactgtctgtaggttgaaaccttcccagtcaata

SEQ ID NO: 474 - DNA, 1320 bp, Homo sapiens
tgtctccatataaaaacatgttctctcattatctctgtcttgtcatttctctttgtcttgagatatctattcacctttcattcatgccttcatagaaaatctaaaatcaaagggttaaagagacattaaggaatatttacagagagagaagtaaggaaaaagatactggatcattcaaacaaattagaaattttgattactactgctcgaggccagcaatatttgtgatgttttaggcccaagggtgccaggatgcctgtggaaaagactaattaatgttttctgagattaattagaaaattaaatggaagtataatgaaaccagcatggcttagctcactggatctacaactatgcaccactaaatttcagtgttattcaaaagttctatttattacttgaatacaaatatagtaagattggctgtaattgattttttttttttttttttactattctgtcacctaattccaaacagaactactaggaacttcacagtaatataaagcacaaagctgtctgacagtcctggcctgagttaatgtccatcaaagtgccttcaagaaaaataaactaaaatatcccccaaattttcggtggtattttggaaggttgccacagatcatgatattggcctctttactagataatcctcctagattctgtgagcctttttccagctgaaacacttttggtcagtgcatggcatctcccatcagcaaaaggaggtatgagaaaggaggcaataaactccaatagggaggaggaagaaccagaggggtgaaacttcgcatttgttgcatgaaagtgatgtgacaagtgttttcaccttctctctgtgtcttgttttctgtaaaaacagaatattttaaatgttttccccgtgtccctattgagctgtcaggtaactgaaatgaaacaggtatgggcccattatcatatgatgcaatcccatcaatraggcttttatccaagccattggctggcaaataagggtattcaataattgaaaatttatggaaataaatttttaagtaagtacaactccaagaaaatgcaattgtcttttattagactgcagatgtgtcttatgacttgcttgacaagtcttattcaaacctttcctctgccaatttttcaaattccagcttctctgggctagttttcttgctgttttcaagatattgtttgtatcttagaaacagtacgatagattgtatactgggaaagacaaaagaaccaccaaactcatctacttgttatcagttggacaatcaccggacccagcaagatgcaacagataattgattacgaaatgca

SEQ ID NO: 475 - DNA, 528 bp, Homo sapiens
cagatagattttccaagtactgaaagattttcttttcttttctgagaaggagtctcgctctgtcacccaggctggagtgcagtggcacgatctcggctcactgcaacctccgcctctggggttcaagcaattctctgcctcagcctcctgagtagctgggattggaggtggctgccaccatgcccggctaattttttgtatttttagtagagacggggtttcactatcttggccaggctggtcttgaacccctgacctcgtggtccacctgcctcggcctcccaaaatgctggattacagggtgtgagccaccgcacccggccaaaagattttattagaaaaagtttactctatgtgttaaaatygaaaggaaaaagcaaaaccaaagccaatgtgttgatccctctgccagggtagactctggcaggggctgcatcctcctgaaggtacacttggggaggcaaacgttgactcatctgtagtcaaggtacttaagcgattcccttcttagaatctccccatggaaaa

SEQ ID NO: 476 - DNA, 528 bp, Homo sapiens
cagatagattttccaagtactgaaagattttcttttcttttctgagaaggagtctcgctctgtcacccaggctggagtgcagtggcacgatctcggctcactgcaacctccgcctctggggttcaagcaattctctgcctcagcctcctgagtagctgggattggaggtggctgccaccatgcccggctaattttttgtatttttagtagagacggggtttcactatcttggccaggctggtcttgaacccctgacctcgtggtccacctgcctcggcctcccaaaatgctggattacagggtgtgagccaccgcacccggccaaaagattttattagaaaaagtttactctatgtgttaaaattgaaaggaaaaagcaaaaccaaagccaatgtgttgatccctctgccagggtagactctggcaggggctgcatcctcctgaaggtacacttggggaggcaaacgttgactcatctgtagtcaaggtacttaagcrattcccttcttagaatctccccatggaaaa

SEQ ID NO: 477 - DNA, 735 bp, Homo sapiens
tgttctccgtattcttttcttgtttaaaaggttgttattattatckttgactagttttcctttttaactaagtgaaagtgcttttcaagtgttttctaatatctaaacatagaagactaggccagctgctggaaggttattttaaataaagtattttttaaaattttatattgcaaactttccatgggtgagggatgagagtatcaacccatttccaaatataaagggcgaggacttttgctcaaagattagaaatcttatcatgtgattttaaaaccagtgcagaatatgttttctggaaagaaagtgggacataaagagcagatagaaattgtacaaaagttgtgcatttaataagtatattttccaaatattagttgatgaggaatatatcattttcaatttgggttttaaattatttactgtggttagaagtgcaatgtggccataatagaatcctaaagaatatgaccaaacttgacatcctgagagtggaagccccatgacaatctcaacaccaaggtcagaggatgatttattgagaaaggatcagtccctggaaaaggtgacaattcagaaaaaaatagaggtgcttgaaattttgagcttaaattcctagaagtgtgaatttatctggtttcttctaactaatctttttcaataagccagtggaccacagttttttgcttattgtaagtacatttatttgtttattataattaaatctattgactg

SEQ ID NO: 478 - DNA, 1190 bp, Homo sapiens
aaggagctttctgaggagtacatcgcctacccaccaccccacttcaactggaaatctgtttccagtcagcagaaaactgaccaaagacccatcatcaattatactttgtgaggatggttgtctctgaaatatgcagagtggcccagaaattgtagaaaagaagggttkggaaggtccatgcctataaagccaacaagacactttctgcacctcaagaaaagtagtctcgctgttattgtattctgtctgatcaattttccttattttaatgacacatagttttcatgttttgtaatatttttgtcatcacacatggtaaaaagccaacccatatagtctgaggtggaggatgggaaagcataagacattcatacagtgacccttcaaacagtcacagatgacatggttcctggacagtggggcatatctcccagatgaatttcaatgaaagcaattctatagagagcagagaccattgtggcctaaacaaagagcttttcagtgacccaggaagagccaagtatactacttcaggcacctggagcaatggatgacctgaatgtcctcaacacaatcctggatcattatctttactttcaaccagattttgataagaggagatgtagtcagtgatttgtaatcccacagtggtttgccaatggttgctattagcaggaaatcaattcagagatgtcatttgaggatgaagctcctcggtattttgatgcctttttaggaagctaagaggagctccactaccagctcttcagaaaaaatctcctgagttgcctaatttcacctgaatttttggagcacacatttaaaaattacttgtgaatcaaattcaatttgaaaatatgcaactttttttagctcttgctttctccctgagctatttcttgaaaattgtggaggaattgcttctgctcattgggcccatttacatgaattatttatttttatatgtattacatatttgtctctcctccctcctacaagctgttccatagcaagacctctcgtccctatatatattcatggtgacattacagccatcttcaccctctgatgtctaaaggaaatggaaattctgagggtcttcgaaaagcaaaaagccaggtttcctttattctagatttctagaggatttcatagccactaaatctgtaataaccagaagtaacatacat

SEQ ID NO: 479 - DNA, 738 bp, Homo sapiens
ctttggggtggagacagaagaaacccacctttcttccccctatttctttgcactatgctccacagcagaagataacattacaaacttcccaagtagaacaaaatgtccaaagtctttggttcttgggctgtagatccctactgtcctggtggagaagagggagctgatgcagtctgaccagaaaatcatgctgtgaagacaggatgcggagaacattggtaattcttctagcaggaatcaattttattccacaagttgagtataaaatagtgccacattccttattgtttccttcagtctctatcatgttttgcgggggggtgctgcctagacggtactcagacataggcaaaggacatggtctctgagggtactcatcatccttaaagttgcttcacccaaaggcaagctcctttgggtgctccatccctcagtgcctatggaggtatgggagtctttgaggttcccaaggctcctcttcagtgttccaaccctggtaccccatgctgcccatcagaggacctcacctcttcatctctgctgagaaacaaggcacagttctccagctgattcccaggtraggcactgctagaagactggatatggaggagagaagccaagccttgctccctctctctctgcttctgaagatagcatctccagcagctgccacttctcctctgtgcccccagctcccattgcacaggtcagccctggtttcagctgccctcaggctct

SEQ ID NO: 480 - DNA, 584 bp, Homo sapiens
gacacccaggttgatcaggggatgagcgacagaccaagaactagaactcaagtatccaaattccactgccccctccaatttgccaatgtcccttttaaagagctcttggtcaaaaaggtcaaaaaagagcccttggtcatygcttgggaattgaatcctgctctgccctcaactggctgtggggcctagggggctttccatgacactctgcttcattcattccttcaataaacattatcaagctctcactatattccagacactgtttcaggcagagagtgtgcagatgaatgaaaatcctcatcattacagagacttcactccaggggaagggaacaaataaataaataaaagttattagaaaaaaaatgctgagtatatctgttggtgatatatgacactggaaaaaagaaataaagggaggtaaagtgacttccagggtggagaggttgcaaattttaaatagcatggtcagggaaacctcagtgtctgtctctatctgcaaatgggaataataacagcataaaccttacagaatcactatgaggatcaggcaggttaagccacataaaaggccaagcaca

SEQ ID NO: 481 - DNA, 584 bp, Homo sapiens
gacacccaggttgatcaggggatgagcgacagaccaagaactagaactcaagtatccaaattccactgccccctccaatttgccaatgtcccttttaaagagctcttggtcaaaaaggtcaaaaaagagcccttggtcatcgcttgggaattgaatcctgctctgccctcaactggctgtggggcctagggggctttccatgacactctgcttcattcattccttcaataaacattatcaagctctcactatattccagacactgtttcaggcagagagtgtgcagatgaatgaaaatcctcatcattacagagacttcactccaggggaagggaacaaataaataaataaaagttattagaaaaaaaatgctgagtatatctgttggtgatatatgacactggaaaaaagaaataaagggaggtaaagtgasttccagggtggagaggttgcaaattttaaatagcatggtcagggaaacctcagtgtctgtctctatctgcaaatgggaataataacagcataaaccttacagaatcactatgaggatcaggcaggttaagccacataaaaggccaagcaca

SEQ ID NO: 482 - DNA, 1333 bp, Homo sapiens
ggtttcaagcaccgctggcatgtgtgttagtcctgagtccacattcctcttgtgggtaccactggttggatagccatcttcacctccttctcccacagtaatctcaaactcaaaataatttttctgtcttgggctgagttttccagaaagtggagcctgggacaaagacttatgtattgtcttagtcacagttctccaaagaacagaaccaaaaagatgtgtgtgtgtgtgtgtgtgtgtgtgtgtgtgtgtgtataaatatatacaaaatctattgtaaggaattggtgcatacaattatagagactggcaagtccagaatctgtaggatgggtcagcaggctgaaggcccaagcagagttgatgttgcagcttaagtctgactgccatctgctgtcaaattcgcttttgcttgaggaagggcagtcttttattatatttagtccttcaaccaattagatgaggcccacccacattatggagggcaatctgttttgcccaaatccgctggctttactgtgaatcttatttaagaaatgccttcacagaaacatccaggataatgtttgaccacatgtctgggtaccatgacccagccaagttgacacataatattaaccttcatatatgtgaatatcttatgtaggaaagtgatctcaaggagaagtgagggaaaaggagcatgaaacaaggaagtggggagatccaaaacaatgaggaattcccaggttggtcatgggaaactggctgattcagaggctgggtggaggaggcatttttttccatcagatctcagcctctactggttaccttgaaagcagaaatcatatccagtcatctcttcacatgcacatcacagaagtctcagcttgaaccaaaataggtgctcaggaggatatttgcagatgcggtgcagaagggactatgcttggaccattcatggaaggacctcctacctgataccctgatgcagaaggctggggaatgatcacattatgtcctctggytgagtttcagaacaggtgagggccttggttatctggactgtgttagggatagacttagctcaacaaagaggggctggggagaatccatgtgcctcagtggagcccctttcccttacagtgagggccttaagaagccgaagtgtagtttaagcagaagctgagttcttgagattctatccaggggaggttaagtgttggcccgtttcctgaagagccagtgcttctaggttctgagaatttgttccctaatctctgcttacaggactccaggcggctggagtctgcatgaaaggggcctttgtctgatatgggaatggtttttgggg

SEQ ID NO: 483 - DNA, 659 bp, Homo sapiens
ctgttgaaatttcaaaaccaaactttgaactttggtagtagagcttgaagtcccaactgtgtcaatttcttatattgcaacatgagggatgtccctgtcttggactcacatgtcttgggtgagtgccgaacatgaacacagccggacaccgccactgacacagagtgggttctcgggtaaagttcatccactcggtcactgatatgggtgagcaggcacagtctcagtttatgcctattgtctaacataactactagtagtgtccactttcctttaaaagtgtcctatttggatgatccattttatagtcaccctagtttcagtagaatgtaatttggaattgttccttggaaggttcctckgaggcaatggcatctattgcagacatacatccccaagggcatgcagttatccctcacgtttctgtcttccttctctcctccttttcttaagcccagggggtcttaaattccttctcttcatttgtactgggaggaacacttttgagatcagaaagaagtgatagagaaactgccctgccctgcctctattagtggaggccgattaacttttatttttccccacatttctttctagaggagtcatttagatcccttaatttagagcccaggacattccagagtgctctgggataacaa

SEQ ID NO: 484 - DNA, 659 bp, Homo sapiens
ctgttgaaatttcaaaaccaaactttgaactttggtagtagagcttgaagtcccaactgtgtcaatttcttatattgcaacatgagggatgtccctgtcttggactcacatgtcttgggtgagtgccgaacatgaacacagccggacaccgccactgacacagagtgggttctcgggtaaagttcatccactcggtcactgatatgggtgagcaggcacagtctcagtttatgcctattgtctaacataactactagtagtgtccactttcctttaaaagtgtcctatttggatgatccattttatagtcaccctagtttcagtagaatgtaatttggaattgttccttggaaggttcctctgaggcaatggcatctattgcagacatacatccccaagggcatgcagttatccctcacgtttctgtcttccttctctcctccttttcttaagcccagggggtcttaaattccttctcttcatttgtactgggaggaacacttttgagatcagaaagaagtgayagagaaactgccctgccctgcctctattagtggaggccgattaacttttatttttccccacatttctttctagaggagtcatttagatcccttaatttagagcccaggacattccagagtgctctgggataacaa

SEQ ID NO: 485 - DNA, 599 bp, Homo sapiens
aacacctatcaaatgatttgttgacttcattgtcagttttatgcagatatggagtaaagttcattcagctatgctcaggaagtcatttctttcccttcaaatatgtctcccacttgcttgataatgactaaaattatatttagaagaaagctttttattgtagcattacttagaaatatcaaaatgcaaataactcttggagaaataagacattgacctaaagttccacaaaggcataaattactgacatcaaatcatttattgaaagaagtaggaagtggctgggtgcagtggctcacacgtgtaattcagcactttgggaggccgaggcaggcggatcatttgaggtcaggagttcgaacccagcctggccaacatggtgaaacaccgtctctactaaaaatacaaaaattagctgggcatggtggtgggcccctktaatcccagctactcgggagcctgaggcaggagaattgcttgagcccaggaggcagagggtgcaatgagctgagacataccactgcactccagcctgggcaacagagagacaccctgtctcaaagaaaaaaaaaaaaaaaaaaagcagcagcagcagcagc

SEQ ID NO: 486 - DNA, 599 bp, Homo sapiens
aacacctatcaaatgatttgttgacttcattgtcagttttatgcagatatggagtaaagttcattcagctatgctcaggaagtcatttctttcccttcaaatatgtctcccacttgcttgataatgactaaaattatatttagaagaaagctttttattgtagcattacttagaaatatcaaaatgcaaataactcttggagaaataagacattgacctaaagttccacaaaggcataaattactgacatcaaatcatttattgaaagaagtaggaagtggctgggtgcagtggctcacacgtgtaattcagcactttgggaggccgaggcaggcggatcatttgaggtcaggagttcgaacccagcctggccaacatggtgaaacaccgtctctactaaaaatacaaaaattagctgggcatggtggtgggcccctgtaatcccagctactcgggagcctgaggcaggagaattgcttgagcccaggaggcagagggtgcaatgagctgagacayaccactgcactccagcctgggcaacagagagacaccctgtctcaaagaaaaaaaaaaaaaaaaaaagcagcagcagcagcagc

SEQ ID NO: 487 - DNA, 1047 bp, Homo sapiens
gcaggaaacttgaaggatggttagggcttgtctatttggaatggagagagaggccacaaaggagtgcgtgtgtagaaataatgagtaataaaggaggtcaaggttagtagggacgtgtgtggttacaaatagaaatatttggatttgtaccataacatttctattacaacttcctttctcccattccaaacatgcttggttttacagaaaaaacttccaggactcagatttccatgggtattagtttkcaaactaatccctgatgagatattatgaggagctaagagagtgatgctagaattctcaagtggcaatggcaaatttcagggctgacttcctggataaccaattctttttttttattctgagcatgggaatttcagttcatccagcagaagaaatgttttttgatagatgtgacttttggtacattttgaattatgtcatcttggggacaaatggtcccaaaagccaaggtcctaaatgtgtacatctgatccaactctaagaacttttgctcagttgtgacgtcaaagaatttctattttagagtggtcttctgcaactgataccatccatatttctgtctccaaagcagagaaacaagaaaatcaatttgccaatataactgaataaatccaggtaaatacatatttggctttcaattagccagggagtctgaatttctagagaatattgaagagacagcgtcagacaatgcaatttcctttaatagggaccataacctcagagttgctgctctgttttttaatattgtacaattaactttttttttttttgcagcacactctgcttatagcttctgtggaaacttaaacattattcaatagaataatttcctggaaaatcttttgaaagtggtcacagccctgaccttgctctggtgccctgggtccaccagcatgctgtttcattacctcaggaaggtttggtgccaagagacagtccaagagttagtgcataaagaaagctaggttcataaaagaattaatatctgccttctttcaaggagggaaactgccactt

SEQ ID NO: 488 - DNA, 1047 bp, Homo sapiens
gcaggaaacttgaaggatggttagggcttgtctatttggaatggagagagaggccacaaaggagtgcgtgtgtagaaataatgagtaataaaggaggtcaaggttagtagggacgtgtgtggttacaaatagaaatatttggatttgtaccataacatttctattacaacttcctttctcccattccaaacatgcttggttttacagaaaaaacttccaggactcagatttccatgggtattagtttgcaaactaatccctgatgagatattatgaggagctaagagagtgatgctagaattctcaagtggcaatggcaaatttcagggctgacttcctggataaccaattctttttttttattctgagcatgggaatttcagttcatccagcagaagaaatgttttttgatagatgtgacttttggtacattttgaattatgtcatcttggggacaaatggtcccaaaagccaaggtcctaaatgtgtacatctgatccaactctaagaacttttgctcagttgtgacgtcaaagaatttctattttagagtggtcttctgcaactgataccatccatatttctgtctccaaagcagagaaacaagaaaatcaatttgccaatataactgaataaatccaggtaaatacatatttggctttcaattagccagggagtctgaatttctagagaatattgaagagacagcgtcagacaatgcaatttcctttaatagggaccataacctcagagttgctgctctgttttttaatattgtacaattaactttttttttttttgcagcacrctctgcttatagcttctgtggaaacttaaacattattcaatagaataatttcctggaaaatcttttgaaagtggtcacagccctgaccttgctctggtgccctgggtccaccagcatgctgtttcattacctcaggaaggtttggtgccaagagacagtccaagagttagtgcataaagaaagctaggttcataaaagaattaatatctgccttctttcaaggagggaaactgccactt

SEQ ID NO: 489 - DNA, 1047 bp, Homo sapiens
gcaggaaacttgaaggatggttagggcttgtctatttggaatggagagagaggccacaaaggagtgcgtgtgtagaaataatgagtaataaaggaggtcaaggttagtagggacgtgtgtggttacaaatagaaatatttggatttgtaccataacatttctattacaacttcctttctcccattccaaacatgcttggttttacagaaaaaacttccaggactcagatttccatgggtattagtttgcaaactaatccctgatgagatattatgaggagctaagagagtgatgctagaattctcaagtggcaatggcaaatttcagggctgacttcctggataaccaattctttttttttattctgagcatgggaatttcagttcatccagcagaagaaatgttttttgatagatgtgacttttggtacattttgaattatgtcatcttggggacaaatggtcccaaaagccaaggtcctaaatgtgtacatctgatccaactctaagaacttttgctcagttgtgacgtcaaagaatttctattttagagtggtcttctgcaactgataccatccatatttctgtctccaaagcagagaaacaagaaaatcaatttgccaatataactgaataaatccaggtaaatacatatttggctttcaattagccagggagtctgaatttctagagaatattgaagagacagcgtcagacaatgcaatttcctttaatagggaccataacctcagagttgctgctctgttttttaatattgtacaattaactttttttttttttgcagcacactctgcttatagcttctgtggaaacttaaacattattcaatagaataatttcctggaaaatcttttgaaagtggtcacagccctgaccttgctctggtgccctgggtccrccagcatgctgtttcattacctcaggaaggtttggtgccaagagacagtccaagagttagtgcataaagaaagctaggttcataaaagaattaatatctgccttctttcaaggagggaaactgccactt

SEQ ID NO: 490 - DNA, 1047 bp, Homo sapiens
gcaggaaacttgaaggatggttagggcttgtctatttggaatggagagagaggccacaaaggagtgcgtgtgtagaaataatgagtaataaaggaggtcaaggttagtagggacgtgtgtggttacaaatagaaatatttggatttgtaccataacatttctattacaacttcctttctcccattccaaacatgcttggttttacagaaaaaacttccaggactcagatttccatgggtattagtttgcaaactaatccctgatgagatattatgaggagctaagagagtgatgctagaattctcaagtggcaatggcaaatttcagggctgacttcctggataaccaattctttttttttattctgagcatgggaatttcagttcatccagcagaagaaatgttttttgatagatgtgacttttggtacattttgaattatgtcatcttggggacaaatggtcccaaaagccaaggtcctaaatgtgtacatctgatccaactctaagaacttttgctcagttgtgacgtcaaagaatttctattttagagtggtcttctgcaactgataccatccatatttctgtctccaaagcagagaaacaagaaaatcaatttgccaatataactgaataaatccaggtaaatacatatttggctttcaattagccagggagtctgaatttctagagaatattgaagagacagcgtcagacaatgcaatttcctttaatagggaccataacctcagagttgctgctctgttttttaatattgtacaattaactttttttttttttgcagcacactctgcttatagcttctgtggaaacttaaacattattcaatagaataatttcctggaaaatcttttgaaagtggtcacagccctgaccttgctctggtgccctgggtccaccagcatgctgtttcattacctcrggaaggtttggtgccaagagacagtccaagagttagtgcataaagaaagctaggttcataaaagaattaatatctgccttctttcaaggagggaaactgccactt

SEQ ID NO: 491 - DNA, 2070 bp, Homo sapiens
  misc_feature (1)...(2070): n = A,T,C or G
tgctgtaaaacttctattttagtgttcaaagatatttaggaataaatcaattgacctctctattttagatgtgaaataaggaccagaaagcattgttcctctttccaggcagtgaaattcctgcctattcattaactggcaaaagagtagaggtgggagcccaatggtcttgggtggaatgtcctgcggaattccctgggattgaggaaccatgcagaaccctcaagaagaagccacactgggcaacaagagggtggccccatgtgagggacagggggaccgaatcgcttttcctgatttcctattttagcctcactctcttctctcctcaaattcttaccactccctttatcctctctgactcacctcatggcccagttcattaaaggggacagaaggtggaggcagattgagaaaccagcagtgggcagacatttttatttttaatgtgaaatgtctctttagggggctcatggttgatgtgcttgagagagtactctgggagaaaaaaatactctactaatatataatgcttccagcatgtatttattttcacttagaatattattgtagcagttcctcntagataaggcaccttgggaatgatgttatcagaaattctacatccacataattctcttttcctgttgttttggttagacttgggtggtgtggtatagctttgcccacctctcccctggtagttgttggatgcattaaattctacaaatgtgattttataaattagttgccctcctaatggcctcctggctgtacattcttccctaccttcataatccatcagcatcgtgaaagcacagagggacgttgagcagagctctgtgctggcgccaccgcactctgtagcctgtaagagagcagcaaagaggaatgtgttgctcaggtatagacgggggtgggtgcatagagacttccgctgcggcatggcccttcatgtccagggtaggcatgaagcaatggactattccaggttgtgcataggaaaccacacagcactcttggagggatttttgctctaaagacaactaattcaaaataaggcgctttctacctgaaagaacagcatgaactaagaaaagagatatatagagagatctctgtgtactatgatcaggttgcacatattctgggatttatgtattcttattagttcaattccttatttattgaccacttactgtttacaatattgtattagattcttttaggattacagttgacccttgatcaatttcaggggttggcacactgaccatacacagtagaaaatccaggtataactctgactctcaaaaacttaactactaacagcctgctgttgaccagcaacagttaataacatgtattttgtatgttatatgtatgatatactgtattcttacaataaagtaagctagagaaaaggaaatgttcgtaaggagaaaatacatctgtggtactgttatgtatttttccatacagtaagtttacaccacctgtttacaagatgaatcatctgtctgaaatggaagcaaccccagctacagacctcagtctctgttacatatcaagcaaatccagtttttcttgtaatgtcaaatgtcatgacttttctctgcttcttgggagcacttccagcatcactagtgccacttcatattggatcccatggtgttattcaaggtttacagtacagcacgaaacaggacgaaaaatacatgcgaacagggagagagcactttttactgtgatgcgcaattcactggggatgaactgctcatgatggaatgttgagtatcacagaaygttttaagtggatactcgcaacacctttgctcattgcaacagcaacaggaggaggatatgaaattattaccatagtgtggtatgcactacggttaaatttatgcagttacaatttaatactgcatcttgatgtttgtatacacttctctcaactgagaatagcaccatatacgatctgtgagtgtgtacacaatttttactaaattttaacttttgcaatagttttgttatattttatggtagtaaagaataaaatagactagg

SEQ ID NO: 492 - DNA, 626 bp, Homo sapiens
gaaagaacagtgcctaaggttgaggcagctagaggaggctcagggaggaggcaggaactgagctgggtttggagttgagagagcccttgacaagcaccaggaaggygggggatggtgtggtcctgcaccctctgatggggaccattaagagatcgagttggctgaagcataggctttgtgtaagtgatgggcctgggaaggtagctatggacgccagactgagcacccacggcaggaccatgtggatggggacgggaggggtcaggggccagggcagggtggaatgtggagcagaggttcaggggaagtgatcagagtcgggaggtcatggagacgagcctcccagaactgggagacaataaacttatgtcattgaagccatgcagtttatgaccctctgttattgctgccctagcaaatggatacaggtagccatttagattgtctgctgagcccactaatgtctgctgagcccactaactaatgatttgataaatatatactcatgtctgcctctctggggatttgtgatagtttttttgagttatatgtcataaaataggatagctgcatcatctggtatacatatgatcaaactcactaaataatgacagatttctcttcag

SEQ ID NO: 493 - DNA, 626 bp, Homo sapiens
gaaagaacagtgcctaaggttgaggcagctagaggaggctcagggaggaggcaggaactgagctgggtttggagttgagagagcccttgacaagcaccaggaaggcgggggatggtgtggtcctgcaccctctgatggggaccattaagagatygagttggctgaagcataggctttgtgtaagtgatgggcctgggaaggtagctatggacgccagactgagcacccacggcaggaccatgtggatggggacgggaggggtcaggggccagggcagggtggaatgtggagcagaggttcaggggaagtgatcagagtcgggaggtcatggagacgagcctcccagaactgggagacaataaacttatgtcattgaagccatgcagtttatgaccctctgttattgctgccctagcaaatggatacaggtagccatttagattgtctgctgagcccactaatgtctgctgagcccactaactaatgatttgataaatatatactcatgtctgcctctctggggatttgtgatagtttttttgagttatatgtcataaaataggatagctgcatcatctggtatacatatgatcaaactcactaaataatgacagatttctcttcag

SEQ ID NO: 494 - DNA, 626 bp, Homo sapiens
gaaagaacagtgcctaaggttgaggcagctagaggaggctcagggaggaggcaggaactgagctgggtttggagttgagagagcccttgacaagcaccaggaaggcgggggatggtgtggtcctgcaccctctgatggggaccattaagagatcgagttggctgaagcataggctttgtgtaagtgatgggcctgggaaggtagctatggacgccagactgagcacccacggcaggaccatgtggatggggacgggaggrgtcaggggccagggcagggtggaatgtggagcagaggttcaggggaagtgatcagagtcgggaggtcatggagacgagcctcccagaactgggagacaataaacttatgtcattgaagccatgcagtttatgaccctctgttattgctgccctagcaaatggatacaggtagccatttagattgtctgctgagcccactaatgtctgctgagcccactaactaatgatttgataaatatatactcatgtctgcctctctggggatttgtgatagtttttttgagttatatgtcataaaataggatagctgcatcatctggtatacatatgatcaaactcactaaataatgacagatttctcttcag

SEQ ID NO: 495 - DNA, 626 bp, Homo sapiens
gaaagaacagtgcctaaggttgaggcagctagaggaggctcagggaggaggcaggaactgagctgggtttggagttgagagagcccttgacaagcaccaggaaggcgggggatggtgtggtcctgcaccctctgatggggaccattaagagatcgagttggctgaagcataggctttgtgtaagtgatgggcctgggaaggtagctatggacgccagactgagcacccacggcaggaccatgtggatggggacgggaggggtcaggggccagggcagggtggaatgtggagcagaggttcargggaagtgatcagagtcgggaggtcatggagacgagcctcccagaactgggagacaataaacttatgtcattgaagccatgcagtttatgaccctctgttattgctgccctagcaaatggatacaggtagccatttagattgtctgctgagcccactaatgtctgctgagcccactaactaatgatttgataaatatatactcatgtctgcctctctggggatttgtgatagtttttttgagttatatgtcataaaataggatagctgcatcatctggtatacatatgatcaaactcactaaataatgacagatttctcttcag

SEQ ID NO: 496 - DNA, 467 bp, Homo sapiens
gatcaatttttcattccctctggttgaacttcaagtactaataaacactatagcatgaaaacatatggatattttgggtctggggcttggtttgcagccttggtgaaaggtagtttgttttgttaaatttttttcttcttgtatgcagggttcgaactaagatacaaaaggaagtaggaaagttgaaatgtgccctgaagttttgaaaagagaaaagggaggattttagcctactctgtacttgctgattagtgtatcttaaacaccaamcaggcagatggcttccagaattcctaaacagaagtggagtcactgtaaccttctcatggtttcctgcacacatggcctttagaatatgggagcattttttattatagtttaaatcaaatatttattgactacacattgtgctaggtgtggggaatacagagaattcttagatgtagtctttgcatttaagggatgca

SEQ ID NO: 497 - DNA, 589 bp, Homo sapiens
taatctgggggagagtaaactaaggagaaaatgtactgtgctccatacagagctgtattatgcacttttaaaagcaatttaagaatgtttggtctatttctatcttctttaccaaaaaaacccaaaactttgctttggattttagttatactttctaatagctgaattagccttttctctatttttctctctggttaattgacaatctggctactagagtattcttcatggggaaactggatgtggctggcagctgtcccttcatgccaccatctcatattataggtcctgctattattgttaaattggtttctacctttatcgatttttagtcatatatctttcctcttttcctcagagtgctatcctacttcattagtgccgctttgttgaaaaataagccactaycctgcctcttattgagatacctattccttgggaccccaagaaaattcatgttagattttgttgcttctgaagttttaactcttaaacaacctatttattgtaatcttaggatatgttcagtgcatgtcttctagtagacttttggggcaaaagaaacgatgtaaacatatttaaacataaa

SEQ ID NO: 498 - DNA, 585 bp, Homo sapiens
atgaagagtgaataccattaaaagtgcatgagcagagaagagacagcgtaaatataagaaactgtcatctgaaagctcactcctagagagctctcaaatgggaaagattctattcagttctgcctagagacagcaacatggaccacatgatttcttccagtctaaatgtgaaaaccatgatgtcacacccagctcactggtcttccagagcccatctgccaaccagttcataccaatcggctttcttctttctgtttgtagctcttgctttgatcctcctcactctccttcttcccatctaaatattctccaagtgcttccctgtgatggaaaaaagcagagaaaatgaagttatttctaatacgtaaattctatatttaaaggttttggcctggcacagtagctcatgcctgtaatcccaacagtttgggagaccaagacaggaggattgcttaaggccaggarttcaagatcagcatggccaaaatagcaagacccccatctctatttatgtaaaacaataataataataataataataataataatggttccattgtacttcatatataaatatatattcca

SEQ ID NO: 499 - DNA, 1195 bp, Homo sapiens
tctttgcttcttgtttctataataggcttccccctgcacagatctcccctcgccccacaaaatgcttaaaaggtagcttaactctgttcaaggctgtgtcctttaaatgttaatctgactggtttggtgcatctaaataattaaataattcctcctcaacccctcggtctctctgattctttaattatcccactgcaatatagtctaaatatttttccctatcagtaggtgtagctatacatcatcatttttaatgaccacatggtgttcctttgtatggctatatcctagtttatttttctaggtgcctctttttagaggacatacacacactggaatgcacattgtttgtgcacattatctattcactcatccacttctctttctctctctctttctttttcttttttttggagacagggtgtcgctctgttgcctaggctggagtgcagtggtgtgatcactgcagcctcaacctccctggctcgggcaatcctcccacctcagcttcctgagtatctgggaccacaggcatgtgccaccacacctggctaattttaatttttttttttttgtagagatagggtccctcctatgttgcccaggctcgtcttgaactcctgggctcaagtgatccttccacctcagactctcaaagtgctggggttacaggcgtgcaagctgtgcctggcccacttatattataaagcatctttttagaaatggaattgctgctgagtgtcagtttcttacttctgtctccaaagccttcttttacaggcctggcttgttttgttttgttcttttgttttatggtgagagccaagtaaacaagaacttaatgtcattccatctgtcaattctgtgtgtggctttttttttttttttttttttttttgagacagagtatctctctgttgcccaggctggagtgcagtggcaygatcttggctcactgtgacctccgtctccccggttcaagcaattctcttgcctcagcctcccgagtagctgggactacaggcacgcgccaccacacctggtgaatttttgtatttttagtggaggcagggtttcaccatgttgtccatgctggtctcgaactcccgacctcatgtgatctgcccacctgggcctcccaaagcgctgggattacaagcatgagccacagtgcccagtgtaattctgtgtgttt

SEQ ID NO: 500 - DNA, 664 bp, Homo sapiens
gtctaacaggtttttatgggattcgtctggaaaattaataccatatgttaacactctttctatgggaaaatgcttctgaggaagaaaccaccttacaaactaacttaggcgtgacccagtcattattagactatagagactgccaccacccagttctgggcgagtcaggagcagtatactatgaaaagctgttactgccacctgcctcgtattctgccttttgaaacaagtcacaggatcacagaacgcccaggagcaagcggctgatctctctaaaaacagaacaaaaccttttcagtgttttgctttaaaataatcaatgattctctgagacaagtggctggacattagttttctccccatagctccctccccttttgcacttaccaaggaaaacaaagaagacaatctgaaaacaattaaaaggatttaaaaattactcttttacttttattacaataaataattatcaataatagaattaaacaattttcaattaaaacctactgcattactttggggtttcacagcagcagaaacaaacataaatccagttgaaagggcaaggcttccagaatccagtgacaagaaacagtctggtcttgattattcgggctagcaatgggaaayactgatacagataatgcaaaaacaatgaaatgca

SEQ ID NO: 501 - DNA, 1112 bp, Homo sapiens
ttctgatgcgatacctgcaaaaatatagtaaaccgcagatttgatatagttgactcctgcttggatccttgggcataaaaatgattaataaaacatgactacataacttagataattcacttctataatatgtaaaaacaaaaatgttgctaaattaataattcctgaattcctaggtgcttcctgaagtggctgagttgtaaatcacattttctattacctgtggtgagactcagagaatgctttcatttactctgttaggcttggaaaatacctctataagccattccagagaagaagctgatacaatttggattttgtcccctacaaatcttatgttgaaatgtgacccccagtgttggggatgaggccaggtgggaggtgttggggtcatgggggcagactcttcatgaatgaagtggtgctcttcccatggtaatgagttcacgcaagatcctgttgttagagagactggaacctccttcctctctctcttgctccctctccttttgccctgtcacaagcctgctccccttttgctttcaggcatcagtaaaagcttcctgggcctcatmagaagccaagcagatgctggtgctgtgtgtacagtcaacagaactatgagccaaataagccacctttctttataaattacccagtctcagatattcctttgtagtaacacaaaatagattaatactaaagtctttctcagtttttggtgacttgtatcttttgtaaagtaaactaaaataaaattgtgtctcctctctacgtcactaatcatgtccagtcctaagacaaatcagaatggcactctcccttccttctcttgtgtctttcttttctccttccagaactaccacaccccagcttgggcctgggaagcataatttaacatagaagctttgcactttgcccgtcaggtttaccaggctcccagtctattattattttatgataaaatttgtctttgaaaggagtctgaatgttagtgcaatacttttccaaatagtgtcttcatagggcttcaagggatagtttaaatgcaaaacaaattcaaggctttctgatttctcaattaactcttacataaagttatcaaatatgca

SEQ ID NO: 502 - DNA, 1112 bp, Homo sapiens
ttctgatgcgatacctgcaaaaatatagtaaaccgcagatttgatatagttgactcctgcttggatccttgggcataaaaatgattaataaaacatgactacataacttagataattcacttctataatatgtaaaaacaaaaatgttgctaaattaataattcctgaattcctaggtgcttcctgaagtggctgagttgtaaatcacattttctattacctgtggtgagactcagagaatgctttcatttactctgttaggcttggaaaatacctctataagccattccagagaagaagctgatacaatttggattttgtcccctacaaatcttatgttgaaatgtgacccccagtgttggggatgaggccaggtgggaggtgttggggtcatgggggcagactcttcatgaatgaagtggtgctcttcccatggtaatgagttcacgcaagatcctgttgttagagagactggaacctccttcctctctctcttgctccctctccttttgccctgtcacaagcctgctccccttttgctttcaggcatcagtaaaagcttcctgggcctcataagaagccaagcagatgctggtgctgtgtgtacagtcaacagaactatgagccaaataagccacctttctttataaattacccagtctcagatattcctttgtagtaacacaaaatagattaatactaaagtctttctcagtttttggtgacttgtatcttttgtaaagtaaactaaaataaaattgtgyctcctctctacgtcactaatcatgtccagtcctaagacaaatcagaatggcactctcccttccttctcttgtgtctttcttttctccttccagaactaccacaccccagcttgggcctgggaagcataatttaacatagaagctttgcactttgcccgtcaggtttaccaggctcccagtctattattattttatgataaaatttgtctttgaaaggagtctgaatgttagtgcaatacttttccaaatagtgtcttcatagggcttcaagggatagtttaaatgcaaaacaaattcaaggctttctgatttctcaattaactcttacataaagttatcaaatatgca

SEQ ID NO: 503 - DNA, 920 bp, Homo sapiens
catctgagggggtcttgttggaaagactgtacagtggcaggggatttgacgctgactcctgcttccccttcccgtgtggctctgctcacctctacatgcacctcagtcccctgtctaccgagggaggccccatcacgagggcatctgaaggtagggacatggggtagggataccaccctgtggcccactgcacccctgcttggggcactgtagcccccacaatctgcgctacttcccatgggctatgtgcccaccttgtggacgcagacagcccacctgggggaacctgtgtccttgcaggggggaggtgttgggcaattcggaattggaagtctgagcagcagccgtttggatgctggctgtggatgatggacagctggagaggctcccaggactgggctyatggagggagcagagcagagccagctcccagaaagcctctggccacaggcagcagcagctgctaggcagacttgggacacgggtatcatcagaaacaacagctctccatggtgtcctgagaggagacctctccatatgaggggtaccagggacacagcaggcagtggccagtggctcctccttcctcaggtacagacaggcctgatcccacacacttcccaagaggcccctagagaggctgcccctccctgggcactggcccaactgctcctgtgagtccctctgaggatgccctagaaacgtgggctgctttgagaacccccatggggccaggaggttgacccagcagtaggggaggctcccggtggggtgagggcttgggacctccctgggatgccacacactggccccagaccacatgtgcagttacagcgtcctgtttcctgcttacaaaaatgccactaagtcaaggagagcttttgaggaagaaggaaaaatcactatgttaaatgtacaca

SEQ ID NO: 504 - DNA, 1070 bp, Homo sapiens
aagaatatgcaatggtraaaataaatacattacttcaacagacaatgtgtttaactgtcacaaatattgagcaaaacaaaagagtgatggggaagagctcatgtttcttgatgtcatttttggtgtgtaaaaagcagaaaacactaatctgtgatgacagagataaggaaaccaagcatagtagttccccttggcaagagaaaaattgggggattctagggtgctggtagtgttccatttcatttgttatttgatctgggaggaggtaatgagggttgttcactttataaaaattaaccaaactttccacttatgatttgtgaacttttctatatgtataatatattttaataaagaaagtttaaaaggtataaatcatgaattcctacatgttcaaaagagtgaaggtcatttaatggtaatctagtatcatgtatttaagccagtttccctggcttaaattttgtcaatttttgtcaatttaaaattttgtcaatattttatttaatctttttcttattgagtaattacagtaggacttattctgcatatgagtcttttatggatatacatattacgaatattttttctattctgtggatttcctttacttcattttaatgagatgttttgatctatctcatcagtttgccttggccattccaatggaatttaataatttaagtcaatttcacttacattgtttttccatccatggtcctttaattaattgttgagtcatagtagtaatctagtccactagttggccacatgtcgtgagccaagtcacttcatatcttaagatcttacttctcttatttgtaaaatgagaatttggactacaacaataatagtttaatataatagaaattcaaagaatacaatcaatattttggaattcaaatctcggcttgcacctctacatagttatatgggtaaattaggtaaattttccatgcctcacctccttcctctgtaataagaagctaactcaacagatatatctttgtatgtttgtgtgtgtgtgtgtgtctgtgtgtgtgaagaaattacagttacttgtattagca

SEQ ID NO: 505 - DNA, 665 bp, Homo sapiens
ccatgtacaggctataaaaacatcaacttgacatacaacacaaaggctaatgccataaatcgttagtttctrctaatagaagagtacctagttctgtttgtaagactacttgaagcacattgaattattttctagctccatgaacggtaggtaaaattactgatctgaaaaaatctcccactaggttcccaatggggaaatgtttttactaacctttttgtaaaagatgaggagttaaaatgaacagacctctgatgtccacaagatgttgtccaacaattgtgctccctgataaaaagtaatttgaaattaatcagatatctgaaaaagaaaaaaaaatataaaactaatcaagaggaaaataagaggaaactctccctaattgtgttggttgtggttatgtgtaaaagtagtctaatatgtggatatttggcaatataacatttatgtttgtacatctcattcattatctgctaaatatttcatatttaaagttattggacaaggtaagtcagtcaagagtcattgaccccatttgatatgttgaaagacagacccaagagttatcttctcctggtgccataacaaataagtgagtttctaaaccaaaatataatcatgtgccacataaggacattgtgatcaatgagagactgcatatatga

SEQ ID NO: 506 - DNA, 665 bp, Homo sapiens
ccatgtacaggctataaaaacatcaacttgacatacaacacaaaggctaatgccataaatcgttagtttctgctaatagaagagtacctagttctgtttgtaagactacttgaagcacattgaattattttctagctccatgaacggtaggtaaaattactgatctgaaaaaatctcccactaggttcccaatggggaaatgtttttactaacctttttgtaaaagatgaggagttaaaatgaacagacctytgatgtccacaagatgttgtccaacaattgtgctccctgataaaaagtaatttgaaattaatcagatatctgaaaaagaaaaaaaaatataaaactaatcaagaggaaaataagaggaaactctccctaattgtgttggttgtggttatgtgtaaaagtagtctaatatgtggatatttggcaatataacatttatgtttgtacatctcattcattatctgctaaatatttcatatttaaagttattggacaaggtaagtcagtcaagagtcattgaccccatttgatatgttgaaagacagacccaagagttatcttctcctggtgccataacaaataagtgagtttctaaaccaaaatataatcatgtgccacataaggacattgtgatcaatgagagactgcatatatga

SEQ ID NO: 507 - DNA, 1238 bp, Homo sapiens
catgaacgtaggcaggtcttttcctacctacttccaagtggctggatgtgtaggctgagtggggacctgaaagccccagcctgtgagatgcctcagagtggtggtgggtgaggtgttagaccctacgagcaggcaggcagcagaagagcaaatgagcaagtccctgtgcaattaggaaggtgtcatcttttggaactcaggatggcggcccaagttcatgaaaacttcgtgaaattatcataaataaaggcataagtgagaaatataaaaacccatgtctggaatactattgttcaaagggcagctgtcagagcagaggtaaatgtacagtgacgggctgggaaggcttcggaattggtatatttgyagaacactattgtttacacagggaacgccagcaacagaagaaatagatccgattttaaaaacagattttggtcctataatgagaagagggattaaagaaaaaaggaaagagaaaacactgtcatccaggaaacactgtcagtcctgcccaggttaaaggaaaaattagaacaacttcaggaacaagtcaaaaattttaaacatacttgggctagcctgaaaaacataaggtagcaagagaaaactagagaactggaaacatatcccgcagctgcgaacagcagagacgataggaagtaaagcttctagtgacagtaaagtggaataagataaagtcagacaactaaatagctgagaaaaggcaagatgttggacaagagtgtataaaaaatataaatcgtttcctctgagtccccaagatctcagactatgaagcaataactgctgtttcaatgcagaaatctattgaggacaggggctctttccatacatttgtattagaggagttaaaattgtaattgttggtttaaatgtctagaagctagtggggtacctaataaagatattcactgaatttaaaaatattacatacatggcttccactttgaatttctgaatcctttatacttgattttgagactgctttaatataaaaaaatcaaatgcagttaaaattgcattattaattctgaaaaggtatgtgaaaattagggtgtttacatgtcatatagtgggtgcacttaggaatctcaagtgtactgatgatctaaaaccagtttctgacattaaccacacaatcttccatggcattctctaggtagagatcagtaaaactatggccagagccacatgagtagttgaaataattaaag

SEQ ID NO: 508 - DNA, 1238 bp, Homo sapiens
catgaacgtaggcaggtcttttcctacctacttccaagtggctggatgtgtaggctgagtggggacctgaaagccccagcctgtgagatgcctcagagtggtggtgggtgaggtgttagaccctacgagcaggcaggcagcagaagagcaaatgagcaagtccctgtgcaattaggaaggtgtcatcttttggaactcaggatggcggcccaagttcatgaaaacttcgtgaaattatcataaataaaggcataagtgagaaatataaaaacccatgtctggaatactattgttcaaagggcagctgtcagagcagaggtaaatgtacagtgacgggctgggaaggcttcggaattggtatatttgcagaacactattgtttacacagggaacgccagcaacagaagaaatagatccgattttaaaaacagattttggtcctataatgagaagagggattaaagaaaaaaggaaagagaaaacactgtcatccaggaaacactgtcagtcctgcccaggttaaaggaaaaattagaacaacttcaggaacaagtcaaaaattttaaacatacttgggctagcctgaaaaacataaggtagcaagagaaaactagagaactggaaacatatcccgcagctgcgaacagcagagacgataggaagtaaagcttctagtgacagtaaagtggaataagataaagtcagacaactaaatagctgagaaaaggcaagatgttggacaagagtgtataaaaaatataaatcgtttcctctgagtccccaagatctcagactatgaagcaataactgctgtttcaatgcagaaatctattgaggacaggggctctttccatacatttgtattagaggagttaaaattgtaattgttggtttaaatgtctagaagctagtggggtacctaataaagatattcactgaatttaaaaatattacatacatggctyccactttgaatttctgaatcctttatacttgattttgagactgctttaatataaaaaaatcaaatgcagttaaaattgcattattaattctgaaaaggtatgtgaaaattagggtgtttacatgtcatatagtgggtgcacttaggaatctcaagtgtactgatgatctaaaaccagtttctgacattaaccacacaatcttccatggcattctctaggtagagatcagtaaaactatggccagagccacatgagtagttgaaataattaaag

SEQ ID NO: 509 - DNA, 1887 bp, Homo sapiens
gcatatgttaaatgtgtctcacatacacacacacacactgcagttgctatgggaaccatcctggagaatttcctgtcttttatgcaattaaaatttcactctcacatcttcttgaagtggaatacactttcattcacaagaggacactaagaaaaaggtctcctgatgagtttcatttccaatgagcaggctgaatttctccaaatcggatcatcttccaagagactcccagcacgctggcaatcatcgaattagtcctaattaatgttcaggtgagcatacaatgctcaggcactgagtgagcctctctctcctcttggctctgcaaactacagcttccctgctccctctcrgagaccctctaaaagtctcttcaccttcctgggcctctaccagccatctgtggcagaccagaaagaagggggagcaaatgcccattaattcaaggctgcaggaattctgccattgtgacaattctcagagggctccactccagttaaccttccctctctcggtggagaaggaggctgcaaatgactcttgttaatacattaatgtaagctagccaactatttcaaagcactgtggaggagtccatttacaaacctaacctgggaattgccaagtcagcatatagaaggaccgcttgagcctatgtacagataaaaatcagttttatctgatatggtttggctctgtgtccccacccaaatctccatgttgaattgtaatcctaatgtgttggagcagaggcctggtgggaggtgattgcgtcatgggggcggatttcccccttgttgttctggtgatagtgaacgagttctcaggagatctggttgtttaaaagcatgtagcgttttcccattcgcatgctctctcctgctccaccatgggaagacatgcttgcttcctcttcaccttccaccatgattataagtttcctgaggtctccccagccatgcctcctgaacagcctgtggaactgtgagtcaattaaacctcttttctttgtaaactacccagtcttaggtagttcttcatagcaatgtgagaatggactaatacattatctattaatttatctattatttagttcattgggttggaagcagaagacctaaatttatatctcatttgcaatatttaccgcctatgtgctccacaaatattcaaaattccttgaaccacacatttctcatctggaaaacagggctaacaatgcatagggtagtgtataccagatgatgtggtaaatgacaaatgacagtgtgaactttgcaaattgcagaatgtacatgtaagttggttttattgaagttattgccaataaggccaagttcatatacaacttgcttgccaaactgtgagtgaaaaatcacagttcactctattattttattacttaaaaatgtttttagtgagtgacgaatatcagggcacatgtacatgtgggcggtgagattgccatgaaagtaggcaccatgctggcttaatctcactgggctgggatcaaacctttcttatcaattccttaaagcaggataactgccctgtatctgaaagtaaagtgcttaggcttcactgaaaaaacaaaagccaaccacttagaatgagatactcctgggtaactctggactagtcagttttcaatacataaaaccactctttctgctatttaacccagttttacaaataggcataaaaatgagccaatgtcttagagaagatgggagcctgaccttgctcctcagaatgcaggaacacaaatctgctgaggacagaaaatatacatgaaagccccagcacactgaccgagagtctagtcatagatgattgcagttgctatgacctaaactgaaactgattattttccaaagtttatgtccc

SEQ ID NO: 510 - DNA, 1240 bp, Homo sapiens
tataactggttatttagaggtaattgttttttgatgaagctgagtttatcctccaccccctaacctgacacctcagtaaaggaatggcctgtgaccttgtgctagtcttttaaccttctaaagcacagtttttccttcggtataaagaatagtcataatagcaacttctgtttattaagcacttactatgtgttaggaattacactaagtacttttcggacattgtctcatttaatcttcacaacatcctgtgaagtggaagttttatttccacagtacaaataaggaaatgtgagccgagtttccccaagtcatatagctattatgttctagagccagtctgtctccaaagctcgtgtgcatagcattatactgtctttaatgttagtcttttccagccttagccttccatgaccaaacctttatgaccatctgacttcctttgcccagtgcactcaccatcgacactgcctctcagccagattcaaacaggttaaccttgcaaaagcccttaaatttccaacaggttacctatgcagaagaagaaactgaagttcaaagggcttattgctttgtaagggctcatttagctaaccaaaatcatgtccrtttaatagcagtatcttgactgactcaaaagggcacaaaaatataatatctacttcaaaaacattttttaaaactggggatatgtgctagttgtgttttgtttttgtttttgtttttgtttttgttttacttctcttccacctctaggagtctatcaagtcactttctggtggatacgcaatatgacaacacatctcttagtagtcttgagctgccctcatgggcgcatttctgtgtgctttttgaaacagaccagactcctttgagcaggttactgatcttatcaaggtagggagtgaacatctggtattaatctataatgctaagagggtatcttatagaaaccattttgaaaaaatatgggatatatcaaaagtgacctctaaagtataattcatcaactttactttcagacaaagtctgaaaagtatatttctttttgttgctcctgtgaatcgacttagtcaaccactactactagtattaagtccatatggcggacagacctggattcatgacttgaccttgcttggcactggttcgattataacctcaagcttccttaggcatccaatggtactaatatttttttttttatggcttttgaaaggattcagtgagagaatgttta

SEQ ID NO: 511 - DNA, 967 bp, Homo sapiens
acttttaaaactaggtcttacagttgaagtggttaacttgcttcacatagtcagatgatgttcagtggatacattttaactttcagggttttatgtattttagaactatgccttgcttttaaaaacaaaacaaaaatttaaaagaatacttattgaagaggccaggcgcggtggctyacgcctgtaatcccagcactttgggaggccgaggtgggcggatcacgaggtcaggagatagagaccatcctggccaacatggtgaaaccctgtctctactaaaaatacaaaaattagctgggtgtggtggtgggcacctgtaatcccagctacttgggaggctgaggcaggagaatggcttgaacccaggaggcggaggttgcagtgagccaaaattgcgccactgcactccagcctggtgacagagaaagactctgtctcaagaaaagaaaaaaatacttattgaagtatctataactagatttagtagctcattgacattgtaaaatagttcaaatgaaagcataggttaggtcttatctcgtgttacagttgtctagttgcttatttgttcccaagcaacctcacctgatccccagtcttacagactgaagtgtaaaagcctttaccggaacatgcctttgactgaactttgtcctccaaactacatttccttctccttctacagtccttggtgttttgaggcagaaatttgcataatgtaactaacctgacatgatttttatgtttacaattcatttttcagagaagtcactgaaccaggtgagatacatgaggctgacttatacaagttcagggttaaatctgtatttaaaactttgatattttgttcatcatagatctttgcataaatttctatttttacagtgtatggcatttacatgttatttatcttgatttctgagcttttgggcaccccctgaaattttgtgcttcagacctgatagat

SEQ ID NO: 512 - DNA, 617 bp, Homo sapiens
aggcagaggttgcagtgagccaagatcgtgccattgcactccagcctgggcgacagagtgagactccgtcaaaaaaaaaaaaaaaaaaaaaccamccagaaaagaaaacgagagaaatggaccatttacaggatgaggatgagaacataggaaggaagagtaatctggaaagcgttgccctgacaagatgtgcatgcctgccttcagttcactgagaagttggcctgggggatgttggacaggaagatagggagaatggcagtaggtgaaggacacaggaagagaacaagctggatctgcagtgctactgagcaccaaacacgaaacacgaggacacatagcttctcgcaggtggaatgcacatggccgcagagatagggtgtagagccagcatttgtatttcaaaaagattttttaattaaatcagacctattgttgactaaactaacatttacactaccacgctggtaaaattaaaagacttatccattcccagtgttggagaaggtacacggaaatccatatgcttacatccttttcaggaggagaatagtttagtagtgcttattcaaatttaaaatacacatatttctaatctagaaatttcacttctggca

SEQ ID NO: 513 - DNA, 1189 bp, Homo sapiens
ccttggagaaagtggagctttagactctycagaggataagaacagagtccctggaccaagagacaccagccatgatgaaagaagtactggactgacaatggttgggggagggttaaataaacattacataataattaatggtgaggtgcctcccccagccttctttccccacttaagctcgcagaactctgactaccaggctattacttgaaaaactttgttttggagaagctgaccagcctgagaggaaagtcttgaaggcagtgacatcagggtgcccacaaaccagacaggcaggacaaatcactttccaccacagggtctagtttcaaacagaaagtcaaagtgccccatgccccaactcatgaacccagaataccagtgaccttctgagtgctccactcttaaatgtaagaccacctaggatccccagacatcagaggggaacctccagcataaaagacagccaaaacagaccacttagagaaaacaagacgaagcagggaggggaaaaatgtcaaaaccacctttcagaccacagagaaataacaaagagtattgtgtacacaaaatcagtatgtttttagaaaattaatagaatatgcagaaacaaagggatcttagaataaaaaatgtgataggagctaaggactgcagtcattcataagcctcacagaactacttgctatttcaaactgcgtgcaccatgggtacaatgaaaagctgaaggaggcagaagagaaaacatgcacaagagctgatgaagtggatcccacacacagatctcggctgtcaaccttttcaaatactcctgtggaggaagcaggacggactgctgggagatgagagagcaaaatcacgggcagagaatgtctgaacacctctacagagagaagacaggaggcagagaatgaagttggaggagtgggtgacatgccagtggctcaccaacccagtgggatctggcctctggtggaggctgacccttagggaggaaaagcacactttctgagctggaaagctgggggagggtcggggaacagagtgactgactgtggagtcctgactgagaggggtctagggaccagagcttcccacaaaagacagacttaggggaaacagaaggactgagatgattccgggtctctcatggttgcctgtgtttatcctgcagtcatttttaagacat

SEQ ID NO: 514 - DNA, 946 bp, Homo sapiens
gaagtagagggtgtgctataggccagagggaggtgcagcaaagggaaggctgctcagggaatttgattctgagctgtgacctgaggatggggcaagggagtcctatcaagggctggaggagttccaacaaagagaactgcacaggaccaaagacgcagaggaagctggtctgcctgaagcctgaagtgcgtggaggaaaggccgactgtaagggccacacaatgaggattttttgttaaaggatttagatttatcctgagggtagtggggaagttaatgaagggtgtaaacaggtgtggtacgattgtttctgtgaagagtgagccctttggagaatgatttgaggggagtggttcaggtacagatggtagccacctggagttggatagggttggagagaggtggttggaatctggatcaggacctaccgagtaatagagaagggwtagcatgggtcctggttgatattcaggttttcagtagatggtggggctataacagagaggaaatgtgaaaggaagtgcagatctattaggggcaaggaggagcgtgtggtgagttcagttttagaaatactgagtttgaggtgccagttggaggttttgaatagacagatggatctgctgatctggagttcaggcatgagatccaggttagagggaagatattgggaagtatcagcctaagtgagttcattaaagccagaagatggtatgaggctctccaggggagaaaaagaggacatcgcagacccctcatggtagattagaggaggggaaagtgttggaaggaaactgagatgaaactgccgaagaagaagaaagaaaaccagaacagcaggcctcagtaaccagtccctgcttacttgcatttattcttttttagggatgaggtctcactccatcacccaggctggagtacagtggcaccgtcatagctcaatgca

SEQ ID NO: 515 - DNA, 1075 bp, Homo sapiens
gaggataaaatttgcctgtgcttttctgcttctagcattcacattacagcattcacatatttgcatttcctgcaaaaacacaggcagaaaaaaagacaaatcacagagccttaaatttgaaagtgacctgcgagttcatcagtgctacccttccaagtccaaagaattcacttctaggccaaaattttaatgtgttaatgtgtgatgtggcttaaaatacttggactattcaacagcagctatattcctctcacaaaaagggtagcaagttgcagatatatgactctttacataatgtttgcccaagtaaacagatacagaactactgtccccattacatcattgaagtactttctgagaaagcaaccagcatgagttttattaatggtttagagctacattacatcagtagtcaaacttttaatacttaaattattctaaattttgttttatttttattacttggtgtctgtttttttcactaggcatataaaaattcttgacatttaaaaacatagtttcttatgtatttctttagattatttgtgaatactgttaatatataatacatatatattttgtaataaaagcaaggtttttttgtatgtartaaatgtaaaggtaatattcttctttcttcatgcaactgcttacatttttaattatttcttttatttgtgaacttggacaagagatgtaagatttctcaaactgccagtcacattttacttcaatattcatgtttttttgaaatggcaaaaccccttaaggctgtgtgattttcactcatgtatgtattgaaagttcatagccaaatacaactgaataaatcatggagcacattttctctccatgcctgagaactgcaaatggctataggtcaattgctgaaaggtcttgtcttcatctcatatgtcttgtttgtaatttgtttttcatttattccatgtgtgcacaattcagtttgcatttgcttgttatttacatgttttttggttgtcctcaaagtttgctttaatataaggaggaactattctagtttgactctgcctttctaaatgtcctgaccaaggtt

SEQ ID NO: 516 - DNA, 1286 bp, Homo sapiens
  misc_feature (1)...(1286): n = A,T,C or G
cttgctgcgtcataacatgactgaaggtattgcatggtgagagaaggcaagagattgaatttgcagtctcaagctcttttaaaattggcatgaatctattcataagggtggagccctcatgatctaaactgctcccattgggccccgtctcccaatactgctgcactggggattacatttccaacacatactttttgggggacacattcaagccatagcaatcgttaagtaaacacagccttctgcgacacaccagggagctgtgcctcatggttactggtaggagaagcaacttgcttgcacattgttacctgtaatttggatcctatggacttggcactgtggctttgggtcccatgtctgaaacccttttttgttttgtgcgttttttgtttgtttgttttgttttgccctgactcaggatcttaacactttgggaggcagatcccttctggcccttagggagatctcttctgaaacctgtttagctgcctatttctgggcaggccgccacaactacaaagggaattgtgagtatgccacaaacctatatttgaatgcaacctatcctaagcataccctaagcttccctttccttttcacattattaggtaataagaagactgaaatgttgaaatgttgtttaatttatatggatttattttacaaatgtcaccaaatcagaaccatattctactttttccaccttacatatcctgggaatatttttgtgtgctattaaatatatatatatctatacacaaacaaaaattttttctgagatggagttttgctcttgtcacccaggctggagtgcaatggcacgatcncagctcacggcaacatccgcctccaaggggcaagtgattctcctgcctmagcctcccatgtagctgggaanacaggcgcctgccaccacacctgaataatttttgtattttttgtaaaaacagggnttcaccatgttggccagactggtcttgaactcctgacctcaggtgatctgcccgcctcagtctcccaaagtgctggggacaggtgtgagccaccacgcccggccttaaatatactttctaatatgatattttgtgctggcataattttctgaagttgcgtgttatacattcaaattattttccacagcaattttcacagctctaaataatgccacaatgaatatttttataaataaatcttccactacctctctgtctcttagaataggttcctcgatatggaattactgaatcaaggcatttgaacattcatttaaaactcttcatatg

SEQ ID NO: 517 - DNA, 1286 bp, Homo sapiens
  misc_feature (1)...(1286): n = A,T,C or G
cttgctgcgtcataacatgactgaaggtattgcatggtgagagaaggcaagagattgaatttgcagtctcaagctcttttaaaattggcatgaatctattcataagggtggagccctcatgatctaaactgctcccattgggccccgtctcccaatactgctgcactggggattacatttccaacacatactttttgggggacacattcaagccatagcaatcgttaagtaaacacagccttctgcgacacaccagggagctgtgcctcatggttactggtaggagaagcaacttgcttgcacattgttacctgtaatttggatcctatggacttggcactgtggctttgggtcccatgtctgaaacccttttttgttttgtgcgttttttgtttgtttgttttgttttgccctgactcaggatcttaacactttgggaggcagatcccttctggcccttagggagatctcttctgaaacctgtttagctgcctatttctgggcaggccgccacaactacaaagggaattgtgagtatgccacaaacctatatttgaatgcaacctatcctaagcataccctaagcttccctttccttttcacattattaggtaataagaagactgaaatgttgaaatgttgtttaatttatatggatttattttacaaatgtcaccaaatcagaaccatattctactttttccaccttacatatcctgggaatatttttgtgtgctattaaatatatatatatctatacacaaacaaaaattttttctgagatggagttttgctcttgtcacccaggctggagtgcaatggcacgatcncagctcacggcaacatccgcctccaaggggcaagtgattctcctgcctcagcctcccatgtagctgggaanacaggcgcctgccaccacacctgaataatttttgtattttttgtaaaaacagggnttcaccatgttggccagactggtcttgaactcctgacctcaggtgatctgcccgcctcagtctcccaaagtgctggggacaggtgtgagccaccacgcccggccttaaatatactttctaatatgatattttgtgctggcataattttctgaagttgcgtgttatacattcaaattattttccacagcaattttcacagctctaaataatgccacaatgaatatttttataaataaatcttccactacckctctgtctcttagaataggttcctcgatatggaattactgaatcaaggcatttgaacattcatttaaaactcttcatatg

SEQ ID NO: 518 - DNA, 1286 bp, Homo sapiens
  misc_feature (1)...(1286): n = A,T,C or G
cttgctgcgtcataacatgactgaaggtattgcatggtgagagaaggcaagagattgaatttgcagtctcaagctcttttaaaattggcatgaatctattcataagggtggagccctcatgatctaaactgctcccattgggccccgtctcccaatactgctgcactggggattacatttccaacacatactttttgggggacacattcaagccatagcaatcgttaagtaaacacagccttctgcgacacaccagggagctgtgcctcatggttactggtaggagaagcaacttgcttgcacattgttacctgtaatttggatcctatggacttggcactgtggctttgggtcccatgtctgaaacccttttttgttttgtgcgttttttgtttgtttgttttgttttgccctgactcaggatcttaacactttgggaggcagatcccttctggcccttagggagatctcttctgaaacctgtttagctgcctatttctgggcaggccgccacaactacaaagggaattgtgagtatgccacaaacctatatttgaatgcaacctatcctaagcataccctaagcttccctttccttttcacattattaggtaataagaagactgaaatgttgaaatgttgtttaatttatatggatttattttacaaatgtcaccaaatcagaaccatattctactttttccaccttacatatcctgggaatatttttgtgtgctattaaatatatatatatctatacacaaacaaaaattttttctgagatggagttttgctcttgtcacccaggctggagtgcaatggcacgatcncagctcacggcaacatccgcctccaaggggcaagtgattctcctgcctcagcctcccatgtagctgggaanacaggcgcctgccaccacacctgaataatttttgtattttttgtaaaaacagggnttcaccatgttggccagactggtcttgaactcctgacctcaggtgatctgcccgcctcagtctcccaaagtgctggggacaggtgtgagccaccacgcccggccttaaatatactttctaatatgatattttgtgctggcataattttctgaagttgcgtgttatacattcaaattattttccacagcaattttcacagctctaaataatgccacaatgaatatttttataaataaatcttccactacctctctgtctcttagaataggttcctcgatatggaattactgaawcaaggcatttgaacattcatttaaaactcttcatatg

SEQ ID NO: 519 - DNA, 511 bp, Homo sapiens
tcccccactgcttgtttttacttacgaaccaaatcctggagttgctgccgaattggccagcgccgctctgctcctccctcagcccgagctgcagccagtcacctatggcatgacctcagatgaactgtcttttcaacatggccacccgtgtgtccttcacagtgcccggacggcactgctcagtctcagggggcacgagaggggctcactgggttccaaagaggactcmggcttacccgctgcagcagtgggatatcagctgttcctggagccaaactgatcttagaaatttggttttgcatccttagacacgagacagccctggataccacttataattttttatgtaatatggtattttcagaataagatatgtaacatttagataagttgtatgacaacaatgaaatgaacacacatgatccatcccacctctgaacttaagagctgaaacatcaccagactattgaaactgcctgttttcctgctccattcattccaggtcctctta

SEQ ID NO: 520 - DNA, 1931 bp, Homo sapiens
tgaccctccttagacctgtaaatatgtattggtaccaactgtacagcaggccctgtgctgtccgccagcaagataacagtgaatgaaaacatctctgctctaaagtagatattctccccagcccttcccagcatggtctggaagggaacagcaggatattcagacagtgccttagcaaggaaggacacagtggtgcgttcgtgtcaaacactggtgtgcagaaggtagggagtccaggagggcttcatggaagagggagacttgactgcgccttgagatgtctggaaggagtacagagggctcttcaggagtcagaacaaacagataagtgatcggaagccgtggagaaagtttaattgttagaatttccatttattttggtgtgtatgtgctatgtttaaaccttaggaatttgcataccacttggtatcattttattagatcctagttttgtaggtctagaagtcaagaccaatgttaggaaaactgcccttgatatgtagagacacccacctggccatctcctgtcttccccagcagaaggatggagaaacagacaagctcctgatagcagtgacatgatgcatatgtgatgggcaaccaactgtgactctgaagccactttaaacactgtttctctgatttaaaaacctgtttggagctttggaagttgatttttaggtttataaaaaaactggactattttgagtttggaaacataatttactrtttccaagaaaagagttttaaaaaccgattactttccctaactcctcatccccttgcgacaatttataaaagagaaatcaggatttcaaatcctgcacgtggagtgagtagcttttttgagttcagttcacgaggttgcactttgacatgctttttaagatttgaatatttttataaatcatgattatgctactgtttaatgagaacaaaagtggaaatcgcatctgtttgtctgcggcggagcatctcccggcctgtgtgtgctgtctgggaaagtggtggcccagtctggagagctgacgagcagcttgattagctgaaattacttcctgcagtagtttgagggtgtcagtcctgggatgaactgggtcatctcagggatctgggacacgggagccactctgagactcagggtggctgatggcccggactccaatcagaaatccccaactcttccccgcgtgaacacgtcgggcagattcccttccagcccaggttgggatctcagggtctgttccttgctagaccgggtccaattggtatcagccccctattcctgctttggaatagggggctgatacaaattggattgaacctaattgagatgccctgtagtgtcagctggtcccggggaaagaggctatacaggtgcaggcacgttccctgagggtgggagatagccgcggccgagagacagcagtggaaatagacctatagcatgggcatcgaggacaggactttggagtcaaaatgcttaattccattatcactcagcccgatcatcgatgttcaggttgaagagcctgtgtcagcaaaagagttgaagtaatttggagttctttgttcactcagctttagaacgctgctgttttttcgttttccttcaaactagtaaaactaaaaacgtttctgatttttaactgttactgtttttatctggaaaactcattaatctagattttgttaccactgacagcctataggtcccctctaaatattgtttttaatgtaacttctctacaacgaaatgcctggatctttggcatgcggttcaatcagttttgcactgacaaatgcagacatctgtgtaacccacattcctatcaagtaaaagagcattcccatcagcccagaaagccccctcgtgccccttcccaggcatccccctgcctccagaagcagccactgatggtttgttttta

SEQ ID NO: 521 - DNA, 1931 bp, Homo sapiens
tgaccctccttagacctgtaaatatgtattggtaccaactgtacagcaggccctgtgctgtccgccagcaagataacagtgaatgaaaacatctctgctctaaagtagatattctccccagcccttcccagcatggtctggaagggaacagcaggatattcagacagtgccttagcaaggaaggacacagtggtgcgttcgtgtcaaacactggtgtgcagaaggtagggagtccaggagggcttcatggaagagggagacttgactgcgccttgagatgtctggaaggagtacagagggctcttcaggagtcagaacaaacagataagtgatcggaagccgtggagaaagtttaattgttagaatttccatttattttggtgtgtatgtgctatgtttaaaccttaggaatttgcataccacttggtatcattttattagatcctagttttgtaggtctagaagtcaagaccaatgttaggaaaactgcccttgatatgtagagacacccacctggccatctcctgtcttccccagcagaaggatggagaaacagacaagctcctgatagcagtgacatgatgcatatgtgatgggcaaccaactgtgactctgaagccactttaaacactgtttctctgatttaaaaacctgtttggagctttggaagttgatttttaggtttataaaaaaactggactattttgagtttggaaacataatttactatttccaagaaaagagttttaaaaaccgattactttccctaactcctcatccccttgcgacaatttataaaagagaaatcaggatttcaaatcctgcacgtggagtgagtagctttttkgagttcagttcacgaggttgcactttgacatgctttttaagatttgaatatttttataaatcatgattatgctactgtttaatgagaacaaaagtggaaatcgcatctgtttgtctgcggcggagcatctcccggcctgtgtgtgctgtctgggaaagtggtggcccagtctggagagctgacgagcagcttgattagctgaaattacttcctgcagtagtttgagggtgtcagtcctgggatgaactgggtcatctcagggatctgggacacgggagccactctgagactcagggtggctgatggcccggactccaatcagaaatccccaactcttccccgcgtgaacacgtcgggcagattcccttccagcccaggttgggatctcagggtctgttccttgctagaccgggtccaattggtatcagccccctattcctgctttggaatagggggctgatacaaattggattgaacctaattgagatgccctgtagtgtcagctggtcccggggaaagaggctatacaggtgcaggcacgttccctgagggtgggagatagccgcggccgagagacagcagtggaaatagacctatagcatgggcatcgaggacaggactttggagtcaaaatgcttaattccattatcactcagcccgatcatcgatgttcaggttgaagagcctgtgtcagcaaaagagttgaagtaatttggagttctttgttcactcagctttagaacgctgctgttttttcgttttccttcaaactagtaaaactaaaaacgtttctgatttttaactgttactgtttttatctggaaaactcattaatctagattttgttaccactgacagcctataggtcccctctaaatattgtttttaatgtaacttctctacaacgaaatgcctggatctttggcatgcggttcaatcagttttgcactgacaaatgcagacatctgtgtaacccacattcctatcaagtaaaagagcattcccatcagcccagaaagccccctcgtgccccttcccaggcatccccctgcctccagaagcagccactgatggtttgttttta

SEQ ID NO: 522 - DNA, 1828 bp, Homo sapiens
gggaacaataatgtagtctgccgcaaacatattaaagtgtaactggatatggttgctgcagaattttgaacctttgttttaattgtgatttttactctttcccccctatctagtgcccttttgtaatacagtaattatcatgatttttgtctgaactgaaatcttctgagattagattgtctacgaaaatacagtcgatcctccttgttttcagcttttgtatttgtgaactcacctactattttttgtaacccccaaatcagtactcacagcactttcatagtcatgtgtttgcgcagagtgtcaaagaatttgagtttgaacaggatgatattctgccttctttttcagctctcatacaatagtcaggtatcctttttgtggtctatttaatgccatgcttttcctgtttttgtactgtttgttggttgttttgccatttaaattaacccccaagcatagtgctgaagtgctgcttagcattcacaagtccaagaagtctgtgatgtgtcttacagagaaaatacatgcattaaataaactccattcaggcgtgagtgctgtagtgccgttggctgtgagttcaatgttaatgaatgaacaatgtatattatttatttattcttcatttaattaattattattattwttttttttgagatagagtctcactctgttgctcaggctggagtgcagtggtgcagtcttggctcactgcaacctctgcctcctgggttcaagcgattcccctgccttcgcctcccaagtagctaagactacaggcatgcgccaccatgcctggctaattttttttttttttttttgtagttttagtagagacggggtttcaccacgttggccaggctggtctcgaactccagacctcaaatgatctgcccgccttggcttcccaaagtgctgggattacaggcgttagccactgtgcctggccaacaatatatattaaataagcacacatacaacaaaagtaggtgttggtaagcttacaaaagtgtgaccagtagcttgctgaaacctaactttttatttgttcatggaactttctagaccgtaactacactgaataatgagaatctgctgtaatctttttaggtgctgtagatgagccattggattaaattattacagtatgtttcagactgctgtatgttgaaccctagtgaaatgcctctcaaaccttcataaggatcacaatctcatgtcctttttttttgttattaaatgcccagtatgtgttagcgatttaaacaaaattcaaatatttttttttttttttttttgagacagagtctcgctctgtcacctaagctggagagtgcagtggtatgatctcggctcactacaacctctgcctcccgggttcaggcgattctcctgcctcagcatcctgagtagctgggattacaggcacccgccaccacgctgggctaatttttgtatttttagtagagacggggtttcgccaggttgtccaggctggtctggaactcctgacctcatgcgatctgcctgccttggcctcctgaagtgctgggattataggcgtgagccaccatgcccggcgttgacttcttaataataaccatactgactggtgtgagatggtatgccattgtggttttgatttgcatttctctaatgatcagtgatattgagctttttctcatatgcttgttggccgcatgtgtgtcttcttttgaagtgtctgtttatgtcctgtgcccactttctaatgagatttttttttttcttgtaaatttgtttaagttccttatcagtgttggacattagatctttgtcacatgca

SEQ ID NO: 523 - DNA, 626 bp, Homo sapiens
tatggaggagttttgttttgttttaataagataaaaatatggttagttttatagcaatacacctggaaatctggatcaattctgtccactatagtcattactagtgacatgtagatattgaacacttgaaatatggtggatttgaattgatttatgctatatgtaaaatacaaactagatttagtttaaaaaatgtaaaactgaataattttaatattgttttatgctgagatgacaatattttggatatactggattaaatacatataaaatattgttaaaaatcaagtagtatagtaaaattggtctttttgttttacttttttattttgttttggtttttgaagggatagaaatcatggctaagatggaccctggggcatatcattgaccatcatgaaacatgcactgatttgccaaatgtattattttcctgtggctgttataaaaatcacaatacacttagtagtttaaaacaacataaatttatkgtctagcagtattccaggttagaagttcaacacaggtcttactgatttaaaatcaaagcattggaagactgcattccttctataggctctgtggaataatccatgacctggcctttcccaggctttagaatccag

SEQ ID NO: 524 - DNA, 601 bp, Homo sapiens
cgctctgtcccccaggctggagtgcagtggcgccatctcggctcactgcaaactctgcctcccaggttcacgccattctcctgcctcagcctcctgagtagctgggactgcaggcgcccgccaccacgcccggctaattttttgtatttttaatagagatgggggttcaccgtcttagtaaggatggtctcgatctcctgacctaatgatctgcccgcctcggcctcccaaagtgctgggattaccggcgtgasccaccacgcccggccaatttttattttatcttatttaaataaccacatgtggctagtggctaatgtattgaacactacagctgtagacaatacgaaataaatataaagcagtctccactttggaaaaacagaagactcttactgcctcataatatagatgaaaaatgaaatactaagataagtaaaacgttctttaaagaacaaaaacaaaagaaaacctaatgaaagctataaaagtccattggataataatgctaccagtactaaggaagtacagcccctaagagtgatttgcagtcacaaatataaaaatgactattcaagtgaactcctaaggtgaaaatttc

SEQ ID NO: 525 - DNA, 601 bp, Homo sapiens
cgctctgtcccccaggctggagtgcagtggcgccatctcggctcactgcaaactctgcctcccaggttcacgccattctcctgcctcagcctcctgagtagctgggactgcaggcgcccgccaccacgcccggctaattttttgtatttttaatagagatgggggttcaccgtcttagtaaggatggtctcgatctcctgacctaatgatctgcccgcctcggcctcccaaagtgctgggattaccggcgtgacccaccacgcccggccaatttttattttatcttatttaaataaccacatgtggctagtggctaatgtattgaacactacagctgtagacaatacgaaataaatataaagcagtctccactttggaaaaacagaagactcttactgcctcataatatagatgaaaaatgaaatactaagataagtaaaacgttctttaaagaacaaaaacaaaagaaaacctaatgaaagctataaaagtccattggataataatgctaccagtactaaggaagtacagcccctaagagtgatttgcagtcacaaatataaaaatgactattcaastgaactcctaaggtgaaaatttc

SEQ ID NO: 526 - DNA, 573 bp, Homo sapiens
attgaataccaataatgataagaatatcacttcattccttattgtattggccaagatctcagtgcaatgtggaatcatacaacagatagtggttgctataaatttgacaccactatgtttatattaaggtcagctataggtttttgagagataaatttttcaagttgaggcaactttcatttaaatctagatggttatctttttataaaacatgagaatgagggttaaattttatcagatgtttataatctatcgacatgatttttatwccatatttttcttcgataagtaattttatgtaattttatgtgatacagtgaatcaccctgagaaagttttttgatcttgaagtatggtcatgtttctgacataaatcctgccacgaggttgttttttatagttgttagtatttctctttgttttcttttactctgttgttttcaatttcgctaatagttttctgttagtcatttgttttttgtccagtttagtatcatacttatgtctgatgggtaaaagaagttggttttcccacttttcctatgctctggaagaaatcacaaagttgttgtc

SEQ ID NO: 527 - DNA, 1184 bp, Homo sapiens
tgaaatgtttatgacctacactggctttaccaaaattcgagagaggtgcagtgtgcttgcaatatccagtgaagttgcaggagagcagactcaattttggtccttagttcttcttttcattatctcgtcctttgacttggaacaaccttgtcctagcccttctaccaaagtgcagcctgtcagtgcgtgtgtacttgcccctaattactgtttactgaatttgcatgtaactttttacatgataaaataattatcattactaggtagtccggttgctgaggcaactaagagtggtgcatgcacagcttatcctttccctaaaatttaactctccttaatcaaatataagagatgttcttggtattttctcttttgtgtttgaaaattatagaacattctacaggtcttctggcttttctccctctttgtctgtctcttcacaagattttactgtcttttcctcaatacttttttcccccaaattttatttttctcaaatgtaatatatattctttaaaagttaaattgtatttgagatttataacaaaaataggaattttcctacttcatcaattctcaccattaccatgcttaattcttgcttcataaataatcatttaaaatactttttgtgtattattttagtatttcccttcatatttctaaataacagacaaatgttacttcttgacttttcagctttagttatgatctaactttctgccaagaaagatagcgatttagtttctgtttccacttattctccccatttktttctccttgattctcctgatagcatttagctcatggcttccctctcagctgatgtgcctggagcttaggaaagaagtgagagagacaagatgaggccagaagggtagatatacagggccttgtggtctttgttgaggagtttgggttttatcctaaatgcaatgggaagcatatggctgccataaagttgtagagaaattgtcagatataggacatcttttcaagggagaaccagtagagcatcatgatggattgagtgtcaggagtttaggaagaaagatggattgagtgtcagagtttaggaagaaagcagggattaatcaatgctgacacctaggttttggtttgagcacatggatggatggtagaaccatttgttgagatgccaaagattggggtgtgcttatgca

SEQ ID NO: 528 - DNA, 2393 bp, Homo sapiens
ggtcagagggctagctyatgaagtatctagcatagcaggggctccatgactaatatcatttgattacagtgactgcgtgaagcacagtgttgagaaggattctgaagctgaattattgcatctccatgtgcagtagttggtaagcaatgcctatcatggacgcagaagggctcgccggtgctataagtgccacgtgtttgccaatcctgatgtagaaaatgctttaagttggccgggcagatcagggatgcctttaaagtgaaaaggtttctttttctcttggagaaagataacatggaaataccatttcctgctgaagatgagcaatatatttaaatatctcttgctttgatgaagttctgtgtgtaccctgccccgatcttccttctgtggaaatcaaggtaatgcagagagcttggtaagtattttcaagatctgagtatgaactgcaggctcgcagtgtctggggagagcttgaatgcctttgcttgtggcaaacttacactgtgaacaagccaattgtgtggaagatgtaaaatgtttccaagtgcatttcttatcttgacaaactcctccactaacagccagggagcagagatctacttagcagtcagagggaacaggagttaaccatggggaagtgtggggatgctaacagccccaggctctccaccctctggtgctgcacagcagtcagctgaatctttcccagccctgtggctggcaccccgtagctctgggcctcattatacatgctccttgtgcccactcttccctgctctgcatttcctccttcatgtgcctgacatttcctaatgaagatgtttaacttcatttttcaccactggtgttcaggcacaagtcagtttccactgatgctctggcttctgaaggccccaacagcatgtggccaccaggatttgggctcagagagacattcttgggggagtgccccccaggaccctttcaaaacagctctggtcattggtaccaggcatgaggacacagagataaacatggccagttcctgctctccaagaatgtcaagtccttttgcaaagaccgactctccatgagtgactcacactgcagaacaccgagttcaagagtggatggggatacgaaagcatgcatctgaagagtctgcttgaaagacacaataatgagtgtgtatgcttaccctactttctgatgctcatggcctgaggttggcaggacctggaaatttataattgttgtttctttttacagacaaggaaaccagagtttagattgcatatccattcactcattcttttagcttttttctagtacccactataagtcaaacatattgctaagtgcttaagacacaagaggtgtagctgtccttgccaccactgagctggagatgctcacatttatccctgcacactcacacccactcagtgcctgaatctgggggcaaatcagtcactgctctgtatcaagctcccttcttaagactctgtattgtgtattcactggaatgcaaccacaaagagagctttcctaaaatgatctcctcctgaaacagtgcaggagggtttgcaatatttctttcttgaacatttctctaaagcttttccctgaatggagaagggcccctggctatacagatgcaggtggaaactactggtgtgaagttattctgtgaacaaataaagttgacttcctaaaatttccctgttcaaatagttgttgacaggggggtgaagatttttaaaagaatgatctataaacatcgcacttcagagttatgtttgcaaggccatctattatgtttacaaagaagatcttgaggtaggaatctctgggttctgcaggtgctgcgtgaaccccagcagggccattccagatgctccacaggacagcgctgaacgcaccgcagtgagcctgggaggccctgggctactgctgcctccccttctctgggctgaacatcaaggtagtgcttctgtgttcttctcccagcgtgtgcaagaaaggacattaaagttatttttatgaaattgccgaacacaatggctaaaccagggatttgttcagactcgtttttaccacgtacctgaaaagttattgataaggatgtttttaagctaatgtagagaacgttcttattttgctcttccagggtcaggctgttctagctagagatagaaaagagtgaggtaacttatgagcacacttttgaatgaactctgccagttctacaagacagcacaaaacctccgtctcacagcgctgagaagaccgtctgtatggacccacaaaaggctctctggacagccatgatcctgtgacccacaagccatgtgtctggggattgataggacgaggagcgttgccaacagatggctttgccctttcatgca

SEQ ID NO: 529 - DNA, 2393 bp, Homo sapiens
ggtcagagggctagctcatgaagtatctagcatagcaggggctccatgactaatatcatttgattacagtgactgcgtgaagcacagtgttgagaaggattctgaagctgaattattgcatctccatgtgcagtagttggtaagcaatgcctatcatggacgcagaagggctcgccggtgctataagtgccacgtgtttgccaatcctgatgtagaaaatgctttaagttggccgggcagatcagggatgcctttaaagtgaaaaggtttctttttctcttggagaaagataacatggaaataccatttcctgctgaagatgagcaatatatttaaatatctcttgctttgatgaagttctgtgtgtaccctgccccgatcttccttctgtggaaatcaaggtaatgcagagagcttggtaagtattttcaagatctgagtatgaactgcaggctcgcagtgtctggggagagcttgaatgcctttgcttgtggcaaacttacactgtgaacaagccaattgtgtggaagatgtaaaatgtttccaagtgcatttcttatcttgacaaactcctccactaacagccagggagcagagatctacttagcagtcagagggaacaggagttaaccatggggaagtgtggggatgctaacagccccaggctctccaccctctggtgctgcacagcagtcagctgaatctttcccagccctgtggctggcaccccgtagctctgggcctcattatacatgctccttgtgcccactcttccctgctctgcatttcctccttcatgtgcctgacatttcctaatgaagatgtttaacttcatttttcaccactggtgttcaggcacaagtcagtttccactgatgctctggcttctgaaggccccaacagcatgtggccaccaggatttgggctcagagagacattcttgggggagtgccccccaggaccctttcaaaacagctctggtcattggtaccaggcatgaggacacagagataaacatggccagttcctgctctccaagaatgtcaagtccttttgcaaagaccgactctccatgagtgactcacactgcagaacaccgagttcaagagtggatggggatacgaaagcatgcatctgaagagtctgcttgaaagacacaataatgagtgtgtatgcttaccctactttctgatgctcatggcctgaggttggcaggacctggaaatttataattgttgtttctttttacagacaaggaaaccagagtttagattgcatatccattcactcattcttttagcttttttctagtacccactataagtcaaacatrttgctaagtgcttaagacacaagaggtgtagctgtccttgccaccactgagctggagatgctcacatttatccctgcacactcacacccactcagtgcctgaatctgggggcaaatcagtcactgctctgtatcaagctcccttcttaagactctgtattgtgtattcactggaatgcaaccacaaagagagctttcctaaaatgatctcctcctgaaacagtgcaggagggtttgcaatatttctttcttgaacatttctctaaagcttttccctgaatggagaagggcccctggctatacagatgcaggtggaaactactggtgtgaagttattctgtgaacaaataaagttgacttcctaaaatttccctgttcaaatagttgttgacaggggggtgaagatttttaaaagaatgatctataaacatcgcacttcagagttatgtttgcaaggccatctattatgtttacaaagaagatcttgaggtaggaatctctgggttctgcaggtgctgcgtgaaccccagcagggccattccagatgctccacaggacagcgctgaacgcaccgcagtgagcctgggaggccctgggctactgctgcctccccttctctgggctgaacatcaaggtagtgcttctgtgttcttctcccagcgtgtgcaagaaaggacattaaagttatttttatgaaattgccgaacacaatggctaaaccagggatttgttcagactcgtttttaccacgtacctgaaaagttattgataaggatgtttttaagctaatgtagagaacgttcttattttgctcttccagggtcaggctgttctagctagagatagaaaagagtgaggtaacttatgagcacacttttgaatgaactctgccagttctacaagacagcacaaaacctccgtctcacagcgctgagaagaccgtctgtatggacccacaaaaggctctctggacagccatgatcctgtgacccacaagccatgtgtctggggattgataggacgaggagcgttgccaacagatggctttgccctttcatgca

SEQ ID NO: 530 - DNA, 963 bp, Homo sapiens
ttttattaaattcagagtttcaaatatgaagagcattcaaatgccatcctgcactggactcctatccatgcctctgatcactggtcacctactggacaggctgttccttcagttatgtagaagcccgcttgaagtgctatcacgtgattggccaaaaactggcttttgtttggcccayacagtgtattaaattagaacaaaatcgttaccaaatttgaaggccgggcgtggtggctcacgcctgtaatcctagcactttgggaggctgatgcggacggatcacaaggtcaggagatcaagaccatcctggctaacacggtgaaaccctgtgtctactaaaaatacaaaaaattagccgggtgtggtggcgggtgcctgtagtagtcccagctacttgggaggctgaggcaggagaaaggcatgaacccaggaggcggagcttacagtgagctgagatcgtgccactgcactccagcctgggcgacagagcgagactccgtctcacaaaaaaaaaaaaaaaaaaaaaaaaatagttaccaatttgaagagtgtaccatttcacccaaaagtctcgacttcctgcatctcttgaaaacatttgagaggctggcaacactaacactgcagtgagagaggaacactaatgtccccacgacttgcagcattcccctgcttcacatgtgtgagtcgccggagcttctgtcatctgcctgtcccctggagacattggcattctgcaatttcagacctgtgagatggtgggggtgggcaattcttgagggaatgaatgattgttttctcctaggtggggttttgttgatctgctaggcatttcccctagttcacagctatcctttcctttctgtgttgggggctttcacagggggttaggaaacgtgggggccgccattttggtgaccctcctccttcagcagatgatacaattaggttcaatcacattat

SEQ ID NO: 531 - DNA, 619 bp, Homo sapiens
caataaacattcagtgattatttattgagctgaattaagctgaaaaatgaatgtaagtctaaaaaagagtaatcaactcytccgtctgtattagctatctcctactcactctaaagttcaccaaaacttagttagcagctagaagtgcccccaactaattcagacatagatgaaccaaaaagactaatagactcgaaacaccaaccccaataccagacccatagaagatgcttgatcatcttggtcactgacatgtctttctggtcatttacccatgagccatcctcccacccatcacggcaccttccaggttcttcttgtgctcactccctgtttctccggacccacaattcttccttgtctatctgaattctctcactccagccatcacagattatctgcttccaaaacctcatttctgacaatgcattctgatttctctctcttcatttattctccgtgttcatcttcaattcttatatctgtttctttttttttttttttttttgagatagagtcttgctctgtcaccaaagctggagtgcagtgacatgatctcggctcactgcaacctccacttcccggattcaagtgattctcctgcctcagcctcccaagt

SEQ ID NO: 532 - DNA, 529 bp, Homo sapiens
ttaacacaaatctttaaaatcctccaagacacggccgggcgcggtggctcacgcctgtaatcccagcactttgggaggctgaggcgggcggatcacgaggtctgaagatcgagaccatcctggctaacacgctgaaaccccgtctctactaaatatacaaaacattagccgggcgtggtggygggcacctgtagtcccagctactctggaggctgaggcaggagaatggcatgaacccgggaggcggagcttgtagtgagtggagatcacgctactccactccagcctgggcgacggagtgagctccgtctcaaaaacaaaaacaaacaaacaaaaaatcctccaagacacatcattttctacttccatagttatcttttagccaggtttaagcctatcagggaaaaaaaaataacttagttccaaggaatatctccacttccttagttgaggagattaagtcagtttcctctactttagtatagttttcagataactgattatgtgattcattatttatgtagctgat

SEQ ID NO: 533 - DNA, 752 bp, Homo sapiens
aaaaggcacttcttacatggtggcagcaagagaaaatgaggaagatgcaaaagcgaaaaagcttgataaaaccatcagattccactatcacgagaacagcatggggaaaaccacaccctgattcaaattatctcccactgggtccctcccacaacacatgggaattattggagtatagttcaagatgagatttgggtggggacacagagccaaaccatatcagtgggacttcttggtccccaaaatctcctgagccgactcctataacaaatcccctcttagacgtctctgtctatcctgattggttctgcttttctgaagagccctgactaattcagacaggcagttggcaccacttccttcaacagcctgtctccttttggcctcttccccatttttataagtgcctactattgattgttyggtttggtggaatctcagcagaatattagggagaatgaaaaatgtctgattcctataactagcaaagaagcacccgcaactactaggcatgactggccttatctctgggtggccttggcccaccagaaattcccatggccaccctgaccccatgttctgctcttcaccacctctgtggaggcttggaatttgacttcttccctaaggctttgtcctgacctgatggatgagacacctcccaatgtcatctccttggcgtccaaggcctccgcagagtcatgcctatgagacaaggtgcctgccactagggccaaggccactctgtgtat

SEQ ID NO: 534 - DNA, 752 bp, Homo sapiens
aaaaggcacttcttacatggtggcagcaagagaaaatgaggaagatgcaaaagcgaaaaagcttgataaaaccatcagattccactatcacgagaacagcatggggaaaaccacaccctgattcaaattatctcccactgggtccctcccacaacacatgggaattattggagtatagttcaagatgagatttgggtggggacacagagccaaaccatatcagtgggacttcttggtccccaaaatctcctgagccgactcctataacaaatcccctcttagacgtctctgtctatcctgattggttctgcttttctgaagagccctgactaattcagacaggcagttggcaccacttccttcaacagcctgtctccttttggcctcttccccatttttataagtgcctactattgattgttcggtttggtggaatctcagcagaatattagggagaatkaaaaatgtctgattcctataactagcaaagaagcacccgcaactactaggcatgactggccttatctctgggtggccttggcccaccagaaattcccatggccaccctgaccccatgttctgctcttcaccacctctgtggaggcttggaatttgacttcttccctaaggctttgtcctgacctgatggatgagacacctcccaatgtcatctccttggcgtccaaggcctccgcagagtcatgcctatgagacaaggtgcctgccactagggccaaggccactctgtgtat

SEQ ID NO: 535 - DNA, 581 bp, Homo sapiens
tttttttaaacttcatacctaacgtggtagtgaaagagccatgaaaaacagacattcacattttccttcctactttatatgctttaawtttttcctaagttgaaagtttcataatggaccatgggtaatgtcctaagcagctgagacaattctggaaagagaagttattttacacagcaggacacgtgtcgtggaaaatcaatgtccttccaatcatagaaccttttgattgccttgatgagaaaattttaatcttctgcaaggctttatggtgtaatgactaaaatgggcaaattaaggttatttttaattattgtttttctacagagagcttaacaccagagcattcttttgccagattcataaatcttaaacaactttggactgcataggcaagcgttgaaacagggatgcagggcaatgtagaaatactcaccaggctgctcagaaccattccatagctgatattttcagagtgaagttttgaaaatacctctcaatcgtaatccataatcagaaatgctctccataacgatgagagcaggagatcatccgctgagtggaaaattctggaataaaca

SEQ ID NO: 536 - DNA, 581 bp, Homo sapiens
tttttttaaacttcatacctaacgtggtagtgaaagagccatgaaaaacagacattcacattttccttcctactttatatgctttaattttttcctaagttgaaagtttcataatggaccatgggtaatgtcctaagcagctgaracaattctggaaagagaagttattttacacagcaggacacgtgtcgtggaaaatcaatgtccttccaatcatagaaccttttgattgccttgatgagaaaattttaatcttctgcaaggctttatggtgtaatgactaaaatgggcaaattaaggttatttttaattattgtttttctacagagagcttaacaccagagcattcttttgccagattcataaatcttaaacaactttggactgcataggcaagcgttgaaacagggatgcagggcaatgtagaaatactcaccaggctgctcagaaccattccatagctgatattttcagagtgaagttttgaaaatacctctcaatcgtaatccataatcagaaatgctctccataacgatgagagcaggagatcatccgctgagtggaaaattctggaataaaca

SEQ ID NO: 537 - DNA, 965 bp, Homo sapiens
tagatccagagacaggccacgtgtttctggatgcgtgaccctgcttctcagccgcagccttcatcttcccctgggctgcatccacctctggccccagggcccatccctggcccagaggagggggcgtgagccatctgagccaaccaagcttatttgggggctcccctgtcttgtctgctcttggtcttgggatttgcctgcatacctggacacttaamtcagttcacagagacctttgccacagtgccctgatccttagcccagccctgtccaccatgcttcatgggctttacctactggtcctcacttctgcctctcatcccactcctctgggcccatctccgcaccgacatctcattccaatcacagtttatcaccctcctgagctgcaacaagagctatttataactcgagggacttactcatatcatggagaagggaaagaacaaaataggtgttctcagaggagccacctcggaactcctctgacaaactgttggatgcagttcccttgtcaaatcccatgtctcaaaagccaccgacatctttccaagtttccatcacctccagcagctttctgagaaaatcagatgatttcatcagaaagggctgattccatttgtggttttggcccaattctccaaactccatttctttaaaccctgcataggcacaaaccactggtgtgccaagtgggtgtgcctcgggaagctctgcgcatatgtctcttacgggtgctcccaagaccagctctgtgtctgcaacatcatctccagtcttgaaatgggctgacgtttggagagacagtcaccttcccatggaagcaaggctccgaggatgggctccccgtggggagcagttccaaggtgaggaggcaggagggcttcaagttgatggaggcaaagcaggtggtgagtgaagcctcactgggctccagagagatgatgaagcaagtgtgtccaagt

SEQ ID NO: 538 - DNA, 965 bp, Homo sapiens
tagatccagagacaggccacgtgtttctggatgcgtgaccctgcttctcagccgcagccttcatcttcccctgggctgcatccacctctggccccagggcccatccctggcccagaggagggggcgtgagccatctgagccaaccaagcttatttgggggctcccctgtcttgtctgctcttggtcttgggatttgcctgcatacctggacacttaaaycagttcacagagacctttgccacagtgccctgatccttagcccagccctgtccaccatgcttcatgggctttacctactggtcctcacttctgcctctcatcccactcctctgggcccatctccgcaccgacatctcattccaatcacagtttatcaccctcctgagctgcaacaagagctatttataactcgagggacttactcatatcatggagaagggaaagaacaaaataggtgttctcagaggagccacctcggaactcctctgacaaactgttggatgcagttcccttgtcaaatcccatgtctcaaaagccaccgacatctttccaagtttccatcacctccagcagctttctgagaaaatcagatgatttcatcagaaagggctgattccatttgtggttttggcccaattctccaaactccatttctttaaaccctgcataggcacaaaccactggtgtgccaagtgggtgtgcctcgggaagctctgcgcatatgtctcttacgggtgctcccaagaccagctctgtgtctgcaacatcatctccagtcttgaaatgggctgacgtttggagagacagtcaccttcccatggaagcaaggctccgaggatgggctccccgtggggagcagttccaaggtgaggaggcaggagggcttcaagttgatggaggcaaagcaggtggtgagtgaagcctcactgggctccagagagatgatgaagcaagtgtgtccaagt

SEQ ID NO: 539 - DNA, 965 bp, Homo sapiens
tagatccagagacaggccacgtgtttctggatgcgtgaccctgcttctcagccgcagccttcatcttcccctgggctgcatccacctctggccccagggcccatccctggcccagaggagggggcgtgagccatctgagccaaccaagcttatttgggggctcccctgtcttgtctgctcttggtcttgggatttgcctgcatacctggacacttaaatcagttcacagagacctttgccacagtgccctgatccttagcccagccctgtccaccatgcytcatgggctttacctactggtcctcacttctgcctctcatcccactcctctgggcccatctccgcaccgacatctcattccaatcacagtttatcaccctcctgagctgcaacaagagctatttataactcgagggacttactcatatcatggagaagggaaagaacaaaataggtgttctcagaggagccacctcggaactcctctgacaaactgttggatgcagttcccttgtcaaatcccatgtctcaaaagccaccgacatctttccaagtttccatcacctccagcagctttctgagaaaatcagatgatttcatcagaaagggctgattccatttgtggttttggcccaattctccaaactccatttctttaaaccctgcataggcacaaaccactggtgtgccaagtgggtgtgcctcgggaagctctgcgcatatgtctcttacgggtgctcccaagaccagctctgtgtctgcaacatcatctccagtcttgaaatgggctgacgtttggagagacagtcaccttcccatggaagcaaggctccgaggatgggctccccgtggggagcagttccaaggtgaggaggcaggagggcttcaagttgatggaggcaaagcaggtggtgagtgaagcctcactgggctccagagagatgatgaagcaagtgtgtccaagt

SEQ ID NO: 540 - DNA, 965 bp, Homo sapiens
tagatccagagacaggccacgtgtttctggatgcgtgaccctgcttctcagccgcagccttcatcttcccctgggctgcatccacctctggccccagggcccatccctggcccagaggagggggcgtgagccatctgagccaaccaagcttatttgggggctcccctgtcttgtctgctcttggtcttgggatttgcctgcatacctggacacttaaatcagttcacagagacctttgccacagtgccctgatccttagcccagccctgtccaccatgcttcatgggctttacctactggtcctcacttctgcctctcatcccactcctctgggcccatctccgcaccgacatctcattccaatcacagtttatcaccctcctgagctgcaacaagagctatttataactcgagggacttactcatatcatggagaagggaaagaacaaaataggtgttctcagaggagccacctcggaactcctctgacaaactgttggatgcagttcccttgtcaaatcccatgtctcaaaagccaccgacatctttccaagtttccatcacctccagcagctttctgagaaaatcagatgatttcatcagaaagggctgattccatttgtggttttggcccaattctccaaactccatttctttaaaccmtgcataggcacaaaccactggtgtgccaagtgggtgtgcctcgggaagctctgcgcatatgtctcttacgggtgctcccaagaccagctctgtgtctgcaacatcatctccagtcttgaaatgggctgacgtttggagagacagtcaccttcccatggaagcaaggctccgaggatgggctccccgtggggagcagttccaaggtgaggaggcaggagggcttcaagttgatggaggcaaagcaggtggtgagtgaagcctcactgggctccagagagatgatgaagcaagtgtgtccaagt

SEQ ID NO: 541 - DNA, 570 bp, Homo sapiens
aaatgaaaccaagggaaattatttaataccggtatttcctaatcataacyttttgcttctttgaaccgccctatgggccaatctcattgcaatcttgcattgaaggaggaagagggtggaggagaggcggttgctgcggcatttggctctgctcagggtgacacttccgaagagggtccccaccaagccctgtgtccagagctgggagcgttctgaaaggtaaacccaaggtcagagaatgactccccagtgcagaagagaagacggatgactcctgcagtacctgagacaccacctcctgagccagccacttcctgctgggggcctgaaaaagacagaaccaagacatgagggatctggtggtgtttcctggatgtctggggcttggggattctgtgtgcatggtagagagggggtcccaactcccaaactccagcagcagtgagcagagctgcacaggttgtccgagcagaaacaggagaaaggaggtctgtccccatgtgggggcctgcacgtctcacaccttcagtgtgtgggctgaggatgaggcctcaggctgcaatgagcatg

SEQ ID NO: 542 - DNA, 553 bp, Homo sapiens
cacaggtgaccacaaacatcgggtgagaggagcggagctgggtcagagtgtccatgcgacacgggagtaagacacgccactccctttatttttctaggttggatcaagctcttggagctctggggttggtgagtaacggagcccggccatgcrttctcgtgctcccaccctccctaaggttggctccagatggccaaggtccatcatagccatggctatggtgcttttgtccaagactggccagtccagccaaggagtgtggccgccttccctccagccacacagcagctgcccttcagccacctctccagcacgactcagcacagtccactgcggtgggcttcggtgctcctctgtgtccacctcctgacactctgcagctgtcggagcctccactgaagacacagagggctgctttctccctgctcccacgggctcactcagcctttgcctctctatccttcccttccccttagtggtcagggatccttaccatccgggcttctgtgcatttgctgctgaatcctcctagaaaagttttgctgcttctcct

SEQ ID NO: 543 - DNA, 553 bp, Homo sapiens
cacaggtgaccacaaacatcgggtgagaggagcggagctgggtcagagtgtccatgcgacacgggagtaagacacgccactccctttatttttctaggttggatcaagctcttggagctctggggttggtgagtaacggagcccggccatgcattctcgtgctcccaccctccctaaggttggctccagatggccaaggtccatcatagccatggctatggtgcttytgtccaagactggccagtccagccaaggagtgtggccgccttccctccagccacacagcagctgcccttcagccacctctccagcacgactcagcacagtccactgcggtgggcttcggtgctcctctgtgtccacctcctgacactctgcagctgtcggagcctccactgaagacacagagggctgctttctccctgctcccacgggctcactcagcctttgcctctctatccttcccttccccttagtggtcagggatccttaccatccgggcttctgtgcatttgctgctgaatcctcctagaaaagttttgctgcttctcct

SEQ ID NO: 544 - DNA, 553 bp, Homo sapiens
cacaggtgaccacaaacatcgggtgagaggagcggagctgggtcagagtgtccatgcgacacgggagtaagacacgccactccctttatttttctaggttggatcaagctcttggagctctggggttggtgagtaacggagcccggccatgcattctcgtgctcccaccctccctaaggttggctccagatggccaaggtccatcatagccatggctatggtgcttttgtccaagactggccagtccagccaaggagtgtggccgccttccctccagccacacagcagctgcccttcagccacctctccagcacgactcagcacagtccactgcggtgggcttcggtgctcctctgtgtccacctcctgacactctgcagctgtcggagcctccactgaagacacagagggctgctttctccctgctcccacgggctcactcagcctttgcctctctatccttcccttccccttagtggkcagggatccttaccatccgggcttctgtgcatttgctgctgaatcctcctagaaaagttttgctgcttctcct

SEQ ID NO: 545 - DNA, 453 bp, Homo sapiens
tagtggaaggctcagcaccacttggcctacaggtggaatggggggaggctgaagggaccccaagacaggctgcaagcccagcaggatgaggacttagaaagcaaaggaaaagaggaatttagagatatctcaagccctgccctctcctggcctctggctgggtagatgctggtaaaaccgactgcaagatggatccacaaacagaaccaccatttatagcatctttcctgttttcagattatccgtggctctgataaaattaacaaggtggggatttgttggcagctctgacttcctgtctcccatgtgctgtggcaaaggccgatcattgcacatgttgcagatagttttgtttaacccacagtggagacagtatatatataygtatatatatatacacatatatatatatacatatatatatatatatatatatatatatatatatatata

SEQ ID NO: 546 - DNA, 471 bp, Homo sapiens
tcattataatttttaattgaccataataagcagttgacctttagaatttggtaggtttttacatttagtgtatttttttagcacaaagyaaattattaaaatatttttcaatactatttttaggaccaaaatatttgaatttagtaagatgctactcagtaactttctctaggaatataaattgcaatataaaaatgaaaccacacattatgtccatcaacaatgggagacagaaacgtgagtcatccaaacatagtaatatatttggtgtttatatcttcagaacaggtataaaattaatgaacaaactttcaaaataccacacattatgtccatcaacaatgggagacagaaacgtgagtcatccaaacatagtaatatatttggtgtttatatcttcagaacaggtataaaattaatgaacaaactttcaaaataaagaacaatactgagaaatgaaataatctgaaa

SEQ ID NO: 547 - DNA, 550 bp, Homo sapiens
atataccatgtaatttttttcaagcaaacagatgctttggagaaacatgtaagatttcctctgcacttgggtcattttagtatattggaatttttttcccacgtttaactttttgtttttaaaaaaaccttaactccacatcttttaaaaaaaatatatgaaagaatgaatataatgccaaaattttgaatttatgtaacaccccatattgataaaaattgagcagagctccattccagagagtgtgtaattatgtatataaaattatttgttgtgttgtgtgtggtcttattcagacatatggatgttgagttgacctggaaatacttcaggtccctttaacacagtctggctctgaacaaagtccctaagtactaatccttctcagagtcatccagtcgacagtaattaagtttgtaatttggggaatgcatcgactttcatcttttttcttgactttaaatcgcataatttwttcctttcctgaaattaaatttcctctaggttttctctgaaactcacctccagtcatctttggataaatttatca

SEQ ID NO: 548 - DNA, 1097 bp, Homo sapiens
acattgcatacttctagccataggcattagagcaggagtcctcaaccttcaggccatggaccagtaccagtctatggcctgttaagaaccggccgcacagcaggaggtaagcatcaaacaaggccctgagctctgcctcctgtcagatcagcagcggcattagattctcacaggagcttgaaccctatcgagaactgtgcatacaagcgatctaggttgcacacgccttatgaggatttaatacctgatgatctgaaatggaacagtgtcatcctgaaaccatccccctagagtccatggaaaaactatcttccacaaaaccagtccctgttgccaaaaatgttggggaccactgtgttagaagattattccatataattattcaattatattattccatataattattcaaggagataggtacaaggaggtctagcatttttgtaatagtaaaaattacgaacagcctgagggaaatggataaataataataccatattcatatgcaagaatctacacagaagttaaaatgaatgaactgaagctatatatttttttaatacatgygttaaatatagacctttatatttatttaaactcaagacctcaacccaccatctccaaaacaaaggtgtcatgcttcttcactcctaagatatctcagagctttcagtttctctacttctacattaacctcactaagccttcttttttgcaaatgctcgatgactttgaccatgttcctgacactgatgaagcaagttgatttgtaaaatactgtggaagtttcaaaaaataagacaaagtggttattaagaccaccaatatataactgaagtttaaaaaatagaaccacataggaagcatgttctagggaatatagtgatacataatttcatagaattatacaaatatatcaattggcatataataaaatcttcataagacatttcagataattttccaaacatgccccccttttaaataaaaatgatttttcaattacaatatttctttaaacaaagcatcaccaaaattgattttcttcatttattgttttaatccaaaccacattatctgtaagtaacaatgattat

SEQ ID NO: 549 - DNA, 629 bp, Homo sapiens
attgaggtaagatgtcctttctcttggtgaaatacataatatcctgcagatatttatgatcaagcctagtctattatctggctgtaaactgcagaaaacatgactatattagctttaaaatatatatgtttatttttttcataaaactaaaatctagaggaaagtggctactgacattggtgcaataaatctcattaaattaggacaaatgtatctgtgattctcttggccttcctcttatgatttctagatgactgcmgcaggtgaggctatcatgagtgcattcaaggcaagaaaggaaaggagggaaagaaaaggggacaatatctgcatcaggaaaatcagtcttctcagaaaaccagtttaatcccatctacatttcactgaaaacaattatagctcttaaccacccctctgaatccaaagaagactggaatagcaaggatttttatttgactcattcattaccatctcaaacatttgatttctgttggtttggaacaagagggaaaaataaatattgtaggcactagcactgttcaccccacaaaggaaacagcctagggtaggtttcacaaacccaaaaaaggttagtgagtaatcaagaaatatgggcctctcaacacatt

SEQ ID NO: 550 - DNA, 585 bp, Homo sapiens
atgttttttattttaatctgtgaagttttaggtggttgcattaactcttacacataataaaagtaggaacattgtaacagtcagtatgggctatgcaattctgcagaataaaaaattcctaaatcttagtggtttgtaaaattgaaagcctatttatcaatcagtctatatgtccattctgaattgactatgtgctctgttctacaacaaacacctcactccagtgtacaggtggagaaagtaagcaccatcktaaaagcttctagttgccttggcagagagaaaaaaaatacagaaaatcttgcactggcaattaaatgctttagcacaaaaatgaaacacatcactcgtttgtaactcattagccaaaatttttcacatgacacaatacttggtgaactacgttatgtccaagtatgtcttctttgatgtaatgtaattttttttactgtgtgttgtgattttttaaaagttttaacagaaaagcagctctaaggtatatttctcagagtgaaattaataggtcatagagcaggcacatttttacctttcccagatgttattaaaatgcttctcaaagtggat

SEQ ID NO: 551 - DNA, 631 bp, Homo sapiens
aatctgctaatgtgataatgggaatgtgtgtgtttctccctaccccagataacatatttgtattttattttcactcagacacagaggagcagggaggtggtaggagcagggccaaagctattagatagcatcaaagttactgtcgttcagtctttttgttattgtttttgttttacaaaaagcaaagaacatgccaaccaacaaacaaaacagaagctgttttgcaaattcaggtccagcttatggttcactgtggctctgaagttttcttttttttcctttctggttgaactcctacacaaccaggcttcctccagctggtatgttgtacatcatttttatcaatgatctgcataaacaagaaaatcctgtcccattccccacctccaacagcacagataagatgcccatttctttccatctccttctttgcaataagacccttcctcactgacagcattgtgacgaaggagacataacaaggaccatatcccctgaatctttgccccagcgcccccacccgtatcctgtgtaggattctaggttggtctgcgcraggggtaagagtggcagtgcaaactgtgggcaatcagagcttcagcccttgttctttaccttccttttgacttga

SEQ ID NO: 552 - DNA, 1094 bp, Homo sapiens
acttctgtcattgagactgatgaataaaatgttaaaatcttctgaaatgtggaaagtaaaagctaaacagagccaaggtgagatgaagtgatactgtaaacaaccaacagtgatggaaatgtccttctttacattctatttacaatttttattactgaaactgcatataatactttcctgagaacaaacctttcccctctccatttttaggaagatatttaaaattatgattatcatttctacagttttgggaaatagtcattaaatcttttgaccccctcccctccaaattataatagtctctctatattttttggtgtgttttttttccccacaagaaacattgttacctttttttcatttctacttctcctgaggccctaggcccattgtattaacccaccaaggttatgtttaaacagtaaggagccaatttggcaggacatgaagtggtattaggatgaatgatgtatccttgtggcctggaaaaaaatagatgtaacattatacatatttgcttaataaatgataaagcacatgaaccacagatacagtttaaagcaaatgggatcttgccactatctaattttgatcaragcactttttgcataattacttagattagggattgccatttggttaattacaataaatatataagcaaagtgtaattaaaaggttgcagtgagggtaattttatttctgatcattttatgattttatacttttacaggacaaataaacttatgctttgcattttatgtacctaggtactctgatagttttgtttagggtttccaacatttgcaacctttttttttttcttttgggaagttgtgtgttagggagtcatattctcattaccctggttacaagcttctcagtaaccaccatgttaccttgcttctaagatgcacattttcctattaaaaaatggagcacattttacaatcatacacacacacagacacacacacacttcttggagtgtttctgacttctttgccccacccctaccattgcagttattcagttgatgatgccctttcaaatgagggccattttagaacagagggaatggtctgttgactttg

SEQ ID NO: 553 - DNA, 1266 bp, Homo sapiens
aaagaaatgggctaattcgaggcaaaattcatactcatccttctacaatgttataaaatatattggagaggtattgtttagtttgttttaacattgtttggcttataaagcaattttgccatattagtattcagaatactctgtatatgtatcatacattcccctcacatcacagatgaggaacccaatccttgaggaggctaactaacttgtccaaggacatacagctaatggaggaaaggtagtaatccaacccaggttcatggttctagacactttcaacatcattcccttctactttgctcactcctctgctctatttaagttgatctctttccattctctaaataagcaacaaataaccctattcttgtttccagatattttctcaagccatccctttagcaaggaatgtcttcacatttctccactgaatcataatcccaatggttgtcatttaytgagcacttactacatgttgagggaggataaataatttagatggtggtacactggctcttaaatattttggcctatgagtgacacacattggtgtcattcacatttcattggttagaactaatctgtggcacacctgagtacaaagtggctaggaaacaaagttatcccatgtgcccaggaaggagagtagaaccagacaagagagagcactggaaggccctgtaaagaagccaaagccagtgtttgccttattaactggaactgatggtagacaaactggggagaaggaaaaaggaacactgagcttcagagacccaagagttggtcccctacaggcaaaacagggcatgccaagaaagtgagctatgacttggtgactaacacaggaaaccagtggttcatagttgatactccacctcaggacaggactctggttctcagacaggagatcagaagtcagtactggggcattgcttctttgggtcaccctaccaatgaatgtgactttaaaatgtctaggctcctcatgaaagcttatctacacagtcacacaggactgtgtgacagcaactcaagtagataccaaatctgagtcctgggacaggtatatctctccatcactagtgcacatgtacacaaacacacacacacacacacacacaccagacaacagaaggcaagatttatatattctgcccttagccctcttgcctggaggactcaactgaggcacccattgcaagaaacctcacctcttgagaagtaaaatgctcaaagagttcatcagtctgagtgatttaacaa

SEQ ID NO: 554 - DNA, 1359 bp, Homo sapiens
ttttttttctacaaatatgattatcccgtatttactgttctgtaacttgcttttccaaaccacggtatctcggatactttttactgtagcacatctagctctactttattctttgaagtgggcacacgtttttcattcaagtgattctgatttagtggattaggccagacctagagatttatgcttttgaagaagcttccctatgatttcgagtgtaarccagtctatgaactagtatttcaaaaccactgtcttagctcatgtgacaaaacatgttttaagataaatcatttctatgtttggctggatcttttcctcactgaagattagaaactatgttttctttcctgttgcctaataagaataagaaatgtaagacacaattgctcccaaagagattcttttaaagacacaacaaaattctaccgtacacacaaggaagaaaagtttccttggcaacaggtggcaagtatggaagataatagatggaatttatcataagaataaggcgacgttctattgagagcatgtcagagtgaggcagtgtaaacatggtactcacaggtctgcatgaagagcccagaatgaatgcctgatgttcatagataaatagataaataatggcaaagtagttaaaattaaataatctttttttaagctgaaactatattcttctaacaaagtaatctttaccttgaacttgggttctggtgaattgccttaactattatttttctgtcgagggataaatacttcatttttgaaaagagtcttttaaagccgttggtagggattttgaatagttttctaggaaacaattacaagtcaataagcctgccaaggaacttctctgggctcccctgcactaggcagcttgtcatctaccagcagtgaaacgtgtttttctgcaggatgaatcttggccagtcaaattaagacttgccaagaacactaattaaagcaatataagttagagtccattttctcccttagtaaagattatgaatagtatgggggagggggtatgagaatattggatcttttaaattcctgagagaggcacctgcccctccaagctgaacacctccccagcttgtgacaagtagcagaaatgatatgttcccaaggcataaagattaagctttttaaaaactgcattatattttctaaaataaaaaaaaaattcgaacaaaactcaagagatcttttaagcataattcttttttgtcatgtatatacaggaacaactggaatagaagctgagtactttgaaagaacacccttagagatttcagtttgatttttatcagccatgggactatcccattttggaaactatcactttaagaaatcaaactg

SEQ ID NO: 555 - DNA, 1323 bp, Homo sapiens
ccagctccttgctcatttagtcatacgcaggacttttgctctggttcctgattattcggctcttaataattttttaaactttttcatgaaaatttgctctttttttaaaaactatcttcttcagttattgcctccaacattcaaaagtcacctagttcttatcctaaagctgctaatagtatgaatttttctaaatgtattttatcaggtttctaaatatatcttcttatcatcaatacatgatgctttacttacagtgatttcttataccaattgctcttactatagagaatcaacaactcaaactgcaagtgtcttctgattttttcgtaatttcattttgaaatatcaattttattaagaagttaaagttgactcttttctaattactctcttaaaagaatcactattgataagtgatttattattagaaaactaaagtaaattttctttatcactgggcttgtgaatttctaaatagggattcgagttaagccacatggacaatagttaaaatcaacaacaaaaccaaaatggaagttaataatgagcacgataattactaacagacgtgatttttacttatgcaagtgactcttatttgtacaaatgattttaagcaaaacaaatggcattcagaaaagtctgcagtagatacacaggagtgctaaaaagtaaaaatttattttatctatgtaaaatcaatcaaatgtaccacactgcctataggagattataataatactcgagggataaaactctattccagaaaacagtcgtaaatctttcctccacttttgttctcaagggctgctgttcaattttatgtataattgaagtaactacttagttgctattcctggagcaaattttcagagcctcactttgagacagagtctggctgtgttgcctaggctggagtgcagtggcgcgatctcggctcactgcaagctctgcctccagggttcacgccattctcctgcctcagcctcccaagtagctgggactacaggcacccgccaccamgcccagctaattttttgtatttttaatagagacagggtttcaccgtgttagccaggatggtctcgcttgatctgcagacctcatgatccacccgcctcggcctcccaaagtgctgggattacaggtgtgaaccaccacacctggcctatgggacacttttatttcagcttactttagccaagtggtctcatcacacctttgtttatgacaaacagaaattctatcacgttcatattaagccatgcttttataatagtagccaccaaactttttgtttgtttgcccttatcaataaaa

SEQ ID NO: 556 - DNA, 671 bp, Homo sapiens
tcagtatttattttccactttggatggattataaatcaatatttcattattgattttgttgctcacattgtttcagctttggccattgggagattctttacttagttcctgtatccatctgatatatccccatcattgtgttttctcgagcccttcctcacattctgaaactacaagataagccaggctcatctagtatagcccttgccccagccctgagascagccatttgtctcaggagccacagttcttttattggagaatgttaaaagaaacatagaaataggttctgagtgtgattatttttactaaggtatctgttgtctatttgtaaattggattgtttatcttttcatggtggaattataaggagtgttttgggttttgttttgtttttgattctagatacatattctatatctgatatgtgtgttgcaaatattttctcccagcccgtggctagtggagggaggagggtgggtggaagggagtgcgagtataaagaattgttttggttacttggatgaggctaatcaggacatcattgaaatatttttaaaatgttctttacatggaattcccggtgctcagactacgattgtgggtgtcgttttgcctcaaggtccactagtctcaaaggaggaaagtgtcccctgggtttgttccttctc

SEQ ID NO: 557 - DNA, 580 bp, Homo sapiens
atgacagtaaacagatagtattttaaagtgcaaagtgcaactaccatccaaaaaagaataattaagcacaaatatattagtagttaatccgtagctaaaaaccaacatctaaagtctgctaagccaaacctgtgagtaaagtaatactcggggaagaaagaaagattggtgcataaactcaagagtacagggctcactgtgaattctcaaaactgggaagagccaagagaaaactctacacatgttttattttaaaattactatttgatactgattccaaaacgaaagtgttttgtaaaatattttcacagtaggtggcatcacttatcaactgtaggaggggggtggtggcttgaagcattttcctttattaagttatcaaataatcatttaaatggctttcacacattctgttccatttgagatacacctacaagtaagacaggcttgccagagaacgggaaaaaattccagtagagtctgactatccagatacttgtttttccctccrctctttaatcataagaaggggaaaaaagcaagtttgcaaatctactttttttgttaagtaacagatcat

SEQ ID NO: 558 - DNA, 590 bp, Homo sapiens
taaatgtggagataacctatgtttattgctgtatatttacatctcttccaaactcagaggtgamcatgtgactacatcctggcctgagatgcagatgaagctcctgggtaaaggaccctgagaaatctgtttgaaggagactgccttcagggaatgaacataattttttttttttgtaccagctgacctctctagtccttcttgcctgaaatggataagatggctgcagctccagcaaccattttgagccacgaggttaccctgaagagggaaacttcgcattaaaggtggccaagctgcgcagcagagcccgggctcctgatgacattgtggcacccacaccagcactcaaccatccacctccaggctttttccacatgcaaatgaacctctaatgcctttaagccactttatttagctctctattctggccaatgaaagtgattccccactgacccccagccatgttagatcatcactccttccttcccatttatccaatttctattttgtcattcatttttccatcactgagacatggatcttgacctaaagtaactcaacaatgaacaggcagagcagacttacaa

SEQ ID NO: 559 - DNA, 590 bp, Homo sapiens
taaatgtggagataacctatgtttattgctgtatatttacatctcttccaaactcagaggtgaacatgtgactacatcctggcctgagatgcagatgaagctcctgggtaaaggaccctgagaaatctgtttgaaggagactgccttcagggaatgaacataattttttttttttgtaccagctgacctctctagtccttcttgcctgaaatggataagatggctgcagctccagcaaccattttgagccacgagrttaccctgaagagggaaacttcgcattaaaggtggccaagctgcgcagcagagcccgggctcctgatgacattgtggcacccacaccagcactcaaccatccacctccaggctttttccacatgcaaatgaacctctaatgcctttaagccactttatttagctctctattctggccaatgaaagtgattccccactgacccccagccatgttagatcatcactccttccttcccatttatccaatttctattttgtcattcatttttccatcactgagacatggatcttgacctaaagtaactcaacaatgaacaggcagagcagacttacaa

SEQ ID NO: 560 - DNA, 1180 bp, Homo sapiens
ttgataaagaaaacagggaactacagaggcttctgacccacaagactgctggaaaatcaataaaacagccttcgccttttttttttttggagactagtcttgctctgtcgcccaggctggagtgcagtggcacgatctcggctcactgcaacctcggcttcccaggttaaagagattctcctgcctcagcctcccgagtagctgggattacaggcacccaccaccacatctggctaatttttgtatttttagtagagacagggtttcaccatgttggctaggctggttttgaactcctgatctcaggagatccgcctgccttggcctcccaaagtgctgggattacaggcatgagccactgcgccyggccagccttcacccttcttactcaagcaccagacttgttaccttagcctgacggaatcttgcctgagcactcaagacaaaaaactttccttccacccaggtcctgggctgaccagatgggaggtggcccaggcagggaggaggaactctgggtctcctcctgtggatggtctctcatctggggacatgaaaactgcttagcactgtggcctgagtggtgtctcctgtccttgcagatggctgggccctgagaggctcaaaggtttccattctccctttctttctttttttttttttttttttttttgagacggagtctcgctctgtagcccagactggagtgcagtggcgtcatcttggctcactgcaggctctgcctcctggttcacgccattctcctgcctcagcctcctgagtagctgggactcccacgcggccgcaaccacacctggctaattttttttttttttgtattttcagtagagacggggttttactgtgctagccaggatgatctcgaactcctaaccttgtgatccgcccgcctcggcctcccaaagtgctgggattacaggcgtgagccaccgcgcccagcttccattctccctttcttatgccaagccaaaggctatgtgctggatgcctgaacctgcaggacttggacaaggtggagtttctcccaacacttttcacataaaagttcctatggtaagaggaatttattcccctggatgtttcagagttatctcttaggtcttacgttttagagttatgtcttaggtcttaggccctgctgaaaaatctagttataagg

SEQ ID NO: 561 - DNA, 1799 bp, Homo sapiens
agtgtgtttttatatacctgtgtatacccggatatacacattgggaaatgcttcccaattcctggcttaaactcttgtgctccattactcatttaccaaatagaagtgtcttcagctgcacttaatttcaaattccttggtcatgtttcggtacctccctttctcctgataagtgggaaatttcatagcctgggaactgaatgggtccatactagcccaggtacaatttgagaagcttaatatcataatgcacttaaaataacctgcagcaatcgaacaccaatctgtacctttataggaagtttatgcaccatggtttaccccatctagctggaagttggcttcaaaatcagccaggctccccattggcccataaaattagtggtgtccatgcaaggttcctaacttgtctggacatgggataattcccacggtagctgtgacttggtgatttgctctggttcccttctccccgaataaataggcaggtgaaatgcagaggaaggagcatgggaggtagagccaaagtctggcattcaaatccagctccattgctttctagttatgagaccttgtataagttagtcactctgtcatctcctgtataaaattgaaatgaaatgcctacctgatataatttttatgtgtggtaacatgaaaaactcttttgaaatgtgattggcacgtggggatgcctaatatatttttatatatggtttttaaataaagatgcttccctttctcaagaatgtgtctatcattataattctttcacagacacccccttttctggaaaagccttttaaaaatttttcataaccctggttatactcattttgtgtgattccaataagctgttagaaaaagcagagcatgttgtttaaggtgtagagattccagatattactaagttttctctccctgcctgctgatttcaggttcagagtcaaccctaatacataaattaagagaaatcattagaaaatatctcgaaccctcccttcttgttagtgtaacatgtgttcagtcagtactaatttatgcatgacattaaatttctttcctctgtactgaaaatgtgctcttttattgctttcaggcaattgattaaattcagaaacacttatattctatcctgtatagagaatagaaataaaaatatgtgatacttttgtatcatatatatatatatatatattctaggaaaagatgaaagggaaagtaatgtatattttacatatcaackcattcatagatcagcaaattgttattgagtgcatactctgtgccaggaaccattctgggtattagggacatagcaaaaactaaaccagacagaaattgtggacctcatctaacataagttttacaattaatagagtgaaacatgaaaatagatttttcccttattttcagttcacacatatcatgaccagttagcttgtatttgttttttttgctgttgttttataacatgcttttatgtagtttatctaattaaatcctcgtagcaaatttaaaataggttaggtagattatgcttaaccaattctgtattagaggaaaggcaagcatggggtagcctaagtttgctgggagtacccagcaaagccagtggtaacgtttaccatggatttcagatcctccaatatttggtgacttccactttccacttcttctataatcctcatgttaatattcattcccctcttcatgatttaacactatatacaattcccaggaggaaaatgtggtagaaatctatttttccttgctttgccacactgaactacaaaagg

SEQ ID NO: 562 - DNA, 1160 bp, Homo sapiens
ctccagtcggctccaccttcttcatgacagcagccttcacaatgacagcagccttcacaatgacagcagtgacgagggcacccctcaaggcttcagaccttcagggccttaggactcatgttctgttttctggctacactaacggagctaagggaaggagcctctgcttccgctgctcagatgctggctggtgcccgccatgccttcatcattctcacatctgattcaggggctctccctttctccaggcttgggttcggggaacctgagggccactatctgctgggttccatcagcaagtccagcagcacagctgatctgacaggtgtcacatgactcacaggcaggcaggctcagtgggacaagtcctaaactaggactcaggggaccgcctggtctctgttgtctactaaccagctgtgtgaccttcaataggccacttcccttttctaagcctcagtttccatagcagtaaaaccagagggcccttctctagagagttcttcccgccctgacagtctctctctctctctctctctctctctctctcacacacacacacacacacacacacacacacatatctgggtgggtatgttttacagaagtactgtattgctctacattttgtaacatgctcttaagtttttgagaaaatgatatacagaaggatttgtaacttctttgctattcactcaaatgaatccattttgtgttttagtagcttcagatcacttcaacagccaatgcaaataatcaagacagaagcagtgcaacctcttggagttggcctatttccagtggtacagccaaacgcaatggcattatttacccaaattgttgggcaaccagcatgcactggaagcagatgccagcagacgccttcccggacgccaagtcctaggagttggcttaggcccttagctcaggatggaggcagcacccactgcattgacacaatgctgtggggtgatccagtcctcagcaacyacagggaggatccagccactggggcagactgcacttcagggacatcagaagcggaaacctgggctggggaggtgcttccaaaggaaacacctggaagagggagaaaggataaaagaaccaccatctagattaggaaagcaaggcagttcctgccacccagaatagtgtgt

SEQ ID NO: 563 - DNA, 658 bp, Homo sapiens
cttgattcaaaactcaggaagccagttcagctcttctctggatttcaacagaaagaattctaggccttggagcctcagaagtagaggaatgttttttatgtctggattgtctctgtgcctttcaaatcattccacctaggctgcctgccctgcccacttctgaaatcagatctgcttcccattccacaattcttgatgcaagaataagatggagatactttcttaaaagaactggaaaatagcaaaagaagactcaccttcccaggcagggacatctgcatgaagctgagtggggttcctccagatcagagtctctcracctcagcacaattgacttgttgggctggataagtctttattttgaggtgctgtcccgtgccttataggatgttaagcattgtaagtatggcacctatccccctttgtgggagaaacaaccagaaagtctctagaccttgccaaatgtgccctagggggtcaaagttaccctcaggcaagaagcacggctctagatgccccgcaggcaggcaggccgtagcctctctttgggccactaaaatacctttacctggcactggtgtatcattaatctgataacttccccataaagaagagcagaaatcagtcttatttctatctgtaactggctctatacata

SEQ ID NO: 564 - DNA, 667 bp, Homo sapiens
gtaatggcctcctccactctcttgactcattcccccttaccccccagccaatcccagttatgctgattcgttttttgtcatgacttttggttctctcccttccttttcaaatctagtgttttatatattccgtctatttcttccaactatccaaggcattttaccctcgagccctctgaggcccagaagcctaaagcatattgcctgaagcacacagctgatcaaggacagtgtcatcattggaacccacattccttcctctggctccaaagcccatgctctttctatcactgaagtgtatcccattagcacaagtccaggactgagatacctgcaggtgtaatcagaaattattttaaataatttagtaacagtactttaaataacagtgtactacttaggagttattcccttttcaattttctttcaaccttttaaaataaatggagaaagtcccatctgatgctagaatactaacggtattgcaaatcttccttttcaataaaaagagagcaggcctaaggctcagaactttggcaagcaacaaaatctagctagcatttactaacattgttttgtcttcatggttactttctatttatggcaaatgacacgagttttccacgygtggtaatggcagtcatataaaattttctttaaaaataaa

SEQ ID NO: 565 - DNA, 622 bp, Homo sapiens
gattttttgtttcacatattaaaattttttcatattataaatgctttataacattattgtgatatatggattctgctgaaacatacaattttatcactgcttccatcaaatatattagctatcaaaaaaagaaagttaaaaagactaaaatcaggaggtataaattttatatacagcaaaatgtcagggagaagaaaaagatttaaggagcacaggcttaaaatcagtagtcctagaatctagtctgggctttacgacttactagctgagtgatcttcacaaataagtcaattaactccttaggctccatttcctggtctgtaaaataaagattataatacttgctttatctccttctcagggttgttgtgaggtccattaagataatatatrtgaaagcagtttatatagtgctgcataaaggaatgttgtagttttacccctcaataccaatgttttaatggcattaaactatgtattgttatggcacaatgaattcaaaattcaccaaggctctgctaaagaaaaacataaaatgatagatgtgatgggaaacagttctgaaatcttaattacattatgcaaatgtgaggcaatattattttatatcttgatgcagatt

SEQ ID NO: 566 - DNA, 1438 bp, Homo sapiens
taacagtgtatatgtgcataagtgcacatgtgggggtgtgctgaagtaataaaaccataaagttgtagcagtggaaaagtataggattgtttcagagaagagaggggagtatacactgggtgatactgttaaaagcacagattagggaagtactggagaacatattaaatgctgaaataaggctcatggtaaggagcccatgatgatgggaatcaaaaaaagaaattgtatataaactggagttatattactaaagtagcaagataaactgtcaaatgatggaaaacagtatatatagcataattcctattttaaaaaaaggttgtgtatatatatgcatgtatgaatgtcttgatataaatatagaagtttggaatgatacagaaaccgtagaggtgacatttggatgtaccgagggtggaaaaacaaagtaatattttcattgtttaatcatttgttttatattttatttatggtgtacttctattgcttttataatgtaagtaacatgtaaaatgaaaaattaaaaaagaaaaaagaacttcctaaaagataaaacattctaccagtatttgagacactcaacaaaaggaaacttgcagaaagtaaatttcttaatattcaccagaactcagcagtacggtattgataaaatcatcacctgtggcaatttcaccttgataattggggtttttgtgtttttttttttccctaaagagacaaggtcttgttatgttgcgcaggctggaatgcctcaggcaatcctcccgcttcagcctcccgtagctgggactacaagcatttgccactgtgcccactctgctaattttttaatcatgaaagttaacaacaaaaaaagttaatgtatacttgttataatttattattacagagattgtaagaaaaaaatcaaggccaggcgcagtggcctatgattcccagcacttgggaggccgaggcaggcagatcatctgaggtcgggagttcgagaccagcctgaccaacaaggagaaatcccatctctactaaaaacacaaaattagcagggcgtggtggcgcatgcctgtaatcccagctacttgggaagctgagacaggagaatcgcttgaagccaggaggcggaggtagcagtgagccgagatcacaccattgcacttcagcctgggcaacaagagcgaaactccgtctcaaaaaaaaaaaaaaaaaamaaaaaaagaaaagaaaagaaaagaaagaaagaaaaagaaaaaatcatttatccctacgtcccatctaatttctttagggtaaacagtattaacaatttaatatatatccttacatatcatcttcaatattcatacacaaatgtttgttttttgttttcataaagagaattatatacatattaccttgctacttattattcattaggataattttaaatatatttacctac

SEQ ID NO: 567 - DNA, 636 bp, Homo sapiens
acatctggagagagagagaaggacagggcagggcgcagtggctcacatctgtaatcccagcactttgggagacccaggcgggcggatcacytgaggtcaggagttcgagaccagcctgaccaacacagcctgaccaacacatctctactaaaaatacaaaattagccaggtgtggtggcgcatgcctgtaatcccagctacttgggaggctgaggcaggagaatctcttgaacccaggaggcggaggttgcagtgagccgagatctcgccattgcactccagcctgtgcaacaagagcgaaactccgtctcaaaaaaaaaaaaaaaaaaaaaagactcagagagacagacgggacagagacccagagaaaagggggcagagacccagcaacagggacagacatttagagagagagggacagagactgagagaggcatcccaagggcagggcttcgtcctgtctgccggggcactgcagtaactatcctctccccaccccgccagtcctacttcgtgtctgactacgaccccactattgaggactcctacacgaagatctgcagtgtggatggcatcccagcccggctggacagtgagggcggcaaggatggatgatggatgggggtggtgtcagtg

SEQ ID NO: 568 - DNA, 636 bp, Homo sapiens
acatctggagagagagagaaggacagggcagggcgcagtggctcacatctgtaatcccagcactttgggagacccaggcgggcggatcacctgaggtcaggagttcgagaccagcctgaccaacacagcctgaccaacacatctctactaaaaatacaaaattagccaggtgtggtggcgcatgcctgtaatcccagctacttgggaggytgaggcaggagaatctcttgaacccaggaggcggaggttgcagtgagccgagatctcgccattgcactccagcctgtgcaacaagagcgaaactccgtctcaaaaaaaaaaaaaaaaaaaaaagactcagagagacagacgggacagagacccagagaaaagggggcagagacccagcaacagggacagacatttagagagagagggacagagactgagagaggcatcccaagggcagggcttcgtcctgtctgccggggcactgcagtaactatcctctccccaccccgccagtcctacttcgtgtctgactacgaccccactattgaggactcctacacgaagatctgcagtgtggatggcatcccagcccggctggacagtgagggcggcaaggatggatgatggatgggggtggtgtcagtg

SEQ ID NO: 569 - DNA, 636 bp, Homo sapiens
acatctggagagagagagaaggacagggcagggcgcagtggctcacatctgtaatcccagcactttgggagacccaggcgggcggatcacctgaggtcaggagttcgagaccagcctgaccaacacagcctgaccaacacatctctactaaaaatacaaaattagccaggtgtggtggcgcatgcctgtaatcccagctacttgggaggctgaggcaggagaatctcttgaacccaggaggcrgaggttgcagtgagccgagatctcgccattgcactccagcctgtgcaacaagagcgaaactccgtctcaaaaaaaaaaaaaaaaaaaaaagactcagagagacagacgggacagagacccagagaaaagggggcagagacccagcaacagggacagacatttagagagagagggacagagactgagagaggcatcccaagggcagggcttcgtcctgtctgccggggcactgcagtaactatcctctccccaccccgccagtcctacttcgtgtctgactacgaccccactattgaggactcctacacgaagatctgcagtgtggatggcatcccagcccggctggacagtgagggcggcaaggatggatgatggatgggggtggtgtcagtg

SEQ ID NO: 570 - DNA, 636 bp, Homo sapiens
acatctggagagagagagaaggacagggcagggcgcagtggctcacatctgtaatcccagcactttgggagacccaggcgggcggatcacctgaggtcaggagttcgagaccagcctgaccaacacagcctgaccaacacatctctactaaaaatacaaaattagccaggtgtggtggcgcatgcctgtaatcccagctacttgggaggctgaggcaggagaatctcttgaacccaggaggcggaggttgcagtgagccgagatctcgccattgcactccagcctgtgcaacaagagcgaaactccgtctcaaaaaaaaaaaaaaaaaaaaaagaytcagagagacagacgggacagagacccagagaaaagggggcagagacccagcaacagggacagacatttagagagagagggacagagactgagagaggcatcccaagggcagggcttcgtcctgtctgccggggcactgcagtaactatcctctccccaccccgccagtcctacttcgtgtctgactacgaccccactattgaggactcctacacgaagatctgcagtgtggatggcatcccagcccggctggacagtgagggcggcaaggatggatgatggatgggggtggtgtcagtg

SEQ ID NO: 571 - DNA, 619 bp, Homo sapiens
ctccactgcgatttgaaccaccagaggatcagtcaagctctggaaacgagacccagggaaaaggaaatctcaaattgaacacgagaccacagaaggtgtccacattctctaaagcccagaaacccagcaggacccaggaggcttcctggatttcagagtggggtttgcaagcccgccttatttggggataaactgaacatcacgctaattcctcattagccctttccagctgtaagcatggggctggtgcaggagggatctcycatttcccccgattgggaccacagaaaaaggatggaaagtaacttaacaagctttttggatgtcaaattgctgttacaaaacaacgtttttaggagttaagcaattaatccaaacacacatggattcaatttccttgaaacccaaatggcttaaaaaaccaagggagaaaaatgctcagggacaaatcccttctgagtttgtgaaccccaagcctgtggaaagaaaacaacagaactgcggtgctgccccccttaacacactggaagctcccttctcggtggagggaggatggggcaggcgcccaggccccacagtcacgtggactgggggcccagaggacgtggacaagggaagg

SEQ ID NO: 572 - DNA, 619 bp, Homo sapiens
ctccactgcgatttgaaccaccagaggatcagtcaagctctggaaacgagacccagggaaaaggaaatctcaaattgaacacgagaccacagaaggtgtccacattctctaaagcccagaaacccagcaggacccaggaggcttcctggatttcagagtggggtttgcaagcccgccttatttggggataaactgaacatcacgctaattcctcattagccctttccagctgtaagcatggggctggtgcaggagggatctcccatttcccccgattgggaccacagaaaaaggatggaaagtaacttaacaagctttttggatgtcaaattgctgttacaaaacaacgtttttaggagttaagcaattaatccaaacacacatggattcaatttccttgaaacccaaatggcttaaaaaaccaagggagaaaaatgctcagggacaaatcccttctgagtttgtgaaccccaagcctgtggaaagaaaacaacagaacygcggtgctgccccccttaacacactggaagctcccttctcggtggagggaggatggggcaggcgcccaggccccacagtcacgtggactgggggcccagaggacgtggacaagggaagg

SEQ ID NO: 573 - DNA, 1238 bp, Homo sapiens
gcatgtggaattatatactttcttaagaaattgagcaattataattgtttcagcttaggcccaaaagtccaagacttttagggtattttttttttaatgtttgaatggtcaaatattacacattttctctagtaagcttgattaatctctggcagattaaggtatcacacaaaatttcatctttttttttttttttttttttttgagacagggtctcatttagtcacccaggctggagtgcagtggcatgatcatggctcactgcagcctcaacctcctggcctcaagccattctgccacctcagtccctcaagtagctggaatcacaagcttgtgccaccacacccagctaatttttttattttttgtagagatgaggtctcactatgttgtccaagctggtattgaactcctacactcaagagatcctcctgcctcagcttcccaaagtgctgagattacaggcctaagccactatgcctggcccaaagtttcatctttatgtgcagctgtaactggcacatttatttactactttaaacatacttaatgtttattctggttagggggatgatgactacaaattcatgaagtttatgatattttgctaaaattgtctcactatggtgcatctgagaaaatgtcctaccatattaactaaaaaggctacgtttatatgctattactgatatatactagatagtagcaaagaactttcaatcaaattaaggttgaatttaacacaatctactatttcacratcatgtcaaagaagacttagtttggacccagccctctcacagatttcctgcagtggcagttaactaaactaggcaaataaattacttaatttaattaaatcactactgggtcactgtcacgttcatcacagctaaaagaaaataattcaaaatgcaaaaagaaattgcatttttaaaaatgtgagatgaatcctagcaatacaatgttaaatgagagacaacaagtccaaacattacacacagcaaaatgccttttaaaaaaggtaaaaacaacaaagaagtacatatttcttaaggaatgcatacaaatgcaataaaaccatattaaaggggaagaaagaaatggtgatcacagaaatcatttgggaagaagtagagataccagatggttgtgggggaccatatgcttagtttggggcctgtgttcgtagtgcttataatattattttaaataaaaataaataaatgtatgaatga

SEQ ID NO: 574 - DNA, 1238 bp, Homo sapiens
gcatgtggaattatatactttcttaagaaattgagcaattataattgtttcagcttaggcccaaaagtccaagacttttagggtattttttttttaatgtttgaatggtcaaatattacacattttctctagtaagcttgattaatctctggcagattaaggtatcacacaaaatttcatctttttttttttttttttttttttgagacagggtctcatttagtcacccaggctggagtgcagtggcatgatcatggctcactgcagcctcaacctcctggcctcaagccattctgccacctcagtccctcaagtagctggaatcacaagcttgtgccaccacacccagctaatttttttattttttgtagagatgaggtctcactatgttgtccaagctggtattgaactcctacactcaagagatcctcctgcctcagcttcccaaagtgctgagattacaggcctaagccactatgcctggcccaaagtttcatctttatgtgcagctgtaactggcacatttatttactactttaaacatacttaatgtttattctggttagggggatgatgactacaaattcatgaagtttatgatattttgctaaaattgtctcactatggtgcatctgagaaaatgtcctaccatattaactaaaaaggctacgtttatatgctattactgatatatactagatagtagcaaagaactttcaatcaaattaaggttgaatttaacacaatctactatttcacaatcatgtcaaagaagacttagtttggacccagccctctcacagatttcctgcagtggcagttaactaaactaggcaaataaattacttaatttaattaaatcactactgggtcactgtcacgttcatcacagctaaaagaaaataattcaaaatgcaaaaagaaattgcatttttaaaaatgtgagatgaatcctagcaatacaatgttaaatgagagacaacaagtccaaacattacacacagcaaaatgccttttaaaaaaggtaaaaacaacaaagaagtacatatttcttaaggaatrcatacaaatgcaataaaaccatattaaaggggaagaaagaaatggtgatcacagaaatcatttgggaagaagtagagataccagatggttgtgggggaccatatgcttagtttggggcctgtgttcgtagtgcttataatattattttaaataaaaataaataaatgtatgaatga

SEQ ID NO: 575 - DNA, 595 bp, Homo sapiens
gtacctagttcatgctgactgtcctccaggtggctcaaagatgtctttgaatggttttattcaaatcaggacccacagggtttctcttaagtctcctcatctgtaataatcagcaactccctttattaaatgccagttacttattgaaactgggtcatttgtcccgtagaattttccatattctggatttggctgattgcatcttccaagtgtcatctaacatgttcttctatacctataaataagtactaggtcaagaggcttgaatcaattcaggtgcagatccttggcaggaatactttgaaggtgtttttctgttttctcttgcatcacttcaagaacataaagttcagttaccccacttttagtgatttttgttcattagtgagtttagggtatcagtctgacctccrtcgtaaagttccctatcaccctcttgccgaatgactttactgcctgctgatgagcaaagcccagattattgtttcgttactatagtgattttctacttccatcaatctttctgtgcttattagctcttgttgttttttgttgttgttgttgttgtttctggttttgtttgtttgttttgaga

SEQ ID NO: 576 - DNA, 1056 bp, Homo sapiens
gcatgggcaaggaatggcctcttctttaaaaaaaaaaaaaaaaaaaaaaaatttaactctccttagctgacaggaaggaattgggagggacagaatttcatttttggtgttcaggcaaacatgctatttgygtaattgttctttgtctaggtgtagaagaaaagtacaatttctccttgtgcagacagtttgggagcaatatagcatgactgacaaatatgaaatactgttgactcactactttacattagtttttatttatttattttttatggttttgtagagatggagtcttgctctgttgtccaggccaaacttgaactcctgggctcaagcaaccctcccacctcagcttcctgagtagctgggactacagatgcttactaccatacccagcttagtttttattcttattcaacattattgttattctagaatgttcttctaattatcaataaaatacaaatatttaatgtttttaaccattgtaaaactgcaaaaactaaaatatagtacaatttggagtaagatataaagtagtggattatcagtttctgagataaaaatatttccagtgttctaaaggtaattaagtagatataatgtgatgtttaactgctgaggtaactttttaaatacttttgggttttgtgattaagaccattatttttagtttttcaatggaagacaaatcagaaagagattttccttcagtagcagaagagaccagggttagaatcagcaatactggttttgtaaatactggaatttatttaaagcatgatgattagagatattgggagaaattaaggtaatttctgtcaagaaagtatgcctcatagtgatacgtgcacagggtactaagacatacccagttagacttttttgttccattttaagaggacactggtatcttgggattagagtgaatgtgacagtaattaacaaaatatagtgaaaaaactattatcatagagcaaaggggggaagtagtccagtattaggtattactgtatgtaaatctaaaatcccatttaaatataatttttatttgtt

SEQ ID NO: 577 - DNA, 1056 bp, Homo sapiens
gcatgggcaaggaatggcctcttctttaaaaaaaaaaaaaaaaaaaaaaaatttaactctccttagctgacaggaaggaattgggagggacagaatttcatttttggtgttcaggcaaacatgctatttgcgtaattgttctttgtctaggtgtagaagaaaagtacaatttctccttgtgcagacagtttgggagcaatatagcatgactgacaaatatgaaatactgttgactcactactttacattagtttttatttatttattttttatggttttgtagagatggagtcttgctctgttgtccaggccaaacttgaactcctgggctcaagcaaccctcccacctcagcttcctgagtagctgggactacagatgcttactaccatacccagcttagtttttattcttattcaacattattgttattctagaatgttcttctaattatcaataaaatacaaatatttaatgtttttaaccattgtaaaactgcaaaaactaaaatatagtacaatttggagtaagatataaagtagtggattatcagtttctgagataaaaatatttccagtgttctaaaggtaattaagtagatataatgtgatgtttaactgctgaggtaactttttaaatacttttgggttttgtgattaagaccattatttttagtttttcaatggaagacaaatcagaaagagattttccttcagtagcagaagagaccagggttagaatcagcaatactggttttgtaaatactggaatttatttaaagcatgatgattagagatattgggagaaattaaggtaatttctgtcaagaaagtatgcctcatagtgatacgtgcacagggtactaagacatacccagttagacttttttgttccattttaagaggacactggtatcttgggattagagtgaaygtgacagtaattaacaaaatatagtgaaaaaactattatcatagagcaaaggggggaagtagtccagtattaggtattactgtatgtaaatctaaaatcccatttaaatataatttttatttgtt

SEQ ID NO: 578 - DNA, 1056 bp, Homo sapiens
gcatgggcaaggaatggcctcttctttaaaaaaaaaaaaaaaaaaaaaaaatttaactctccttagctgacaggaaggaattgggagggacagaatttcatttttggtgttcaggcaaacatgctatttgcgtaattgttctttgtctaggtgtagaagaaaagtacaatttctccttgtgcagacagtttgggagcaatatagcatgactgacaaatatgaaatactgttgactcactactttacattagtttttatttatttattttttatggttttgtagagatggagtcttgctctgttgtccaggccaaacttgaactcctgggctcaagcaaccctcccacctcagcttcctgagtagctgggactacagatgcttactaccatacccagcttagtttttattcttattcaacattattgttattctagaatgttcttctaattatcaataaaatacaaatatttaatgtttttaaccattgtaaaactgcaaaaactaaaatatagtacaatttggagtaagatataaagtagtggattatcagtttctgagataaaaatatttccagtgttctaaaggtaattaagtagatataatgtgatgtttaactgctgaggtaactttttaaatacttttgggttttgtgattaagaccattatttttagtttttcaatggaagacaaatcagaaagagattttccttcagtagcagaagagaccagggttagaatcagcaatactggttttgtaaatactggaatttatttaaagcatgatgattagagatattgggagaaattaaggtaatttctgtcaagaaagtatgcctcatagtgatacgtgcacagggtactaagacatacccagttagacttttttgttccattttaagaggacactggtatcttgggattagagtgaatgtgacagtaattaacaaaatatagtgaaaaaactawtatcatagagcaaaggggggaagtagtccagtattaggtattactgtatgtaaatctaaaatcccatttaaatataatttttatttgtt

SEQ ID NO: 579 - DNA, 1056 bp, Homo sapiens
gcatgggcaaggaatggcctcttctttaaaaaaaaaaaaaaaaaaaaaaaatttaactctccttagctgacaggaaggaattgggagggacagaatttcatttttggtgttcaggcaaacatgctatttgcgtaattgttctttgtctaggtgtagaagaaaagtacaatttctccttgtgcagacagtttgggagcaatatagcatgactgacaaatatgaaatactgttgactcactactttacattagtttttatttatttattttttatggttttgtagagatggagtcttgctctgttgtccaggccaaacttgaactcctgggctcaagcaaccctcccacctcagcttcctgagtagctgggactacagatgcttactaccatacccagcttagtttttattcttattcaacattattgttattctagaatgttcttctaattatcaataaaatacaaatatttaatgtttttaaccattgtaaaactgcaaaaactaaaatatagtacaatttggagtaagatataaagtagtggattatcagtttctgagataaaaatatttccagtgttctaaaggtaattaagtagatataatgtgatgtttaactgctgaggtaactttttaaatacttttgggttttgtgattaagaccattatttttagtttttcaatggaagacaaatcagaaagagattttccttcagtagcagaagagaccagggttagaatcagcaatactggttttgtaaatactggaatttatttaaagcatgatgattagagatattgggagaaattaaggtaatttctgtcaagaaagtatgcctcatagtgatacgtgcacagggtactaagacatacccagttagacttttttgttccattttaagaggacactggtatcttgggattagagtgaatgtgacagtaattaacaaaatatagtgaaaaaactattatcatagagcaaaggggggaagtagtccagtattaggtattactgtatrtaaatctaaaatcccatttaaatataatttttatttgtt

SEQ ID NO: 580 - DNA, 1212 bp, Homo sapiens
tttgaaatttgtaaccaaaatgtttctttgctcaatccctgcagcaaccccaaatttttatttattttgccaggcagtttgtcagagtagagacaggctattcatctacttcctacctgaatgggcttataaagtagaagaaacagagtattatgtgctttttgtgtggcagccagagtatctttgaaaacaaaaattgtacaatgttttaaataaaacaataaaaaataatttatttcatgtagatgaagtgaacagatggacatataaaaatttaaataaaaacctgtaatggaaggaataccatatatttatatgtggtatttcttagttctgttcccagacatatcacttacaagccatgtggcctgcaaaatataactgaacttctctgattttctgttccttgtaaaagasagagttgggcaagactaaatgatcctggaaagtcccttctaactctaaaagtcttacatcctggtaaacaactaagcagtcttaggtgtgtcataggaattgagcgaaagcaatgagtgagaaattggttttgaagaagtagaaacatgggaacagaattgtagttgactaaggaattagaagaaacagaaaaactttctttggccccattctcaacacttactcagtgatacaggtgaaggaaaaacaacatgcttaaactaaagaatactgaaatcactaataagtacactgggttcagaaatatatttggaaactaaaatcaagatagaaataaacaagatgaataggaacagacagtattgtaaaactctacattaaaattttaaaaggaattgtatagattggtgagaacctagcctggcagcagcttacatgagtaaaaaacttagtaagagctgctgtggtaatgtaggtactaaaactctcaacacagtccatggtgacattgattcgagtctgagaggtgcttaggtggaggtatgctcccttatgtgtgtgttggccaaataaaacatgatgtaattaatccacttttgatagatattctttaacaatggtattgagaaacttggatgcttccaaatgctggcatccagtatatcaaggatttgcaaaccaggtcacataaggaatagttatgggtacaaagacttgcctcagggagcacagctgtcatatgaagaaggaatgttcacagtgcttaaccaggttcttaagaattcttgtggagtt

SEQ ID NO: 581 - DNA, 1212 bp, Homo sapiens
tttgaaatttgtaaccaaaatgtttctttgctcaatccctgcagcaaccccaaatttttatttattttgccaggcagtttgtcagagtagagacaggctattcatctacttcctacctgaatgggcttataaagtagaagaaacagagtattatgtgctttttgtgtggcagccagagtatctttgaaaacaaaaattgtacaatgttttaaataaaacaataaaaaataatttatttcatgtagatgaagtgaacagatggacatataaaaatttaaataaaaacctgtaatggaaggaataccatatatttatatgtggtatttcttagttctgttcccagacatatcacttacaagccatgtggcctgcaaaatataactgaacttctctgattttctgttccttgtaaaagagagagttgggcaagactaaatgatcctggaaagtcccttctaactctaaaagtcttacatcctggtaaacaactaagcagtcttaggtgtgtcataggaattgagcgaaagcaatgagtgagaaattggttttgaagaagtagaaacatgggaacagaattgtagttgactaaggaattagaagaaacagaaaaactttctttggccccattctcaacacttactcagtgatacaggtgaaggaaaaacaacatgcttaaactaaagaatactgaaatcactaataagtacactgggttcagaaatatatttggaaactaaaatcaagatagaaataaacaagatgaataggaacagacagtattgtaaaactctacattaaaattttaaaaggaattgtatagattggtgagaacctagcctggcagcagcttacatgagtaaaaamcttagtaagagctgctgtggtaatgtaggtactaaaactctcaacacagtccatggtgacattgattcgagtctgagaggtgcttaggtggaggtatgctcccttatgtgtgtgttggccaaataaaacatgatgtaattaatccacttttgatagatattctttaacaatggtattgagaaacttggatgcttccaaatgctggcatccagtatatcaaggatttgcaaaccaggtcacataaggaatagttatgggtacaaagacttgcctcagggagcacagctgtcatatgaagaaggaatgttcacagtgcttaaccaggttcttaagaattcttgtggagtt

SEQ ID NO: 582 - DNA, 573 bp, Homo sapiens
ctccttaatggcttcctacaggacttagaatgggatccaaactcttgccagtggtcttacaagatgctttggccttctctctcactctgctcckaagcgtgatattcttgccacattggtcatttctccaaaatgctgagcactttttgccttaggacctttgactaactgttcactccatctcaaacgctctgcccctgctgttcgcatggctggctcctcttgtccttcagatatggcataaatatcacctcctcagagaggccatcccaggccatctaatataaaggagcctcagtgtcaactctctatggcatcagccttttagcttcctcctagcactgattactatccaaaattccctagagcagtgctttccaaaaataaactttctgtgatgatgcaaatattctaaatcgatgttgttcaatatggtaaccactggccacatgtggctattgaacacctaaaatgtgactagtgtggcaggaaacagacattttaatttaatttaatttaatttaatttaatttaaatttaaatagccagctgtggctggtggctaccatacta

SEQ ID NO: 583 - DNA, 573 bp, Homo sapiens
ctccttaatggcttcctacaggacttagaatgggatccaaactcttgccagtggtcttacaagatgctttggccttctctctcactctgctccgaagcgtgatattcttgccacattggtcatttctccaaaatgctgagcactttttgccttaggacctttgactaactgttcactccatctcaaaygctctgcccctgctgttcgcatggctggctcctcttgtccttcagatatggcataaatatcacctcctcagagaggccatcccaggccatctaatataaaggagcctcagtgtcaactctctatggcatcagccttttagcttcctcctagcactgattactatccaaaattccctagagcagtgctttccaaaaataaactttctgtgatgatgcaaatattctaaatcgatgttgttcaatatggtaaccactggccacatgtggctattgaacacctaaaatgtgactagtgtggcaggaaacagacattttaatttaatttaatttaatttaatttaatttaaatttaaatagccagctgtggctggtggctaccatacta

SEQ ID NO: 584 - DNA, 576 bp, Homo sapiens
agagaattcctcaaccctcctaagccctgaaaacatacatagggagctgccagtagattgggggacaaaattgtcccaggaagggaactcatgctgygtcccacactttttctgagacccaaacagttacagcaaggcaccattttaaatcctagtctttggcagatgcacatgctatcctggtggccagcagcaccaagactgaagcattagggaaactcaggctattgctgctgagactggggcacaaactgggaatgagctcccacagctgagactgagaatcaaatgaggcatgggctgcagctgacaatgctgggaagtgagtgctgccggggctgagactgggaggaaaacaggcacaagttgccactgggacttagtcacaagctggtggggactcctgcagcaaggtaagggctcaagctaggtgtggctggctgctgccagggctggggggtaagccccgccagggctgtgaagcatgagacaggtgcatattccccacctactggcccaggctgtagccacagaggtcagccccaccttctccagtgggaggacctcagcatggct

SEQ ID NO: 585 - DNA, 458 bp, Homo sapiens
gttaagtgttgtctattttaggctaaacacaggaatggttattaaattgatattttttgagtacttttgaaggaaacagtaatcattgagtaaggatggcttctctaggagaagtaatrtcaaacttgatgttttctagacttaataggcaagggggatgttacagagaacaaattcatcaaggcatatgatgatgtcaagatgcaaatattttttttaattgttacatctctatatgattttatgtttaaatagcttttggagatactcgtaatcaatttatccaaccaactcacctcaaatattttattgctgagctgagactgttctagcaatgtaacagtgaagaaaatggacagagtttttataaaacttatattttagtgatgtgatacgtaacggagaagagctctgaattaaaatagaacagatttgagggttgaagagtgagggtgagg

SEQ ID NO: 586 - DNA, 599 bp, Homo sapiens
tctgcttcccaaagtgctgggattacaggcgtgagccaccgcgcccagcccacagtatatacagttttataagaaattgataaccttttcctaaagtgataatatcattcaatgttgtcgcttttcyattaaccgttctagtggatgtctagtggcctctcatcatgtgtgtttatattgaaattatccttgattattctaatgaagttgaacattttttcaagtgtatgttggtgatttgtctcccttgtgaaagatcatttcaggtctgtggcccatatttattgcgttttttaaaaaattgttgaattccacaagtttttaggttcctagataaatataaacctaaaaatgtgttcaatgaaacagtttaggttccaagataaaagtccactgtgtgtgaatatatattttagaatattaagctcctttctgtttcatgcccttggtacttagtattcctgttcctgaaatgctctttcctcatgatcttggcatggcaattccctgacttgataaaagtctctccttaaatttcatttcctaagaacatgaccaatttaggaaagtctatctaacaagactctccaaccaccaaa

SEQ ID NO: 587 - DNA, 599 bp, Homo sapiens
tctgcttcccaaagtgctgggattacaggcgtgagccaccgcgcccagcccacagtatatacagttttataagaaattgataaccttttcctaaagtgataatatcattcaatgttgtcgcttttccattaaccgttctagtggatgtctagtggcctctcatcatgtgtgtttatattgaaattatccttgattattctaatgaagttgaacattttttcaagtgtatgttggtgatttgtctcycttgtgaaagatcatttcaggtctgtggcccatatttattgcgttttttaaaaaattgttgaattccacaagtttttaggttcctagataaatataaacctaaaaatgtgttcaatgaaacagtttaggttccaagataaaagtccactgtgtgtgaatatatattttagaatattaagctcctttctgtttcatgcccttggtacttagtattcctgttcctgaaatgctctttcctcatgatcttggcatggcaattccctgacttgataaaagtctctccttaaatttcatttcctaagaacatgaccaatttaggaaagtctatctaacaagactctccaaccaccaaa

SEQ ID NO: 588 - DNA, 1315 bp, Homo sapiens
tgcatttgaatgtggcaacagtagagagagaatcatataaatacatcatctgaaataatgtcatctaggcaaaggcatctgtaggaactcagcttagagtaaatgggcaaattgggaggggggaacataacatttgaaatgggcaataattcatctgcacttagtctttctgtgcagaaaaagcaatctatgttttgatgtattttcagatacgatgatagcatgtaaacaagragatcaacaagactcagagttctatttctggaatggttataaattttatatttgacacataagaaaatattggagatgaagcttggagtacttggagaggagcttgtcatcattatcacaacaaatttttatctattaatatgaatttattaggtgcttaatcaatgcttaatgttgagtgaatcattaatgaagcatacttaatgtaatacagctacttctagacataagtgagagacaccatatgtgtactagcagaattactaaagaagttacagattacaattgtcaaatatatttaaaatattttctttggttatctggcataaactagaaaatctgcacacagcttaatcagctatatactgaaaactaggaagacaaaagaggcacttggtagcaacttttaggttcaataatgatattaacacattcaaatacggacctaaggaccagttttgaaaggtgcataggatattaaaacatttaagatatttactgacacattactgttttttattttcaggctcagcacattggaggttttatttcttctctagtagattatcaatactaatgtctcacactttatattttatcagactttaacagagacaaataaaacaggtaaggttattgcctaaataatacagcctgacttaatgtcatgtgcatgtttggtttgtataattagccctgttttcctaaaatgaaatattatttttcactttgtttttaaccaatttacaagtcatattgtaagatttagggtacagaccaatatgctatgaaaaagattatccaatatatagtgattgaaacaagctggactggcatttgcttttattagacaggataggatgtgcaaattggttatattctgcaatttcttgtgcagagtttccaaaagtggtttttgccttgtctttttccagttttcaaggggagggcttccagcttttactcattcagtatgacattggctgtgggtttgtcatagatgacattcattattgtgaagtatgtttcttaaatccctagtttattaagagtttttttaaaaaacatggagatgttaaat

SEQ ID NO: 589 - DNA, 704 bp, Homo sapiens
tgaaatactatgtagaaattataataatttttaacaagactacttactaaaatgggaaaaatttcaaacatattttataccacaaattcagttccactattttataaaaccaattatgtaaatataatatgaacataagacacagtagacttatttgttataaaaatgacacaggttattattggttattaggcttaagaatcagaagtcaatatttatccagaataaataaactaaaaaatacttgtagaactattatggaaatacaaagataaatgccatataaaataaaaataagcaaggagacaagatggccgaataggaaccgctccggtctacagctcccagcgtgagcaacacagaagacgggtgatttctgcatttccatctgaggtaccgggttcgtctcactagggagtgccagacagtgggtgcaggtcagtgggtgcgtgcaccatgcgcgagccgaagcagggcaaggcattgcctcactcaggaagcgcaaggggtcagggagttccctttcctagtcaaagaaagtggtgacagacggcacctggaaaattgggtcactcccacccgaatactgygcttttccgatgggcttaaaaaagggcgcaccaggagattatatcccgcacctggtacggacggtcctacgcccacggagtctggctgattgctagcacagcagtctgagatca

SEQ ID NO: 590 - DNA, 990 bp, Homo sapiens
tttctttatctgtaattatctcatcaaggcatcttgtccagaaatattcttaatatgtttaaatcattcatcatggaaatttgtatataagtaatcaacacataattgtttggtttgcttgctcaatacataattattattatttatactgcttcttgtttttaactttttggaaatcatggtatcatttcctcaaaggtgtttttcaatcagtattcagcattagatgtaaaaccacttattaaaaatttgctttttaaaacagtgggggaaaaratagacctcagaattaatggaatgcacaactctcatatcaatgggctgatatttggcacttgataaatgtctcctgaatgaatggatgaatggtgaattaattagttcaagtcagaaaatctttattgagcatcaacgctttgctcatgccagaaatagaagtcgaggtcatgaactggaacagaacaggcaaagctagccagggccggcctggagaaccctggcttgagattgctgacaaaaacatacagtgacttgaagcttattagcaaacctaatctttttgctgaatgtaagtaacctaagagggtttactgtgtaaacttttaatttgtgaatccatagatatttttgtcctacatatctgacatatagaataaatttaggtgcagagaagtttagtgactgacctggagctatgagatgattcgataactcatctagaaatgtaaaaccctaggctttccaaatccaagtaactgtgaagatgttcttgactaaattcagtgctaaccagataaaatgaagccttcaaggaaaaaatatttaagacccatatatactgcataaagaaattagattgtcacaatacagtgagcaccttggtaggtacatcagatcacaagaaccagtataatattaacttagtaaatgagctcccagagacctacaggagttaaaacaccttaaagaaagacatacaaacactcacaa

SEQ ID NO: 591 - DNA, 990 bp, Homo sapiens
tttctttatctgtaattatctcatcaaggcatcttgtccagaaatattcttaatatgtttaaatcattcatcatggaaatttgtatataagtaatcaacacataattgtttggtttgcttgctcaatacataattattattatttatactgcttcttgtttttaactttttggaaatcatggtatcatttcctcaaaggtgtttttcaatcagtattcagcattagatgtaaaaccacttattaaaaatttgctttttaaaacagtgggggaaaaaatagacctcagaattaatggaatgcacaactctcatatcaatgggctgatatttggcacttgataaatgtctcctgaatgaatggatgaatggtgaattaattagttcaagtcagaaaatctttattgagcatcaacgctttgctcatgccagaaatagaagtcgaggtcatgaactggaacagaacaggcaaagctagccagggccggcctggagaaccctggcttgagattgctgacaaaaacatacagtgacttgaagcttattagcaaacctaatctttttgctgaatgtaagtaacctaagagggtttactgtgtaaacttttaatttgtgaatccatagatatttttgtcctacrtatctgacatatagaataaatttaggtgcagagaagtttagtgactgacctggagctatgagatgattcgataactcatctagaaatgtaaaaccctaggctttccaaatccaagtaactgtgaagatgttcttgactaaattcagtgctaaccagataaaatgaagccttcaaggaaaaaatatttaagacccatatatactgcataaagaaattagattgtcacaatacagtgagcaccttggtaggtacatcagatcacaagaaccagtataatattaacttagtaaatgagctcccagagacctacaggagttaaaacaccttaaagaaagacatacaaacactcacaa

SEQ ID NO: 592 - DNA, 1269 bp, Homo sapiens
gctatttctcaaggaaatgaccccccaccccccagactgatttctgacctctcattacatggcacattagttggctgtcaaaaaaggaaacttaagcagaaatgcccagctgtgatttctcttctccaacttcccgtgtttgacgtgaggtgtataggctggaaatgccagctccctggctgctgaaggagagactctgcagtctctcctttgtgattcttgcagctgctgaaagataccatgtcttcagtgccagaggatcaacaaagaaaaacaacttggcctcacatgataatgaccccaagtggttggtcaagaaaaasaagtggcaatggtgagttttattgcttttgttgtgtttcatctctctttgtggatttttattgtgattatttaaagatatttataataaaataaacagttacaaatgttagggggattgtgttgcactggggttctctctcacagctgcaagtgttgcctcctacatgttgttaatttagaggtaatcaggtttgcatttgcagctgtgcagcatatgtttttctaaaacagtcatggccatgggcaccagaataattaagactggaaaaaatgccaggaagcatttttttcttcctctgataaactgataatgcctttcttttaattcttgttttgtatggctttatcattaaagagagtaaagtaaaccacctgctatgtgtctgagctagtcgcttttcataaatgttattacatttaaatatactatcttggttttttttttttaatggtttaattttattagtggagagagcagctaaggccttttggtaggagacagtaataccatgtcagacacagtagaacatacagtgttatagctggaatgttacatcagggaaaaagctgattagatattgctggttggaagttgctattttttttccaatttcaattgaattctaaatcattcttagattactctgatagaaaattccttattgccataatctgatttctgagtcaaatgcaaaaactgtctttactttttggataatcttgtagaatgaacagattatacatttctttgaagaatttgaactgagttatgatgtatagatgggagataaacccggaacaaggcttgcatcagagacgtcctgaaccgtgatgttcttttggtatctaagcatccctgtttctttctccatgcaatgcaactttttcattctcttgcattaagtaaaaataccaatataaataaaattcgtttgaagatttacc

SEQ ID NO: 593 - DNA, 617 bp, Homo sapiens
gaaaataaaatgagaaaaggggtaggaggtgactgacctgaagatacctttgagctttttttttttttttttttcracggagtctcactctgttgcccaggctggagtgcagtggcgcgatctcggctcactgcaacttctgcctcccggtttcaagcaattgtcctgcctcagcctcccgattagctgtgactacaggcaggcgcaaccacgcccagctagtttttttgtgtttttagtagagatggggtttcaccatgctggtcagtctggtctcgagctcctgacctcaaatgatccgcctgcctcagcctcccaaagtgccggggttacaggtgtgagcctctgcatccggccacctttgagctttttacattggcccctcttatacccccaaatcacacaatgtagttaactcatctaacttaattgcaataaatggtgaccctggtcactgatcttgggccatgcgaaattttctgttgcagttccttttctcatgctctctttggaagcatatatactaaaattaaaggtccttttttctctatctcccatgattttcatttggtagacttttatagcattgtagcctggaggcttacaggggtggcttt

SEQ ID NO: 594 - DNA, 595 bp, Homo sapiens
tgccttttaaaaacacaggattttaggttgattgcatacaatcttattttgcagtttgctccctattaggacataagacactgctttaaagggacaacaaaggccacaaaagtaagcatgaaaggtggaggagacatacatctctgtttcactgagacagtttcttcactctcaaaagtgtcccaatttgggtgataaaggatatagtcatcagtggaaaaggagagaggacgacagctcacataccattgccttgtgcagaagggtctcccatttccaggcagccacgtgtcctctgtgctttctcctaatcatttggcagagcccctccctyctccttgctccttgcccatcttggagctgtggtttagtaaaacactcaaagaatcaaatactgatgaataagcaaaacactaagtatgaagcctctggcaacagacattaaatatatattttcttttagagcttaaatgtatatggctaagttcattaattccatgatactatggatggtttgtggaagaggatgtcatatattttgaacaccaatgtaccagcgcttaagaaatgtatattatcgctcaccaagctgaag

SEQ ID NO: 595 - DNA, 602 bp, Homo sapiens
atcattccacataaatgagaatctaacttattaggaaatatctttactcaaggatatttaatctgaatgtggaattatgaaaatatttctcaactgctgttgtttacaattctctggaactgcaaataaatcatgctagttatgcaactcatattgaggtctctaagcaaaatttttcaaaggttctaggacatcactcctcaaaacatctgacagcaccacttcktttcatagatttctcaaatcctcaagtgtcaagcctaggctatgaggcatcttcagcactgtaaggtgccccaggagaataataaaaaatataatgatcctggaaattaaaataaaacaaatgataattttgaagcagccaccaatacaactacttgaaaagaaaaagattgagtgtccctgtctaatattgctaaccagtaataatttgacagaagaacttaatttaaaaaacatattaaagtggccaggcactatggctcacacttgtaatcccagcatttttggaggccaaggcaggaagatcacttgaggccaagagtttgagaccagcctgggcaatatagcaagaccccatgtctaccaataataattat

SEQ ID NO: 596 - DNA, 602 bp, Homo sapiens
atcattccacataaatgagaatctaacttattaggaaatatctttactcaaggatatttaatctgaatgtggaattatgaaaatatttctcaactgctgttgtttacaattctctggaactgcaaataaatcatgctagttatgcaactcatattgaggtctctaagcaaaatttttcaaaggttctaggacatcactcctcaaaacatctgacagcaccacttcgtttcatagatttctcaaatcctcaagtgtcaagcctaggctatgaggcatcttcagcactgtaaggtgccccaggagaataatmaaaaatataatgatcctggaaattaaaataaaacaaatgataattttgaagcagccaccaatacaactacttgaaaagaaaaagattgagtgtccctgtctaatattgctaaccagtaataatttgacagaagaacttaatttaaaaaacatattaaagtggccaggcactatggctcacacttgtaatcccagcatttttggaggccaaggcaggaagatcacttgaggccaagagtttgagaccagcctgggcaatatagcaagaccccatgtctaccaataataattat

SEQ ID NO: 597 - DNA, 563 bp, Homo sapiens
gaaataaacataatgttgagtaagagatggcagacacaagagtacatactgtataatttcctttccgtaagtaaaaaaaaaaaaacctggtaacattaatctatgctgttagtagtcagtggaatgaatggggaggggttgtgactgagaaatgggacaagtggcttggccactggcgatgctctgtgtcttgaccgggggctggtctggtggggagtgttcacttggtacctttatgatacatgtacttttctgtatagatatattttaataaaaagtgcaaagctatacaacgttaaaatatatgtatgaactagacaaatggaagctgctagattgctactggagttgacactcttatgtagaaaacwtgcttgtatttttggaagcctgcatatcttctcagagcaagagaacatgaaatggtagtatcagtagaaccacaggaaaaggacaaaaggaaagtgctttttctttccacaatccaagtttattttctgtgagagagatgggatggggagatcatctgctgacctgggatgggctctctctttggaagccag

SEQ ID NO: 598 - DNA, 1057 bp, Homo sapiens
ggtttgcaaaagacaaagtttttraaacctgcccacagtagtgtggtgtagtgtgtgaatatagttttcatgttaccctaaccccaaactgagttgcatttctgctggttgctgctggttactggttactgtaaatccttggccacgttttaacctgtttctttgtctataaaatgtaataaaattctacttcgtgattcagtgggaaaatgcaaaaaagttttgggtggaatctggccctttggaagtatcaataaatatttaactaatatcggatgttacagtcatagctggtgagtagcagaccttaacccaaatggcttcacaatcaaatgtggatgaaatgatacaacccttcccacttttgtcagaaatgctggacttgagacatgggggaggggagggtggagcaagggaagatggggaaggagtgtgtaatagaaaagagggagacagacacgggacatttcagcagaatgtcctatggaaagagaagaccaatgggctcaaagataaagtgttccatctacccagggaccacccggatgtgaaagagcatacgtatataaatttctaaaatgctgacacttcgttattttcacagggatcctgcacacaccctagagattagtggaaagtaaactcagcggaagcgtctggaacacctccactaacttcttaaaagatgctgctgattcactgattctcaaaaattataattcaattttctcagcttttatcctgtaacaatcaatttgtatagtaaatgaaagccaaaagcatattcgttttatttacaaggatgataaaatagaaacatcattcatctatttccattcctgaactttcatgcctgattcctctttatactcactttcatcctctgtggatactttaatatccattttaatccctctgtgagaaattctgctaaattactttactctgtagggtcagagtattcaagataaaacattcctggaaaaatgtatttctaccaggaaaagacagacttaaaaaaggagggggagacagcagggttagaggaaaactgtgt

SEQ ID NO: 599 - DNA, 3900 bp, Homo sapiens
gcataatggagttggctgccttgcaggtgggggtgggtgggtggagccaggaaatggtgagcacactggggagtgcagctgcagactgtggagctggcactgagtggggctgctgagcaggcagccaagacaaaggctgacacagagaataaagccatatcccacctgtataagatccctcgagtgttctttcagctacccgccaccggtccacctactcccctcggaccccagcttgggttggaagctgacactgactttctttcttttctgtgaggtggagtctagctctgttgcccaggctggagtgcagtggtacgatctcggctcactgcaacctccgcttcccaggttcaagcgattctcctgcctcagcctccagagtagctgggactacaggtgtgcaccagcacacctggctaatttttgtatttttagtagagatggggtttcaccatgttggccaggctggtctcaaactcctgacctcaggtgatctgcccacctcggcctcccaaagtgccatgataacaggtgtgagccaccacacccggcttctgacactgacaaatagcttatgtcctgaggtgctttgagtcatgagacgcagtttagcctggcagccgaaagcttgggttagtatcctagctcccccactttcctagctttgagcctacggagcaaagacctgagggatggctgacttttgaactccgacaaagtaggtattttctcagtaattgtaattaaactaccaaacggagagtttaatcattcatagcaaaggaatacttgaaagaagctcctttgaatctcataacaaaaaaggctggtgcctccattttctcatgtatgaaataggaattataacagtaactgcctcatccagctgctgtgaggatggygtagttaacacgtgaggggcatggtaaatgatggccagtttgcaccacagtcatcctttcttccactgcttcctgccctctttctcctggcatggccaccagcctcaccccttcaaggccgcgttgcaatgacctgctgctgctcccctgggagtgaccatgaggccttcgtgggcagcctttccccactgcctggattccactttaatatgaattgttccctttcatgggtacttcctatatgccaggcatagtaataagccctttacatgtatcattaagcttttcaaaatctctaggagggaggcgttattgctcccccttcatagatgagcaggtgccgagagcttacgtgacttgtcccaggccacatggtaagtagcagaatcaggactgatttgaactcaggtgctgtatggtaaatgcatctgatagcaataacttaagcagaccctgggaatgacctttatggcagatgcacctgaatgtgtgttccagattagggaatccgggactggccaaccagagattctttccttgtcatctgagcccctgtcctgtcctgtcctgtgaaacacgagctgtacaggggatattgaagccctgagttttgggttgcatgaaggttgctagggatagcgtggaggttgttaggggtgggtgtcaaaagaagatgctatataagctgcatgcctttcgaaagcaggtgcagttatccaggccagccctgcaccagcagactctctcttgtatgtaacactccatgtctcgtttgctctggctctgggtctcttctttagcttgttgaacctggcggtatctacattggagtcaatagggttttggcacaacaggtgtctccttgatttctttgtattctcctggccagcattttccattggtcaggacccccttcttgtttcccccttccctttctcagtactgattagatcactattaaaaagatcttgcaagtagggttttaattaaaaacaacagggttttctaagcgggttccgtgatgggccatgtgatcagaaagcctttatcatggttttatggatggtaatatcaggcacggccatcattcaaatatatagggttttttttgaaagagaaaaaaatgagtctgctttatttgatcatctgcaaagcagtaacagaccaagttccaggcaccgaacaatcagccagtgacaagactgacaaggctgcagggttcgcctgggaagggcagtcggccaggacccgcctccattgtcctctaggtttgccagcctggtagtggccctcaacctgaatggcagcaatttaataaaagaaattgtcctcccacagaactggaacccaaatgttgccgcacagccagaaatttcaggagtgcttggggacacttacatagtcaagggtcctgcccacctggcctctcaatcaaggccagctccctcctacctctcccctcttctttctggttataggaactgtccttttccctgttcctgatattttggttgagaccagcatctctattctctgttcttctccccaacatcctatttcagaaaacaacacactgtctgtccttagaggctcactcgcggcccttttctgccagtgcagcagacagctgttgtgctcacgttgacttcgcttctgtgagaaacccctccatctcgctgcttaaatagaatgcatccagagaaaaccccaggcaaagcggcgcaggtgctgagagtcagaagtagggctggcaggcactgaagtggtgagttccacagggatgacggcgggcacaccatatgtgacagacgcacagtgtcctcaaagctgcatcatgagcttcctgggcttcacgctcactcaggcttgatggaaatcctatttttctttcaatcttatgaaacagttcagaggaattctaataggtttctttctaaaaaactgtacgtgtattttatgatgataatgattattactgtcattattattatagatagagacaaggtcttattatattgcccaggctggtgtccaactcctgggctcaagcgatcctcccgcctcagcctcctgaagtgttggtattacaggtgtgagccactgtgcacagcccattattactgttgtcattactgttactattttgcttaggctgtgtattagagttctctagagggacagaactaacaggacatatatatatatatatatatatatatatatacacacacacatatatacaaataaaggagagtttattattaattcagacgatcacaacgttacacaataggccatctgcaggctgaggagcaaggagagccagtccgagtcccaaaactaaagaattggagtccgatgttcaagggcaggaagcatcctgcacaggggaaagatgtaggctgggatgctaagccagtctagccttttcacatttgtctgcctgctttatattctagctgtgctggcagctgattagatggtgcccacccagattgagggtgggtctgcctttcccagcccactggctcaaatgttaatctcctttggccacaccctcgcagacacacccaggatcaatgctttgcatccttcaatcccatcaagttgacactcggtattaaccatcacaggctggttaaagttggtttctgtcgtgggtagaacctctcacagtacagctagtttgagtaatgaatgggtgaggaataactaggctcacttgaagatgattcaagtgatttttaccacatagtatgtcccctaagtgaaagacactaacatcgactgaacactttccatgaaacatgcttttccatttagaccctacagggcaagcccattccaactctcttcatcacatggtatgagaagtaagaaacaaaacataggtatgaacgtatattgaatatgatcaaacttaaaaggtaaacaaattggaaaaaaagtagacttgccacatatttgaggttcaaagacagacagccttgatcta

SEQ ID NO: 600 - DNA, 3900 bp, Homo sapiens
gcataatggagttggctgccttgcaggtgggggtgggtgggtggagccaggaaatggtgagcacactggggagtgcagctgcagactgtggagctggcactgagtggggctgctgagcaggcagccaagacaaaggctgacacagagaataaagccatatcccacctgtataagatccctcgagtgttctttcagctacccgccaccggtccacctactcccctcggaccccagcttgggttggaagctgacactgactttctttcttttctgtgaggtggagtctagctctgttgcccaggctggagtgcagtggtacgatctcggctcactgcaacctccgcttcccaggttcaagcgattctcctgcctcagcctccagagtagctgggactacaggtgtgcaccagcacacctggctaatttttgtatttttagtagagatggggtttcaccatgttggccaggctggtctcaaactcctgacctcaggtgatctgcccacctcggcctcccaaagtgccatgataacaggtgtgagccaccacacccggcttctgacactgacaaatagcttatgtcctgaggtgctttgagtcatgagacgcagtttagcctggcagccgaaagcttgggttagtatcctagctcccccactttcctagctttgagcctacggagcaaagacctgagggatggctgacttttgaactccgacaaagtaggtattttctcagtaattgtaattaaactaccaaacggagagtttaatcattcatagcaaaggaatacttgaaagaagctcctttgaatctcataacaaaaaaggctggtgcctccattttctcatgtatgaaataggaattataacagtaactgcctcatccagctgctgtgaggatggcgtagttaacacgtgaggggcatggtaaatgatggccagtttgcaccacagtcatcctttcttccactgcttcctgccctctttctcctggcatggccaccagcctcaccccttcaaggccgcgttgcaatgacctgctgctgctcccctgggagtraccatgaggccttcgtgggcagcctttccccactgcctggattccactttaatatgaattgttccctttcatgggtacttcctatatgccaggcatagtaataagccctttacatgtatcattaagcttttcaaaatctctaggagggaggcgttattgctcccccttcatagatgagcaggtgccgagagcttacgtgacttgtcccaggccacatggtaagtagcagaatcaggactgatttgaactcaggtgctgtatggtaaatgcatctgatagcaataacttaagcagaccctgggaatgacctttatggcagatgcacctgaatgtgtgttccagattagggaatccgggactggccaaccagagattctttccttgtcatctgagcccctgtcctgtcctgtcctgtgaaacacgagctgtacaggggatattgaagccctgagttttgggttgcatgaaggttgctagggatagcgtggaggttgttaggggtgggtgtcaaaagaagatgctatataagctgcatgcctttcgaaagcaggtgcagttatccaggccagccctgcaccagcagactctctcttgtatgtaacactccatgtctcgtttgctctggctctgggtctcttctttagcttgttgaacctggcggtatctacattggagtcaatagggttttggcacaacaggtgtctccttgatttctttgtattctcctggccagcattttccattggtcaggacccccttcttgtttcccccttccctttctcagtactgattagatcactattaaaaagatcttgcaagtagggttttaattaaaaacaacagggttttctaagcgggttccgtgatgggccatgtgatcagaaagcctttatcatggttttatggatggtaatatcaggcacggccatcattcaaatatatagggttttttttgaaagagaaaaaaatgagtctgctttatttgatcatctgcaaagcagtaacagaccaagttccaggcaccgaacaatcagccagtgacaagactgacaaggctgcagggttcgcctgggaagggcagtcggccaggacccgcctccattgtcctctaggtttgccagcctggtagtggccctcaacctgaatggcagcaatttaataaaagaaattgtcctcccacagaactggaacccaaatgttgccgcacagccagaaatttcaggagtgcttggggacacttacatagtcaagggtcctgcccacctggcctctcaatcaaggccagctccctcctacctctcccctcttctttctggttataggaactgtccttttccctgttcctgatattttggttgagaccagcatctctattctctgttcttctccccaacatcctatttcagaaaacaacacactgtctgtccttagaggctcactcgcggcccttttctgccagtgcagcagacagctgttgtgctcacgttgacttcgcttctgtgagaaacccctccatctcgctgcttaaatagaatgcatccagagaaaaccccaggcaaagcggcgcaggtgctgagagtcagaagtagggctggcaggcactgaagtggtgagttccacagggatgacggcgggcacaccatatgtgacagacgcacagtgtcctcaaagctgcatcatgagcttcctgggcttcacgctcactcaggcttgatggaaatcctatttttctttcaatcttatgaaacagttcagaggaattctaataggtttctttctaaaaaactgtacgtgtattttatgatgataatgattattactgtcattattattatagatagagacaaggtcttattatattgcccaggctggtgtccaactcctgggctcaagcgatcctcccgcctcagcctcctgaagtgttggtattacaggtgtgagccactgtgcacagcccattattactgttgtcattactgttactattttgcttaggctgtgtattagagttctctagagggacagaactaacaggacatatatatatatatatatatatatatatatacacacacacatatatacaaataaaggagagtttattattaattcagacgatcacaacgttacacaataggccatctgcaggctgaggagcaaggagagccagtccgagtcccaaaactaaagaattggagtccgatgttcaagggcaggaagcatcctgcacaggggaaagatgtaggctgggatgctaagccagtctagccttttcacatttgtctgcctgctttatattctagctgtgctggcagctgattagatggtgcccacccagattgagggtgggtctgcctttcccagcccactggctcaaatgttaatctcctttggccacaccctcgcagacacacccaggatcaatgctttgcatccttcaatcccatcaagttgacactcggtattaaccatcacaggctggttaaagttggtttctgtcgtgggtagaacctctcacagtacagctagtttgagtaatgaatgggtgaggaataactaggctcacttgaagatgattcaagtgatttttaccacatagtatgtcccctaagtgaaagacactaacatcgactgaacactttccatgaaacatgcttttccatttagaccctacagggcaagcccattccaactctcttcatcacatggtatgagaagtaagaaacaaaacataggtatgaacgtatattgaatatgatcaaacttaaaaggtaaacaaattggaaaaaaagtagacttgccacatatttgaggttcaaagacagacagccttgatcta

SEQ ID NO: 601 - DNA, 3900 bp, Homo sapiens
gcataatggagttggctgccttgcaggtgggggtgggtgggtggagccaggaaatggtgagcacactggggagtgcagctgcagactgtggagctggcactgagtggggctgctgagcaggcagccaagacaaaggctgacacagagaataaagccatatcccacctgtataagatccctcgagtgttctttcagctacccgccaccggtccacctactcccctcggaccccagcttgggttggaagctgacactgactttctttcttttctgtgaggtggagtctagctctgttgcccaggctggagtgcagtggtacgatctcggctcactgcaacctccgcttcccaggttcaagcgattctcctgcctcagcctccagagtagctgggactacaggtgtgcaccagcacacctggctaatttttgtatttttagtagagatggggtttcaccatgttggccaggctggtctcaaactcctgacctcaggtgatctgcccacctcggcctcccaaagtgccatgataacaggtgtgagccaccacacccggcttctgacactgacaaatagcttatgtcctgaggtgctttgagtcatgagacgcagtttagcctggcagccgaaagcttgggttagtatcctagctcccccactttcctagctttgagcctacggagcaaagacctgagggatggctgacttttgaactccgacaaagtaggtattttctcagtaattgtaattaaactaccaaacggagagtttaatcattcatagcaaaggaatacttgaaagaagctcctttgaatctcataacaaaaaaggctggtgcctccattttctcatgtatgaaataggaattataacagtaactgcctcatccagctgctgtgaggatggcgtagttaacacgtgaggggcatggtaaatgatggccagtttgcaccacagtcatcctttcttccactgcttcctgccctctttctcctggcatggccaccagcctcaccccttcaaggccgcgttgcaatgacctgctgctgctcccctgggagtgaccatgaggccttcgtgggcagcctttccccactgcctggattccactttaatatgaattgttccctttcatgggtacttcctatatgccaggcatagtaataagccctttacatgtatcattaagcttttcaaaatctctaggagggaggcgttattgctcccccttcatagatgagcaggtgccgagagcttacgtgacttgtcccaggccacatggtaagtagcagaatcaggactgatttgaactcaggtgctgtatggtaaatgcatctgatagcaataacttaagcagaccctgggaatgacctttatggcagatgcacctgaatgtgtgttccagattagggaatccgggactggccaaccagagattctttccttgtcatctgagcccctgtcctgtcctgtcctrtgaaacacgagctgtacaggggatattgaagccctgagttttgggttgcatgaaggttgctagggatagcgtggaggttgttaggggtgggtgtcaaaagaagatgctatataagctgcatgcctttcgaaagcaggtgcagttatccaggccagccctgcaccagcagactctctcttgtatgtaacactccatgtctcgtttgctctggctctgggtctcttctttagcttgttgaacctggcggtatctacattggagtcaatagggttttggcacaacaggtgtctccttgatttctttgtattctcctggccagcattttccattggtcaggacccccttcttgtttcccccttccctttctcagtactgattagatcactattaaaaagatcttgcaagtagggttttaattaaaaacaacagggttttctaagcgggttccgtgatgggccatgtgatcagaaagcctttatcatggttttatggatggtaatatcaggcacggccatcattcaaatatatagggttttttttgaaagagaaaaaaatgagtctgctttatttgatcatctgcaaagcagtaacagaccaagttccaggcaccgaacaatcagccagtgacaagactgacaaggctgcagggttcgcctgggaagggcagtcggccaggacccgcctccattgtcctctaggtttgccagcctggtagtggccctcaacctgaatggcagcaatttaataaaagaaattgtcctcccacagaactggaacccaaatgttgccgcacagccagaaatttcaggagtgcttggggacacttacatagtcaagggtcctgcccacctggcctctcaatcaaggccagctccctcctacctctcccctcttctttctggttataggaactgtccttttccctgttcctgatattttggttgagaccagcatctctattctctgttcttctccccaacatcctatttcagaaaacaacacactgtctgtccttagaggctcactcgcggcccttttctgccagtgcagcagacagctgttgtgctcacgttgacttcgcttctgtgagaaacccctccatctcgctgcttaaatagaatgcatccagagaaaaccccaggcaaagcggcgcaggtgctgagagtcagaagtagggctggcaggcactgaagtggtgagttccacagggatgacggcgggcacaccatatgtgacagacgcacagtgtcctcaaagctgcatcatgagcttcctgggcttcacgctcactcaggcttgatggaaatcctatttttctttcaatcttatgaaacagttcagaggaattctaataggtttctttctaaaaaactgtacgtgtattttatgatgataatgattattactgtcattattattatagatagagacaaggtcttattatattgcccaggctggtgtccaactcctgggctcaagcgatcctcccgcctcagcctcctgaagtgttggtattacaggtgtgagccactgtgcacagcccattattactgttgtcattactgttactattttgcttaggctgtgtattagagttctctagagggacagaactaacaggacatatatatatatatatatatatatatatatacacacacacatatatacaaataaaggagagtttattattaattcagacgatcacaacgttacacaataggccatctgcaggctgaggagcaaggagagccagtccgagtcccaaaactaaagaattggagtccgatgttcaagggcaggaagcatcctgcacaggggaaagatgtaggctgggatgctaagccagtctagccttttcacatttgtctgcctgctttatattctagctgtgctggcagctgattagatggtgcccacccagattgagggtgggtctgcctttcccagcccactggctcaaatgttaatctcctttggccacaccctcgcagacacacccaggatcaatgctttgcatccttcaatcccatcaagttgacactcggtattaaccatcacaggctggttaaagttggtttctgtcgtgggtagaacctctcacagtacagctagtttgagtaatgaatgggtgaggaataactaggctcacttgaagatgattcaagtgatttttaccacatagtatgtcccctaagtgaaagacactaacatcgactgaacactttccatgaaacatgcttttccatttagaccctacagggcaagcccattccaactctcttcatcacatggtatgagaagtaagaaacaaaacataggtatgaacgtatattgaatatgatcaaacttaaaaggtaaacaaattggaaaaaaagtagacttgccacatatttgaggttcaaagacagacagccttgatcta

SEQ ID NO: 602 - DNA, 3900 bp, Homo sapiens
gcataatggagttggctgccttgcaggtgggggtgggtgggtggagccaggaaatggtgagcacactggggagtgcagctgcagactgtggagctggcactgagtggggctgctgagcaggcagccaagacaaaggctgacacagagaataaagccatatcccacctgtataagatccctcgagtgttctttcagctacccgccaccggtccacctactcccctcggaccccagcttgggttggaagctgacactgactttctttcttttctgtgaggtggagtctagctctgttgcccaggctggagtgcagtggtacgatctcggctcactgcaacctccgcttcccaggttcaagcgattctcctgcctcagcctccagagtagctgggactacaggtgtgcaccagcacacctggctaatttttgtatttttagtagagatggggtttcaccatgttggccaggctggtctcaaactcctgacctcaggtgatctgcccacctcggcctcccaaagtgccatgataacaggtgtgagccaccacacccggcttctgacactgacaaatagcttatgtcctgaggtgctttgagtcatgagacgcagtttagcctggcagccgaaagcttgggttagtatcctagctcccccactttcctagctttgagcctacggagcaaagacctgagggatggctgacttttgaactccgacaaagtaggtattttctcagtaattgtaattaaactaccaaacggagagtttaatcattcatagcaaaggaatacttgaaagaagctcctttgaatctcataacaaaaaaggctggtgcctccattttctcatgtatgaaataggaattataacagtaactgcctcatccagctgctgtgaggatggcgtagttaacacgtgaggggcatggtaaatgatggccagtttgcaccacagtcatcctttcttccactgcttcctgccctctttctcctggcatggccaccagcctcaccccttcaaggccgcgttgcaatgacctgctgctgctcccctgggagtgaccatgaggccttcgtgggcagcctttccccactgcctggattccactttaatatgaattgttccctttcatgggtacttcctatatgccaggcatagtaataagccctttacatgtatcattaagcttttcaaaatctctaggagggaggcgttattgctcccccttcatagatgagcaggtgccgagagcttacgtgacttgtcccaggccacatggtaagtagcagaatcaggactgatttgaactcaggtgctgtatggtaaatgcatctgatagcaataacttaagcagaccctgggaatgacctttatggcagatgcacctgaatgtgtgttccagattagggaatccgggactggccaaccagagattctttccttgtcatctgagcccctgtcctgtcctgtcctgtgaaacacgagctgtacaggggatattgaagccctgagttttgggttgcatgaaggttgctagggatagcgtggaggttgttaggggtgggtgtcaaaagaagatgctatataagctgcatgcctttcgaaagcaggtgcagttatccaggccagccctgcaccagcagactmtctcttgtatgtaacactccatgtctcgtttgctctggctctgggtctcttctttagcttgttgaacctggcggtatctacattggagtcaatagggttttggcacaacaggtgtctccttgatttctttgtattctcctggccagcattttccattggtcaggacccccttcttgtttcccccttccctttctcagtactgattagatcactattaaaaagatcttgcaagtagggttttaattaaaaacaacagggttttctaagcgggttccgtgatgggccatgtgatcagaaagcctttatcatggttttatggatggtaatatcaggcacggccatcattcaaatatatagggttttttttgaaagagaaaaaaatgagtctgctttatttgatcatctgcaaagcagtaacagaccaagttccaggcaccgaacaatcagccagtgacaagactgacaaggctgcagggttcgcctgggaagggcagtcggccaggacccgcctccattgtcctctaggtttgccagcctggtagtggccctcaacctgaatggcagcaatttaataaaagaaattgtcctcccacagaactggaacccaaatgttgccgcacagccagaaatttcaggagtgcttggggacacttacatagtcaagggtcctgcccacctggcctctcaatcaaggccagctccctcctacctctcccctcttctttctggttataggaactgtccttttccctgttcctgatattttggttgagaccagcatctctattctctgttcttctccccaacatcctatttcagaaaacaacacactgtctgtccttagaggctcactcgcggcccttttctgccagtgcagcagacagctgttgtgctcacgttgacttcgcttctgtgagaaacccctccatctcgctgcttaaatagaatgcatccagagaaaaccccaggcaaagcggcgcaggtgctgagagtcagaagtagggctggcaggcactgaagtggtgagttccacagggatgacggcgggcacaccatatgtgacagacgcacagtgtcctcaaagctgcatcatgagcttcctgggcttcacgctcactcaggcttgatggaaatcctatttttctttcaatcttatgaaacagttcagaggaattctaataggtttctttctaaaaaactgtacgtgtattttatgatgataatgattattactgtcattattattatagatagagacaaggtcttattatattgcccaggctggtgtccaactcctgggctcaagcgatcctcccgcctcagcctcctgaagtgttggtattacaggtgtgagccactgtgcacagcccattattactgttgtcattactgttactattttgcttaggctgtgtattagagttctctagagggacagaactaacaggacatatatatatatatatatatatatatatatacacacacacatatatacaaataaaggagagtttattattaattcagacgatcacaacgttacacaataggccatctgcaggctgaggagcaaggagagccagtccgagtcccaaaactaaagaattggagtccgatgttcaagggcaggaagcatcctgcacaggggaaagatgtaggctgggatgctaagccagtctagccttttcacatttgtctgcctgctttatattctagctgtgctggcagctgattagatggtgcccacccagattgagggtgggtctgcctttcccagcccactggctcaaatgttaatctcctttggccacaccctcgcagacacacccaggatcaatgctttgcatccttcaatcccatcaagttgacactcggtattaaccatcacaggctggttaaagttggtttctgtcgtgggtagaacctctcacagtacagctagtttgagtaatgaatgggtgaggaataactaggctcacttgaagatgattcaagtgatttttaccacatagtatgtcccctaagtgaaagacactaacatcgactgaacactttccatgaaacatgcttttccatttagaccctacagggcaagcccattccaactctcttcatcacatggtatgagaagtaagaaacaaaacataggtatgaacgtatattgaatatgatcaaacttaaaaggtaaacaaattggaaaaaaagtagacttgccacatatttgaggttcaaagacagacagccttgatcta

SEQ ID NO: 603 - DNA, 630 bp, Homo sapiens
gcctcaccgggaatccacatagggcagggtaggaagatgaaggaggaaacagcctcttctaactgaaaggctcaaccacaaaaggctttgtataattaagtcttaagtgagagaacttccagaccrggtcatgggggccccaggtctgtggaaaggcaatggccccgaggtgagacagctctggtgggttggaggatgagctgagaggtcaggctgcagaggcaagggctgggctggcactggaggggctgtcctcaagagctggggaaaccacagagagcgaaagcccagatctgagtttctgaaaacctgctctagtgacagatgaagaagacgggacagggttgtgtactcactgctcaccattcatgatgcagggcacggtgccaggcaccgcaaggaaatgaggccgcagtgaaaatggcctctgttcaaacccacgtggaggcagaggccacggtcagcccccgggagacactgtgtgctccagagcaggtcacctcacccagacggaacacgcctttccccagtgtgcccatgactcttcatgccccagctcccatccctggaagaccctgcgaggtggcgccagggaaaggaaagggcctccttccttggagaaagaggaaa

SEQ ID NO: 604 - DNA, 630 bp, Homo sapiens
gcctcaccgggaatccacatagggcagggtaggaagatgaaggaggaaacagcctcttctaactgaaaggctcaaccacaaaaggctttgtataattaagtcttaagtgagagaacttccagaccaggtcatgggggccccaggtctgtggaaaggcaatggccccgaggtgagacagctctggtgggttggaggatgagctgagaggtcaggctgcagaggcaagggctgggctggcactggaggggctgtcctcaagagctggggaaaccacagagagcgaaagcccagatctgagtttctgaaaacctgctctagtgacagatgaagaagacgggacagggttgtgtactcactgctcaccattcatgatgcagggcacggtgccaggcaccgcaaggaaatgaggccgcagtgaaaatggcctctgttcaaacccacgtggaggcagaggccrcggtcagcccccgggagacactgtgtgctccagagcaggtcacctcacccagacggaacacgcctttccccagtgtgcccatgactcttcatgccccagctcccatccctggaagaccctgcgaggtggcgccagggaaaggaaagggcctccttccttggagaaagaggaaa

SEQ ID NO: 605 - DNA, 598 bp, Homo sapiens
tcccactattgtcagcctgcatcaccagagacccgggcagaaccatggcgtccaggacgccgctgaccaccctcaacacggatatcagcatcctgtccttgcaggtaagacctgctccggggtccccgccccgccgccgcacactcccgcggtcgtctgggctgtcactaggagatccgtagcccagacggtgactttcgtatgagctatttaactttattttcttcagaatctgctgtagattgagctgtgcgtgaaattgctagtaagttctgacatgttaatgcgtctgtctttaaatctgaattgttaccataaacgtgtttaatggaacttgctggtctgtggactacaaaaaaaaaaaaaaaaaaamaaaaaccctttctacttaacattgtcttaacctcgtactctttatcctctttctttccaggcttctgaattcccttctgagttaatgtcaaatgacagcaaagcactgtgtggctgaataagcggtgagtgtttgcttgtgccacccgtgggtaaactgcccctcggtgtgtgtgcgcgcgcgcatgtgtttttgcttgtgtatctataaaatgtctgatttggt

SEQ ID NO: 606 - DNA, 1137 bp, Homo sapiens
ctgaatttggaattgacgttgatttcaaaaaaattgagaaattggaataggcttgttttctctcatgacacaagtaccagtaagtcagatgacgaagtggaatgtatcctcatgaaaggaagcatattaaagataagacccagctgctctgccaaggagtggctgttctttattcctttacttttcctaataaacttgctttcattttactttatggacttgccctgaattctttcttgcgcraggtccatgaaccctctcttgggatctggattgggacccctttccggtaacatcttcctggtgaaccatgaagggatgatactgaggaaacttccaatccttcctgcaacacacacacacacacactcacacacacacacacacacacacacaaacacacacacaaataaaaaagataaaacccaacattttaaatccttcagacccgcatttcactggtaagtagaaagtcaagggacacagggcttggttttcatggttttctcttatttgggtggagcaaatttcctgatcattcctgtgacgtgggaggcaaatatttggacaccttgaatgtctgacatcatctccattgtaccctcacacttagttgataatgggtttggtacagcattcagggttggaaatcattttcccctggatttttgctgcattgtagtctagcatccaggatttgtcttgagaatcaaaattattctgattcatgatcctttgtagaagacctatttgtatctccctgtcagcttgtaagattgtcttttgtcctcagtgtttgtaaatgttatgcgggtggcttaggctgggtatcttttcatctgtcatatgggcgggtgctcattgggtccttcgggctagaaattaatgtctttcagttctctgaaatttcctaaactatgtcatgatgctttcctttcccaccttttccttggtttctctctctctctctggaactctgtcttcatatgttgaaccccttgaactaattttacatttttttgctctattttctctatttcctctgttttgtcttctaatttttcgaatgaactttacatttataaaaaggcattttaagcttacaactattctttctgttctctaaatattctttaa

SEQ ID NO: 607 - DNA, 1137 bp, Homo sapiens
ctgaatttggaattgacgttgatttcaaaaaaattgagaaattggaataggcttgttttctctcatgacacaagtaccagtaagtcagatgacgaagtggaatgtatcctcatgaaaggaagcatattaaagataagacccagctgctctgccaaggagtggctgttctttattcctttacttttcctaataaacttgctttcattttactttatggacttgccctgaattctttcttgcgcaaggtccatgaaccctctcttgggatctggattgggacccctttccggtaacatcttcctggtgaaccatgaagggatgatactgaggaaacttccartccttcctgcaacacacacacacacacactcacacacacacacacacacacacacaaacacacacacaaataaaaaagataaaacccaacattttaaatccttcagacccgcatttcactggtaagtagaaagtcaagggacacagggcttggttttcatggttttctcttatttgggtggagcaaatttcctgatcattcctgtgacgtgggaggcaaatatttggacaccttgaatgtctgacatcatctccattgtaccctcacacttagttgataatgggtttggtacagcattcagggttggaaatcattttcccctggatttttgctgcattgtagtctagcatccaggatttgtcttgagaatcaaaattattctgattcatgatcctttgtagaagacctatttgtatctccctgtcagcttgtaagattgtcttttgtcctcagtgtttgtaaatgttatgcgggtggcttaggctgggtatcttttcatctgtcatatgggcgggtgctcattgggtccttcgggctagaaattaatgtctttcagttctctgaaatttcctaaactatgtcatgatgctttcctttcccaccttttccttggtttctctctctctctctggaactctgtcttcatatgttgaaccccttgaactaattttacatttttttgctctattttctctatttcctctgttttgtcttctaatttttcgaatgaactttacatttataaaaaggcattttaagcttacaactattctttctgttctctaaatattctttaa

SEQ ID NO: 608 - DNA, 1137 bp, Homo sapiens
ctgaatttggaattgacgttgatttcaaaaaaattgagaaattggaataggcttgttttctctcatgacacaagtaccagtaagtcagatgacgaagtggaatgtatcctcatgaaaggaagcatattaaagataagacccagctgctctgccaaggagtggctgttctttattcctttacttttcctaataaacttgctttcattttactttatggacttgccctgaattctttcttgcgcaaggtccatgaaccctctcttgggatctggattgggacccctttccggtaacatcttcctggtgaaccatgaagggatgatactgaggaaacttccaatccttcctgcaacacacacacacacacactcacacacacacacacacacacacacaaacacacacacaaataaaaaagataaaacccaacattttaaatccttcagacccgcatttcactggtaagtagaaagtcaagggacacagggcttggttttcatggttttctcttatttgggtggagcaaatttcctgatcattcctgtgacgtgggaggcaaatatttggacaccttgaatgtctgacatcatctccattgtaccctcacacttagttgataatgggtttggtacagcattcagggttggaaatcattttcccctggatttttgctgcattgtagtctagcatccaggatttgtcttgagaatcaaaattattctgattcatgatcctttgtagaagacctatttgtatctccctgtcagcttgtaagattgtcttttgtcctcagtgtttgtaaatgttatgcgggtggcttaggctgggtatcttttcatctgtcatatgggcgggtgctcattgggtccttcgggctagaaattaatgtctttcagttctctgaaatttcctaaactatgtcatgatgctttcctttcccaccttttccttggtttctctctctctctctggaactctgtcttcatatgttgaaccccttgaactaattttacatttttttgctctattttctctatttcctctgttttgtcttctaatttttcgaatgaactytacatttataaaaaggcattttaagcttacaactattctttctgttctctaaatattctttaa

SEQ ID NO: 609 - DNA, 920 bp, Homo sapiens
  misc_feature (1)...(920): n = A,T,C or G
tgcatctgcctgagtctaggttttcttaactctaagacagcactcccatctcagggaagttgtgaagctgtcatgaaactggcaggtaaaacccacccacttcttggcacagatttctcracctttttctgtcaaggcccacaggacatccttgcaggcagagctgcaggcccagcagctgtgacaacagtataaccaaaatctagaatctgtgctaatttttttttttaagagatagggtatctctctgtcacccaggctggagtgcagtgacaggatcatagctcactgtaacctccagctcttagactcaagcaattttcctgcctcagtctcccaagtagctgggactacagacaactgccaccacacctggctaatttttattttttgtagacacagggtctcactatattgcccaggctggtctcaaactcctagcctcaagcagtcctcccacctcagcctcccaaagtgctgagattacaggcatgaaacacctcacccaaccccaacctgtttttttaattgaagaataactggcgaactatgccatcttaaaatgattaacattattattatataattacataatatagaatataaaatgaatattttcttgaaatgtatccattgttatccattgttcttaaactattaagaactaggagtttaaagcaaaaaaaaaaaaacattgctgctgaagactttgtcctctcccagctccacaagagcacagggtggcagagcaggggtttgagcccaggctctgggtcntgaccgccgggggccaaatcccagctcaccgtgaactgtctgaacagccatgggcaagccgtttctgctctctgagcctcagtctctcatctgtgactggcggcatccacccctcgggctgctgtgggggtgagacagaacga

SEQ ID NO: 610 - DNA, 920 bp, Homo sapiens
  misc_feature (1)...(920): n = A,T,C or G
tgcatctgcctgagtctaggttttcttaactctaagacagcactcccatctcagggaagttgtgaagctgtcatgaaactggcaggtaaaacccacccacttcttggcacagatttctcgacctttttctgtcaaggcccacaggacatccttgcaggcagagctgcaggcccagcagctgtgacaacagtataaccaaaatctagaatctgtgctaatttttttttttaagagatagggtatctctctgtcacccaggctggagtgcagtgacaggatcatagctcactgtaacctccagctcttagactcaagcaattttcctgcctcagtctcccaagtagctgggactacagacaactgccaccacacctggctaatttttattttttgtagacacagggtctcactatattgcccaggctggtctcaaactcctagcctcaagcagtcctcccacctcagcctcccaaagtgctgagattacaggcatgaaacacctcacccaaccccaacctgtttttttaattgaagaataactggcgaactatgccatcttaaaatgattaacattattattatataattacataatatagaatataaaatgaatattttcttgaaatgtatccattgttatccattgttcttaaactattaagaactaggagtttaaagcaaaaaaaaaaaaacattgctgctgaagactttgtcctctcccagctccayaagagcacagggtggcagagcaggggtttgagcccaggctctgggtcntgaccgccgggggccaaatcccagctcaccgtgaactgtctgaacagccatgggcaagccgtttctgctctctgagcctcagtctctcatctgtgactggcggcatccacccctcgggctgctgtgggggtgagacagaacga

SEQ ID NO: 611 - DNA, 920 bp, Homo sapiens
  misc_feature (1)...(920): n = A,T,C or G
tgcatctgcctgagtctaggttttcttaactctaagacagcactcccatctcagggaagttgtgaagctgtcatgaaactggcaggtaaaacccacccacttcttggcacagatttctcgacctttttctgtcaaggcccacaggacatccttgcaggcagagctgcaggcccagcagctgtgacaacagtataaccaaaatctagaatctgtgctaatttttttttttaagagatagggtatctctctgtcacccaggctggagtgcagtgacaggatcatagctcactgtaacctccagctcttagactcaagcaattttcctgcctcagtctcccaagtagctgggactacagacaactgccaccacacctggctaatttttattttttgtagacacagggtctcactatattgcccaggctggtctcaaactcctagcctcaagcagtcctcccacctcagcctcccaaagtgctgagattacaggcatgaaacacctcacccaaccccaacctgtttttttaattgaagaataactggcgaactatgccatcttaaaatgattaacattattattatataattacataatatagaatataaaatgaatattttcttgaaatgtatccattgttatccattgttcttaaactattaagaactaggagtttaaagcaaaaaaaaaaaaacattgctgctgaagactttgtcctctcccagctccacaagagcacagggtggcagagcaggggtttgagcccaggctctgggtcntgacygccgggggccaaatcccagctcaccgtgaactgtctgaacagccatgggcaagccgtttctgctctctgagcctcagtctctcatctgtgactggcggcatccacccctcgggctgctgtgggggtgagacagaacga

SEQ ID NO: 612 - DNA, 1131 bp, Homo sapiens
tatatatatatatatatatagaaaacaaaacctcctgtgtcgctaaaattcttagagtgttgactccagtatttctaaacttaaatatctgccgcctggataatgtagcttaaatcagtgataacttttgagatgtcatcatgagactttttgggcttcatattttaaaatcactgatttcttaactttattagtgagggcttatgtaataacacatttttagcttaaagagggattaattatagaatattccctatatggaattaaatgtatttgcttttctagcatatggacttcagaaccctaaagttggggaagtggggtggagtctgaatagtttagatggacaaagaaattcctgcaagagagactgtaaccacactgaaactrggcattgtttatagattttttaaaaagttttgtttcattcacatacactcatgactgtcatatagatatagatgatattatggcaaataaaatacaaaattgttttaaaaggatccatggttgcttttgttcatcagatgtttgctaatcaaagactagaaaccaggttactagcacatggaagtgtttgaatattgggagttgttgttacgcagttttaaagtggatttcaaatgagtgctgtgtttaactaatggaatataagtaacattctatccaaagaacataattgtatgtgagcgtaaaccttaaagcaagtatatttaataaaagacaccagcaatttccgaggttgttctaaataatgttcagcacattaaaaaaaaaagtggttccatctgttactttctattcttaacaaaaggggaaaaaggagatcattttgatcaatgcccttttaattcttaggcttggtataaaataaatcacagtgttatggcaattcatttatagaggttaaagtgatatgatgtggcttttcatggcaacatgggtttcacttggtgagcgcctgggactttgatttgccatattacctgctgtggcttaagtgatgcaaaataattattggggcttccttgtcacagtggcctattccacacctgcacccttttgttgggaacccaacagggatgctggatatgcggtctccactgaatagacgatcctccctgactagtc

SEQ ID NO: 613 - DNA, 1234 bp, Homo sapiens
attatatagtttcagttagcaaaatattctgaattaataaaaaccaatataggtgtatttaatacataaacataagtaagttttaaatactttatagaaacttaacctaaaaatcaaaactaacatgaacctagagttttgtatggagagtattatgggattctttaatatcacaatatctttaccacagtaaaggaaactgactttggattgctaagatgcccaagaaaatttttcctttttaaattcatatgtaagcatgtttatttgttatactttattttcctggaaagatcaagtgatcacacagatcatcctgcatgttcatcaactcacagagtatttcacatattaacagtttgcttgacgtgagctggattcataccttttaagtgcgttgcatatatagggtatttgtgaccgtgagacttaacaatgagtagaaataattcttcccacttacactaagtgccgttgctgctcttccatcagggcatcctcacaggggcaccatctgcctggtggagagtggggcacacagcatctccatgctctcccattcaggttgggtataagtcctgggcttcctgaagagtggcaagggaacattgatttgtctcccaacaggcatgccctgggacactctcgcaacagatggctctgtagcaccctgcagcctgaggtctccacataacacaaactgaatatattcctcctctgcaagctgctttctccttggggaatgctttttttttaaacatgcaaaccttgcaggtcttttctgaattttaygaatgccaacatcctgttggcttcattgggaacactatttccacaggcttaacttgcagaggtgtcagtggtattctgaagaatatataagaatatataaaacctataaaatgttgtttatgatctttagttcagatagtctggggctatattgaagggctttagaaacctggaactaattgtccatttggatataaaattgagtaagaagagtagctctgtttcattcttcctggagagaaaagttgtctttacatttaactgtaagagaagtaagtactgtggtctcttgtttcatcgtttgtattttctttatattctttttttatacctgttcagtaaataagaatccacagctcttgataaaatatccctgtgcatttgtttggcaatcataaagtcaatacccacttcataatgagctactggctttgccacaaac

SEQ ID NO: 614 - DNA, 1234 bp, Homo sapiens
attatatagtttcagttagcaaaatattctgaattaataaaaaccaatataggtgtatttaatacataaacataagtaagttttaaatactttatagaaacttaacctaaaaatcaaaactaacatgaacctagagttttgtatggagagtattatgggattctttaatatcacaatatctttaccacagtaaaggaaactgactttggattgctaagatgcccaagaaaatttttcctttttaaattcatatgtaagcatgtttatttgttatactttattttcctggaaagatcaagtgatcacacagatcatcctgcatgttcatcaactcacagagtatttcacatattaacagtttgcttgacgtgagctggattcataccttttaagtgcgttgcatatatagggtatttgtgaccgtgagacttaacaatgagtagaaataattcttcccacttacactaagtgccgttgctgctcttccatcagggcatcctcacaggggcaccatctgcctggtggagagtggggcacacagcatctccatgctctcccattcaggttgggtataagtcctgggcttcctgaagagtggcaagggaacattgatttgtctcccaacaggcatgccctgggacactctcgcaacagatggctctgtagcaccctgcagcctgaggtctccacataacacaaactgaatatattcctcctctgcaagctgctttctccttggggaatgctttttttttaaacatgcaaaccttgcaggtcttttctgaattttacgaatgccaacatcctgttggcttcattgggaacactatttccacaggcttaacttgcagaggtgtcagtggtattctgaagaatatataagaatatataaaacctataaaatgttgtttatgatctttagttcagatagtctggggctatattgaagggctttagaaacctggaactaattgtccatttggatataaaattgagtaagaagagtagctctgtttcattcttcctggagagaaaagttgtctttacatttaactgtaagagaagtaagtactgtggtctcttgtttcatcgtttgtatkttctttatattctttttttatacctgttcagtaaataagaatccacagctcttgataaaatatccctgtgcatttgtttggcaatcataaagtcaatacccacttcataatgagctactggctttgccacaaac

SEQ ID NO: 615 - DNA, 1234 bp, Homo sapiens
attatatagtttcagttagcaaaatattctgaattaataaaaaccaatataggtgtatttaatacataaacataagtaagttttaaatactttatagaaacttaacctaaaaatcaaaactaacatgaacctagagttttgtatggagagtattatgggattctttaatatcacaatatctttaccacagtaaaggaaactgactttggattgctaagatgcccaagaaaatttttcctttttaaattcatatgtaagcatgtttatttgttatactttattttcctggaaagatcaagtgatcacacagatcatcctgcatgttcatcaactcacagagtatttcacatattaacagtttgcttgacgtgagctggattcataccttttaagtgcgttgcatatatagggtatttgtgaccgtgagacttaacaatgagtagaaataattcttcccacttacactaagtgccgttgctgctcttccatcagggcatcctcacaggggcaccatctgcctggtggagagtggggcacacagcatctccatgctctcccattcaggttgggtataagtcctgggcttcctgaagagtggcaagggaacattgatttgtctcccaacaggcatgccctgggacactctcgcaacagatggctctgtagcaccctgcagcctgaggtctccacataacacaaactgaatatattcctcctctgcaagctgctttctccttggggaatgctttttttttaaacatgcaaaccttgcaggtcttttctgaattttacgaatgccaacatcctgttggcttcattgggaacactatttccacaggcttaacttgcagaggtgtcagtggtattctgaagaatatataagaatatataaaacctataaaatgttgtttatgatctttagttcagatagtctggggctatattgaagggctttagaaacctggaactaattgtccatttggatataaaattgagtaagaagagtagctctgtttcattcttcctggagagaaaagttgtctttacatttaactgtaagagaagtaagtactgtggtctcttgtttcatcgtttgtattttctttatattcwttttttatacctgttcagtaaataagaatccacagctcttgataaaatatccctgtgcatttgtttggcaatcataaagtcaatacccacttcataatgagctactggctttgccacaaac

SEQ ID NO: 616 - DNA, 754 bp, Homo sapiens
agccaaaagtgaagaagtggcttgcccatggtcatttagggatcaatgagtgactctgactctcacaagctacagtgagtctttctttctgatattattcctgccttcccctgcacacagagtgaggctgatggtttatattatttgaccggccccatgtgcagggctgactcaaccttgggtggattttgaaattgaggctgagaaacaccagttatgctgggctgtttgtagagaactctggatgtaagagctgcgttcatggattagccataagtgcacagaagcagaaaaggtgacgtgcagaggaagaagaatgaagtaaacacactgagaagctgagatgagaggcagggagagagtacttttcctccttcctgtgaagtttcaactgactttggagtccatgaacgacttagacgccttccaataagtcagcatgtttttgtttatggtggcttgaattaacttstgttacttataagcaagtacactttgactaaacagtggcattacttgctcattcattcatgatcaaacatatattaactatctacttgctcattcattcatgatcaaacatatattgattatctactccaggctaggtgttaaggataaagagatgtataaaattcaggaatggctgctaagtatttacaatttagaaagaaggtggatgtatattttaatgatagtaataaacatttatggtatgcttgccatgtgccaagcaatgtgctgaacactttat

SEQ ID NO: 617 - DNA, 537 bp, Homo sapiens
  misc_feature (1)...(537): n = A,T,C or G
tggaagkannnnnnnnnnnnnnnnnnnnnnnnnnnnnnnnnnnnnnnnnnnnnnnnnnnnnnnnnnnnnnnnnnnnnnnnnnnnnnnnnnnnnnnnnnnnnnnnnnnngatgagaagtgctacctataacacataataaattaccacatggtttgggatttattgctgaactttctattcttttccatttttctaacaagacacatgttctacattaattactctgactttatattttaatatttggtaggattaatcagccctcatttttttcagaagttttctggctattcctgcttaaaaatataattttaatggtatatattattccatcatatggtatcataattctgtcatttcgttataattcacaagccatttccctcttgttggacacttaagttgtttagaattttttgccataataaatccagaactctttctgtagctcaattattatataacgacaggttctaggaaattggggtgattggctttgaatgattggaaaagtcttggcatatcaacaattttcta

SEQ ID NO: 618 - DNA, 643 bp, Homo sapiens
aatacctaggtgatgggttgatagatgcagcaaaccaccrtggcacacgtttacctgtgtaacacacctgcacatcctgcacacgtatcctggaacttaaaataaaataagataaaatgaaacaaaaaagacttgaaacaaagcctctaccacatactctatgtcagtattaagttctattgaaaagaaaaatttccaagcattttatcagaaataattttcgtagtgtattcatcaatctcagccacactagcatggctgttctcagtattacagatgaacccacacgacctcagctgctttgtcatgtcagttacatgtaccattattcagaacgagtgggcccattttcaatttcctgttgtaaggttagtctgtcttcaatctatcacaggacgcaatggcgttgtaactaagattcataatttccagtaggagaatgatttgtcatcacattccatagtctcagggttgactgtttcgttggtcttgctattgaatgattaagggaacagccaggagattttaaacactccttacaaagcgttttcctctggagacctacttggctgctgcttaatcttaatgtgtgcaattagaagttgtaaatgtattcagaatatatgggcttagagagactggt

SEQ ID NO: 619 - DNA, 1205 bp, Homo sapiens
cacaaaatactgcagaattaatataaatggtctatgcaatttaatgtatcttttttctctggctttacttagaaaaatcacagcaaaatatgcattttttaagttaactctgtcaacctagtcataattccaggcaaaattgtacatcagtaagtgatgctaaaggaaattaaaaggagacgcaagactaacaatatgacatcaaaatgcagggccttttaaacaygtttgttcatgcatttaaaaaaatgccagtagcatttaggtgtatttaggtttgtgcttaataagggtcccagaatgatggcccgagatcttttcctgctattattttgtttgctcgttgatctatttcttgataaatctggtcagcagttactgcatgtctagtacataccaggtactattctaggcacagaggatgcagcagagaatatgagagaaaaattctcctaccttcctactaagacagacaattagtaagtaaacaaacatatgtgacatcatttcaggtagaaaaaagtgctaagaagaaacataaagcaagagtaagagtataggaagttagtaaagtgggatgctgttctaggtctggtcaggaaaggtgtctgagcaggtagcatttgaacaaagggcacagactcagtctatttgctggaaaacactacagaatgtcatggatgggtcagtgaatggacacgacacactgatattgacacccagtccccaggactgtttttcttagtcaccagggcctccctaggtacttgccctgggaaaaaggcttcacgatgagagaagaaaatttaaaatgcaaaaactcaaaacgggcagcaaataggatgcagtggatgagtctgccctggggtacttgcactccacagattgtcctctaggtcagctgctcagggactcattgtgtcagagcacttgggacgtgagctacaaaaaaaaaaaaaaaagaaaaaagaaaaaaaaaagctatagtatccatgtcccccaaaatttctctttcacatccaagactagtaagagaaaacaacacttgtgtggtgtaaggacattttatttgactttatggtggtatgtgaaataacaatctcacaccttcagaagcatcaaagaatatcatcagagtgacatggtttggaaacacatttggtctctcagtcaccttctttacctcttcgtctgttaacagaacc

SEQ ID NO: 620 - DNA, 854 bp, Homo sapiens
tcatggggtacaagcgcaatcctgctacactgatgtattgcattatggtgaaatccgggacttcrgtgcatccatcagtggagcaatgcacgttgtacccatcaagcaactgcttctggtccacagtcttcagtcatgtctttcacgctttgaatcctcaacccgaatgcacccaacacctaacactgtgtatgacccatagttttttccataaactttggtcgcattatatgtttgctctagattagtggttctcaaatgttagcgtgcattagaatctcctgcagggcttgctaaaacacagattggtggatcccactcccagcatttgtaattctttacatatgggtcagggcttgagagtatgcatttataatatgttcacaggttataatgcaaaattatataatgcaaaattgtaacctgtgaacatatcagaaatgcaaactctgcaggtgtggtgaccacattttgagagtagatagatagataggtagatagataaatagacagatgacagatagataaaacacccagtaactgcaaattaatattaattatttgtagtaaaggaactcacctcacttgctgctggcacagacaggataaaacagttgtttaacaaaagccacaatgtgtttcgttacaaacagaccaggcaaatgtgagtttaacccttaatcttttaaatctataagaatattaaaactgctgttgcatttttgtaatcacagtttttatttgttcttaattagtaagaacaccagctgacttgccacacccactgggatggttataattaaaaagagacataataacaagcactggcaaggatgtggagaaaacagaaactt

SEQ ID NO: 621 - DNA, 536 bp, Homo sapiens
gccgagggtagatcccttgagcccaggagttcgagaccagcctgggcaacatggcgaaatcccatctctacaaaaactacaaaaattagccagatgtggtggcatgtgcctgtagtcccaggtacttgggagactgcagtggaaggattgccgagcccgggaaagggaggttgcggtgaatggggatcccgccactgcactccagcctgggtgacagcgtaagactctgtctcaaaaacaaaacaaaacaaaagattcatttcttattgataaagcaagctccttggagaaagatcttggaacctcattagtgctgggggtgggggtggggcttcttcaatccagccgagctggctgtgaaacccccaggctttggtaccaagtgagctccagtcccagctgtggctgactstgtgaacttggctatgcattcagaggcctctgagcctcagtttcctcatctgtagaagacagccaggaacccgtcatcctggctagcagtggaagtcaaaggtgctcatggaaagcccttgctg

SEQ ID NO: 622 - DNA, 1288 bp, Homo sapiens
ttacaggtgttctcaaagttgtacatggacgatggaccagtgacctaacattaaactttgaatttctctactactgtttcaacatgttgttggcacaatttccgaattagttacgtggtttttctttgccaccataaggatgtctgctctgggacccaaagagtcaaaatgccttaatcaatcattgaactttccttatctttatttcaactctcactcactcacctttatctaaaaaatattttggtagagattatgaatccatatcccacaccctcctcctgcacaacctatctgcttctgctcactgcatgccccccagtcttatgacatgattggtaataactatttttttattatgataaatttgatcacctcaaaatcagcaagaggcttgttttaacccagacttatgagttgtttctctgacaatgacatttcaggtataaccttaaagcaaatttgggatgttgttattattctcccaggtgcaatgatcttttctatcaagttgttgttatttgaaagatacactttgttttcaaaaaccatgaaaatatgaatgaccaattgtcaaagtaatttattagagacattaaatttataccaataatataatacaaataacatataacaatgataattatctttttgtacttacaaccaaaccatattttcccagaaagaaagaaaggaaggaaggaaggaaggaaggaaggaaggaaggaaggaagraaggaaggaagaaagaaagaaagaaagaaagaaagaaagaaagaaagaaaaagaaagcaagcaagtgagcgtgcgtccaggcgcagtggctcacgcctgtaatcccaacattttgagaggctgagctgggcagatctcttgagctcaggagttcaagaccagcctggacaacatggcgaaaaccaaaaccaaaccaaaccaaaaccaaaaccaaaccaaaactatctccaccaaaaatacagaaaatcagccaggcacagtggtgcatgcctgtagtcccagctactcgggaggctgagggagaaggatcacttgagcccgagaggcagaggctgcagtaagctcacatcacaccactgcgctccagtctgggtgacagagtgagaccttgtctcaaaataataataataatgtgctcgattcagtaacccactaaagtgggtctgagtttatcattattctttccttactatccccatcgaaatttatggcaataatagccttggattcagtaattccattgctaagaacaaattctaatgaagcactcagg

SEQ ID NO: 623 - DNA, 1288 bp, Homo sapiens
ttacaggtgttctcaaagttgtacatggacgatggaccagtgacctaacattaaactttgaatttctctactactgtttcaacatgttgttggcacaatttccgaattagttacgtggtttttctttgccaccataaggatgtctgctctgggacccaaagagtcaaaatgccttaatcaatcattgaactttccttatctttatttcaactctcactcactcacctttatctaaaaaatattttggtagagattatgaatccatatcccacaccctcctcctgcacaacctatctgcttctgctcactgcatgccccccagtcttatgacatgattggtaataactatttttttattatgataaatttgatcacctcaaaatcagcaagaggcttgttttaacccagacttatgagttgtttctctgacaatgacatttcaggtataaccttaaagcaaatttgggatgttgttattattctcccaggtgcaatgatcttttctatcaagttgttgttatttgaaagatacactttgttttcaaaaaccatgaaaatatgaatgaccaattgtcaaagtaatttattagagacattaaatttataccaataatataatacaaataacatataacaatgataattatctttttgtacttacaaccaaaccatattttcccagaaagaaagaaaggaaggaaggaaggaaggaaggaaggaaggaaggaaggaaggaaggaaggaagaaagaaagaaagaaagaaagaaagaaagaaagaaagaaaaagaaagcaagcaagtgagcgtgcgtccaggcgcagtggctcacgcctgtaatcccaacattttgagaggctgagctgggcagatctcttgagctcaggagttcaagaccagcctggacaacatggcgaaaaccaaaaccaaaccaaaccaaaaccaaaaccaaaccaaaactatctccaccaaaaatacagaaaatcagccaggcacagtggtgcatgcctgtagtcccagctactcgggaggctgagggagaaggatcacttgagcccgagaggcagaggctgcagtaagctcacatcacaccactgcgctccagtctgggtgacagagtgagaccttgtctcaaaataataataataatgtgctcgattcagtaacccactaaagtgggtctgagtttatcattattctttccttactatccccatcgaaatttatggcaataatagccttggattcagtaattccattgctaagaacraattctaatgaagcactcagg

SEQ ID NO: 624 - DNA, 1349 bp, Homo sapiens
ttttcattgaggactggtacccatatatcttataggatttctaagtgacccccaaaaaagttaattacctttgaaatgaaaaagtattagaatattaacagtggtggtgtttcgcttatagaactatagatgattttttttctttccaatgatctacggttcacctagctattcatttcccctgtttctaggaagtagagatacaatgatgaacaagacagcaaggtccctgccctgtaggagattatcgtctaacgaaaagacaggctataacaaatgtacagaataattttagtgataagggatttgaacaaagaaatgtggagctattttaggcagggaagttaagaaaggcctctgtgaagcagtgatgtgtgctctaaatctgaatgaagtatggaaatcagggtgggggacaagtacaaagatcctaaggtggaaactgtgagcttggagtacttgtgcaaaatcagagcagcccatgtggctgaggagcagagggtgaggggccgggaccaggtcccttgaggcctcttgcctgtggtgagcactgtggttggcctctattccagactgatagaaatctccttccagctgactgcctggactgcatgggaaactgccagattatttcacactctatggtaaaatttaaaattctgaagaaatccagagactctgggggcacacagtgaagtgagtcaaaaagtgtgaagcaggccgggtgcaggggctcatgcctgtaatcccagcactttgggaggccgaggtgggcagatcacaaggtcaggagttccagaccagccttgccaacatagtgaaaccccgtctctactaaaattacaaaaattagctgggtrtggtggcacgcgcctgtagtcccagctacttgggaagctgaggcgggagaattgcttgaacccggaaggtggaggttgcagtgagccgagatcgcgccactgcactccagcctgggagacagagtgagatgccgtctcaaaaacaaacaaacaaacaaaccatgaaggaaagaggccactccttgggatcaatgcctctcggtttgttgtctctcagccctgtaaagtggttcaggatctttgggaaggaaaggaataaggtttggggcaaggatgggggaacagacagaaaccaaagcagctctgcttttaaacacttacaaagaggagattctgatcccaagcaaaacaaaataaaagcctgtagctctaaattttatttgagaaggtgtgtcaaaaggagcttccttcttaaaaatgaaaacaaaacatacaacaaaaaaactacagttctggattttctaaatgttatccttgaatcaaaatgca

SEQ ID NO: 625 - DNA, 1349 bp, Homo sapiens
ttttcattgaggactggtacccatatatcttataggatttctaagtgacccccaaaaaagttaattacctttgaaatgaaaaagtattagaatattaacagtggtggtgtttcgcttatagaactatagatgattttttttctttccaatgatctacggttcacctagctattcatttcccctgtttctaggaagtagagatacaatgatgaacaagacagcaaggtccctgccctgtaggagattatcgtctaacgaaaagacaggctataacaaatgtacagaataattttagtgataagggatttgaacaaagaaatgtggagctattttaggcagggaagttaagaaaggcctctgtgaagcagtgatgtgtgctctaaatctgaatgaagtatggaaatcagggtgggggacaagtacaaagatcctaaggtggaaactgtgagcttggagtacttgtgcaaaatcagagcagcccatgtggctgaggagcagagggtgaggggccgggaccaggtcccttgaggcctcttgcctgtggtgagcactgtggttggcctctattccagactgatagaaatctccttccagctgactgcctggactgcatgggaaactgccagattatttcacactctatggtaaaatttaaaattctgaagaaatccagagactctgggggcacacagtgaagtgagtcaaaaagtgtgaagcaggccgggtgcaggggctcatgcctgtaatcccagcactttgggaggccgaggtgggcagatcacaaggtcaggagttccagaccagccttgccaacatagtgaaaccccgtctctactaaaattacaaaaattagctgggtatggtggcacrcgcctgtagtcccagctacttgggaagctgaggcgggagaattgcttgaacccggaaggtggaggttgcagtgagccgagatcgcgccactgcactccagcctgggagacagagtgagatgccgtctcaaaaacaaacaaacaaacaaaccatgaaggaaagaggccactccttgggatcaatgcctctcggtttgttgtctctcagccctgtaaagtggttcaggatctttgggaaggaaaggaataaggtttggggcaaggatgggggaacagacagaaaccaaagcagctctgcttttaaacacttacaaagaggagattctgatcccaagcaaaacaaaataaaagcctgtagctctaaattttatttgagaaggtgtgtcaaaaggagcttccttcttaaaaatgaaaacaaaacatacaacaaaaaaactacagttctggattttctaaatgttatccttgaatcaaaatgca

SEQ ID NO: 626 - DNA, 785 bp, Homo sapiens
acccagtgcttggctgctccgaagccactccaaatgtgaaatatgtcgaagctaaagctgcactgccctcctttctcttctttctaatggggccaagtgaattaaatgtcactcatcccaaaaaagaaggcaaatcctctttaaaaccaaaaattcttttgggttaggctagcttctcctctattcatgtgaagagatttaattcctttttgttggttttgtttttttcaattctgggaagaggatgagccaccctggctctggccatcagagccactttctttttgcacatgtttgaaaggcatgacacaacttgaactggaaaaagggctggcatgaaccccggcatctcaagagagactagaggtgcttttcagagtgaggktcccattttgcaagaaattatttggaggatcaaagacaaaaactgaggcatcgaaagggaccaacttaggcttcagaggaaggggagagtgctactggggaccttgaaaataattatcaggaaacacagcttatggttcacatttcaaacccagcctacaatgtttctttacgtgtatttcttggcatcttcagtcgaaaatatcacccaaatgaggcagagtggtacagtggatttgagatctgtttctgccattaactgactaagagactactgtaagtaacatctccaagccttggtctcctccaatgtaaaatgggcataagaacatccattacatgaggctgttttgagaatttcatcaaataacaaaagtaaagcacctagcacagtgccggat

SEQ ID NO: 627 - DNA, 785 bp, Homo sapiens
acccagtgcttggctgctccgaagccactccaaatgtgaaatatgtcgaagctaaagctgcactgccctcctttctcttctttctaatggggccaagtgaattaaatgtcactcatcccaaaaaagaaggcaaatcctctttaaaaccaaaaattcttttgggttaggctagcttctcctctattcatgtgaagagatttaattcctttttgttggttttgtttttttcaattctgggaagaggatgagccaccctggctctggccatcagagccactttctttttgcacatgtttgaaaggcatgacacaacttgaactggaaaaagggctggcatgaaccccggcatctcaagagagactagaggtgcttttcagagtgaggttcccattttgcaagaaattatttggaggatcaaagacaaaaactgaggcatcgaaagggaccaacttaggcttcagaggaaggggagagtgctactggggaccttgaaaataattatcaggaaacacagcttatggttcacatttcaaacccagcctacaatgtttctttacgtgtatttcttggcatcttcagtcgaaaatatcacccaaatgaggcagagtggtayagtggatttgagatctgtttctgccattaactgactaagagactactgtaagtaacatctccaagccttggtctcctccaatgtaaaatgggcataagaacatccattacatgaggctgttttgagaatttcatcaaataacaaaagtaaagcacctagcacagtgccggat

SEQ ID NO: 628 - DNA, 733 bp, Homo sapiens
ggttgtccttaccttttggaaggtaatgtaggttgtcttggactttgttgtatcaacaatagagagtcacttcaggtttttaaagaagttattatcttgagaaaacctccaaactgttctccatagtggctgtgctaatttacattcccaccaacagtgtgcaagtgttctcctttctctgcatcctcrccagcatttgttattgcccgtcttttggagataagccattttaactggagtgagatgatagctcattgtagttttgatttacagttctctgatcagtgatgttgagcactttttcatgtacccatttgccatttgtatgtcttattttgagaaatgcctattccaatgttttgcccatttttttaatcagatgattggatttttttcctatagaatagtgtgagctctttatctattctggttattaatcacttgtcagatgggtaatttgcaaatgttttctcccattctgtggcttgtctcttcactttgttgactatatcctttactgcacagaagcttttgaacttgatgtgatcccatttcttcatttttgctttggttgcttgtgcttgtggggtattgctcaagaaatgtttgcccagaccaatgtcctggagattctcctcagtgttctcttgtagtagtttcatagtttgaggtcttagagttaagtctttaatccattttgatttgatttctgtatatggtgagagatacaggt

SEQ ID NO: 629 - DNA, 903 bp, Homo sapiens
ttgtggctcttgttatatttatattgggcagtgctggtctaagtgttctccaaagaagttaacccaatttagtctcttaycagtgatgtataggaactcccccatattcttgttaacacgttgtattattacatttttatttttgctatagtatctgttaaccgtatctttctgtggtatgatttcgcatttagttcatttcttatgaggttgagaatcatacatgtttactgtctgttttggtttcttcctttgtggatgtctcttgacctttttttattgagttatttgttattttctcaaattttcttgatttgtaggagttctttgtattctttcagtctatgtcttaaaaactatttttccaaaggtaccttttgatatattaaacattttaatttaatatattcatttactgagtttcagaacgtgagcttttcagtaaatcgtattttgaaatatttaaaaaggaataggagttttttattcattttgacaactgctttatccgcagagcctagaacagggcctgttgcaaataggcactcaataaatattagttgagtaaagtacattacctttcaatagctctctggcgtccatattatgcctttgttatcaactttcttcctcaggatctagaatctctgtcctgtttagcttaatgtagcctgcttttattccctttgaagctcattggtttcatatatttcactctactgacaatctatacttttacaaggcttctcaaggtgtgttgcctgcaacagtgcttccagagagtgtaaaaattgttatgttaaaaataggttgtcatagacaaatagggtttgggaactaagctggacaatctttggtattacaaaccttctggagcctttgatatgctaacacgattgtgac

SEQ ID NO: 630 - DNA, 903 bp, Homo sapiens
ttgtggctcttgttatatttatattgggcagtgctggtctaagtgttctccaaagaagttaacccaatttagtctcttatcagtgatgtataggaactcccccatattcttgttaacacgttgtattattacatttttatttttgctatagtatctgttaaccgtatctttctgtggtatgatttcgcatttagttcatttcttatgaggttgagaatcatacatgtttactgtctgttttggtttcttcctttgtggatgtctcttgacctttttttattgagttatttgttattttctcaaattttcttgatttgtaggagttctttgtattctttcagtctatgtcttaaaaactatttttccaaaggtaccttttgatatattaaacattttaatttaatatattcatttactgagtttcagaacgtgagcttttcagtaaatcgtattttgaaatatttaaaaaggaataggagttttttattcattttgacaactgctttatccgcagagcctagaacagggcctgttgcaaataggcactcaataaatattagttgagtaaagtacattacctttcaatagctctctggcgtccatattatgcctttgttatcaactttcttcctcaggatctagaatctctgtcctgtttagcttaatgtagcctgcttttattccctttgaagctcattggtttcatatatttcactctactgacaatctatacttttacaaggcttctcaaggtstgttgcctgcaacagtgcttccagagagtgtaaaaattgttatgttaaaaataggttgtcatagacaaatagggtttgggaactaagctggacaatctttggtattacaaaccttctggagcctttgatatgctaacacgattgtgac

SEQ ID NO: 631 - DNA, 1210 bp, Homo sapiens
tacatgtctataaaccctttctcttagttttggggatttttagtcttatgctcattcattgttcaaccaatatccactacactgtgatgtgtggatcccaacccgaacacatcttgaaaggaataaagagtatgactcataaatggacatttatttagcagagaagatggaggtgatatagaacactttcagattttaatttatttctggctcaagtttgktttttttttttttttttttttgagacggagtctcgctctgtcgcccaggccggactgcggactgcagtggcgcaatctcggctcactgcaagctccgcttcccgggttcacgccattctcctgcctcagcctcccgagtagctgggactacaggcgccggccaccgcgcccggctaattttttgtatttttagtagagacggggtttcaccttgttagccaggatggtctcgatctcctgacctcatgatccacccgcctcggcctcccaaagtgctgggattacaggcgtgagccaccgcgcctggccctggctcaagttttaaacaaattcagaatgtaattgtaaacctcaatgtgataaatgctagagataatctgtagttaacctgggattcctagaattcaagaatcatttttgaattatttacatttgtgtctacttagatgagaggcaagaccccaacaagcagcacaaacagaaatccaggactaaacacaggaagttatggtataaaacttcacgagtcttagaaattaggatccttacccccacctccacgcccttgctgacagatatgaaaataaactttacactccctaattcatgctgaaatggtccattccttattagttaggttgtagtcataataacattaatattagccaacatttctgagcatttactgcgtaccaggcagctttctaaggataagatatatatttatttatgagataggtattatttttatcccacattcacagatgaggaagcttccagctatacagattttctggcaaagagcacgggacatttctaggccccattcaatgctttaacagtccctccaaatcccgtgtggtcctgaaaattcatactggtaaccaagtccccaattacttgacatgaccagaggacaacctattgatttgtaaacctcaaatgagttctataaccaagacaacagcatcaggaaagaactagaatgc

SEQ ID NO: 632 - DNA, 1210 bp, Homo sapiens
tacatgtctataaaccctttctcttagttttggggatttttagtcttatgctcattcattgttcaaccaatatccactacactgtgatgtgtggatcccaacccgaacacatcttgaaaggaataaagagtatgactcataaatggacatttatttagcagagaagatggaggtgatatagaacactttcagattttaatttatttctggctcaagtttggtttttttttttttttttttttgagacggagtctcgctctgtcgcccaggccggactgcggactgcagtggcgcaatctcggctcactgcaagctccgcttcccgggttcacgccattctcctgcctcagcctcccgagtagctgggactacaggcgccggccaccgcgcccggctaattttttgtatttttagtagagacggggtttcaccttgttagccaggatggtctcgatctcctgacctcatgatccacccgcctcggcctcccaaagtgctgggattacaggcgtgagccaccgcgcctggccctggctcaagttttaaacaaattcagaatgtaattgtaaacctcaatgtgataaatgctagagataatctgtagttaacctgggattcctagaattcaagaatcatttttgaattatttacatttgtgtctacttagatgagaggcaagaccccaacaagcagcacaaacagaaatccaggactaaacacaggaagttatggtataaaacttcacgagtcttagaaattaggatccttacccccacctccacgcccttgctgacagatatgaaaataaactttacactccctaattcatgctgaaatggtccattccttattagttrggttgtagtcataataacattaatattagccaacatttctgagcatttactgcgtaccaggcagctttctaaggataagatatatatttatttatgagataggtattatttttatcccacattcacagatgaggaagcttccagctatacagattttctggcaaagagcacgggacatttctaggccccattcaatgctttaacagtccctccaaatcccgtgtggtcctgaaaattcatactggtaaccaagtccccaattacttgacatgaccagaggacaacctattgatttgtaaacctcaaatgagttctataaccaagacaacagcatcaggaaagaactagaatgc

SEQ ID NO: 633 - DNA, 1210 bp, Homo sapiens
tacatgtctataaaccctttctcttagttttggggatttttagtcttatgctcattcattgttcaaccaatatccactacactgtgatgtgtggatcccaacccgaacacatcttgaaaggaataaagagtatgactcataaatggacatttatttagcagagaagatggaggtgatatagaacactttcagattttaatttatttctggctcaagtttggtttttttttttttttttttttgagacggagtctcgctctgtcgcccaggccggactgcggactgcagtggcgcaatctcggctcactgcaagctccgcttcccgggttcacgccattctcctgcctcagcctcccgagtagctgggactacaggcgccggccaccgcgcccggctaattttttgtatttttagtagagacggggtttcaccttgttagccaggatggtctcgatctcctgacctcatgatccacccgcctcggcctcccaaagtgctgggattacaggcgtgagccaccgcgcctggccctggctcaagttttaaacaaattcagaatgtaattgtaaacctcaatgtgataaatgctagagataatctgtagttaacctgggattcctagaattcaagaatcatttttgaattatttacatttgtgtctacttagatgagaggcaagaccccaacaagcagcacaaacagaaatccaggactaaacacaggaagttatggtataaaacttcacgagtcttagaaattaggatccttacccccacctccacgcccttgctgacagatatgaaaataaactttacactccctaattcatgctgaaatggtccattccttattagttaggttgtagtcataataacattaatattagccaacatttctgagcatttactgygtaccaggcagctttctaaggataagatatatatttatttatgagataggtattatttttatcccacattcacagatgaggaagcttccagctatacagattttctggcaaagagcacgggacatttctaggccccattcaatgctttaacagtccctccaaatcccgtgtggtcctgaaaattcatactggtaaccaagtccccaattacttgacatgaccagaggacaacctattgatttgtaaacctcaaatgagttctataaccaagacaacagcatcaggaaagaactagaatgc

SEQ ID NO: 634 - DNA, 1270 bp, Homo sapiens
ccctccgtgccaggggcccttgggcagcttcctcaggtgggggcctgtcagggggatcctggaagcttgagatggacctaaaggagggacacaggtctggggacacagaagttgggcagaggggacagctcgaacaaaggctgtgctatgagtatgccatgctggtagaggagggacactcaggggagcatgaggggaccacacccaggaggcctcagaagccacagtggccatggctacaccgaggctgtggctgggaacaggcagaactgcagcagcacccaggtaggcaaggagggagagacccccttctccactaagaaaggraggaggaggggccagagctggagacaggaaagggataagaatgagaggaggaggtgagaagtctttccaaggctgggtttggagtgcagtgagtttccagcgccagcgggtgtgggtgggacctgggaccagagccaaacacctgggcacagcatccaggggatggaggaagggcaggaggcagggaaggtgggacagggcgggcagagagggagagtgcgaggcaaaactctgggccaaggccttaggatttggagaccagatggggtgagtgagacaacctaagtatccctcagtcacagagggtgaccccgaggacctctggcttggaaacactagcacaggccacatggggaggagaggcactcaaccatccatcctattgtgtcctatttattaaaaataaatcagtaagggctgggcacagtggcccacacttgtaatcccagcactttgagaggccgaggtaggcggatcacccagagttcaagacaagcctgggcaacatagcgagactccagtctctacacaataaaaaaaaattggccaggcatggtaggaacacctgtagtcccagctactttggaggccaaggtgggaggatcacttgagcgtaggagatccaggctgcagggaggtgtgattgcaccactgcactctctctgggaaacacaacgagacgtcatctctaaaacaacaacaaaaaagacgataaaataaagtgatacccaggtgggcctagatgctccccctgcagtggtcgcagagcctacctggccttaccttgggagggctgaggctgcgtgaacgaggactttcatgtttctcctctacaaacttgtgtggcttcaatattttaaaacaagagaatatttacatgtttcttgtacaaaaacaacattgctccagaggttgggaggtgaccccaagaggagtctatgca

SEQ ID NO: 635 - DNA, 1270 bp, Homo sapiens
ccctccgtgccaggggcccttgggcagcttcctcaggtgggggcctgtcagggggatcctggaagcttgagatggacctaaaggagggacacaggtctggggacacagaagttgggcagaggggacagctcgaacaaaggctgtgctatgagtatgccatgctggtagaggagggacactcaggggagcatgaggggaccacacccaggaggcctcagaagccacagtggccatggctacaccgaggctgtggctgggaacaggcagaactgcagcagcacccaggtaggcaaggagggagagacccccttctccactaagaaagggaggaggaggggccagagctggagacaggaaagggataagaatgagaggaggaggtgagaagtctttccaaggctgggtttggagtgcagtgagtttccagcgccagcrggtgtgggtgggacctgggaccagagccaaacacctgggcacagcatccaggggatggaggaagggcaggaggcagggaaggtgggacagggcgggcagagagggagagtgcgaggcaaaactctgggccaaggccttaggatttggagaccagatggggtgagtgagacaacctaagtatccctcagtcacagagggtgaccccgaggacctctggcttggaaacactagcacaggccacatggggaggagaggcactcaaccatccatcctattgtgtcctatttattaaaaataaatcagtaagggctgggcacagtggcccacacttgtaatcccagcactttgagaggccgaggtaggcggatcacccagagttcaagacaagcctgggcaacatagcgagactccagtctctacacaataaaaaaaaattggccaggcatggtaggaacacctgtagtcccagctactttggaggccaaggtgggaggatcacttgagcgtaggagatccaggctgcagggaggtgtgattgcaccactgcactctctctgggaaacacaacgagacgtcatctctaaaacaacaacaaaaaagacgataaaataaagtgatacccaggtgggcctagatgctccccctgcagtggtcgcagagcctacctggccttaccttgggagggctgaggctgcgtgaacgaggactttcatgtttctcctctacaaacttgtgtggcttcaatattttaaaacaagagaatatttacatgtttcttgtacaaaaacaacattgctccagaggttgggaggtgaccccaagaggagtctatgca

SEQ ID NO: 636 - DNA, 1270 bp, Homo sapiens
ccctccgtgccaggggcccttgggcagcttcctcaggtgggggcctgtcagggggatcctggaagcttgagatggacctaaaggagggacacaggtctggggacacagaagttgggcagaggggacagctcgaacaaaggctgtgctatgagtatgccatgctggtagaggagggacactcaggggagcatgaggggaccacacccaggaggcctcagaagccacagtggccatggctacaccgaggctgtggctgggaacaggcagaactgcagcagcacccaggtaggcaaggagggagagacccccttctccactaagaaagggaggaggaggggccagagctggagacaggaaagggataagaatgagaggaggaggtgagaagtctttccaaggctgggtttggagtgcagtgagtttccagcgccagcgggtgtgggtgggacctgggaccagagccaaacacctgggcacagcatccaggggatggaggaagggcaggaggcagggaaggtgggacagggcgggcagagagggagagtgcgaggcaaaactctgggccaaggccttaggatttggagaccagatggggtgagtgagacaacctaagtatccctcagtcacagagggtgaccccgaggacctctggcttggaaacactagcacaggccacatggggaggagaggcactcaaccatccatcctattgtgtcctatttattaaaaataaatcagtaagggctgggcacagtggcccacacttgtaatcccagcactttgagaggccgaggtaggcggatcacccagagttcaagacaagcctgggcaacatagcgagactccagtctctacacaataaaaaaaaattggccaggcatggtaggaacacctgtagtcccagctactttggaggccaaggtgggaggatcacttgagcgtaggagatccaggctgcagggaggtrtgattgcaccactgcactctctctgggaaacacaacgagacgtcatctctaaaacaacaacaaaaaagacgataaaataaagtgatacccaggtgggcctagatgctccccctgcagtggtcgcagagcctacctggccttaccttgggagggctgaggctgcgtgaacgaggactttcatgtttctcctctacaaacttgtgtggcttcaatattttaaaacaagagaatatttacatgtttcttgtacaaaaacaacattgctccagaggttgggaggtgaccccaagaggagtctatgca

SEQ ID NO: 637 - DNA, 1294 bp, Homo sapiens
ttcttgtgctacttttttttgtccagacttagctaataaggtctggaccagcaaggagtgaggatattccgggtgtgktggttcatgtccacaatcccagcattttgggaggctaagcaggtgaatcacttgaggtcaggagttcgagaccagcctggccaacatggtgatacaccatctctacgaaaactacaaaaattagctgggcatggtggtgagtggtgagtaatcccagttacttgggaagctgaggcaggagaattgctggaacccaggaggcagagattgcagtgagccgagatcacaccactgcactccagactgggcaacagagcaagactctgtctcaaaaaaaaaaaaaaaagaaagaaaaagaaagaacacaggacccagcattagtctctctgcctcagcaaagatcacgttgacacaaaccgtagaaccatctgaccatgagggcatgtaggttggataatagaaaagtatagggtgaacatagtggagttaaaacccaggcccttaccctggttgccattttttgagcatcacataagtttcccagatttgagatctcccaacattaaatttaccatcagctcagtaggatggaaatttggagtaatttgcttaaaaatttgatttaaaatgatgatgagtaaaacgtgtattttacacctgaattttctaagaaagtatatacctaataccctcattctagaaatacattaattcaatctcttaacaagtatgtttaaaactcctattatgtgccagaaattatataaagtgctgggattacaaatatgtgtaaaatactcgctttgccatttgaaggcttcacagtttggtaattatgattgcaattagatgcaataagcaatagaggctaatgtgtgaagcattaagacagaaaaggagatagaacaaatttcatagaagaaattgtatcaaatttgggcaacaaaaaccaagcagaaaaaattaccaggtggaatagattagaggagacaagagtgtttcagaaagaaaaaaactccccttgaaagagcacatagtgtgaataaacagcacttttgagaaacaccataagatctttgaagcagatagatctcagtttgaatgcctattctaccattaggcatggaacacctttggaccaagctttactgtttttgttattctctttttgaaacaggggtacttacaacctcctcatggagttcttgtgagggtgaaaggagatgacatacataaaatcccagcctaaccattggccttttacaggtatttttcc

SEQ ID NO: 638 - DNA, 1294 bp, Homo sapiens
ttcttgtgctacttttttttgtccagacttagctaataaggtctggaccagcaaggagtgaggatattccgggtgtgttggttcatgyccacaatcccagcattttgggaggctaagcaggtgaatcacttgaggtcaggagttcgagaccagcctggccaacatggtgatacaccatctctacgaaaactacaaaaattagctgggcatggtggtgagtggtgagtaatcccagttacttgggaagctgaggcaggagaattgctggaacccaggaggcagagattgcagtgagccgagatcacaccactgcactccagactgggcaacagagcaagactctgtctcaaaaaaaaaaaaaaaagaaagaaaaagaaagaacacaggacccagcattagtctctctgcctcagcaaagatcacgttgacacaaaccgtagaaccatctgaccatgagggcatgtaggttggataatagaaaagtatagggtgaacatagtggagttaaaacccaggcccttaccctggttgccattttttgagcatcacataagtttcccagatttgagatctcccaacattaaatttaccatcagctcagtaggatggaaatttggagtaatttgcttaaaaatttgatttaaaatgatgatgagtaaaacgtgtattttacacctgaattttctaagaaagtatatacctaataccctcattctagaaatacattaattcaatctcttaacaagtatgtttaaaactcctattatgtgccagaaattatataaagtgctgggattacaaatatgtgtaaaatactcgctttgccatttgaaggcttcacagtttggtaattatgattgcaattagatgcaataagcaatagaggctaatgtgtgaagcattaagacagaaaaggagatagaacaaatttcatagaagaaattgtatcaaatttgggcaacaaaaaccaagcagaaaaaattaccaggtggaatagattagaggagacaagagtgtttcagaaagaaaaaaactccccttgaaagagcacatagtgtgaataaacagcacttttgagaaacaccataagatctttgaagcagatagatctcagtttgaatgcctattctaccattaggcatggaacacctttggaccaagctttactgtttttgttattctctttttgaaacaggggtacttacaacctcctcatggagttcttgtgagggtgaaaggagatgacatacataaaatcccagcctaaccattggccttttacaggtatttttcc

SEQ ID NO: 639 - DNA, 1294 bp, Homo sapiens
ttcttgtgctacttttttttgtccagacttagctaataaggtctggaccagcaaggagtgaggatattccgggtgtgttggttcatgtccacaatcccagcattttgggaggctaagcaggtgaatcacttgaggtcaggagttcgagaccagcctggccaacatggtgawacaccatctctacgaaaactacaaaaattagctgggcatggtggtgagtggtgagtaatcccagttacttgggaagctgaggcaggagaattgctggaacccaggaggcagagattgcagtgagccgagatcacaccactgcactccagactgggcaacagagcaagactctgtctcaaaaaaaaaaaaaaaagaaagaaaaagaaagaacacaggacccagcattagtctctctgcctcagcaaagatcacgttgacacaaaccgtagaaccatctgaccatgagggcatgtaggttggataatagaaaagtatagggtgaacatagtggagttaaaacccaggcccttaccctggttgccattttttgagcatcacataagtttcccagatttgagatctcccaacattaaatttaccatcagctcagtaggatggaaatttggagtaatttgcttaaaaatttgatttaaaatgatgatgagtaaaacgtgtattttacacctgaattttctaagaaagtatatacctaataccctcattctagaaatacattaattcaatctcttaacaagtatgtttaaaactcctattatgtgccagaaattatataaagtgctgggattacaaatatgtgtaaaatactcgctttgccatttgaaggcttcacagtttggtaattatgattgcaattagatgcaataagcaatagaggctaatgtgtgaagcattaagacagaaaaggagatagaacaaatttcatagaagaaattgtatcaaatttgggcaacaaaaaccaagcagaaaaaattaccaggtggaatagattagaggagacaagagtgtttcagaaagaaaaaaactccccttgaaagagcacatagtgtgaataaacagcacttttgagaaacaccataagatctttgaagcagatagatctcagtttgaatgcctattctaccattaggcatggaacacctttggaccaagctttactgtttttgttattctctttttgaaacaggggtacttacaacctcctcatggagttcttgtgagggtgaaaggagatgacatacataaaatcccagcctaaccattggccttttacaggtatttttcc

SEQ ID NO: 640 - DNA, 1294 bp, Homo sapiens
ttcttgtgctacttttttttgtccagacttagctaataaggtctggaccagcaaggagtgaggatattccgggtgtgttggttcatgtccacaatcccagcattttgggaggctaagcaggtgaatcacttgaggtcaggagttcgagaccagcctggccaacatggtgatmcaccatctctacgaaaactacaaaaattagctgggcatggtggtgagtggtgagtaatcccagttacttgggaagctgaggcaggagaattgctggaacccaggaggcagagattgcagtgagccgagatcacaccactgcactccagactgggcaacagagcaagactctgtctcaaaaaaaaaaaaaaaagaaagaaaaagaaagaacacaggacccagcattagtctctctgcctcagcaaagatcacgttgacacaaaccgtagaaccatctgaccatgagggcatgtaggttggataatagaaaagtatagggtgaacatagtggagttaaaacccaggcccttaccctggttgccattttttgagcatcacataagtttcccagatttgagatctcccaacattaaatttaccatcagctcagtaggatggaaatttggagtaatttgcttaaaaatttgatttaaaatgatgatgagtaaaacgtgtattttacacctgaattttctaagaaagtatatacctaataccctcattctagaaatacattaattcaatctcttaacaagtatgtttaaaactcctattatgtgccagaaattatataaagtgctgggattacaaatatgtgtaaaatactcgctttgccatttgaaggcttcacagtttggtaattatgattgcaattagatgcaataagcaatagaggctaatgtgtgaagcattaagacagaaaaggagatagaacaaatttcatagaagaaattgtatcaaatttgggcaacaaaaaccaagcagaaaaaattaccaggtggaatagattagaggagacaagagtgtttcagaaagaaaaaaactccccttgaaagagcacatagtgtgaataaacagcacttttgagaaacaccataagatctttgaagcagatagatctcagtttgaatgcctattctaccattaggcatggaacacctttggaccaagctttactgtttttgttattctctttttgaaacaggggtacttacaacctcctcatggagttcttgtgagggtgaaaggagatgacatacataaaatcccagcctaaccattggccttttacaggtatttttcc

SEQ ID NO: 641 - DNA, 1294 bp, Homo sapiens
ttcttgtgctacttttttttgtccagacttagctaataaggtctggaccagcaaggagtgaggatattccgggtgtgttggttcatgtccacaatcccagcattttgggaggctaagcaggtgaatcacttgaggtcaggagttcgagaccagcctggccaacatggtgatacacmatctctacgaaaactacaaaaattagctgggcatggtggtgagtggtgagtaatcccagttacttgggaagctgaggcaggagaattgctggaacccaggaggcagagattgcagtgagccgagatcacaccactgcactccagactgggcaacagagcaagactctgtctcaaaaaaaaaaaaaaaagaaagaaaaagaaagaacacaggacccagcattagtctctctgcctcagcaaagatcacgttgacacaaaccgtagaaccatctgaccatgagggcatgtaggttggataatagaaaagtatagggtgaacatagtggagttaaaacccaggcccttaccctggttgccattttttgagcatcacataagtttcccagatttgagatctcccaacattaaatttaccatcagctcagtaggatggaaatttggagtaatttgcttaaaaatttgatttaaaatgatgatgagtaaaacgtgtattttacacctgaattttctaagaaagtatatacctaataccctcattctagaaatacattaattcaatctcttaacaagtatgtttaaaactcctattatgtgccagaaattatataaagtgctgggattacaaatatgtgtaaaatactcgctttgccatttgaaggcttcacagtttggtaattatgattgcaattagatgcaataagcaatagaggctaatgtgtgaagcattaagacagaaaaggagatagaacaaatttcatagaagaaattgtatcaaatttgggcaacaaaaaccaagcagaaaaaattaccaggtggaatagattagaggagacaagagtgtttcagaaagaaaaaaactccccttgaaagagcacatagtgtgaataaacagcacttttgagaaacaccataagatctttgaagcagatagatctcagtttgaatgcctattctaccattaggcatggaacacctttggaccaagctttactgtttttgttattctctttttgaaacaggggtacttacaacctcctcatggagttcttgtgagggtgaaaggagatgacatacataaaatcccagcctaaccattggccttttacaggtatttttcc

SEQ ID NO: 642 - DNA, 740 bp, Homo sapiens
tctaaaattgtagaaaattgattgcataaatcagtttcctaaaattgggggtcaaaaaagtggaataataaaaaaaagaatccaaaagaaaagtggaatagtaaaaaatcatcaatccaaaagaagacacgaagaaaaaaaagaaaaaaagagaaatgcaatagaaaacccaaatgaatgaaaactattataattactataaaatgtgataacatttaatttatttaaattcattgattttcaaactggactaaaataataaaaagctatatattatttaccaaaagtaaatctaaaatataaggatataaatgtttaatatgaaagcatsaaaaaatacggaaggcatgtaataatccagagaaagcttttgtaactatgctagtcagacaaaacacagcttttaaggcaaaagcagtataaatgataaaagttgaatttagcagaaatatataacaatttaaactttatgaatggggtaacaaaaagaaaaatatgtaatgcaaaatttgtcagaactatagagagaatctgataaatctaccatcagagtaacatattttttaacacacatttctcagtaattagtagataaagtagatcacaaaaaaatcagatataaatatagaagatttgaacaaaccaaaccaatttgatttaatacatatataaagaatttttcgtcactccagtagtgagtaaatattccttccaagcatatgtaaaacatttacaaactg

SEQ ID NO: 643 - DNA, 633 bp, Homo sapiens
tgacctaaagttctaaaaacattcacacaaagtctgaactgaagattcatagaagctgaatttggagattccaaatggggcaaagccaggaagttaaatggagctgattttagtcccaaggacctcactaactagaagtgggaattaggcattttatttctttgagcttaattttctgtatctgctaaatgagaacaagaatattcgttattcatcttccacttaaaggctataatgagatttggaggaatatgtgtagctccctgcccctccaatgaagtacacatactcctggttgcaaggtccttgaaaccatgggataccaacattgcatcttcctagagcatcarttttactataagattttgtaagatagtcgaaacagttttgaattaggcttttttattaaaataaagatagttatatcatggattttgtgtgaatcattaagataaaatgtaaaatttcaaaaaaaaatcttactttgggggaacttctttggcccatactccaggaactccagcattaatcattcattcttgtctgctgtttgtgattcttaactggaaaaatttggtaatccccataaatgaaagcattttaaaacttaaaagctgtctacgaacgcatgct

SEQ ID NO: 644 - DNA, 633 bp, Homo sapiens
tgacctaaagttctaaaaacattcacacaaagtctgaactgaagattcatagaagctgaatttggagattccaaatggggcaaagccaggaagttaaatggagctgattttagtcccaaggacctcactaactagaagtgggaattaggcattttatttctttgagcttaattttctgtatctgctaaatgagaacaagaatattcgttattcatcttccacttaaaggctataatgagatttggaggaatatgtgtagctccctgcccctccaatgaagtacacatactcctggttgcaaggtccttgaaaccatgggataccaacattgcatcttcctagagcatcaattttactataagattttgtaagatagtcgaaacagttttgaattaggcttttttattaaamtaaagatagttatatcatggattttgtgtgaatcattaagataaaatgtaaaatttcaaaaaaaaatcttactttgggggaacttctttggcccatactccaggaactccagcattaatcattcattcttgtctgctgtttgtgattcttaactggaaaaatttggtaatccccataaatgaaagcattttaaaacttaaaagctgtctacgaacgcatgct

SEQ ID NO: 645 - DNA, 657 bp, Homo sapiens
ccatctgtgtatcttctttggtgaggtgtctgttcagatcttttgcccattccattttttaattgggttgttcattttattgttgtgtttttaaagttctttgtatattttggataagagtcctttaccatatatgtcttttgcaaatattttctcctggtctgtggcttgtcttctcattctcttgaaagggtattttgcagagcagaagttcttaattttaataacgcctaactgatcaattatttttttcatagatcatgtctttgatattgtatctaaaaagctattgccaaacccaaggtcatctagattttctcttgttatcttytaggagttttatagttttgtatttaacatttaaatatatgatctattttgagtaaatatttgtgaagaatataaggtctgtgtctagattcatttcttttttgtatctggatgccaagttgttacagcactatttgttgaaaagattatttatgctccattgtattgcctttgatcctttgttaaagaccagttgactatatttgtgtgggccaatctctgggctctctatcctgtgtctttaatttatatacctatgtattgtcttttcaaaagtaaaaacaagtgctgtgagttattcaaggatggattggcaattttatcttt

SEQ ID NO: 646 - DNA, 708 bp, Homo sapiens
tggcacttactaaagctcatttctaaaaagacttattttagagacaggttctcactctgtcatccaggctggagtgcagtgagggacatcatagctcactgtagtcttgaactcctgggatcaagtgatcctccaacctcagcctccagagtagctgagaccacaggaaggcgccaccacgtccagctaaattttttgattgtttataatagagacgaggatttaaaccccaatctgtctgatctcacggctcacaatctcactcgatagagtctctttctaccaagatcctatctttcctattcaactagtgtagcctatctcgggcttatcccgttagagagctctgggagagcaaaagccctgtcctattatccaccagcatatcctccctggcctaygggaaggaaactggtatgctccttcattatctgctgattgagtaaacaattatccaaaactgactattaattatctctcaatttggatactttattcccactccattactacttagcattaaaatgataaagtgtaggccctcttactcatttagctaatcaaatattatatatagttattatatgcagtttaaaattactaagctcaaaaattcaaaggacacaaatacatacttattcctcaaaataacactaaggggccaggcatggtggctcacgcctgtaatcccagcactttgggaggctg

SEQ ID NO: 647 - DNA, 673 bp, Homo sapiens
tgcatgacaataaactacgcagtaagaaagcactcagtgggcctgtcatacttgtgattgactgcatagtggtaggaggtactcctgacaatttttgctttgcaattattccttaatataattcaccaccatgactgccatcactcactgattcaccaaatattgggtaaataattttgtttatattagtctttaatcttaaaagtatgtatagctcacatttatttcaatatttaatattagaggtgttctgtatctttatttagaaatttgattttttattttttgaccagaaatatgccataggaacttaactcttgattagcctagggtaaaactggttttgttrtatgtggtttcacctaaagctggtttccaagaacccactgataacgttaaatgaggacttgttttacaagcattttaatcccaatacttctgtaactctgatagcccattcaaaaatataataataaaatatttgtcaaatctatcttctttcattttcagttaatattaaccattatttgctgggtggggaggggggtaggtaactagttacattgttgcatttcagttaatggttgatctaaaaatctgaaaaatctgctcaccatttttatcggtttaaactggcatatgtatacttagtttttgtttaaaaaaatcctct

SEQ ID NO: 648 - DNA, 597 bp, Homo sapiens
tgtagcactttgcctcccaagagcaatgtatgtttgaaatctgccataaataatgtgaaaatgcttgaccaactgatttggttagcaaacgctctctggctaacatccagaagtgctacagttttctgtattttttattttgataaattttgttgtagaacaagaaaaagatatagacactttaaaaaaaaaaaaaaaaaagcagataccactttcatggcctgcaaattataaaaattttgtgtcagaattcttttctgccaggtaggaatttgagaggggcaaagaagagctcratttaatttccctcagggtctttgctgaagggagaagaacagaaatctggattcagttttgttagtaaaaataatctttccaccagaaaatgtaaaaagctacattgttcaggatatttggacctattcatttcaatacagtctgataggtgggggtggggaggggagattttgagctgtgcagttttaatgaaatgtttaaggctgaaataatggttctatacagctcttgacatgatttattttattttgtgtcaatttgcctaaaatgtgtaatgttgtggcattccactgagggagg

SEQ ID NO: 649 - DNA, 1234 bp, Homo sapiens
tgcatagggcatagtacaggggaaagggtacacaaagctccatgccttacccagacatgccaccctcttggcacctcaaatgtattcaccaacctaggagttctgtgaactccattgttcaggagtttttacagagctttatcacatagccataattgatttttaactcagtcaccagccccctctcctctccccagaggttggggaaggtggggctaaaagttacagaaaaaggaatttgttattctaaatttcataaaatataaatatgttcaactacaaacactagtcatataaatttatttctcaataattgtttaaataaattttaatacagcaatttcatagaaaataggtttttgttttcataagtcaattcttatttaacaaaaacagatttgggttttttgggggttgtggatattgttatttgttttgtagtttttattgaagtactgttctaccactgacttggaaacaaataatttgcttacttacttttgtagttgcaatactatttacaaagctgatttgctggaatcctttttcactcaatgtgagacaaacatcccatctttcatttgcaagctcatgaataactttcagggccaccccagtttcatccaatttgtctttcacataaagatctacataactgcgaaatccatttacctattaatttaaaaaacaaaaacaattaaaaatcttacactggcagctcaaataggtgaatcaccttcagtacgtatactttcatttcctctcacttacaacagttctaagtgcaccgatccaaaccttagyggcatttcccagatctattccttaacccttgacctttaaaaaagaaattcatttctatgtgtacttgacaaaaagaggatgtgaagggacaggtaaattgttataaaatatttcagaaatttctatttttaaaatgataaggtagacttccagtttcagttcagacagataatgaactagcaggaaaaaaagcttccatccttgtaagaaaacgggtgatcagacaacaaattaatgggtttttcatgaacccactgaagaactgagatcacaggagagctggccatcctgaagtctggagagacataagtgtctgtaggagaccacaaaacctaagcttttgcttacctggggcagatatttaataagctagtaggaactttaaactagaaattttgactaattgctactggaagagtgtatactagtt

SEQ ID NO: 650 - DNA, 1234 bp, Homo sapiens
tgcatagggcatagtacaggggaaagggtacacaaagctccatgccttacccagacatgccaccctcttggcacctcaaatgtattcaccaacctaggagttctgtgaactccattgttcaggagtttttacagagctttatcacatagccataattgatttttaactcagtcaccagccccctctcctctccccagaggttggggaaggtggggctaaaagttacagaaaaaggaatttgttattctaaatttcataaaatataaatatgttcaactacaaacactagtcatataaatttatttctcaataattgtttaaataaattttaatacagcaatttcatagaaaataggtttttgttttcataagtcaattcttatttaacaaaaacagatttgggttttttgggggttgtggatattgttatttgttttgtagtttttattgaagtactgttctaccactgacttggaaacaaataatttgcttacttacttttgtagttgcaatactatttacaaagctgatttgctggaatcctttttcactcaatgtgagacaaacatcccatctttcatttgcaagctcatgaataactttcagggccaccccagtttcatccaatttgtctttcacataaagatctacataactgcgaaatccatttacctattaatttaaaaaacaaaaacaattaaaaatcttacactggcagctcaaataggtgaatcaccttcagtacgtatactttcatttcctctcacttacaacagttctaagtgcaccgatccaaaccttagtggcatttcccagatctattccttaacccttgacctttaaaaaagaaattcatttctatgtgtacttgacaaaaagaggatgtgaagggacaggtaaattgttataaaatatttcagaaatttctatttttaaaatgataaggtagacttccagtttcagttcagacagataatgaactagcaggaaaaaaagcttccatccttgtaagaaaacgggtgatcagacaacaaattaatgggtttttcatgaacccactgaagaactgagatcacaggagagctggccatcctgaagtctggagagacayaagtgtctgtaggagaccacaaaacctaagcttttgcttacctggggcagatatttaataagctagtaggaactttaaactagaaattttgactaattgctactggaagagtgtatactagtt

SEQ ID NO: 651 - DNA, 641 bp, Homo sapiens
aaaaataggatggttggtcttactgggatagaacaaagtaaagattcaattaaaacggcaagagtttctgatcagccagtactgagtctwgagaaaggtagtatgggaagatgagaagtactcactcttttccttgtcccagtgttcctaagctgaccaacacaactgtggtctctggggaaggggcaagagctaaactatttggaaaaacagtgtttgtattccctggatcatcagcatttatttttcttttggaccagaatttgtaaactttgtagaactattggctgggaggaaatttgttctacttactgtcctctcactctggaccaggggtgtcaaaaaggtggtgcctgctccacagtaactcaccaaatcagccaggagagtgtaaaaggaaacaactaatattgtcatttattttaatttttctctaaaagttagaaaatgaattgagctttactcagtttttttggggtatattttcaagtataacatacatacagaaaagtatacaaatgaaaggtatacagttagattaattttctcaacgtgaacacacatacattgctaacatagatcaagagacaggtattatcaacaccacagaagacgctcctccctcatatcttcttcccatg

SEQ ID NO: 652 - DNA, 641 bp, Homo sapiens
aaaaataggatggttggtcttactgggatagaacaaagtaaagattcaattaaaacggcaagagtttctgatcagccagtactgagtcttgagaaaggtagtatgggaagatgagaagtactcactcttttccttgtcccagtgttcctaagctgaccaacacaactgtggtctctggggaaggggcaagagctaaactatttggaaaaacagtgtttgtattccctggatcatcagcatttatttttcttttggaccagaatttgtaaactttgtagaactattggctgggaggaaatttgttctacttactgtcctctcactstggaccaggggtgtcaaaaaggtggtgcctgctccacagtaactcaccaaatcagccaggagagtgtaaaaggaaacaactaatattgtcatttattttaatttttctctaaaagttagaaaatgaattgagctttactcagtttttttggggtatattttcaagtataacatacatacagaaaagtatacaaatgaaaggtatacagttagattaattttctcaacgtgaacacacatacattgctaacatagatcaagagacaggtattatcaacaccacagaagacgctcctccctcatatcttcttcccatg

SEQ ID NO: 653 - DNA, 647 bp, Homo sapiens
tattaaagagacatgctattacttataatggttaccaattactaaattgggatgtgtgtttacaggtatcatcttatttaacaaggctttaaaagtgacttctccattgcagtatgtccatgtgaacctagaaactaactactttcttatagcacattcttagatggccccacccaccaacatccactttgtattacacttattcacagtaatgtttttcttcctaatttaagttacaatttttagaagcagagattatgttctatatattttatatcctacatttcctagtactgaataatttttactgaaagaaatattcccaatcagtgccatcttatctaatagaccagaatactcctatttaatgactatatctgcctgataggcctgaagccttcttgggcagtggatctaaaaccaacccatcttctcttctgttgattcattcattcaacaaatactcagtgagtgcctaccatgtgccagacgcaattctaggcactacgagtaaggctataaacaaaacaaacaaaatctctccytcaaggagctcacaccctaatgagaaaaaaacaaatatacacaatagatgaaaggtatagtatggtagacagtaataagtacaaggaaaaaaacctaaagca

SEQ ID NO: 654 - DNA, 622 bp, Homo sapiens
tttttctacttttccttgtaataatatatcagattgtcagtgaccagattatttatgacaatcaattgtaagagaagaataccatgttagtttggcttgaaagatatatgtcaaaaaatcttacagagtcatttgtgcaaataactatgtaattaagatatccaagaaaatttgccttaatttttagaggttacttagtaaaaatcaagaggggmaaaaaaggatgcaaagtctagctgctgttcttaatttcactggtgcaccatttgcataagttttattaatttcacaatggcaattaccatgggaagagtacttaagagctgcacataaatgaagcattagatgttatttccttttagctattgttcaaaatgagggtggtgcctttgtcagtttaaattcctgtaagtatgtaactcctagactatgagtatacattttgtaaatccttgaaaagtatagtaattatattcattgttatgttactaccagtcattgcaatttataaaaatgccctgaaataatacataaagtaaaatttttacattatcaattttagtgcagtagtgaataacatatgtctgatgcctagaaagagaaaaaaatcataaatacatat

SEQ ID NO: 655 - DNA, 593 bp, Homo sapiens
ctcgaaaagacatttcaatctcttagctggaaaagcatattttaacaaattaatatttaattaagatgaaaggacaacaaaagacattttaaaatataggcaaaatgtacacattctaatggattttatttcttttaaaacctttcatgtaaatctttaaaatagcaaattaaaaacttcaagtgttgaaagaaaaagggaatacggataagtttgatttactagaaagaaatcaaattccatgatattcacttggggaaaagagactttctttataaaagcaaaatataattttgtttattacagttgacaactattcatctaggaagagatcattagtatcatgtctaacttcagtataaatckaaaacacagactgtcaatggtctctgtgacaactaaaacgttcattttcctgtagaggcatcttattaaagacaaagataattccattacaatttgataaatagaaatcaatatgacattctttatacaaccaagtttccctagctttggattatgttatatgatacatttgtacatatacacaaatatattatatctttataaggtcctttatgaagtattattat

SEQ ID NO: 656 - DNA, 584 bp, Homo sapiens
agtatatatatagaaaatgtataaattttaagtgtacaaccaactcaatgaatttttacaaatatacgcactcatgtaaatagcacccaaggcaagatagagcttattatcaggaccctgaaggtctcattcttgttcctcccaagcagtaattatcagcttttaaaaatgtttccttgaaaatctttacctgttttcttacatgtttagtgtaactaataaaatgtacaaagaaaaataatatgccagttgtttttttgtttgtttgtttttttgtttttgtgggttttttttgagacggggtctcgctctgtcaccccaggctggagtgcagtggaacggtcttggctcactgcaacctccggctcccgggttcaagcaattctcctgcctcagcctcctgagtagctgggattacaggcgtgggccaccacacctgctaatttttgtatttttagtagagacraggtttcaccatgttggtcaggctggtctcgaactcctgacctcatgatccgccagcctcagcctcccaaagtgctgggattacaggcatgagccactgtgtccagcctaatgcatta

SEQ ID NO: 657 - DNA, 1112 bp, Homo sapiens
gcatggcaagttggcttaaataataaccccaaaagttgttttcagatccttggattctatgactgaatcagggacttggtgttcagagaaaacaaacagcttctgcaaggggtggaagagcagcaaagtgctctgcaaggaagggtctggggcgggaatgtgggaactgcccctcttcatcccagttgtcaaacatcgccccaagcaggctgctttcccctyctccctccgttggaggcaatctcaccttctctctctgaggaggactcagctggagtctggaggtctggggtttgggggtgatcagatggatgaagaactaaagttagggctttcaggccccagttttctcccaaccttctctgatctctgctcctgacatctgcctctgggcctcatctgctccccagtgatggctggggcaacacagaggaaggttttcattctcaaggctcttagtgcagttagcatgtggtgcacagcttcaagggctccgggctgtgcaaactagctctctcctgcccagccaatcgacctaaggatccccacatcacctaagaggaagtcccaactgggcagggcacctggagacctgggtcatgggcaggtcctgctgctggtatgacaggctattttccatggcaagtgttttccgcttccagttgcgagcagtggcaggcaagagtcccctgggtaacactttcatagtcttcacctggactagagaggtcctttctttgccaagaattttctagaaagccagagaggaaaggcaggcatactctgcctctccactggggtctggggagcagggcggcagaacaaagcccctcacattcccatcccccagccccaagccaagggttgagcaaggatagttgatgactccatgctctgccactctccaggtgactctgcgcaaggtgttgaattctttagctcaactttccttttctatagaatgggaagaatacccatctcacaggatagagtagttgtgagaatgaaatggcatgaggtgtgtggagcagcaggcaaggtgcctgacattcaagggacaacgaatgggcactatcattatttacagggagcgagggagacaggcatgaccc

SEQ ID NO: 658 - DNA, 1112 bp, Homo sapiens
gcatggcaagttggcttaaataataaccccaaaagttgttttcagatccttggattctatgactgaatcagggacttggtgttcagagaaaacaaacagcttctgcaaggggtggaagagcagcaaagtgctctgcaaggaagggtctggggcgggaatgtgggaactgcccctcttcatcccagttgtcaaacatcgccccaagcaggctgctttcccctcctccctccgttggaggcaatctcaccttctctctctgaggaggactcagctggagtctggaggtctggggtttgggggtgatcagatggatgaagaactaaagttagggctttcaggccccagttttctcccaaccttctctgatctctgctcctgacatctgcctctgggcctcatctgctccccagygatggctggggcaacacagaggaaggttttcattctcaaggctcttagtgcagttagcatgtggtgcacagcttcaagggctccgggctgtgcaaactagctctctcctgcccagccaatcgacctaaggatccccacatcacctaagaggaagtcccaactgggcagggcacctggagacctgggtcatgggcaggtcctgctgctggtatgacaggctattttccatggcaagtgttttccgcttccagttgcgagcagtggcaggcaagagtcccctgggtaacactttcatagtcttcacctggactagagaggtcctttctttgccaagaattttctagaaagccagagaggaaaggcaggcatactctgcctctccactggggtctggggagcagggcggcagaacaaagcccctcacattcccatcccccagccccaagccaagggttgagcaaggatagttgatgactccatgctctgccactctccaggtgactctgcgcaaggtgttgaattctttagctcaactttccttttctatagaatgggaagaatacccatctcacaggatagagtagttgtgagaatgaaatggcatgaggtgtgtggagcagcaggcaaggtgcctgacattcaagggacaacgaatgggcactatcattatttacagggagcgagggagacaggcatgaccc

SEQ ID NO: 659 - DNA, 1112 bp, Homo sapiens
gcatggcaagttggcttaaataataaccccaaaagttgttttcagatccttggattctatgactgaatcagggacttggtgttcagagaaaacaaacagcttctgcaaggggtggaagagcagcaaagtgctctgcaaggaagggtctggggcgggaatgtgggaactgcccctcttcatcccagttgtcaaacatcgccccaagcaggctgctttcccctcctccctccgttggaggcaatctcaccttctctctctgaggaggactcagctggagtctggaggtctggggtttgggggtgatcagatggatgaagaactaaagttagggctttcaggccccagttttctcccaaccttctctgatctctgctcctgacatctgcctctgggcctcatctgctccccagtgatggctggggcaacacagaggaaggttttcattctcaaggctcttagtgcagttagcatgtggtgcacagcttcaagggctccgggctgtgcaaactagctctctcctgcccagccaatcgacctaaggatccccacatcacctaagaggaagtcccaactgggcagggcacctggagacctgggtcatgggcaggtcctgctgctggtatgacaggctattttccatggcaagtgttttccgcttccagttgcgagcagtggcaggcaagagtcccctgggtaacactttcatagtcttcacctggactagagaggtcctttctttgccaagaattttctagaaagccagagaggaaaggcaggcatactctgcctctccactggggtctggggagcagggcggcagaacaaagcccctcacattcccatcccccagccccaagccaagggttgagcaaggatagttgatgactccakgctctgccactctccaggtgactctgcgcaaggtgttgaattctttagctcaactttccttttctatagaatgggaagaatacccatctcacaggatagagtagttgtgagaatgaaatggcatgaggtgtgtggagcagcaggcaaggtgcctgacattcaagggacaacgaatgggcactatcattatttacagggagcgagggagacaggcatgaccc

SEQ ID NO: 660 - DNA, 569 bp, Homo sapiens
tccttaacacgcctggccgatagcagattcaataaaaacatcttagtggcccagaggaaagatgcaataacggtgccattctgracactgtcacaggtccagttaacaagatttgatacagggacccctgcccagcctgcacgtgatcagggccactgtgttcattcccagctttctgcatatcaggagggtgatctcaccggctggcaggtcatcttcctgcaacaccgtgaatcatctgttctcagcaccaacctcattctcccgtgaaccagtgtggccttcggcggggcagccaatgcaagcagtggagacagatatttccaaggcttgttctctgccctgcgtcaggcaggacctctctgcacgcaggcacccgagtcaagcaggccaggactcttgctgtcatcagaaggcagccttgagcaccatctgactcagagagggcagcactcagcttcccgtggggccagcggctgactcccgctgcctccttggcctctccccacagctcctgggcagctaagccttcaccccttcactcacggagctcttgctgcatgttcact

SEQ ID NO: 661 - DNA, 625 bp, Homo sapiens
  misc_feature (1)...(625): n = A,T,C or G
ccaggcagtaagctggggtagtcctagggctttctatgttcatttctcatctctcagggatcactattcttcattgcctgatggttaatgtcttgagggttgttgtttcgtatatatttgtccagtgttttttattagtttcatgtgtgagtataaatgtggtccttatattccatcttgatcaaaagcagaagtcacattatgcttttatatataagaatagatgggccaggcatggtggctcttgcctttaatcccaaaactttgggaggccaaggatggaggatcacttgaggccagaagttcaagaccagcctgtacaacatggtgaagccccatctctggaaaaaataaaataattagctgggtgtagcagcatgtgcctgtagttccagttacccaggaggctgatgtgggaggatcactggagcccgggaggccaaggctgcagtgagccataatctcaccactgcactkcagcctgngtgacagagtgagaccctgtctaaaaacaaaaacaaaaacaaaaatacatgataatttcagagaaaaatttaaggcaatatagaatactgatttgtgaatcaaaatacctaatttccaaatctctcacttgtataaacta

SEQ ID NO: 662 - DNA, 516 bp, Homo sapiens
tcattttaatttataattctcagtgcaagaaattcttaataaaggtttgagctagctagatggaattattgagacaaagtctaaatcacccgtggacttatttgacctttagccatcatttcttattccacattataaaacaatgttacctgtagatttctttttactttttcagtccttggaaaagaaatggtgattaaatatcattrtatcattttatgttcaggcatttaaaaagctttatttgtcatctatattgtcctaatagttttcagtctggctttacgtaacttttacggaaatttctaacatgtacaaatgccatgttcctcctttctttcctacatggctgaattagaaaacaaattacttccattttaagtttggctaaattagaaaacaaattactaccattttaagtttggtggctaaataacgtgctaagggaacatcttaaaagtgaattttgatcaaatatttcttaagcatatgtgatagactttgaaaccaaaaaaa

SEQ ID NO: 663 - DNA, 1117 bp, Homo sapiens
ctcattacattgtttgagctttatctcacaagttttaatatgccatattttcagtgtcgtttaatttaaaatatttactaattttcattgaaatgcctttgatccatgggcgacgtagaagtgcactaagttctaaacatttgaggatttgtttacaattatgttgttttttatctttattctggtcagagaacatactctaatttcaagtctttgaaatttcttggaacttgatttttggcctagcatgtggtcagttttgatgcacttgagaataatgtatattctgccaaatctgtcaaaatctttaaaaaatgaaataatgtcaactatgtcatatttgcatctgccccaaattagtacttacctctttagtcatgatgcaaggacctcacaaccttttaacttcatttcacaagcctctgccccccactttctgcttattagtataatgtgttttagttcaacatattttaaaccccacaagtccttattgtgattattttatgtaatattcttattaatattctttacttatatttacccacagttttgccctctcaattgctcttcctttctccatttctttgcttcattttcttgaagaattccctttagtattaccttttatgctgatctcttggtaccaaattctctccatttctgattacctaggagtgtgcttattttgctttcattttcgaaagatacctgtcttcatccgttttgtgctgctacaacasaatacctgaaactgggtaatttataaagaacagaaatttactacttacagttctagaggccgggaagtccaagatcaaggcaccagcatttgctctggtgtccatacatggcagaagggtgggctagctgaatgttatgtgatgccccttttaaaagagccttaaccctcatggcctgatcccctcttaaaggccccacctcttaatagtattacattggcagcacctgaattttgaacagacacattcaaatcatgccaagactttttgcagataattctaggctgccattttttacttctagccctttaaaagcatttcactatccttcccgcttccttcattcctgttgaaatgccagttgtcagatagac

SEQ ID NO: 664 - DNA, 1117 bp, Homo sapiens
ctcattacattgtttgagctttatctcacaagttttaatatgccatattttcagtgtcgtttaatttaaaatatttactaattttcattgaaatgcctttgatccatgggcgacgtagaagtgcactaagttctaaacatttgaggatttgtttacaattatgttgttttttatctttattctggtcagagaacatactctaatttcaagtctttgaaatttcttggaacttgatttttggcctagcatgtggtcagttttgatgcacttgagaataatgtatattctgccaaatctgtcaaaatctttaaaaaatgaaataatgtcaactatgtcatatttgcatctgccccaaattagtacttacctctttagtcatgatgcaaggacctcacaaccttttaacttcatttcacaagcctctgccccccactttctgcttattagtataatgtgttttagttcaacatattttaaaccccacaagtccttattgtgattattttatgtaatattcttattaatattctttacttatatttacccacagttttgccctctcaattgctcttcctttctccatttctttgcttcattttcttgaagaattccctttagtattaccttttatgctgatctcttggtaccaaattctctccatttctgattacctaggagtgtgcttattttgctttcattttcgaaagatacctgtcttcatccgttttgtgctgctacaacagaatacctgaaactgggtaatttataaagaacagaaatttactacttacagttctagaggccgggaagtccaagrtcaaggcaccagcatttgctctggtgtccatacatggcagaagggtgggctagctgaatgttatgtgatgccccttttaaaagagccttaaccctcatggcctgatcccctcttaaaggccccacctcttaatagtattacattggcagcacctgaattttgaacagacacattcaaatcatgccaagactttttgcagataattctaggctgccattttttacttctagccctttaaaagcatttcactatccttcccgcttccttcattcctgttgaaatgccagttgtcagatagac

SEQ ID NO: 665 - DNA, 702 bp, Homo sapiens
cactccagtgcgggctgggatccccgggattactgaccagagaaacccagccccagcccagtgggtgctgcctcccacctgcctcctccagactcctcagctctgcctgcccctcaggactcccagcagctgtctgccttgagaggctgccctcaagagctggtggggcccyatctctggcttttcttgaaaaccttcctagaggctcatcttttctgcaaacccagagctttttccacaatgtctggttagttaggttccgagacgggtcctgtcccacccagcacttcacccatttctttgcattgggcatcctctcaccacacttgactggcagagagaggggagttgccaagcaccaaggctgcctaagttgctatccctgggctgcagggccctgggagaactggatgccacttcccaggcttcggtggagccagggcagggcgtactgggattactttgccttctcattcctgagctgtagtgccatgcttgaggttaacagtgaagagatattgctgtggaaatggaagaataagagtgtcttagtccacattcatgctgctgataaagacatactcaagattgggaagaaaaagaggtttaattggacttacagttccacatggctggggaggcctcggaatcatggtgggaggtaaaaggcacttcttacatgctggcagcaagaggaaatga

SEQ ID NO: 666 - DNA, 591 bp, Homo sapiens
aaagcccagcggcaaaggcagctttgtcccagctctgccaccctcctgctcacagtggtcagggcccctcaggggcaaggacggcagggattggaacgagggctctggaaggactgttcagccctatgcctaagacccctatgctggggacactacaggcacacasaggaatagcagggccaccctcagagctcacacatccacgaacaaatgaaggctgaggaggtttctaaacctaaagtccatgagtgtgcacttcaatccaggaaggtcgggacttccttcagtttcaaaaaataaattctcccttccggtttggactgttgcaggctcgaggccattcaggagttgtccaccacctggtggggcagtgtgacagaggggccattggggaaggtggctagcttatcccgccccttcaagaagaaggtcagcagctcccccttccccttcacaaagatggggcctcgcctcacaaagcggaagccgtactctcggaggatgacttgggtttcttctaccacctggagagggagggggagcaagaacgtggcgttacggggggagcctagactgagggcgggtgggggc

SEQ ID NO: 667 - DNA, 612 bp, Homo sapiens
ccgcgcccggccccccactggacttctgattagctgcagccctggagctttttcacttataccactggcagaataagtctccatgttggttgtatttgtgtgctccaattttttttttttttttttttttttttttgagacaaagtctcactctgttgccaggctggagtgcagtgcacaatctcggctcactgcaagctccacctcccgggttcacgccattctcctgcctcagcctcctgagtagctgggactacaggcgcctgccaccacgccyggctaatttttttgtatttttagtagagacggggtttcaactgtgttagccaggatgatttcgatctcctgacctcgtgatccgcccgccttggcctcccaaagtgctgggattacaggcgtgagccactgcgcccggcaccgtgtgctccaattgttaaagtacaacaataacattatatttgaaaaaaaaggaagatagtgtatatggtactaccacaattagaggaggccgtgacaactgacaagagaacactgatgacagctccaggcatgtagtgctcaatacgtgcccagtggttctaaaccaatagatctgggctcccaactcctgtc

SEQ ID NO: 668 - DNA, 601 bp, Homo sapiens
ccctggcttccccggcatccttaggagtcccactgcacttaagtccccaccatgggctaggcccttccatgcagcactccagtagcgggcgttgatttcaccgctcaggtcggggagtgggtgggtggagctgcaaggttcataaccataggctctacctcacaagcagtgtgtcggcctgtcttcctcatgccttccaaaacatgaggagacagagtgggcagcagcgtgtactgatgcaggctcgcaggaagaaaagccacctctaggggtgggccarggctgcagcccaggagtgggagacacgatgtcaggaagttatatgcataaaaggtaggggcaccatatcacccagccgaggtccggagggttagcccaggagcggctctgatctgaaaacaagcagggctgctgagctctgtcttaacttggagaagaatcaaaggtcctatcaggctggaaagctagccagtgctgcaaacctccaagagctgccataagctgtacctagctgacttttgcctgcagcagaatggttccctgacttccccatttaggttaccccaagtcatctgctctgaagtggggcagtttgccctct

SEQ ID NO: 669 - DNA, 606 bp, Homo sapiens
agagggatccagtgaaacattttatttatttgtgtatcatttatttatttatttagatggggtctcactctgtcacccaggctagagtgccatggtgccatcaaaacccactgcggcctyaaacttccgggttcaagtgatcctcttacctcagcctcctgaatagcagtgaaacatttttaataataaaaatttaataatttttaataattttaataacaaaatctgtatatgtatgcaacaagttttgccaattagaattttacctcaatattattttgaaaacttccatggtttaaagtggtattttgttacattattttcataagtagtaaattctccaccattttgaagacaatgtcagaaatggtaccaaattgatggaggccagattttgtgggagctcactggtctatcactatgcccaacataaaaagtgtgtgtgtggccaggcgcagtggctcacgcctgtaatcccagcactttgggaggccaaggcaggtggatcatttgatgtcaggagttcaagaccagcctggccaacatggtgaaaccccatctctactaaaaatacaaaaattagccaggcatgtagcacacacctgt

SEQ ID NO: 670 - DNA, 756 bp, Homo sapiens
catgaaggtctttatcgtcatcgtcttcatgttgaataggctaatatattttcccttgcttatgattttctttttcttttctttttttttgagatggagtcctgctctgtctcccaggctggagtgcagtggtgtgatctcggctcactgcaatctccgcctcccagattcaagccattctcctgtctcagcgtcccaatttgctgggactacagaagtacgccaccaggcctggctaatttttttgtattttttttttttyagtagagatggggtttcaccatatgggacaggctggtctcgaactcctgatctcgggtgatccacctgcctcagtctcccaaggtgctgggattacagatgtaagccaccgcacctgtccatggttttcttaataacattttcttttttaaagtttactttattgtaagaatacagtctataatacaaataaaatgcaaaatatgtgctaatcaactgtttatgttattggtaagacttctggttgacagtagactattaggagttaagtagtgtgggagtaaaaattatatgcacattttttactgcacagggggttggcaccccccccacacacacacacagagacacacagataaactatatatagaaagagagcaaaagagggagggaaagagagagaaaagatcagaacgggcaaagatgaaagcctgcatatgccacgcatgtttcccccatgatggaaaacgcctcaacagctacacttaataatgc

SEQ ID NO: 671 - DNA, 756 bp, Homo sapiens
catgaaggtctttatcgtcatcgtcttcatgttgaataggctaatatattttcccttgcttatgattttctttttcttttctttttttttgagatggagtcctgctctgtctcccaggctggagtgcagtggtgtgatctcggctcactgcaatctccgcctcccagattcaagccattctcctgtctcagcgtcccaatttgctgggactacagaagtacgccaccaggcctggctaatttttttgtattttttttttttcagtagagatggggtttcaccatatgggacaggctggtctcgaactcctgatctcgggtgatccacctgcctcagtctcccaaggtgctgggattacagatgtaagccaccgcacctgtccatgrttttcttaataacattttcttttttaaagtttactttattgtaagaatacagtctataatacaaataaaatgcaaaatatgtgctaatcaactgtttatgttattggtaagacttctggttgacagtagactattaggagttaagtagtgtgggagtaaaaattatatgcacattttttactgcacagggggttggcaccccccccacacacacacacagagacacacagataaactatatatagaaagagagcaaaagagggagggaaagagagagaaaagatcagaacgggcaaagatgaaagcctgcatatgccacgcatgtttcccccatgatggaaaacgcctcaacagctacacttaataatgc

SEQ ID NO: 672 - DNA, 756 bp, Homo sapiens
catgaaggtctttatcgtcatcgtcttcatgttgaataggctaatatattttcccttgcttatgattttctttttcttttctttttttttgagatggagtcctgctctgtctcccaggctggagtgcagtggtgtgatctcggctcactgcaatctccgcctcccagattcaagccattctcctgtctcagcgtcccaatttgctgggactacagaagtacgccaccaggcctggctaatttttttgtattttttttttttcagtagagatggggtttcaccatatgggacaggctggtctcgaactcctgatctcgggtgatccacctgcctcagtctcccaaggtgctgggattacagatgtaagccaccgcacctgtccatggttttcttaataacattttcttttttaaagtttactttattgtaagaatacagtctataatacaaataaaatgcaaaatatgtgctaatcaactgtttatgttattggtaagacttctggttgacagtagactattaggagttaagtagtgtgggagtaaaaattatatgcacattttttactgcacagggggttggcaccccccccacacacacacacagagacacacagataaactatatatagaaagagagcaaaagagggagggaaagagagaraaaagatcagaacgggcaaagatgaaagcctgcatatgccacgcatgtttcccccatgatggaaaacgcctcaacagctacacttaataatgc

SEQ ID NO: 673 - DNA, 756 bp, Homo sapiens
catgaaggtctttatcgtcatcgtcttcatgttgaataggctaatatattttcccttgcttatgattttctttttcttttctttttttttgagatggagtcctgctctgtctcccaggctggagtgcagtggtgtgatctcggctcactgcaatctccgcctcccagattcaagccattctcctgtctcagcgtcccaatttgctgggactacagaagtacgccaccaggcctggctaatttttttgtattttttttttttcagtagagatggggtttcaccatatgggacaggctggtctcgaactcctgatctcgggtgatccacctgcctcagtctcccaaggtgctgggattacagatgtaagccaccgcacctgtccatggttttcttaataacattttcttttttaaagtttactttattgtaagaatacagtctataatacaaataaaatgcaaaatatgtgctaatcaactgtttatgttattggtaagacttctggttgacagtagactattaggagttaagtagtgtgggagtaaaaattatatgcacattttttactgcacagggggttggcaccccccccacacacacacacagagacacacagataaactatatatagaaagagagcaaaagagggagggaaagagagagaaragatcagaacgggcaaagatgaaagcctgcatatgccacgcatgtttcccccatgatggaaaacgcctcaacagctacacttaataatgc

SEQ ID NO: 674 - DNA, 1620 bp, Homo sapiens
  misc_feature (1)...(1620): n = A,T,C or G
atagatatagattattatatattgatagatatatttaaatcctttttttggtcaagttcacaaggcaaattaaattaaatccactttttgaaataatggtaatgaatttaaaataggcctctactgaacaaatgtcatacataaattccactgaatgatgtaatgaggaggaatgatggtatgggatagagaaatgtaatagagtcagaaaacatgagtctgaatccctgctccatactaattttgtagggatacatcttagcatttttgacccatgatgtaaacatgtataaagtgagagaacaagagtatatcraatggttgttctgtgctctcttagatgcgagtctcctcaaaatactctgatgacttctcacctctctcagtgtagaagacaaaataaaacaactagtttttagattgtctcacaggtcccatgcgatctatgtccctagtactccttaacttccccacctgtccacgtctgtccctcttctccacagtgcacagctcctcccatccccgagaaccattccaagtgctgttccaatacctgagatgccctcttgccaggtgtctgaatggtgaactccctcattggttggagatctttattctaatgctaccttttccataggtcttgcctgtgtattctattaaaattgaagcctccacctctgaaaccaatatccgcatccacactcacacaaccacacctacacccacaaacatacacttcctataccatttattgctctattgaatttcctcaggatttatccccatctcacatgatttatgatccaatttccgtatttctgatatacacaatagaaattggttataattntattttttttttgagacagaatttctcttttgttgcccaggctggagtgcaatgacacgatcttggctcactgcaacctctgcctcccagttcaagcgattctcctgctttaacctcttgagtagctgggattacaggcatatggaactagacctggctaattttgtatttttagtagagaccgggtttcaccatgttggtcagtctgctcttgaactcctgacctcagctgatccacctgcctaggcctcccaaagtgctgggattataggcatgagctactgtgcccagcgaattgtgtataatttaatatagtatttattatgggagttatgtacatagaaaccaaaaggaaaagaaaaacttgagaaaaagaaatgttaacataatttaatgttagacactgaatgttgtacacgtaatatttccaattttaagtatacaatttgtaagtgtaaaatttccaagtttaagtatacaactcagtggtgctaagcatgttcgcagtgttgagcaatcattaccaccatctatctagaacttcttcatctcacccaaagagaaactgtaaacaaccccatcattccctccctataaaccacccataacttctatatccttatctctatgaatttgcttattttagatacctcataaacgtggaattatgcagtattcattctttcacgtctggcttatttcacttagcataacatttctaagatttgtacctgttgttgcatgtctcagatattcagaccttttaaagg

SEQ ID NO: 675 - DNA, 943 bp, Homo sapiens
  misc_feature (1)...(943): n = A,T,C or G
tgtcatatgcagtcatataaaaatctttctcattttaacagaggttcatgtagacattttcaatggaaatggtctgtaaatatggaataaaaagacggacccagatttgggaatggagcctttttcatgaaaggttacctttaaaaagttgaaagctagtctttttttccccaatgaaatataagaatataagaggganattgtagaaaaactaaccataaacccactcnagcatatattctacatataagatgaatatgctacagtggatgayactttgtatctcaaataaagcataatatacaaaataccaaatcacctagtcaacttcaaaattttttcacacattcaagagaacacacacacactcatccacacacaaacacatatacacacacacacacacgaagttgtattattgagccaatacttcactcttagttgcatttactttcagtgtactttctgaactccagattttcctccttaagcctgtctaaaaaattctcaggcaaaatacaaactgcactgtatgcagatgtgttgtaggaagtatccttgtttatttagttcatgtatagcttttatttccatacttggtcacactgaatccctgacaactttaaaaattcaatgtagataacaggtgacaaatcatcctcctctctgtcaattcagtctctgacaccagattttacatggcaaactcctgcaatcctcatacatatgaacactgagcattggacatttatccaggaccattacaaatataaatccttatctagtatttcaaaccaatctaatacttctttaagtcatgtaccagatattgctatataggatatagtcatcaaccaagctcttctgctttaagaacagctctttgttttcttcttaatgtgcaaaagcatttattcagcactataaatatggcagaggatag

SEQ ID NO: 676 - DNA, 585 bp, Homo sapiens
ttttaaggaayaaagaattataactgaatctaagcaaatagatttttaaaaccacattcttgcatttcttttcaggtagtctctcaaagtacaaactataaaaacaaaatcatacctggaattagaacagtgaatgtctttagaaatgatctattctggagcctttcttttaaaaataaggaaattgaggctcaggttaaaagatgtgttgctgattatgcaggtatctaatatctgagctaagacttgaagccaggtctttctattgactgcacatctttctacttgcttgttcttgcctctgattcttactcatgatcaccttaaattgaaactcgattaaaattatattggaacaactagctggacttctggggaaaaaaatcaataaacaaatctggctctatttcctacttcttatgtcagaaaaaattgagattgatcaagcacttaaatattataagtggaatcaaaaaattactaaaagaaaatatggataaacatattttgtagtatgagggtgtgggcagaccctcctgaaagttatctagaacaagcttagttaaactggacaggtaaaacatc

SEQ ID NO: 677 - DNA, 585 bp, Homo sapiens
ttttaaggaataaagaattataactgaatctaagcaaatagatttttaaaaccacattcttgcatttcttttcaggtagtctctcaaagtacaaactataaaaacaaaatcatacctggaattagaacagtgaatgtctttagaaatgatctattctggagcctttcttttaaaaataaggaaattgaggctcaggttaaaagatgtgttgctgattatgcaggtatctaatatctgagctaagacttgaagccaggtctttctattgactgcacatctttctacttgcttgttcttgcctctgattcttactcatgatcaccttaaaytgaaactcgattaaaattatattggaacaactagctggacttctggggaaaaaaatcaataaacaaatctggctctatttcctacttcttatgtcagaaaaaattgagattgatcaagcacttaaatattataagtggaatcaaaaaattactaaaagaaaatatggataaacatattttgtagtatgagggtgtgggcagaccctcctgaaagttatctagaacaagcttagttaaactggacaggtaaaacatc

SEQ ID NO: 678 - DNA, 682 bp, Homo sapiens
caagactaaacatggtagaacagacaaaataatcaaaataaatgcttgcctgggagatttagaactcatttaatattcctaggtacccatacagggtagatggcacagttcatgaatcaggaaaatgagacatacctgtgcaccagtccagaaatgtgtctgtacatatactatgtgtttttgctttttaaaatccaactcaaacaaaattcacacctttgttactaattattttaacaacattcctgtttagcatataccattatcccattttacagaaggggaaattgtatgaggaatttaagtactagcctggagccagagagtaagtcaatgacagagtcacaacaaaacccaggtctttcagactttgaatcagctgctctttttgctaatgaaattaaaatgttacttcctgacttatatacaggttgtaacaggaagtaaagaaaaaaatgctaccctataagacatgaacaaaaacatcaacactatctacttgagatagttatgtagaattaaaatcaagtatcctccagaaactgytaaataaaattgtagacaaaaggtgttagatttctgtgttggtattttaggctgtcaacaaaaataatgtatgtatatatgtgtacatatatgtgtgtatacattagtgtatatatacacagaatacgaatgtgta

SEQ ID NO: 679 - DNA, 1742 bp, Homo sapiens
gttacactgccatttttttcaaagtaaaaatcaatatgatgcatccatcattttctaaatttaatatttttcctgcttttcatttcaaatttagttttataataattgttaaaggaagagacctgaaaacatgggcgattttatagtctaataatcacatcttatttcaccacctgtctttaaaagtctttatacttttaaataacatttgcaagtacaataatacttttgtacactcatacaatgcactgggtaacaaatttgaaaacacaggaactacttaagagaaaatttagattgtgtctaatttaaatagatagtccactgggcaaggactgtatctaattctatgttaggtacagcacattgcaaaatgttggcactcaataaatgtaaaataataacaacagtcttttcccctttaaagtatataattacatctaccccctactgtgaaccaagcttggtgacagatcttttgtttattaaatccacagccctgaaggcatacagtactgcagcttcaataggagttgcagtaaagtcctctctactttaggtaaagctttaaatgtctataagtctctaaggaacatcttaacttagtcgtccaccatatatattacttaaccatacgtaagaagccttagttctaagtccccagagtggaatccaaacactaagtggaaatgtgttctcaaagttagttcggaaataagtcatggaataaaatcactcttagctaatttaccatttctctctcctaaagaaacatgtcaagttactgagcaaagctctgtaggctttatgcaggaaacattcaataggttcccatgcttgtgttcaaagtgagctattatccaagtagcctgaactgagaaggaaaaaaaaatgactcatgtacagctttatttgagacatttgcactacaatgaactaggcaaagcaacaggtcaagttaaaaaatattgcaaaaagcaacagcagccgaagccccttcaaggggaattttggactggaaagcacttttaattcgtttcatcattattttcttctagtttcccgtgtttgtgtttgaatgcttgcacttgaacattagtttcacaatcacctattctacttttggtattgatgaagttcaacatatgctcagcaattcactgctgctaaaataagaaatgcaaattcagctaagtgcgctccaagtctaatgttaagctaggcccgagcttctttgtagtttttgtagagtattatcattagcagagaagggttaatggcagaggccgatgattgtttaaaaattcacattaccaaagtggattacattgcatctactgaggggatcaacaatgtaagcctacactaagccattattgcagaaacaaagctttcattttaagcctttggaaacaagcataaaatggacaaaagaaaaaattcttctgatgtaagaacaaggcaagcactacatgcttttcatccaaactcagttttagaatcatgatgaatgtacaaaaaatggaccccaaatagcacatcattaaattaaaacatatcagcattttggaaaatgtttcttctataaggctagaaatccaacrgaaatcctttatttaaaattccttttcctttgcttgagaatcagtcacaacaagaagacgtagattctttaggattctctcagtatttgttcttttatcctctaatgagaattttttttaatgattttgaaaaatgca

SEQ ID NO: 680 - DNA, 979 bp, Homo sapiens
tatgcccattagaagctcagagccttgtggaagaggcagagaagttacaaataaaaatcagctacatgatttaatgacagatattgttgaattcagtggggaggcttcagcaattaagggtgtagagaatgaccagaagcacttttttagaagagtgtcaggcagggcttctctaagtagttgatatttgagcaaagacctggagaaaatgaaggagggagttacatggatagctgaggaagggacattccaggcagaggcaatagcaaatgcagcgacctgagtgagaattaatttgtccttttcaaagcaaatcaggagctgcraaggagtgagaaaagggatgattaggagaatgtactgagcagtcccgaagtaggaatggcttcaagaaaaacttggctcagggtgtaaatgatgttgctcaaacttaatttctctccatttccacgtcccacttgccccacccaggcaggagcttaacattttttttttctgaaaagtagaaaaaacatactgtgatatggttaatcaacattaaccagataataatagcttctaatctctcaagtagatattaccaactctaattaaaaataaaaacttttcccacaggccttaaggtcagaaataccattgacatttttaacatgcagtttatttaagatatactatgggaaaaatgtcaaccacaaaattctattaggcaaagcctgaaatattgaagtattgtttatcaatttagctcccacccccgacattccccaaattgtattaagcctggtttttagataaagtagcatattttcagtcttataatattcatgtacgtgtaaggcttatcaacattaaaaaaggtttatttcttaccacaaataagcacatattgtaggcagttgaaacgttttaaaccatatttgtaatttgaaaagttggcttttacacaatgatttggctcaaaaattacattttcttctct

SEQ ID NO: 681 - DNA, 979 bp, Homo sapiens
tatgcccattagaagctcagagccttgtggaagaggcagagaagttacaaataaaaatcagctacatgatttaatgacagatattgttgaattcagtggggaggcttcagcaattaagggtgtagagaatgaccagaagcacttttttagaagagtgtcaggcagggcttctctaagtagttgatatttgagcaaagacctggagaaaatgaaggagggagttacatggatagctgaggaagggacattccaggcagaggcaatagcaaatgcagcgacctgagtgagaattaatttgtccttttcaaagcaaatcaggagctgcaaaggagtgagmaaagggatgattaggagaatgtactgagcagtcccgaagtaggaatggcttcaagaaaaacttggctcagggtgtaaatgatgttgctcaaacttaatttctctccatttccacgtcccacttgccccacccaggcaggagcttaacattttttttttctgaaaagtagaaaaaacatactgtgatatggttaatcaacattaaccagataataatagcttctaatctctcaagtagatattaccaactctaattaaaaataaaaacttttcccacaggccttaaggtcagaaataccattgacatttttaacatgcagtttatttaagatatactatgggaaaaatgtcaaccacaaaattctattaggcaaagcctgaaatattgaagtattgtttatcaatttagctcccacccccgacattccccaaattgtattaagcctggtttttagataaagtagcatattttcagtcttataatattcatgtacgtgtaaggcttatcaacattaaaaaaggtttatttcttaccacaaataagcacatattgtaggcagttgaaacgttttaaaccatatttgtaatttgaaaagttggcttttacacaatgatttggctcaaaaattacattttcttctct

SEQ ID NO: 682 - DNA, 979 bp, Homo sapiens
tatgcccattagaagctcagagccttgtggaagaggcagagaagttacaaataaaaatcagctacatgatttaatgacagatattgttgaattcagtggggaggcttcagcaattaagggtgtagagaatgaccagaagcacttttttagaagagtgtcaggcagggcttctctaagtagttgatatttgagcaaagacctggagaaaatgaaggagggagttacatggatagctgaggaagggacattccaggcagaggcaatagcaaatgcagcgacctgagtgagaattaatttgtccttttcaaagcaaatcaggagctgcaaaggagtgagaaaagggatgattaggagaatgtactgagcagtcccgaagtaggaatggcttcaagaaaaacttggctcagggtgtaaatgatgttgctcaaacttaatttctctccatttccacgtcccacttgccccacccaggcaggagcttaacattttttttttctgaaaagtagaaaaaacatactgtgatatggttaatcaacattaaccagataataatagcttctaatctstcaagtagatattaccaactctaattaaaaataaaaacttttcccacaggccttaaggtcagaaataccattgacatttttaacatgcagtttatttaagatatactatgggaaaaatgtcaaccacaaaattctattaggcaaagcctgaaatattgaagtattgtttatcaatttagctcccacccccgacattccccaaattgtattaagcctggtttttagataaagtagcatattttcagtcttataatattcatgtacgtgtaaggcttatcaacattaaaaaaggtttatttcttaccacaaataagcacatattgtaggcagttgaaacgttttaaaccatatttgtaatttgaaaagttggcttttacacaatgatttggctcaaaaattacattttcttctct

SEQ ID NO: 683 - DNA, 940 bp, Homo sapiens
ctctaacagttatacttagagaagcaaccaagatgaagagagagtgaaagtgaggcgttgctatgggatgtgagaaaacttttgatggtgataaatattatcttgattgtggtagtggtttcacagaaatacacatatttatatattaaattgtattactttaaatatgtaaaatgtattttatatcaattatactgtagcaaaactggaaataaatgcacaaatactgcccccctcaacacagctaagttgatttaattactttctctaaaatttatcaaagcttttatgcaccattctcccacctggactatccttcttcttttgcttttctggatttaattcttcttccaagatcgagcctaaattccattttctccataaatttggcccacagcagctacattgatttattccttttgtgaactcttttttttttttttttttttttttttgagacggagtctcactctgtctcccaggctggatggagtgcagtggcgcgatttctgctcactgcaacctcckcctcccgggttcaagggattcccctgcctcagcctcgtgagtagctgggattacaggtgcctgccaccactcacggttaatttttttgtatttttagtagagacaggtttcaccatgttggccaggctgacttcaagtgatccaccctcctcggcctcccaaagtgctaggattacaggcgtgagccgccgcgcccggcctgaaatctagtaacgatgatgaactgtacagtatgtgaatgaatcacattttacctgtgacattcttctattgatcctttgaattattaaatgtcgggtgtttttcttgcctatggattgtctccccagttagattataaatttctggagagttaaggtcgcattttttatcccgcatttcttatgtgaaattgtttgagtgtgtgtgagtt

SEQ ID NO: 684 - DNA, 940 bp, Homo sapiens
ctctaacagttatacttagagaagcaaccaagatgaagagagagtgaaagtgaggcgttgctatgggatgtgagaaaacttttgatggtgataaatattatcttgattgtggtagtggtttcacagaaatacacatatttatatattaaattgtattactttaaatatgtaaaatgtattttatatcaattatactgtagcaaaactggaaataaatgcacaaatactgcccccctcaacacagctaagttgatttaattactttctctaaaatttatcaaagcttttatgcaccattctcccacctggactatccttcttcttttgcttttctggatttaattcttcttccaagatcgagcctaaattccattttctccataaatttggcccacagcagctacattgatttattccttttgtgaactcttttttttttttttttttttttttttgagacggagtctcactctgtctcccaggctggatggagtgcagtggcgcgatttctgctcactgcaacctcctcctcccgggttcaagggattcycctgcctcagcctcgtgagtagctgggattacaggtgcctgccaccactcacggttaatttttttgtatttttagtagagacaggtttcaccatgttggccaggctgacttcaagtgatccaccctcctcggcctcccaaagtgctaggattacaggcgtgagccgccgcgcccggcctgaaatctagtaacgatgatgaactgtacagtatgtgaatgaatcacattttacctgtgacattcttctattgatcctttgaattattaaatgtcgggtgtttttcttgcctatggattgtctccccagttagattataaatttctggagagttaaggtcgcattttttatcccgcatttcttatgtgaaattgtttgagtgtgtgtgagtt

SEQ ID NO: 685 - DNA, 1239 bp, Homo sapiens
tcaatgcttaatggaagaaaaataacattgagcttccaacagtggacctatacttaatctaccaaaggaaaaaaaaactgtgcatgaagatccatttatatgttttaagttaatataaaatgtctaagttggttgtggattttcccaatttcccaatttcacctcctgtatgaactaattaatccattgcaattctaacwtatctaatttctaaaacttctgttactttagaatgcgtctgtattcttcaacgtatttttgtacaatgacaaatcaatcttaattgttgtattcttttagcagggaacaaaaacatgaaaccttaaattcaaaatgaattaaacagaaattaagactttaacaggctaggtgtggtggctcacacctgtaatcccagcattttgggaagctgaggcgcgggtattacttgagggcaggagtttgagaccagtctggccaatatggcaaaaccccatccctactaaagataccaaaaaaaaaattagtcagacgtggtggcaggtgcctgtaatcccagctactggaaaggctgaggcaggagaatcgcttgaacctcgggaggcaaaggctgcagtgcagtgagccgagaccatgccactgcactccagcatgaatgacagaacaagattatctcaaaaaaaaaaaagttaacacttaattagcaatgatgttttaatggctatctttagtgatttcccatgagtaggaagtctccaggtgcctcttctccctctggatattagtctccttcctgccaccattgccttcgttgcctttagctatacaagattcttttatgccttggatgaccacatacacaccatggctacagaggacagtctggtttaagtccattggatcaacataactattgaaagtcctccatttcacttccattgttgtcctagtttgaaagatacagtatatggactccatatttgtataagacctcatactaccctgctctctgaattttttactttctcatcttctctttcttttgttctctttgtgcacttgaccttgagaaaaaaaatcactcttcagacatgtattcctgacttagagataacctcctgcaagatcttattaaagatttacaaaaagagtgacttagttagaagaaaatataaatatatcacagaactctgatgtcagagtcctcattgccaaccagggccattaaccaaaagatcctaaaaagccaaggcaatatgc

SEQ ID NO: 686 - DNA, 584 bp, Homo sapiens
tgcagaactgagtaccagtcacccatagcatagccaacttgacaatgcaccccctaccctgtaatggcttcatctcttccctgtttttcttcccttgtttctcattactgcttcctttgatcacttcccaatttaarccacctgcatgtaagccatttctcaataggaaattgcagcaactcaatagagacaggactatgataacagatttttcagaaatgaaatctgttgcctacctgataaagacctctgcctaagtggaatatataagcagagtataagggaaatgttgaatggatgatggaagaaaaaaatatgatgataagccttggtctaataacaggatacagttctagaaactgtagtcattatgcatattttgtgttgattgattatttttctcccctctccctgatactttgtgtgagaggtttgtgtgatgggggagaatgctacaatttaagttccagttgaagttaatgtgtgactgacatcattccatcactatctggtagggattttgtgtctccttggtgttaggaatgacaacatcttcatcttctaaataatgggcaagaatagat

SEQ ID NO: 687 - DNA, 584 bp, Homo sapiens
tgcagaactgagtaccagtcacccatagcatagccaacttgacaatgcaccccctaccctgtaatggcttcatctcttccctgtttttcttcccttgtttctcattactgcttcctttgatcacttcccaatttaagccacctgcatgtaagccatttctcaataggaaattgcagcaactcaatagagacaggactatgataacagatttttcagaaatgaaatctgttgcctacctgataaagacctctgcctaagtggaatatataagcagagtataagggaaatgttgaatggatgayggaagaaaaaaatatgatgataagccttggtctaataacaggatacagttctagaaactgtagtcattatgcatattttgtgttgattgattatttttctcccctctccctgatactttgtgtgagaggtttgtgtgatgggggagaatgctacaatttaagttccagttgaagttaatgtgtgactgacatcattccatcactatctggtagggattttgtgtctccttggtgttaggaatgacaacatcttcatcttctaaataatgggcaagaatagat

SEQ ID NO: 688 - DNA, 1224 bp, Homo sapiens
tacccatatcttttaatttgggtaaataataataataataattattattattattattttgatcctcaacttaccatctcccctagccctactgaactcattctgaataagacattaattatgaaacacttagcatttttaatatataaaagattatatgccaggccctacagttccaaatggaaaactgaggcatagaaagtttatgtaacgcataatacaattattgggtgtaagaaagaatagaaagggaagaaaggaaggaaagaagccatgtcatattgccgactcccagaaaacttaattgcaagacagaagaaaatttttttctaataaaatttaatcaagatttcttcaattttagctaaaaaataaaatttaggactttggaatttgctaaaaaatagttgattgctactctggaagaaactattacttccttcaactttttttccccctgtttgacttagaattctcagtaaggacagcttttgctccaatgtacaattgaccacattaaagtctcacaaagaggagaagagactggttgggggtggagggaagaaaggcaacaaagaataggcagtggaaagtatctaggaggtcaagaaaatgagaaaaaaaaagaatttagagacaaagtgtcagtatgcaagtctcaattgtctgttactgactgtgtggtcatcagaaaggtgtttttctttgataaaagcattatgtttgtctgtgaatttagtataataatragaagaagacatatgtctattcttccataaatatttttgaatgcttacactgtggtaggctatatgtttgactcctgggatacaatgatgggcaaaaatggtcacttgctcagcactcaaggaatttacaatagaataaaggagaaatcctataattaaatggtcacaacaatattccaatattatgactgagatatgtgctattaacaaaaatttaaattaggactaatcacttagggaaataggaggtagttatgagttgaggggcgatttgaaagaagagtagaaattaacaaggtttgtctgatttgagatgacaagtattactaccgggggatagaaataattgaaagaccctatcataggaaggagcatgcttttttttaagaaatggaaaattatgagcatgttgtaaaagaaagatcgaaaagaaagatgaaacccagattgtcaacagtaatttacttcatatgca

SEQ ID NO: 689 - DNA, 1224 bp, Homo sapiens
tacccatatcttttaatttgggtaaataataataataataattattattattattattttgatcctcaacttaccatctcccctagccctactgaactcattctgaataagacattaattatgaaacacttagcatttttaatatataaaagattatatgccaggccctacagttccaaatggaaaactgaggcatagaaagtttatgtaacgcataatacaattattgggtgtaagaaagaatagaaagggaagaaaggaaggaaagaagccatgtcatattgccgactcccagaaaacttaattgcaagacagaagaaaatttttttctaataaaatttaatcaagatttcttcaattttagctaaaaaataaaatttaggactttggaatttgctaaaaaatagttgattgctactctggaagaaactattacttccttcaactttttttccccctgtttgacttagaattctcagtaaggacagcttttgctccaatgtacaattgaccacattaaagtctcacaaagaggagaagagactggttgggggtggagggaagaaaggcaacaaagaataggcagtggaaagtatctaggaggtcaagaaaatgagaaaaaaaaagaatttagagacaaagtgtcagtatgcaagtctcaattgtctgttactgactgtgtggtcatcagaaaggtgtttttctttgataaaagcattatgtttgtctgtgaatttagtataataatgagaagaagacatatgtctattcttccataaatatttttgaatgcttacactgtggtaggctatatgtttgactcctgggatacaatgatgggcaaaaatggtcacttgctcagcactcaaggaatttacaatagaataaaggagaaatcctataattaaatggtcacaacaatattccaatattatgactgagatatgtgctattaacaaaaatttaaattaggactaatcacttagggaaataggaggtagttatgagttgaggggcgatttgaaagaagagtagaaattaacaaggtttgtctgatttgagatgacaagtattactacygggggatagaaataattgaaagaccctatcataggaaggagcatgcttttttttaagaaatggaaaattatgagcatgttgtaaaagaaagatcgaaaagaaagatgaaacccagattgtcaacagtaatttacttcatatgca

SEQ ID NO: 690 - DNA, 535 bp, Homo sapiens
aagtaagggtagttacttagcaattttcaacctgtgaaaaagtcctgtaaataagagcctatgtccacatgtcagacaaaataattcttattggtaaggcaccaatacaaatgttacagatgactatgattaagttcagattctgtttctaagggccaaacacttaaaatcaagaccagtttcacggccacgtgacctgggcagccacacagggcctagcattcagaagaaccagcacttgggggtgggtggaggggggaggggggagggatagcattaggagttatacctaatgctaaatgacgagttaatgggtgcagcacaccagcatggcacatgtatacatatgtaactaaccttcacattgtgcacatgtaccctaaaacttaaagtataataatartaaactaaaaaaaataaaaataaaataaaataaaaaaagaaccagcacttggtttaacactttgctgccactgtattgaaattctcaatattttttaacaagggattcacactcttatttttcactggcccc

SEQ ID NO: 691 - DNA, 594 bp, Homo sapiens
aggtacttgaggattttttgcctatataatctttgatggaataataaacgtattctctttttctaaatcattatcttgattttggttcacagccttcctctgacttatgatgctatraatcaggattcatagcctatgtctagatcccagcaacttttgacaacaagctgttggaaactcctcaggtttgaccactctttctgcattttctgtctgacttttcattgacccttttgtttttagccttcagcaatctatattttatcagtgatcctttgacactaccaagaacagtgagcaccttgaccctttccttttcatctccatcatttgcataacatgtttaccataatcttccttatagtgtaagtaaagtcagttcaagtctttcaatagccaccttcttcaaatcatgttcctgtccattgactaataaaggcaaaattctccatagggtgtattttctacaaaggggactcaaagctatatttaatactcagatatattttgtttagttagcacattgacattgacagaaaaatacaattcgaatgccctttgccactaccactcactactgccttttgcttgccc

SEQ ID NO: 692 - DNA, 594 bp, Homo sapiens
aggtacttgaggattttttgcctatataatctttgatggaataataaacgtattctctttttctaaatcattatcttgattttggttcacagccttcctctgacttatgatgctataaatcaggattcatagcctatgtctagatcccagcaacttttgacaacaagctgttggaaactcctcaggtttgaccactctttctgcattttctgtctgacttttcattgacccttttgtttttagccttcagcaatctatattttatcagtgatcctttgacactaccaagaacagtgagcaccttgaccctttccttttcatctccatcatttgcataacatgtttaccataatcttccttatagtgtaagtaaagtcagttcaagtcttycaatagccaccttcttcaaatcatgttcctgtccattgactaataaaggcaaaattctccatagggtgtattttctacaaaggggactcaaagctatatttaatactcagatatattttgtttagttagcacattgacattgacagaaaaatacaattcgaatgccctttgccactaccactcactactgccttttgcttgccc

SEQ ID NO: 693 - DNA, 579 bp, Homo sapiens
cagctcatagactggagaaactggattgtgctgatcttttcccagctctgtgttgaatgacttgatgttggtatttagaaactggtcatgctggragaatttacaccacagaaaagaataaatgctacaaatcaaagctgttctttggaggagcagccagtcagtatttaccagaacagcacttgtcgtattgtcacttcaaccagtaaacttaaaaagtggaatgacctgttcaagacaatagtcaatattcaaaactggaattaacattaaatatcccagtctccctaaattccagccctttttaagacatgggaatggggttagtgcctaggtgctttctcttgttcccagttctccttttctagttaccaacagcttcagactctgggaataaggatgagaaagatagcaaaaaaagtttcctatattctggtagttttccaccatttaagcttagagtttaaactgtctctttttcttatgggcattttttgttttgtttgtttgcttatttttattgctgatgacttatgtcctacagttccattgaggtgggctgataaatgtagtgcttat

SEQ ID NO: 694 - DNA, 579 bp, Homo sapiens
cagctcatagactggagaaactggattgtgctgatcttttcccagctctgtgttgaatgacttgatgttggtatttagaaactggtcatgctgggagaatttacaccacagaaaagaataaatgctacaaatcaaagctgttctttggaggagcagccagtcagtatttaccagaacagcacttgtcgtattgtcacttcaaccagtaaacttaaaaagtggaatgacctgttcaagacaatagtcaatattcaaaactggaattaacattaaatatcccagtctccctaaattccagccctttttaagacatgggaatggggttagtgcctaggtgctttctcttgttcccagttctccttttctagttaccaacagcttcagactctgggaataaggatgagaaagatagcaaaaaamgtttcctatattctggtagttttccaccatttaagcttagagtttaaactgtctctttttcttatgggcattttttgttttgtttgtttgcttatttttattgctgatgacttatgtcctacagttccattgaggtgggctgataaatgtagtgcttat

SEQ ID NO: 695 - DNA, 739 bp, Homo sapiens
ctattcgggaggctgaggcaggagaagtgcttgagcccaggacttggaagctgcagtgcgtcatgatcacactgctgctgcactccagcctgggtaacagagtgagaccttgtctccccccagtttttttttttaaaggaagtcttcagcccaatgtcaatagtgcccaggttgagaggctctggtctaattcaaccttccccagcctcaatggcagctcaggggattacaccaaacttaccctttaacgtgaattctttcagggcccccagtaaatggaaactttatctccttctcatctcagaatctacaacctggtggccagtttagcaacatgtgattcttttttaacaccccccgtttctaagaggaaaatcaaaacaaaaccctccaaataaattgcgggaaaaataaaaggatatttctgatgtttttctaggcttttcatcctttttaaaacgggggcgagggggaggtcaagtggcagctgaggaataaaaacaagtattcaaaagcatcagcgacccaaagtccgcagaaaatcaaaacgaacccagctctcagtgtgcgtaattacrggtacaatcaagtaatgaaaggtttattagtttaatgtgattccatcaagtaccaaaaagcgggaaggagtgggagaaagaaagaaaatggatatgaaagaggggagggagagacatgaaagaggaatatgagtgggcagagatggcgaaattaaaatgca

SEQ ID NO: 696 - DNA, 612 bp, Homo sapiens
gcaaatatttattgaaagagtggcacctaagtacagaacagtgccacgcaggtattattttttgcctttaatgaaaaatggaagaaagttaattgcccaaacaaggaaaatatttatttggtcttgttaattgtgcagataaatcaaagctttaagaccaaatagwttctcaaaccttctatcccctctttatagttcctgggttgtttattacaacacagaaaagccatgcggcagcccagtgattccatactccggctctgccctgcatgaaggtgagcactatccatacaggtcttctactcaccattgttggggctaaacccatcttcattggggtagttggctggagccacctggatggttgatgatgttgggaacaccaagatgtgtgtacaagaagcatcttgaggggtgttgagctgagatgactgcatgttcagtgcagtacttcggccaaaaacagagcccattgtgacagcatctttaaagaaaaaaatagaattatatcaatcaatgaacaaccccagaaatgaggttttcagagggcctgatctggagtggtatgagtctgatgaaaatgccatgataaatacacattcaaaattgagt

SEQ ID NO: 697 - DNA, 568 bp, Homo sapiens
tgaatgaatgaatgataggtaacaccaggatagggttgccagatgcaagacacctagttgaacttgaatttcagataaatgatgaatgcttttytactatcagtctgtcctaaatatggcatggtaaatacattaaaaattgttttctgaaatttaactggacatcctgcgtttttatttactattaataaatctggcaaccttataccacctgcagcaagggacaggaaggggtggttagacagagaggtccaagttaaatgtgagcctgggcctgctggggaggtgggtgtggcaggcaccatagtggtcagagcagtggtttctgaaatgtggccttggaggatccaattcagagaaagtgtccaagggtctagggtcaacccctctgcctctgacctcacagggacagtcagtgaggacaagatgaaagacaataagaccagggctccggctagtggctgccagaagggaggggagagggaggaagatcactttggataaggggaacacccttatttcaggtctagcacacaacaggccctcaagaaagatatcttcacctgca

SEQ ID NO: 698 - DNA, 952 bp, Homo sapiens
gggtgaatagaagacatccgtgtgctcaaacacattttctaaagtgtttaattgtttcagaaagtttcaggctcattctaaaaacacaatgttaagtgtgcatggatgtttcattaagttacaaaattgtttggttccctaaattctccagaataaaatatgtaaactgaattttatttccccrgtttatgtcccaaatcatggagccagagaaatgacaggatacatttcggtgctgtccatccgcctgactgcagttaagaatctgtctccattcccataataaacttaatttggagcatgtggaatttggcagcaacatttcactacaggctgagagttggcacataaggagaacacccagtgagcagcgagtaggcctttgcaaaaaaagaaagatagggaactaatcattgaggattccattgtgtggtatgtgtcataaaagagaggtttctgaagcaaaatggcaagcacatgctgcctctgcctcttattcaactggcttttctaaatggcaagactgattacccacaaaagagaagggtttgatcttctgttatcagcttgacattactcttgcagttaaccaactgtaattcagagcagaagttcctggaaagaattggaatccctgtcttcttgcttgtagttgaatggtcagatggtaataattcagtatttatttcccctagagcttggctggggatgaaatctccatatccagggttaaaaaagaagccctaactttggctgatccatgtttaatcctcctccccctgcaaagacacgcctaagttgccccttggaggtttggatatttggtagctaatagcaaaactgaaaaatactggtagaatttagggcatgcttcctgctgggggaatttgcttgaggcccttcaagagaaatgaatgttgaagactatggtatcagtcagagagatgcaaag

SEQ ID NO: 699 - DNA, 952 bp, Homo sapiens
gggtgaatagaagacatccgtgtgctcaaacacattttctaaagtgtttaattgtttcagaaagtttcaggctcattctaaaaacacaatgttaagtgtgcatggatgtttcattaagttacaaaattgtttggttccctaaattctccagaataaaatatgtaaactgaattttatttccccggtttatgtcccaaatcatggagccagagaaatgacaggatacatttcggtgctgtccatccgcctgackgcagttaagaatctgtctccattcccataataaacttaatttggagcatgtggaatttggcagcaacatttcactacaggctgagagttggcacataaggagaacacccagtgagcagcgagtaggcctttgcaaaaaaagaaagatagggaactaatcattgaggattccattgtgtggtatgtgtcataaaagagaggtttctgaagcaaaatggcaagcacatgctgcctctgcctcttattcaactggcttttctaaatggcaagactgattacccacaaaagagaagggtttgatcttctgttatcagcttgacattactcttgcagttaaccaactgtaattcagagcagaagttcctggaaagaattggaatccctgtcttcttgcttgtagttgaatggtcagatggtaataattcagtatttatttcccctagagcttggctggggatgaaatctccatatccagggttaaaaaagaagccctaactttggctgatccatgtttaatcctcctccccctgcaaagacacgcctaagttgccccttggaggtttggatatttggtagctaatagcaaaactgaaaaatactggtagaatttagggcatgcttcctgctgggggaatttgcttgaggcccttcaagagaaatgaatgttgaagactatggtatcagtcagagagatgcaaag

SEQ ID NO: 700 - DNA, 432 bp, Homo sapiens
agagaaagggagagagagagagagagagagaaagrgagagagagagagagagagagagagagagagagagagagagagagagagagagagaaagggagagacacagagagagagcctgaagtgctcttccgggaaccaaccctctggaactagaggagattatcaattataaggccactaaaatttaaattacacatcttaacctcatggctttaactccatgtttttcaaatcacttggtgattattttattcaattttagaaacagttgcaacaatatatgcttacttaaataacaataataacaaccataataataacagctaccattccaccatttcttgagccttattttctcagtgtttgacacaaagcactttgaagagaatcacccaagtactttacaaaactgccccatgttgtggggaattc

SEQ ID NO: 701 - DNA, 1202 bp, Homo sapiens
gcattaaagcattttaagctataatagtgctttctaaatataagggagaagaaatcaaggccttaaaaatacaaattatgtttcgcttctggagtagagattacatcactctgcatctcacacagttttcattattttcaccaggtatgtactaggtactcagttaaatgttttcgaaaaaagtttgttcagaatcagagagaagcaaggtcagaaaaattcaggaaattttttttttattgaaaaaataattcacatcatgtttaaattttccagtttataactaacttttgggagggcgcaaatatttcttggggtaattgaagtaaaggtaatattctccgccaaaatacataattgaaagcctacattttgtcccagtcaagtttaaattttatttgtgatacttctttcaagaacaaagttaaggcatacgttaggattctgtcaaacattaggaaaagaaggttttatttcytctgaagttgaccttgattactttatatctctcatagttttcagtactttaactaggtttattataacttctcaataaatatcttttgaaaaaatgaataaaaaggtatttagaaatgacacatataagcttcatgtgactttagagacacatgtgcagatagttgtcgagtcctttattcccttgtgacaaaggccatttgtcatgattaatatcatctatcacatggcctctttaccttcttttgaagcccttgcttccaaaagacttcccatttctaggaattatatcccagcctggtcatcacaaagcttctgtttttcaagctccaattataagcttcccaggggctgaaaagcattttctgtactccttaagcctgtggtgacttcctttcagttctttgttacggagtgtctctgacactctgacactccaccaacccacacagactggtcacaagagggcctattcgtttaggcttattacatatgagaagctaagtcaccttcaaagctgtgaaaatcagcaatcttgagtgcttgagtgtttctccaatgactgccaatctgatggggtctctggttggccttgtggatgctttcagttccctctgacttcagcagacagctttattgtggaggatgttcttgacctggagcaccattcatcagaggcaccattctttctcattgcttttatacttactggaattgttactgag

SEQ ID NO: 702 - DNA, 1248 bp, Homo sapiens
tagtaaataataaagaaaaaacacagtaaactaactttaaaggtttaaagatcaacagaagaatgtgtgaagttacatagcagttcatgactaattgccaaatgattagcctggatgagaagtgttatgaagttaggtattattagaacttgccactgcttctccacctgagaatctcttgctcctttaccasgctgtaggaatttggaaagacagaggaaaggaatatgagataacatgttccatagggcttggcgataattgaaggagattgaaccaatagcctgctacaatttgatctgtctgaagctacctccataagaaaagaaaaaatacctctgcttcctttcaactaccttattttgagtcttacaatttaaacacctaaaaataaaagcattcgtctaacatgtaaaagttatttctccacacatgaattctggacctcaaagcggtgtgttaaagtttaatgtcttgaaaattattgttggttcttttcctctccccctctccactttccttattaacacttaagcatggggattaattcagtatgtttgaattttccaaggcagtggatttgttctaaggacagggtggtgtgtaagcacatttctcttctgtgattaagtggaaccagcactccttctgacgcccaagaacacaagctttccacttctaagatggatcgataggaataatcttatgtattgagtgtcactcctggcacctcctcatttgtgcacagacaacaatctccctctgaatctcaaagtggataacgccatacattatttccagcaaatagagaaagcagaatcattttgagctcatctgggctgtgattaaacacaatgatacattcggaaggaacacaccagagactagatggcatctatcatcctaggcctattgagtacacctttaatactaaatgatgtactctctgaatcttactagaccattgacatattctttgtccttttctgttggtaaaaaacctggcagaaatatacaagaactcaacatatttagagtagaaaattgtgaaatttaatcagacaggcaggacaaaaaaaagtgcaagtgttgttttattttagggataagacatgaaagcttgaaactatagcttgaaatttccaaaatccatttacctggtagaagtttggagaggggttttcctggaatttatcaatagatatatggtctatagatcatgaacaggagagtcaggaaatgcctcaa

SEQ ID NO: 703 - DNA, 1248 bp, Homo sapiens
tagtaaataataaagaaaaaacacagtaaactaactttaaaggtttaaagatcaacagaagaatgtgtgaagttacatagcagttcatgactaattgccaaatgattagcctggatgagaagtgttatgaagttaggtattattagaacttgccactgcttctccacctgagaatctcttgctcctttaccaggctgtaggaatttggaaagacagaggaaaggaatatgagataacatgttccatagggcttggcgataattgaaggagattgaaccaatagcctgctacaatttgatctgtctgaagctacctccataagaaaagaaaaaatacctctgcttcctttcaactaccttattttgagtcttacaatttaaacacctaaaaataaaagcattcgtctaacatgtaaaagttatttctccacacatgaattctggacctcaaagcggtgtgttaaagtttaatgtcttgaaaattattgttggttcttttcctctccccctctccactttccttattaacacttaagcatggggattaattcagtatgtttgaattttccaaggcagtggatttgttctaaggacagggtggtgtgtaagcacatttctcttctgtgattaagtggaaccagcactccttctgacgcccaagaacacaagctttccacttctaagatggatcgataggaataatcttatgtattgagtgtcactcctggcacctcctcatttgtgcacagacaacaatctccctctgaatctcaaagtggataacgccatacattatttccagcaaatagagaaagcagaatcattttgagctcatctgggctgtgattaaacacaatgatacattcggaaggaacacaccagagactagatggcatctatcatcctaggcctattgagtacacctttaatactaaatgatgtactctctgaatcttactagaccattgacatattctttgtccttttctgttggtaaaaaacctggcagaaatatacaagaactcaacatatttagagtagaaaattgtgaaatttaatcagacaggcaggayaaaaaaaagtgcaagtgttgttttattttagggataagacatgaaagcttgaaactatagcttgaaatttccaaaatccatttacctggtagaagtttggagaggggttttcctggaatttatcaatagatatatggtctatagatcatgaacaggagagtcaggaaatgcctcaa

SEQ ID NO: 704 - DNA, 2771 bp, Homo sapiens
atgttttaaatgtactgcaggctcagattgcctatatatgctgacaagtcttcctcctacacctgatttatattttacctatgtgtcctcaagtactgaagtgtctgtggatgtgtggaagggcctatggttttcatgctttgacatttcaaatttttagagagcaattcttctgtctggggcttcccaggctgcctcaagcccctcctcctttctgctttagcttcagttaaaaaatgggtgctcaattgtattcttgtaagaagtgcaagagaaagaaaaataaaatcaagctctccttacgccacatgacatcacatctggaacaaagtatagaatttggaaatgttccatcaagctgagtgccaaagtttatgtttgaatttcatcttgtatcatgtgaaatgatgattgtcttattgagttgtctgtcttattgaggtctgtcttattgacgattgtctgtctcattgagtcgtctgtcttatcaagataaaagagatatacttgaacaaggtcctttatagtcccgaaaggacaggtaagtggccttactttatggatggatatgattcaaattaagactgccaactgaaaaaccatgtgatccagttgctaataagatgactgtgaaaaaagaaagatgaaaagtaaatgtgtcaagaattgtgatttttgacctgcaagatttactgatggattttgaggggtagcaatacagataaagacaaaaatgtattttagaaagtggcttaaatgatttgagaggtcattctctgaagcaaggtttcaaaatagtatcatttaaaaaaaatcaaaatgggagaaaaaattgaataatgaaactacagaaaagatgccgttttggcaatgaacattaatatcctccagctgacttcaatttgattgtgccaaatcagtaatgcttgtgaattaatgtaaattatttattggaattctcatgccatgccttcagccatcccttctcagagaagaatggatctgtctagaactctaccctgagctttctgttaggaacattttaaatgactcacataatgatgcttatacatctcatagtaggaacaactggagcctcaaaagccccacagtgaataaatgccacgtgttcatctcttcctccgataggcactccctctgattgattaatggaccgttacccaggaaagcagagagaaagccacttgggattgaaagtatatatttcttgctgtttaaatgtacaacaggctcagatcacctatatatgctaacaagtcttcctactacacctaatttctattttacctatgcctcctcaagcattgagcttattaattttcctttcactctcattctctctctcactcttgctattgccctcaaattagagttttatgtcagaggtgaacatcgtgactaactgattttctcaatgtatcactatcattgatgttttaagcaaactgagaagctcttcctaattattttattacttgttttcatcaacaactagacgatgctactatttgctacatcatggaggagtttatgcattgaaagattaaataaaagaaattaagggccaggtgcagtggctcatgcctgtaatcccaggactttgggaggctgaggcaggtggatcacgaggtcaagagatcsagactatcctggtcaacatgctgaaaacccatctctactaaaaatacaaaaattagcggggcttggtggcgtgcgcctgtagtcccagctactcagaaggctgaggcaggagaatcgcttcaacccgggaggtggaggttgcagtgagctgggatccgccactgcactccagcctggggacagagcaagactccgtctcaaaaaaaaaaagaaaaaagaaattaaggaaaacaaagatcgatactttgaaattactcactaatcttttaaatacaaatactcatatttcaagttatgaaaataatttgtaaaatttaccttaaaaatctatattgcaagatccaaacagaacaaagaacaaaataagcaacaaaaaaataagaaattccaagacataattaataacacattggtacttctatccattagttcagtaaatcctactctagttgcaagtaaattcttttttcaaacctgtggttccatttatcagtttaatctcaggtcttaaattgtcaatctcagttttaattgccatgttaaatttgtttttctaaatttctagaagaaatatcacattcgctcttaagtatgttttcttggtcagggttgttgtcttagttaaggttatttagcttacatgccttttgctgaaaggccccaatacatcctgggacaaccttacctttgatgttattctgcctttatagtagaagtggatgagggcactgtgtctgttccagatgcttctcattgcttcctgttgatttgttgctgagtctatgacatcttgactccacaacttgacttttcagaaacaggttaattttgaaacaatcgatactcacagtgttgtatactataaccataggtttcttgcttgaggaagtgaaaaccaaatggaaataaatattttgagatagtttctctctatctctctctctccctctcctttcaaattttgttgatgtcagaaataaggaatctagaacaaggaaaatgttgaaaacagataggcagcatgaataatattatttacttcacatttgttagagacaaaaagtgaggattctgaaaaattaatgaattaatatacttaaggagttaaa

SEQ ID NO: 705 - DNA, 2771 bp, Homo sapiens
atgttttaaatgtactgcaggctcagattgcctatatatgctgacaagtcttcctcctacacctgatttatattttacctatgtgtcctcaagtactgaagtgtctgtggatgtgtggaagggcctatggttttcatgctttgacatttcaaatttttagagagcaattcttctgtctggggcttcccaggctgcctcaagcccctcctcctttctgctttagcttcagttaaaaaatgggtgctcaattgtattcttgtaagaagtgcaagagaaagaaaaataaaatcaagctctccttacgccacatgacatcacatctggaacaaagtatagaatttggaaatgttccatcaagctgagtgccaaagtttatgtttgaatttcatcttgtatcatgtgaaatgatgattgtcttattgagttgtctgtcttattgaggtctgtcttattgacgattgtctgtctcattgagtcgtctgtcttatcaagataaaagagatatacttgaacaaggtcctttatagtcccgaaaggacaggtaagtggccttactttatggatggatatgattcaaattaagactgccaactgaaaaaccatgtgatccagttgctaataagatgactgtgaaaaaagaaagatgaaaagtaaatgtgtcaagaattgtgatttttgacctgcaagatttactgatggattttgaggggtagcaatacagataaagacaaaaatgtattttagaaagtggcttaaatgatttgagaggtcattctctgaagcaaggtttcaaaatagtatcatttaaaaaaaatcaaaatgggagaaaaaattgaataatgaaactacagaaaagatgccgttttggcaatgaacattaatatcctccagctgacttcaatttgattgtgccaaatcagtaatgcttgtgaattaatgtaaattatttattggaattctcatgccatgccttcagccatcccttctcagagaagaatggatctgtctagaactctaccctgagctttctgttaggaacattttaaatgactcacataatgatgcttatacatctcatagtaggaacaactggagcctcaaaagccccacagtgaataaatgccacgtgttcatctcttcctccgataggcactccctctgattgattaatggaccgttacccaggaaagcagagagaaagccacttgggattgaaagtatatatttcttgctgtttaaatgtacaacaggctcagatcacctatatatgctaacaagtcttcctactacacctaatttctattttacctatgcctcctcaagcattgagcttattaattttcctttcactctcattctctctctcactcttgctattgccctcaaattagagttttatgtcagaggtgaacatcgtgactaactgattttctcaatgtatcactatcattgatgttttaagcaaactgagaagctcttcctaattattttattacttgttttcatcaacaactagacgatgctactatttgctacatcatggaggagtttatgcattgaaagattaaataaaagaaattaagggccaggtgcagtggctcatgcctgtaatcccaggactttgggaggctgaggcaggtggatcacgaggtcaagagatccagactatcctggtcaacatgctgaaaacccatctctactaaaaatacaaaaattagcggggcttggtggcgtgcgcctgtagtcccagctactcagaaggctgaggcaggagaatcgcttcaacccgggaggtggaggttgcagtgagctgggatccgccactgcactccagcctggggacagagcaagactccgtctcaaaaaaaaaaagaaaaaagaaattaaggaaaacaaagatcgatactttgaaattactcactaatcttttaaatacaaatactcatatttcaagttatgaaaataatttgtaaaatttaccttaaaaatctatattgcaagatccaaacagaacaaagaacaaaataagcaacaaaaaaataagaaattccaagacataattaataayacattggtacttctatccattagttcagtaaatcctactctagttgcaagtaaattcttttttcaaacctgtggttccatttatcagtttaatctcaggtcttaaattgtcaatctcagttttaattgccatgttaaatttgtttttctaaatttctagaagaaatatcacattcgctcttaagtatgttttcttggtcagggttgttgtcttagttaaggttatttagcttacatgccttttgctgaaaggccccaatacatcctgggacaaccttacctttgatgttattctgcctttatagtagaagtggatgagggcactgtgtctgttccagatgcttctcattgcttcctgttgatttgttgctgagtctatgacatcttgactccacaacttgacttttcagaaacaggttaattttgaaacaatcgatactcacagtgttgtatactataaccataggtttcttgcttgaggaagtgaaaaccaaatggaaataaatattttgagatagtttctctctatctctctctctccctctcctttcaaattttgttgatgtcagaaataaggaatctagaacaaggaaaatgttgaaaacagataggcagcatgaataatattatttacttcacatttgttagagacaaaaagtgaggattctgaaaaattaatgaattaatatacttaaggagttaaa

SEQ ID NO: 706 - DNA, 2771 bp, Homo sapiens
atgttttaaatgtactgcaggctcagattgcctatatatgctgacaagtcttcctcctacacctgatttatattttacctatgtgtcctcaagtactgaagtgtctgtggatgtgtggaagggcctatggttttcatgctttgacatttcaaatttttagagagcaattcttctgtctggggcttcccaggctgcctcaagcccctcctcctttctgctttagcttcagttaaaaaatgggtgctcaattgtattcttgtaagaagtgcaagagaaagaaaaataaaatcaagctctccttacgccacatgacatcacatctggaacaaagtatagaatttggaaatgttccatcaagctgagtgccaaagtttatgtttgaatttcatcttgtatcatgtgaaatgatgattgtcttattgagttgtctgtcttattgaggtctgtcttattgacgattgtctgtctcattgagtcgtctgtcttatcaagataaaagagatatacttgaacaaggtcctttatagtcccgaaaggacaggtaagtggccttactttatggatggatatgattcaaattaagactgccaactgaaaaaccatgtgatccagttgctaataagatgactgtgaaaaaagaaagatgaaaagtaaatgtgtcaagaattgtgatttttgacctgcaagatttactgatggattttgaggggtagcaatacagataaagacaaaaatgtattttagaaagtggcttaaatgatttgagaggtcattctctgaagcaaggtttcaaaatagtatcatttaaaaaaaatcaaaatgggagaaaaaattgaataatgaaactacagaaaagatgccgttttggcaatgaacattaatatcctccagctgacttcaatttgattgtgccaaatcagtaatgcttgtgaattaatgtaaattatttattggaattctcatgccatgccttcagccatcccttctcagagaagaatggatctgtctagaactctaccctgagctttctgttaggaacattttaaatgactcacataatgatgcttatacatctcatagtaggaacaactggagcctcaaaagccccacagtgaataaatgccacgtgttcatctcttcctccgataggcactccctctgattgattaatggaccgttacccaggaaagcagagagaaagccacttgggattgaaagtatatatttcttgctgtttaaatgtacaacaggctcagatcacctatatatgctaacaagtcttcctactacacctaatttctattttacctatgcctcctcaagcattgagcttattaattttcctttcactctcattctctctctcactcttgctattgccctcaaattagagttttatgtcagaggtgaacatcgtgactaactgattttctcaatgtatcactatcattgatgttttaagcaaactgagaagctcttcctaattattttattacttgttttcatcaacaactagacgatgctactatttgctacatcatggaggagtttatgcattgaaagattaaataaaagaaattaagggccaggtgcagtggctcatgcctgtaatcccaggactttgggaggctgaggcaggtggatcacgaggtcaagagatccagactatcctggtcaacatgctgaaaacccatctctactaaaaatacaaaaattagcggggcttggtggcgtgcgcctgtagtcccagctactcagaaggctgaggcaggagaatcgcttcaacccgggaggtggaggttgcagtgagctgggatccgccactgcactccagcctggggacagagcaagactccgtctcaaaaaaaaaaagaaaaaagaaattaaggaaaacaaagatcgatactttgaaattactcactaatcttttaaatacaaatactcatatttcaagttatgaaaataatttgtaaaatttaccttaaaaatctatattgcaagatccaaacagaacaaagaacaaaataagcaacaaaaaaataagaaattccaagacataattaataacacattggtacttctatccattagttcagtaaatcctactctagttgcaagtaaattcttttttcaaacctgtggttccatttatcagtttaatctcaggtcttaaattgtcaatctcagttttaattgccatgttaaatttgtttttctaaatttctagaagaaatatcacattcgctcttaagtatgttttcttggtcmgggttgttgtcttagttaaggttatttagcttacatgccttttgctgaaaggccccaatacatcctgggacaaccttacctttgatgttattctgcctttatagtagaagtggatgagggcactgtgtctgttccagatgcttctcattgcttcctgttgatttgttgctgagtctatgacatcttgactccacaacttgacttttcagaaacaggttaattttgaaacaatcgatactcacagtgttgtatactataaccataggtttcttgcttgaggaagtgaaaaccaaatggaaataaatattttgagatagtttctctctatctctctctctccctctcctttcaaattttgttgatgtcagaaataaggaatctagaacaaggaaaatgttgaaaacagataggcagcatgaataatattatttacttcacatttgttagagacaaaaagtgaggattctgaaaaattaatgaattaatatacttaaggagttaaa

SEQ ID NO: 707 - DNA, 2771 bp, Homo sapiens
atgttttaaatgtactgcaggctcagattgcctatatatgctgacaagtcttcctcctacacctgatttatattttacctatgtgtcctcaagtactgaagtgtctgtggatgtgtggaagggcctatggttttcatgctttgacatttcaaatttttagagagcaattcttctgtctggggcttcccaggctgcctcaagcccctcctcctttctgctttagcttcagttaaaaaatgggtgctcaattgtattcttgtaagaagtgcaagagaaagaaaaataaaatcaagctctccttacgccacatgacatcacatctggaacaaagtatagaatttggaaatgttccatcaagctgagtgccaaagtttatgtttgaatttcatcttgtatcatgtgaaatgatgattgtcttattgagttgtctgtcttattgaggtctgtcttattgacgattgtctgtctcattgagtcgtctgtcttatcaagataaaagagatatacttgaacaaggtcctttatagtcccgaaaggacaggtaagtggccttactttatggatggatatgattcaaattaagactgccaactgaaaaaccatgtgatccagttgctaataagatgactgtgaaaaaagaaagatgaaaagtaaatgtgtcaagaattgtgatttttgacctgcaagatttactgatggattttgaggggtagcaatacagataaagacaaaaatgtattttagaaagtggcttaaatgatttgagaggtcattctctgaagcaaggtttcaaaatagtatcatttaaaaaaaatcaaaatgggagaaaaaattgaataatgaaactacagaaaagatgccgttttggcaatgaacattaatatcctccagctgacttcaatttgattgtgccaaatcagtaatgcttgtgaattaatgtaaattatttattggaattctcatgccatgccttcagccatcccttctcagagaagaatggatctgtctagaactctaccctgagctttctgttaggaacattttaaatgactcacataatgatgcttatacatctcatagtaggaacaactggagcctcaaaagccccacagtgaataaatgccacgtgttcatctcttcctccgataggcactccctctgattgattaatggaccgttacccaggaaagcagagagaaagccacttgggattgaaagtatatatttcttgctgtttaaatgtacaacaggctcagatcacctatatatgctaacaagtcttcctactacacctaatttctattttacctatgcctcctcaagcattgagcttattaattttcctttcactctcattctctctctcactcttgctattgccctcaaattagagttttatgtcagaggtgaacatcgtgactaactgattttctcaatgtatcactatcattgatgttttaagcaaactgagaagctcttcctaattattttattacttgttttcatcaacaactagacgatgctactatttgctacatcatggaggagtttatgcattgaaagattaaataaaagaaattaagggccaggtgcagtggctcatgcctgtaatcccaggactttgggaggctgaggcaggtggatcacgaggtcaagagatccagactatcctggtcaacatgctgaaaacccatctctactaaaaatacaaaaattagcggggcttggtggcgtgcgcctgtagtcccagctactcagaaggctgaggcaggagaatcgcttcaacccgggaggtggaggttgcagtgagctgggatccgccactgcactccagcctggggacagagcaagactccgtctcaaaaaaaaaaagaaaaaagaaattaaggaaaacaaagatcgatactttgaaattactcactaatcttttaaatacaaatactcatatttcaagttatgaaaataatttgtaaaatttaccttaaaaatctatattgcaagatccaaacagaacaaagaacaaaataagcaacaaaaaaataagaaattccaagacataattaataacacattggtacttctatccattagttcagtaaatcctactctagttgcaagtaaattcttttttcaaacctgtggttccatttatcagtttaatctcaggtcttaaattgtcaatctcagttttaattgccatgttaaatttgtttttctaaatttctagaagaaatatcacattcgctcttaagtatgttttcttggtcagggttgttgtcttagttaaggttatttagcttacatgccttttgctgaaaggccccaatacatcctgggacaaccttacctttgatgttattctgcctttatagtagaagtggatgagggcactgtgtctgttccagatgcttctcattgcttcctgttgatttgttgctgagtctatgacatcttgactccacaacttgacttttcagaaacaggttaattttgaaacaatcgatactcacagtgttgtatactataaccataggtttcttgcttgaggaagtgaaaaccaaatggaaataaatattttgagataktttctctctatctctctctctccctctcctttcaaattttgttgatgtcagaaataaggaatctagaacaaggaaaatgttgaaaacagataggcagcatgaataatattatttacttcacatttgttagagacaaaaagtgaggattctgaaaaattaatgaattaatatacttaaggagttaaa

SEQ ID NO: 708 - DNA, 598 bp, Homo sapiens
gtacagagataggtttcggtctgtttgttttttaaacagattttttactccattagctaagaaggaaaggaaaaggaagtgcagatgtaggtttctggccattcaaagccatctaaccttgaagatatttgaaagattattagcggggtgaaaggcagatttagtgggttttttttttktgaaatctcagacagctttaaaattaatatcagccttttgggtaaatatttattttataattcaataacaaggtctaattgaacagggtcataatgagataaatttatagataggaaaaaaattagaaatcagaaaattatcccccccatcccacagtagtaacaaaaattcacagtttaaaatatgggtaaaacttagtaaatataatagtcctctttcaaattcacataaagccttagtttctaccaactatccttatcaatacaccagtattgtcatgagcccaacagaatccttcaaaaagatagtcattataatctccaaaccaaagctcaatgagattaagtgatttaagcaagtttacctggctactaaattatgctcctaaaatttggcttcagaattttgtactccaagc

SEQ ID NO: 709 - DNA, 598 bp, Homo sapiens
gtacagagataggtttcggtctgtttgttttttaaacagattttttactccattagctaagaaggaaaggaaaaggaagtgcagatgtaggtttctggccattcaaagccatctaaccttgaagatatttgaaagattattagcggggtgaaaggcagatttagtgggttttttttttttgaaatctcagacagctttaaaattaatatcagccttttgggtaaatatttattttataattcaataacaaggtctaattgaacagggtcataatgagataaatttatagataggaaaaaaattagaaatcagaaaattatcccccccatcccacagtagtaacaaaaattcacagtttaaaatatgggtaaaacttagtaaatatmatagtcctctttcaaattcacataaagccttagtttctaccaactatccttatcaatacaccagtattgtcatgagcccaacagaatccttcaaaaagatagtcattataatctccaaaccaaagctcaatgagattaagtgatttaagcaagtttacctggctactaaattatgctcctaaaatttggcttcagaattttgtactccaagc

SEQ ID NO: 710 - DNA, 1224 bp, Homo sapiens
ccagcctcccctcctgtcacacttaaaagtctgcccacaaatcctctcaagagacatggctcaaatctagcgggtgaaaaaagtctgagtgaggcttggagccaagatcctgcatcttacaacctgcagtttctgaggctkccgagagccctgaactccagatgcttgtataaacaagacttcctagaagtcattacctcataactcctcataagcttacacctgacaagcctctcaaagcgagagggctgtgttttccctaataaattcctttttgaacccacttgttagtcaagcgttgtgcacactaactacagaaaggaccctgtgccttggggcataaattattcttctgtgccactgtttctgagcaccccccagttatggattacttcgttctcgacttgacaggaacataattagaactgttgatgaaatctaccaaattgttcctccgtggcctcagtggtcaggaaatttggctgagtcgtatttgtcaccgatgtggaggctctaaacacttcatattaactacgttattaatgtgccctctaatctgcccatgaattggtaacacttgaagtgagcctggccctaatggcaccttgcaatgaatgcattgtaggcccgcattaaaagtttcagcagggagaggatgttaataaaattcctgtgtgtgtgcatgtgtgtgtgtctgtgctgtcaacgccttgatgcttccatttagaaacatgatattgcttaggcctttgctgataccagtttgtgcattgtcaagttggctggtattttagccactgctttgttccatgaatccccctcctgaggtgagaaggcagtgaggtagggtggttaagaacgtggcatttcaggccgggcgcggtggctcacacctgtaatcccagcactttgggaggccgaggagggtggatcattcgaggtcaggagtttgagaccagcctggccaacatggtgaaaccccatctctactgaagatacaaaaattaggtgggcatggtggcaggcgcccataatcccagctacctaggggctgaggcaggagaatcacttgaacccaggaggcggaggttggagtgagccaagatggcgccactgcattccagcctgggcaacagagtgagactccatctcaaaaaagaaaaaaaaaaaaaaactgtggcatttggagtgaggcaggtctgggttgaagtcctagcttttgcc

SEQ ID NO: 711 - DNA, 1736 bp, Homo sapiens
aagatatccctaaccatggggcattgagacatgagtgggttgacaaatgctcactgaaatgtgcaccatgatcaattattataaataccacacagactaggatgataagttaataaaagagaacgggtaaaagatgaaccactagcagaggacatatgggttctagcatcaatgagaacacagcaacaaagttattggtcactgaaatatagcctttggtttcatctgttaactaggcatgaaaaattaaaaacctaacattttatgacaagttgttctttgggggtttattccctgtgcccgagttttctacttgtagaaaatacaaatgccagtacttgtagagacaacaaataatctctaaaatattaaggtaaagatcatggcgaaggtgtgtattctggtcacatgattttgatcttccttgttttaaatatttataaaactcttactattgttatgtgcttttaataagagccctctgatacaggagctgttggcatctccaccaggcagatgtggtaacatatgaaacctggtctccttccatctctgtgaaggaagcgctttgcaaaaaacccaactaaccaaccaaacgaacaggtaaataaatccatgcattaaggtactttcagggttttaaacccaaaccaaccaaacaaaaacacagcttgttttcaatccttaaatttgcagaatatatatacaaattttgctcaataaattactgttaagtgtcacaggaatccatttccataatagctaggaggactacgaagatcccaggctctcctctctctgggaaattgctcccaggtgcaagctctggttctttcttgagcttgagagaaatgttcaatccttgatagtttcaaccaggaaagagttagttttaagcagagaataatgaacaatgaaatggtaggaaatgatttgtgtaggcacactactgagaggtagagatgcaaagaaaattcagaagttcacaatttttcttgtatgtgagtaccagtttccagcctatgaaattctgctcctctttcaaaaccctaattcaaatgctaccttatacattaagtctttcttgattcagattctatttggaaataagcttactcttccccaatttcccttcccatttaacttgtattgtggttatttacatggttctattaggtcctacgtgactgtgagtgactagcttttatttgcccttcattttatccatacatcctacttgatactgtatgcaccattgcataccctttctttcatttgtacatttgaccaattcgtgagatagaatacgtatacaaactgtcaatttaagaggtcaaatgaattacatgaaataagttttatatttatgaagagggaaaaattatggatagctagagaattttaaagaacttcacttgcatacgaagacataggtcataattattcctgttttatagatgatgaaatggggaggctgaattactccaggtcatgtagttagtgagggatagagctaggatttatctcagcattccctgcagttattgtcagatgctagaaatcagaagacaaaccagagcaatgaataaatacagtgtaactatggatcacatttgaatatattttaaaaaccaggacagaataaggtgagtgtcttaatacaataagggagaacattttacagrcttctttttcactaaaatcagatcagtatatcactgttatttttaaactaa

SEQ ID NO: 712 - DNA, 717 bp, Homo sapiens
tgacatcatgccttcctccaactataatcttattgttctggtgtattttatagaaaagcgctttgaaaaaagttttctggactgttccacttccacatgccccagatattcytcatgttcctccaatttggctttgatatttctcactttatttaaaatgattttgccagaaatgagtcaagttttgtgttacaaatttagtgtcaaattattgctctgattttctcaaattttctgtaagatttcatacagttgattactcctttctctcaattcatctgtttttctatgatatcacatgtccttagtttttctcctactgcattattgtctctagtttttgtcctatctgttttagttccattttttggctttttaaatacacatacacaaacacacacacacgtacacacacacacccatattctctcatacaaactttctgcttttttgtggtaaatccatttcattgggtatactttgtcttatatcttagattacatttttccattgaatattttatttaataatttgaatattcttcatttgtaggagaggctttttgtactagtctatttcggctgggtggcttaagcaatagaaatgtattttctcgcaggtttctttttgttttctacagcaaagtttcattagctgtgaaaattgaggagataaagacaggcagttttattcctatggcaaactaattttttgttt

SEQ ID NO: 713 - DNA, 717 bp, Homo sapiens
tgacatcatgccttcctccaactataatcttattgttctggtgtattttatagaaaagcgctttgaaaaaagttttctggactgttccacttccacatgccccagatattcttcatgttcctccaatttggctttgatatttctcactttatttaaaatgattttgccagaaatgagtcaagttttgtgttacaaatttagtgtcaaattattgctstgattttctcaaattttctgtaagatttcatacagttgattactcctttctctcaattcatctgtttttctatgatatcacatgtccttagtttttctcctactgcattattgtctctagtttttgtcctatctgttttagttccattttttggctttttaaatacacatacacaaacacacacacacgtacacacacacacccatattctctcatacaaactttctgcttttttgtggtaaatccatttcattgggtatactttgtcttatatcttagattacatttttccattgaatattttatttaataatttgaatattcttcatttgtaggagaggctttttgtactagtctatttcggctgggtggcttaagcaatagaaatgtattttctcgcaggtttctttttgttttctacagcaaagtttcattagctgtgaaaattgaggagataaagacaggcagttttattcctatggcaaactaattttttgttt

SEQ ID NO: 714 - DNA, 1189 bp, Homo sapiens
tgcatgataagcaataaagagacatgggttgagaaactatgagttaacaatgtttgcaatatattgagaactatataaataaatagatatttcaaactgcataattaaggatgtctctttaaacaaggagtggttttatttaaaagtgtatttccatccacaaaaagcatatggcaagtggaataattgctgtgttataaaccccatgtaactttaacttaaacaaaaaaaggaatcattagccacagtactgagctttgttactcaaagaatagccttcattctaaggctgtagttggccaaaggtttgatgtaaatgtcttgttttaattatctgaaaattattgttaattcaaagtcrtagaataagaaaaatttgtttactataaactttggatcagtccattatttctatcattgttgaattgttgagcagaataagtactgtatgagtatctgaggctcatacaagtcatttaatctgtatgagcctcagatagtagtatgataatagcaataatctacatttttatcgttactaggatggctaggaggatgattaagtgtaataatctgggtgtgaacatttttacgtaatgaaactcagaattgatattaactaatttgatccatgtgttaggccactcttttttcatttctataaagtaatacctgaggctaggtaatttttaaagaaaagtgatttaattggctcacagttctgcaggctgtataggaagggtggtgctgacatctgctttgggtgaggtttcaggtagctcagaatcatggtggaagtcaaatgggaggcagacttgtaacatggcaagagtgggagcaagagagaaagaggtgggaggtgccaaaacaaccagatctcacatgagctcagagcaagaattcacttatcaccaagaagatggtgctaagacatttatgaggatatgcctcaatcacctcccaccaggccacattttcaacatagggaatcacatttcaacacaagattttgagggcacaaacatccaaagcataatgatcaatcacagtctctgaacattttactaaggtccttaaggcaggatcaaggaaaagcaaaacagctctttgatttgaattaaaggatcttgtgcattttccttcatggaacttgattttaggttaaggtattggaaactttttttcaaaa

SEQ ID NO: 715 - DNA, 573 bp, Homo sapiens
ccagggaagcttactgtctttcagtgtgatggacagtccagcataagcaagatgttcktgtccctccccaaattataaaagagctccattcccttgagaaaaactgctgggtgatgattggaaccactgaaggggtttaaagagagaagtgacaagacaggaattgcgaacagatcattcgggtgcaatgggagtgtgagattggagagacaggagtgaaggcttgagaaaaattaggaagccacagttcaagtactttcaaggataatggaaataatacagtctcggccagggcaggggaaggagggacggcaggaagggaaagagtgatgaaaggaaggggctgggaggtttaggggctgggaggtgagagatgttcaggtaaaaacagcaggattttgtatttgaataaggagtcaagagtgcatctcggattgctagttgggaggtttcattaacagatattaagaataaaaagagagtaacaagatcatactttatttgaaaaatgttattgaattgcctgtggagattgctaagcagaaatgccctttaggcaattggaacctcata

SEQ ID NO: 716 - DNA, 573 bp, Homo sapiens
ccagggaagcttactgtctttcagtgtgatggacagtccagcataagcaagatgttcgtgtccctccccaaattataaaagarctccattcccttgagaaaaactgctgggtgatgattggaaccactgaaggggtttaaagagagaagtgacaagacaggaattgcgaacagatcattcgggtgcaatgggagtgtgagattggagagacaggagtgaaggcttgagaaaaattaggaagccacagttcaagtactttcaaggataatggaaataatacagtctcggccagggcaggggaaggagggacggcaggaagggaaagagtgatgaaaggaaggggctgggaggtttaggggctgggaggtgagagatgttcaggtaaaaacagcaggattttgtatttgaataaggagtcaagagtgcatctcggattgctagttgggaggtttcattaacagatattaagaataaaaagagagtaacaagatcatactttatttgaaaaatgttattgaattgcctgtggagattgctaagcagaaatgccctttaggcaattggaacctcata

SEQ ID NO: 717 - DNA, 573 bp, Homo sapiens
ccagggaagcttactgtctttcagtgtgatggacagtccagcataagcaagatgttcgtgtccctccccaaattataaaagagctccattcccttgagaaaaactgctgggtgatgattggaaccactgaaggggtttaaagagagaagtgacaagacaggaattgcgaacagatcattcrggtgcaatgggagtgtgagattggagagacaggagtgaaggcttgagaaaaattaggaagccacagttcaagtactttcaaggataatggaaataatacagtctcggccagggcaggggaaggagggacggcaggaagggaaagagtgatgaaaggaaggggctgggaggtttaggggctgggaggtgagagatgttcaggtaaaaacagcaggattttgtatttgaataaggagtcaagagtgcatctcggattgctagttgggaggtttcattaacagatattaagaataaaaagagagtaacaagatcatactttatttgaaaaatgttattgaattgcctgtggagattgctaagcagaaatgccctttaggcaattggaacctcata

SEQ ID NO: 718 - DNA, 2558 bp, Homo sapiens
ttaggtattataagtaatttagagatgatttaaagtatacaggaggatgtgggtaggttatatacaaatccattttatatcagagacttaagcatctgtagattttggtgtccatggggaatcctagcagcattcccccatgaatactgagggataactattaactcccccacttactagccgtaagtcctttagacaacttatttatcctctttctcatctatagaatgtgcataataatggaacctacctctttaaatgtttgttgttattaagcaaactaacgtgataaagagcttgtaagtgtgtgttctgaaacatttactgagtaagccctcaataaatattagctcttgttatcttggtactgcttccttctacagttttgcttctagaatccagtactgatacacacacacacacacacacacacacacacacacacacacacacacacacattttaatatcatgcttgctctatccaagttccctgcatcttcccaaggagaactattcaagtctgagctcctagacattatgtctcgcttacaatattttcaagaaacctttctttcatccaagacattagtcttaaagaagaacacagcatagttctgtttccacccaaatggcaagctataataatgagttattaatcagagaaggttctggcgtcggagatttctacctgcggtaatggatgacccaacagttaggtgggatgcagctgtgacagtctaggggcatccatcatcctaggctagccgtctggaagtcaatggcaggagagcctgaaaacagtaggcaaaatggcctcaggtaacgcaccaaggctgagcatgaggactccagtttctgcctattgggaatccacaggaataaacctctttcttcttttggaaagattaatgggaactaggatacaatgtgaaaatcagttgtagaaagagagcagctcacttttcagaactagcaacagacaaaaacaaggaggatgaattcccatttgttggaaggtgattcactaggttgccttgatttagtgagaaatccactatgtatgtaggcatccagatgtggtaggaataatacagaagagaaaagaactatgtcaactgtaaaaccaaaagaaaaaagctaagtaaggcatgactggagatggataaacctatctggcttaggcaatgctatatttagtgtctaaatttggaaggcattaagtggaaggctaagagctcaatatttctcttttaggaagtagggagccattaaaattttaaacagagaggtggaataatgcatgcagtgctctagaaagcttctctgcttgtgtacacagtatatattaaaggtgtaaggacggtagtatcagttaagaaataattctgtcaatagtccaggtttcaggaaaaagcctctcttgcattgtcaaagtttcaatcaaaagtcttgaagatacatttggattttagctgatattcaggatgtgctaatatgaaaacataaccaaaatgcacctctattagtttttctaataaggaagtttctatctaattgtaactttttacctgttgaccaaatctcacgatctccccattctcaccacactgcctagcctccggtaaccactaatctaccctctacttccataagatcagctcctttggctcccacatatgagtgagatgatgcaatattagtctttctgtgcttggcttatttcacctaacaaaatgttctctagtttcatccacgttgctgaaaatggcaaattacattttttaatggccagatagtatttcattatgtatgtataccatttaaaaaacttatttaacctttgagagaaaaaaaatttggtattctattatgctgcaatgtgactatggttaaaagaattgtattatatatttcaaaatagctagaagacaggattttgaatgctctcactataaaaaataataaatatataagatcataaatacagctaaataccttgatttcatgattatgcartatatgtttgtattaaaacatcacactgtatcccatgaatatgtacaattgttatgtcaattagaaacaaaataaaaatcatgaagtccctgagaagtaaataaatcctgttcttttggtattagttaagcttacgaataacccttaaaggtaaaataaataagaaagcacacacattcaaaactgtgtaaaatgataaaacaggcaacaacagtaaatagaaaagaaagataaggtatattacattactatgatatgctgtgaagtaatcgttactctctctggtggactaagcaatccagctactgaatttattggtgagctacagatgatgggttactcaatggtatgactatctatcctcaactatggcctggcaattaaagtaattttgatttctgtagctggcccatcccctttcttccaaacattcgaagatatatatttctctttttaaaatatttttcaaagtaatcttgacaatctcaaaatgttgatcaatttttacttttggcagaaaagacgaaatatataataaga

SEQ ID NO: 719 - DNA, 1551 bp, Homo sapiens
atttttattactgttttctaattttgaaaggaatgacaacactgtggacagtcctattaaaacagtcatcttttaatagttataagtagataaattaattgaaattttttcctttcccatgttaagaaagctactggttctagggcctgcccccagcatgtggactttcatgtatatgttcggagaaatgttcgtatacaattaaattcccacaactggtagtttttaaattgtattaattagtatattgatgtctgctattttctttaaaaagcaagttttcagtgaacccaattcagtgttgttttctgccacagcttgaaaatgggaagttattttttgtctcctttagttataaattaaacaattgtaagcactagagaaattcgactccaatctagtattttattacatgatactaagagaagaaaagtaactgggtcatctcattattacatccctgaatttcgaagatgtctataaattccttgagaatatgctgagctcagtccgtcaggtaccttttaagtcttttaaggactcttcaggaagagcttcttttttttttttttttggactaaaggagacatttttcgcaattactctcacaaatgcaagacgtctttagagcagctcagagtggaccaatcctatttattaccataactgccaaattcttgttaaggcctttattttcctggttggaaaagacatctctgcacatgtgactgatgtgcaaagtactccctgagaattaatattgaccagaaattttagaaaagtttatttaattttatcaatcaaatactctccaagacggggaagtctctaatttgtggttttgaaaataaagtagaagtattacacaaagtaggtcaaacctacattctggctggttctctgcaattttaatttggagttaatttttgtccttagtgaactccttagatgcttcattagttctttcaccattccagaattgtgaaattttgtgatctttgcccaaaattatttttcatatcaaccatttattcaaccctttattcacatgaagcataggcatggttcatttactatgaacaaggaactcatttggaccaaataggcaaaaaaaaagttaaggagaaatcctaagttttagaattgtttaaactcctcacaaatgaattccattggcctagagattcctgtaatacttaagaaaggtttgctttgtgctggacactggtctaagcattttgactatattgactcagttcacagctctacaagttagaatttattggtgttacttctactatgtgttataactcatcttgcaggtgaggaaactgaggcagaatcagaatttaaattctagcagaacagctccaaattttacatatttaatcattacctaaactttctgccataaatatttctctgcaagtgaaacttgacttactgcrtagacagaactagcaaaactctatttgccctttaattctttcttagtctgggttctattttagaacaattctttgcttgttataatttcagaggttttagatg

SEQ ID NO: 720 - DNA, 608 bp, Homo sapiens
aagtatagactttcaggttgccaggcgttttctttcagcacaytgaagatactattttttccattatcttctggcttccattgttgctgctgggaaggcagtcactactctaattatcattcctttgaaaataatacttttttctctccggctgcttttttttttttgagacagagtcttgctttgttgcccacgctggagtacagtgatgcaatctcagctcactgcaacctccgcctcctgggttcaagcagttctcctgtctcagcctaccaagtagctggaattacaggtgtgcactaccacggccagctaatttttgtatttttagtagagatagggtttcaccattttggccaggctgttctcaaactcttgacccgaggtgatctgccctctttggcctcccaaagtgctaggattacaggcattagccactgcaccaagccttctctggctgtctttgagattttctctttgtcttttgtgttctgcaattgcactgtgatgtgtatgggcatgtgcatggcccctgaattgaaaacatcagcagtaggttcaaattggtagaaaaaccagacacgtacatcacacagataattcagatg

SEQ ID NO: 721 - DNA, 635 bp, Homo sapiens
tgaaatttggttttctaatactgattagaaaatgtaaatggatatttttaatgggtaaataaatgtgccagtattgtaactagtattcccggtaactagcttttcaacaaataccatctaatatcttcrttgccctttgaaaatgtgtttctttatggatttcttctattattaaaaagaagtaaatctcctattagttctttttattgggacagatctctactaaagtgaatgaagtgcagaaatcatggtagacaaaaacagcaggttgccttataccaaatggaaactatacaataagtaattacaatcagaaagtgcaaattaacagcatactcatttatggggcagtacattatgatataattgcttttgatttataaacatatagagtaaaagtataatttgtgatatgagtgaaaaaagtaatttttaaatttaaaatagcaatttcacttttatgcagtagttaatactaccaaagactccctttaactctgcctccataaatcccatgttttgaaataatttttctaatataaactattcattatttttcaaaaaaataaaagacttattgagatataattcgcaggtcagaaaattcatccttttagagtgaacaattcagtggt

SEQ ID NO: 722 - DNA, 653 bp, Homo sapiens
gaactgttgataaagatggcttaatgttttatgataatctgtatgttccataactttaaaaaattaacagatattaacacatttgtgataaacatttataggaattaaaagaagacaatcaagttttattagaaacaaaaaccatgttggaagaccaactagagggaactcgtgctcgttctgataaattacatgaattagaaaaagagaacttacaactgaaagctaaacttcatgatatggaaatggtaagttttaagaggtagatcagttacatggcctttaaggaaaacttctaagattcagctgatttccctgtattggcaaggatggctagtgtccttgaggctttaacagagaagagagagctaaataaattagatgcctccaactttatataaatataaaagtagtagaaatttctgcttttgttacagaakcatgttacttactaatgttgtcttcaaccttttaataccacaataaataagctattgtgtaaacatgtctttaaaaatacagaaatctgattgctaaaatttagcattggttcataattcttttgttgtatcactaaaacagtatgttgactatgaagaagaattttcattgtgtccccaaagatcagcttaaaaggatgtcagacacttaat

SEQ ID NO: 723 - DNA, 1176 bp, Homo sapiens
  misc_feature (1)...(1176): n = A,T,C or G
cactgtaaaataatctaccaaaaatatttcagtgggatgttttattaggttattcttatttttaagatttttcttttttaatttcatggtggattaagtttctaaatcagacttcaatatattactatcagaaaatacagaaagttcctgcactataatatatatatatwttttttcttttcttttctgttttttttttttttttttgagacagagtctcactctgtcacccaggctgaagtgcagtggcacaatctcggctcactgcaacctccacctcccagcttcaagcaattctcatgcctcagcctcccgaatagctgggattacaggcatgcaccatcccgcccagctaatgtttgtatttttagtagagacagggtttcaccatgtcggtcagactggtctcaaactcctgacctcaggtgatctgcccaccttggcctcccaaagtgctgggattacaggcgtaacnacagcgaccggcccatattttctttaggtaatgataaatcatatttgaagaatgcctaaaaggaatccaatactgcctcaaatgcacaaacctattagaacagattttattcaaaattacaatgataaaataatatacagaggcaaaaatctttattaaatgaccacaccataatctgatacaatacttcctgataaaagagaatgaattatgaactggtttataacatattttttaaaacccaaggtaaaacaaaactagtagataaactgcatacattatcatttaaattttgtgattattttctatgtggacatcctcttccgtatacccattgccctgtgcttttcactgtatttctcagctacactcctcctcctggattgtgaacattcgctacaaaatctctttaaaacaccaatgccaccacaaacttcccattgctgccaggctctcagattgtctagctctcccagaaaaggagaataagctaaattcacaataaggtggatctaagggataacaggtcttttccaacctgattcctcccttctcctccaccctcacctctcaccactgggcctctcctttacagccacagtgaactgctttctcacaattccatgcctgccatgattggctccttcaaccttcaccgtggagcagccttcacacacatgcttcctcttcatgctttggct

SEQ ID NO: 724 - DNA, 752 bp, Homo sapiens
tgaaatactcaatttttattcttttatctaacgcttactcttacatttctttaaagctctggccaagtattttatttcgtccctaaacattctaactatccaccaaactggtaagttggcttttctttttcctccccctgtcattcatttagctgttatatttcattttaatgttttgggtggtgcctcttatactatgttgtattcctagacaaggaaatgtatatcaaaatatgttagatgattgattgttttatctccttgatgatagcacctcttatactgctttacagaatcaggaaaaagtaaactgcattttacatagtggttttaaatattgattgattgatattctaaacctggtttcctatataaagttgtaagttcaagataaagagaccacattctttactyatgtgaggttctggaaatcctttatttcttttttaaaaacattttgataactttttttttaaatttaaacctttttaagagcaatttcaggctcacagcaaaatgaagaagaaaataatcttcacagagatttcccataaacctcctgctcctgcacatgcccaacctcccgttttcattgtctgccaccagagtggtgaacaattggtgaacccacactgaatcatcataatcacccagagtccatagttcatgtcagggttcactcttgtacattctgtgagtttgggcagatgtataataaactttggctccaccccagtatgcaatcctctcag

SEQ ID NO: 725 - DNA, 752 bp, Homo sapiens
tgaaatactcaatttttattcttttatctaacgcttactcttacatttctttaaagctctggccaagtattttatttcgtccctaaacattctaactatccaccaaactggtaagttggcttttctttttcctccccctgtcattcatttagctgttatatttcattttaatgttttgggtggtgcctcttatactatgttgtattcctagacaaggaaatgtatatcaaaatatgttagatgattgattgttttatctccttgatgatagcacctcttatactgctttacagaatcaggaaaaagtaaactgcattttacatagtggttttaaatattgattgattgatattctaaacctggtttcctatataaagttgtaagttcaagataaagagaccacattctttactcatrtgaggttctggaaatcctttatttcttttttaaaaacattttgataactttttttttaaatttaaacctttttaagagcaatttcaggctcacagcaaaatgaagaagaaaataatcttcacagagatttcccataaacctcctgctcctgcacatgcccaacctcccgttttcattgtctgccaccagagtggtgaacaattggtgaacccacactgaatcatcataatcacccagagtccatagttcatgtcagggttcactcttgtacattctgtgagtttgggcagatgtataataaactttggctccaccccagtatgcaatcctctcag

SEQ ID NO: 726 - DNA, 636 bp, Homo sapiens
  misc_feature (1)...(636): n = A,T,C or G
tacaggttgtactatacttwtgtccctgagtcagtaaggcatcagctctttgctaatcaatctgaatgtggcttgggaaatacttacaagtctgcactacatcttgctctgactggtactgagtaggcagagcggntgcataaacacagccttccagaccccagagatgagtgtgctcttagtgggccactttagctgtatgtttccctgcttctctctgttaaacttctggctggtcgtctttgtttctttgttgctattagttttatgcagctattggccttctaattgttcaccaacaaaaaataatttctgccttacagccatataactgtaatttgtacttttcttacctttacaaagtgactggaaaatgcaagattagccactgaatggataccctaagccaggggttggcaaagtttttcagtagagggacagacagtaaatactttaggctttgcaactcatttggtctcttgcaactactcaattctgtcattatagcacaagagcacccagagctaacacataaatgaatgagtgtggctatgtttcaataaaacattacagttgacccttgaacaatgtgggagttaggggtgccaacccaccgtacagtcaaaaatcccatta

SEQ ID NO: 727 - DNA, 636 bp, Homo sapiens
  misc_feature (1)...(636): n = A,T,C or G
tacaggttgtactatacttatgtccctgagtcagtaaggcatcagctctttgctaatcaatctgaatgtggcttgggaaatacttacaagtctgcactacatcttgctctgactggtactgagtaggcagagcggntgcataaacacagccttccagaccccagagatgagtgtgctcktagtgggccactttagctgtatgtttccctgcttctctctgttaaacttctggctggtcgtctttgtttctttgttgctattagttttatgcagctattggccttctaattgttcaccaacaaaaaataatttctgccttacagccatataactgtaatttgtacttttcttacctttacaaagtgactggaaaatgcaagattagccactgaatggataccctaagccaggggttggcaaagtttttcagtagagggacagacagtaaatactttaggctttgcaactcatttggtctcttgcaactactcaattctgtcattatagcacaagagcacccagagctaacacataaatgaatgagtgtggctatgtttcaataaaacattacagttgacccttgaacaatgtgggagttaggggtgccaacccaccgtacagtcaaaaatcccatta

SEQ ID NO: 728 - DNA, 646 bp, Homo sapiens
tccatggaattttctagaagccttactggaaacagttatctttttctcaaaggggaataaaaatccacaaataattagctgtcaaatgcaggaaaaatgaaaatgaaaaactaacaaaagttaaaacacttttttttctggtttgtaaaagggaaaaatatatatatatatttttcagagacagggtctcactatgttgcccagtctgtagtgtactggctattcacaggcacaatcatggtgcatgacagcctcaaactcctgtgctcaagcagtcctcctgtgttagcctcctgagtagctgggactataggtgcacaccactgcacctggmacagaaaatatttttttaaaaaagtctttacaatgaattgtttcttacttaaaaacaaagtcttgaaacataatttaacttattttcttactgaagttttaaccactttccagcctgatgtatctcgattataacctaaaacttcttgggcagtttgttgggcaattgccttgaagtccatctatctgcaagttttaaaaacaaacaactggtaagaatataatcatataaaaacttaaaaagtgctatcttacattttaatattatttctataatgcctgtcacatagaaatgaacataattacttgatga

SEQ ID NO: 729 - DNA, 173 bp, Homo sapiens
gggccccttccagcgtccccctcctgaggccatccctcctggcttccacagcccacattctcccacaggctgagtgcttcccgggtggctctctgggccctttctcggcgccacttgccaggcattcctcctccccatctagatktcagcacttctcggagctcagtcttgct

SEQ ID NO: 730 - DNA, 723 bp, Homo sapiens
tcctctggcattcaacactgatatcagtctcagcaacattaataatacagtgcaaccgaattaattctgcctcctcaccgaattaattctgcctcctctgatttcagaggggacaaattcagatgcacaattcagtgagcatgtttggggggctcactgggtgctgggcaccagcaggagggctctaagcaaagggaaaggcatagctcctcttccaggagtttgcaatgttggtaggaccataggaagcagccaggatacaattttattaccaattaaactccttgtatctgtatagtgctttgtagtttccaaaaccattttgagactcgcataagtagtcagaccctctgatcttttaggactcttttgatggtagattgaaataatttctttggactcagagaggaactttgcattgtggttaccaaactggtcyttgcaattaaaattgggtcccagcaccagttctgagcagttccagctgtgtggcctccggcaagtcacttaacctttctgagcatctatttctttttcttccaaatggatgaggactcactaaatttgcaggcgtgtaagacacttccctgcctctttccttcaaaattactgtgtgcccatattccaggtggaaataagagtcagagaggaaataatgtaagatgctaccccccagtggaggagttaggcaattcaaaactcatagcaaaggtcagcgtgcca

SEQ ID NO: 731 - DNA, 887 bp, Homo sapiens
atacagcaaaagatttatttttttttaaataccaaatattggtgtcaacatagcacaattattgtaattcaaactttggattttgttggaagtgtttttgcattcgtattactattatgtacttccagcctgacctttctcttttcctagaagagcaaattggagttagaggtgagggaagtggcaaaacaggaggctataaaattgatgaacagcctgtagggacgcaagaaactaaatattgatctttgttctttcagtgaggactcttgcgtttctaaggatgtcattacagccatggcagtatgggttcatccgatctgctattcagctgtggttgctctcggcattgaaaggacgctttgttcatggggtcagctgatgaccagggagttttctaaagtgagacttacagtgagaaaattcctctccaggtgttatgtgagatatttggggtatgtaggactgtgaggtaaggaatacagtttgctttaaaaaatgacacawctaaaaaaaatggcatagcttatacattcaaattagtgctattcttccaggaatcatagtgggagatatgaacttatcctagtaaagacaccattttgcaaagcattttggaactctttatcttagagttgccttcagaaccaaggttagggtctgcagaccactcgggactaaatacttagtgttttacttcaatttttagccacgacacagaaggttgattagttatttttctcccttctagatttaactccaaataacttggggtatttaaaaaaattaaatctattcatttactccttcatccatagattcattttttcaataagtactcattgaatgcccctgcatgtcaggctctgtgttagaagttgaggatt

SEQ ID NO: 732 - DNA, 1201 bp, Homo sapiens
gtgtaattacacatttttcaaaggagggcaaaacgccttaggcatttgtacttcatcttcagagttgacctgatcctccttctgctgactctgactctctctacccttcaggactcttgtttgcctctgctgctggtctctcggctgccagctgaactgctttgattgacaacttaggtgttcaagacttttggaatgcacactttagccttcctggggctgctccatcctttttactccctcaggctggggaacccactgtttggggctgccctttccacagcactttcttcagggagggacttgccgtttggtaactgacacccctcacccccaccacttctcttctgaggagatggaagagctgcagcatagaagaagctggggaacaggcccaaaaccaagggccccagagtctaggtgggattcctttggctctggccctaggcctggcatctgagtattayagagaaactcattttatgtttatccaggggttcttgcattgcctgtgatttctgaggatgcttttaaatcactagtattcactgcctctactagaacttctgtacactggattttattccccccagctataagggcttgtgaaaatatcttaaagagtagagtaagtagctcgggcaggcttgcatttgcaaaagcccaccctcacggatggaagactggtgggaggcccttgtgataggttgagggaaagaagctgaggttttagttggggcccaggattggggtggaggggaggagatgggtgtgagttttccccttcccttctctgtgggcgatgctccacatacggtggcaaggaaagttttctgcattcttcaaagcatgagcagagatcttttgcatgctgtttccacgggtgtttcagggagctctctgtaataagggttccctttgtggcagttggcagtcggttccaagctcatcattttgttgcagcaggacttggcaggggcatgggagaacaagacttctgctgttctttgccactctgagctctgcacccgtacctatgagggctactctttcctcatcctgttccacctgtcctcttcctgccactcttttgtcaaacctgtgggaggctgcattcaagttcacagagaaggcgtacctgtagtcacacagggtaggaggatgggaggagaggagaaaggaataagcaacttttgcctca

SEQ ID NO: 733 - DNA, 1326 bp, Homo sapiens
ggcaatggtcaaggtcatgatttttttcactggatacccattgctccagtctgccttgaaagcaccagggctctatgaggcagtggggatacaggagtgaagaaacccaggctccttccctccagggattcggtcagctggggcaacaggcatgtaaaaaacacatgaggccgcgaggtaacagctctgaaaaatggagtaagcagaagagaaagcaggggtcagggaaaggatccttgaaagatgctgggagtgcccttagataactggaaggggagagatctcggggataaagagccgggttaccacaaaggccctaggtgcgaaataactttgggaggarggggaaggaggtgcgggaaagggtggagaagggtagaagccaggtcagggaggtcacacaggccttgctgaagaaggttaccctttattttgaaatcatggaaccttttgtagtcgattcacagctgatctttgtctagtcccagatcactgcagtggctcccaaagttatgcaaatgtggggcaagtgggcatccattgttctgggattagggcatcaaaccaaattcacaaactgacagctcctaggccagataaggccccagacaagttttgttttgcctgtttttttttgttgttgttgttgttttttaatcaagctaacagcttaaaaccagaatatttcacataaaactcaatatttttggttcctcctgaaaaaaattaaagacttagcaactgtgagtgccagatttctgcggggtaacagtggatggttgctgagtggaggctgccctgtctgtcaggcttctggctcctggaggcatttgagcttttgacccctggcataacaggatgttttgtgactgggtgaaggccccactctgagaccccaggctggtagagcttgtcactgggtaaaagcaatttgcatgaggagcgctgggcctcttgggaggccaatccccaatctccttaccaaagacactgtattctacctaggcaggcagcccacaggcagggagcagtgaggctcctaaaataacaatgaacattgatcccagcttgggctctgtttctagggaacccaacctaagagaagtaggctctctcccaccaggggagctggaggggctcaagtgatcagctgagaaaatcaccaaatttgtggaacaagttttacaagttacataaccaaatagtttaagcagggaatgctaggctcaggttttatactttaataggttattctaggcttgaaggatggtttgttgggagcagagcaaagactggtttgggagaaattttcctcttccatgacag

SEQ ID NO: 734 - DNA, 1319 bp, Homo sapiens
catacatagacaggcagacagctatctcaaaagagaaagagaggaaaaaaaaggcagacagagaaagcaaatgttaacaactgctgaatctaggtgaagaatatattaattttgtgggggttttctttcagcttaactgtaggtttgaaatattttcagaataaaaattggggggaagaaaaaaatgaaggttttggaaaagatggtgtctctgtctcttaccttgctgtcatttgaaaaatgccacaaccagctgggcgcggtggctcatgcctgtaatcccagcactttgggaggccgaggtgagtggatcacaaggtcaggagatcgagaccatcctggctaacacagtgaagcccagtatctactaaaaatacaaaaaattagccgggcgtggtggcacacgcctgtagtcccagctactcgggaggctgaggcaggagaatcccttgaacctgagaggcggaggttgcagtgagccaatatcgcgccactgcactccagcctgggcaacaaagcaagactctgtctacaaaaaaaaaaaaaaaaagaaagaaaaaaagaagagaaaactgccacaacctgaaatagatcatccttgcaggaggcagccctgtccgaagcctgggtcaagttaacaatcctccctgcaaacccacgctgagtgtccattcagcatactcaggagctgaccaaagagggtgctggctcccctgctccttcctccagtctggtgcaccatgatgactgtttggaagttgactttgatagacaagaggatgtttgtgcactgctggaagagactgtgaagggtgagtcagaaaaaggctgggaaacagatgagggggcagagagatgggaagtttgtagccaggagacaacttagggaatgtctgggaaatgaggaggaggggaggctgggaaagggtcaacgagcagtggcttatctgaaaatcctttagtataaaaacaacagaggaagacttatttggtgttgtttatttacctactacaagttgacactgaggggtaggtgagcagcccctatctctgttttctcatcttctaagggagcataaatttcctwcctgactctttcagacaagcccttctttccttggcaaatcactggtcttcttcacctcaatgtgcccaaagcaggaacacagacatttggagctggaatgtgcatgaagaaattctaagagggcatgggtggaaacaggaggaccagtctgaaggtctctgcaatctagtgaccaatgagagtggtctagacagggggttacagaggaggtggtgagaggtggttggattcc

SEQ ID NO: 735 - DNA, 1058 bp, Homo sapiens
cattagtatcaattcagttatttagctctttgctagttttgttaatttactaaaatggcagatatgctttacatctggcacatttaacatttaaatgtcaggccaggcacagtggctcacacctgtaatcccagccctttgggaagccgaggttggtggatcacctgaggtcaggagttcgagaccagcctgtgcaacatggcaaaaccctgtctctactacaaacacaaaaattagcagggcatggtggcgcatggctataatcccagcgactcaggaggctgatgcaggagaatcgcttgaacccaggaggaggaggctgcagtaggctgagatcgcaccactgactgcactccagcctgggcgacagagcgagactccrtctcaaaaaaaaaaaaaaaattgaatgacataattatttttgtaaaatgtagactcaaagacagtttagttaggcctgaaagaatcctacttgttttatttgttgtccctatcaagacttttaaagtctcataacatactgtatgagcagacagacagatttttggaagttgggtaaagccaaaacaaaaggaagcatctcaaaaaacaggcagatatccgtatctgagcaaaactgacagatatatttacaatgtatttggctatgcctacagtaatggcttggcagttcatgccttttaacatgaatttgacatgggttccagacttcttgagtttatgtatatttggagctggctagcctgatgaagttaaccccatttactaagtagttccatcaagggaacagagttctacagaacaagagccttgtatcccttgtcgctaacttgccagttttgcttaatttttttgacaagaggccatgtgtggaggtgaaccaattctttcattttctgccaggatgtttcaactgcagtaggactttctgcacaagcagaacaggctgctgagaaagagcaccatgaacagacagtgctaagaaaacactccagtgaaaaattcaaggaggctgtgaatgatggagcaggggtacatttttccttcaagaagatgca

SEQ ID NO: 736 - DNA, 1058 bp, Homo sapiens
cattagtatcaattcagttatttagctctttgctagttttgttaatttactaaaatggcagatatgctttacatctggcacatttaacatttaaatgtcaggccaggcacagtggctcacacctgtaatcccagccctttgggaagccgaggttggtggatcacctgaggtcaggagttcgagaccagcctgtgcaacatggcaaaaccctgtctctactacaaacacaaaaattagcagggcatggtggcgcatggctataatcccagcgactcaggaggctgatgcaggagaatcgcttgaacccaggaggaggaggctgcagtaggctgagatcgcaccactgactgcactccagcctgggcgacagagcgagactccatctcaaaaaaaaaaaaaaaattgaatgacataattatttttgtaaaatgtagactcaaagacagtttagttaggcctgaaagaatcctacttgttttatttgttgtccctatcaagacttttaaagtctcataacatactgtatgagcagacagacagatttttggaagttggktaaagccaaaacaaaaggaagcatctcaaaaaacaggcagatatccgtatctgagcaaaactgacagatatatttacaatgtatttggctatgcctacagtaatggcttggcagttcatgccttttaacatgaatttgacatgggttccagacttcttgagtttatgtatatttggagctggctagcctgatgaagttaaccccatttactaagtagttccatcaagggaacagagttctacagaacaagagccttgtatcccttgtcgctaacttgccagttttgcttaatttttttgacaagaggccatgtgtggaggtgaaccaattctttcattttctgccaggatgtttcaactgcagtaggactttctgcacaagcagaacaggctgctgagaaagagcaccatgaacagacagtgctaagaaaacactccagtgaaaaattcaaggaggctgtgaatgatggagcaggggtacatttttccttcaagaagatgca

SEQ ID NO: 737 - DNA, 1058 bp, Homo sapiens
cattagtatcaattcagttatttagctctttgctagttttgttaatttactaaaatggcagatatgctttacatctggcacatttaacatttaaatgtcaggccaggcacagtggctcacacctgtaatcccagccctttgggaagccgaggttggtggatcacctgaggtcaggagttcgagaccagcctgtgcaacatggcaaaaccctgtctctactacaaacacaaaaattagcagggcatggtggcgcatggctataatcccagcgactcaggaggctgatgcaggagaatcgcttgaacccaggaggaggaggctgcagtaggctgagatcgcaccactgactgcactccagcctgggcgacagagcgagactccatctcaaaaaaaaaaaaaaaattgaatgacataattatttttgtaaaatgtagactcaaagacagtttagttaggcctgaaagaatcctacttgttttatttgttgtccctatcaagacttttaaagtctcataacatactgtatgagcagacagacagatttttggaagttgggtaaagccaaaacaaaaggaagcatctcaaaaaacaggcagatatccgtatctgagcaaaactgacagatatatttacaatgtatttggctatgcctacagtaatggcttggcagttcatgccttttaacatgaatttracatgggttccagacttcttgagtttatgtatatttggagctggctagcctgatgaagttaaccccatttactaagtagttccatcaagggaacagagttctacagaacaagagccttgtatcccttgtcgctaacttgccagttttgcttaatttttttgacaagaggccatgtgtggaggtgaaccaattctttcattttctgccaggatgtttcaactgcagtaggactttctgcacaagcagaacaggctgctgagaaagagcaccatgaacagacagtgctaagaaaacactccagtgaaaaattcaaggaggctgtgaatgatggagcaggggtacatttttccttcaagaagatgca

SEQ ID NO: 738 - DNA, 1058 bp, Homo sapiens
cattagtatcaattcagttatttagctctttgctagttttgttaatttactaaaatggcagatatgctttacatctggcacatttaacatttaaatgtcaggccaggcacagtggctcacacctgtaatcccagccctttgggaagccgaggttggtggatcacctgaggtcaggagttcgagaccagcctgtgcaacatggcaaaaccctgtctctactacaaacacaaaaattagcagggcatggtggcgcatggctataatcccagcgactcaggaggctgatgcaggagaatcgcttgaacccaggaggaggaggctgcagtaggctgagatcgcaccactgactgcactccagcctgggcgacagagcgagactccatctcaaaaaaaaaaaaaaaattgaatgacataattatttttgtaaaatgtagactcaaagacagtttagttaggcctgaaagaatcctacttgttttatttgttgtccctatcaagacttttaaagtctcataacatactgtatgagcagacagacagatttttggaagttgggtaaagccaaaacaaaaggaagcatctcaaaaaacaggcagatatccgtatctgagcaaaactgacagatatatttacaatgtatttggctatgcctacagtaatggcttggcagttcatgccttttaacatgaatttgacatgggttccagacttcttgagtttatgtatatttggagctggctagcctratgaagttaaccccatttactaagtagttccatcaagggaacagagttctacagaacaagagccttgtatcccttgtcgctaacttgccagttttgcttaatttttttgacaagaggccatgtgtggaggtgaaccaattctttcattttctgccaggatgtttcaactgcagtaggactttctgcacaagcagaacaggctgctgagaaagagcaccatgaacagacagtgctaagaaaacactccagtgaaaaattcaaggaggctgtgaatgatggagcaggggtacatttttccttcaagaagatgca

SEQ ID NO: 739 - DNA, 1058 bp, Homo sapiens
cattagtatcaattcagttatttagctctttgctagttttgttaatttactaaaatggcagatatgctttacatctggcacatttaacatttaaatgtcaggccaggcacagtggctcacacctgtaatcccagccctttgggaagccgaggttggtggatcacctgaggtcaggagttcgagaccagcctgtgcaacatggcaaaaccctgtctctactacaaacacaaaaattagcagggcatggtggcgcatggctataatcccagcgactcaggaggctgatgcaggagaatcgcttgaacccaggaggaggaggctgcagtaggctgagatcgcaccactgactgcactccagcctgggcgacagagcgagactccatctcaaaaaaaaaaaaaaaattgaatgacataattatttttgtaaaatgtagactcaaagacagtttagttaggcctgaaagaatcctacttgttttatttgttgtccctatcaagacttttaaagtctcataacatactgtatgagcagacagacagatttttggaagttgggtaaagccaaaacaaaaggaagcatctcaaaaaacaggcagatatccgtatctgagcaaaactgacagatatatttacaatgtatttggctatgcctacagtaatggcttggcagttcatgccttttaacatgaatttgacatgggttccagacttcttgagtttatgtatatttggagctggctagcctgatgaagttaaccccatttaytaagtagttccatcaagggaacagagttctacagaacaagagccttgtatcccttgtcgctaacttgccagttttgcttaatttttttgacaagaggccatgtgtggaggtgaaccaattctttcattttctgccaggatgtttcaactgcagtaggactttctgcacaagcagaacaggctgctgagaaagagcaccatgaacagacagtgctaagaaaacactccagtgaaaaattcaaggaggctgtgaatgatggagcaggggtacatttttccttcaagaagatgca

SEQ ID NO: 740 - DNA, 2403 bp, Homo sapiens
atcttatctgttaaagagtttttcatcacagggctaataagcattctagaaaagagaggttctgctgataaacaatctagaaaaatgctgaataaaacaagtaagtttttaaaaatgttattttaattgtaggactgctcatatgggctcactgcattgtgactgatgggaaatcttgtgtcaagcataaacttaaaaagacattgaacaaacaatggaacactatttgggaaatgatcagatggcccagtaggtggagggacgcctgtctagctggtatggagtgctctgtaccagcctaaattgccaacatcaattatttactgggggatggcatgaagcattttccttggctgttctcatttacagtgcaagaatcctggatagactcaacttagattttaacccatgagttagaagagaatgagcattttgatggagggagggatactgaatttggactatttagggggacttgtgcagagaaagagcctggagaacctagggatggggttggtttgagaggatgtggcagagaggaatggcagtcaaggagagaagaagaagaagcagatggacactgcttcagaatcacctgagagacttccaaaaaaaccaatgcatggggtaccacctcagatccatctcaggtgtgacctaggtcacagtactttttaaaatctcaccaggtgattcacttgtgctaccaaggttgagaaccatcctttaaggttttacaatatgcttgcaattctgatagcttccacaaggtggtagttgattttagtttcataagcaaataattagactcactctgacaactgagagaaagcaagattaaaaattatgcaagcttgtgcttcccattacaatatatttcttcataaagatgaaagcatggatttaattaagctacaatgcctacctagaaataacaaacaacaatttagaagattttaaataaatgcaaacacctaaattcaaggtgaacgctcaccaaatttttaattataattattcactacttaccttttatcttatttccagggaagatttcctgcattcaccttcccacygggacttacactcaacttccactgggaatttcagctctagctcaccaagagcaaccaaacagtgaagggggagccacctcgcactgtaactgatggaaatagtggtcacagcaagaaaaagattgtctatgacaagcagtgagcatcgcttcagggcctctaaccctgtccctatgccccaaaacagactgcaggcaatttaaaagtcgtgagaaatctcagtaatgctttccaatctgaaaagaagaggaccagagccaagtggagcagctctgaggaaagtgaagaaaaagtcattgagagtagggactttgatgcgctgccattgcctcagcagagggagggtcagaccatggcaggaaaggccaccagagctttccataatgcagatgactctgccaggttggggaagagggctcagctaatcccacaggacaggatgcacctctggctgagtggaatggtcgctggtacagaacgtgtaaaaagatctcagaaaagaaagcagaaccgagactgtccagccagggctgtgctcagctgccattaatcttttttcttcacttctgcatcgctgagtcacaaaggagcagtggatacgtaacattgtcgcctcacaatacagctctaaggaaagacctataactgtaataggttccttgcccgatgcatacaacaagtcaatacactaaaacactgagttgcagcacagaaagagattcaaaggtagggtagctgagtgaggagatgttaggaaacctcaaatccacctccccaaggagattggaggtagggtttttaagagttttggagtgggccaaagtgtggagatcattgattggttaaagagtgcagggtaaagtcattggatacagagattaagaagctgtgttctcatgctgatcacgttcctctgtggggggttgggaagggggactttaaagtggctactcgaatttggggctggaaaaaaccttcttaagtgattcttaaacaaaaaccttatgattctaatgtcagagatcctgtctacaggaacaatgaggatgcaagtcagttcctaaacagtcttatgaccctatatcagaaatcctacctacaggaacgatggggatgcaagtggccactatctagtgctatgtggcttttagcaacaaggaagtgggccaaggtgcagtctgattagtgcttcactttaactatatttctgtccagaacccggcacgcaattgttgtcacccctgtggggttggtttcagacagagaagatgagaaggattcagaaagaatgaactcaatacttcaaacaaacaaggtctggacaaac

SEQ ID NO: 741 - DNA, 626 bp, Homo sapiens
accaaattgttgtctagaaaggttatactracttaaatgtccatcaatagtgcatgaagcccatttttccacacaattgccagcaccagataccatgaaactctttaatttttgcccagatgataaattatgaaaattactgctgcttttattaaaatatgagagaaattgttcatgtttttcattagttgcttattcacaaactttgcacatttgtttctgttggatgttactttatttcttattgaattttatgagctctttgttaattaaaaaatttagccctttgtgatgtaacacttcctttttttgtcttttcactttctgtatataactttgcttacagatttattcatttatttattttaatagatggggtcccattaggttgcccaggttggagtacagtgactattcacaggagtgactatcccatactatacccctgaactcgtgggctcaagtgatcttcctgccttagcctcctcagtagctggaactacaggtggatgccaccaagcctggccaggttttaaattttaaatcaccaacagtatcatttgattattttatggtctctcaattatgtatctgctttataaaagcttgttaattttttgttttct

SEQ ID NO: 742 - DNA, 580 bp, Homo sapiens
cattctggattatttagagtggaatattaacagtaattttctttaaaatagtccagaaagaaagataaagaaatatggcaaattgttacgtaagttgggtttatgcttgttcattataccattctctctgcttttctgctatgttttgaaattttttataataatraaattacctttgctgggggaagagtgttgggaggtagatttcacagagatggttggatctgagtaataactaaattgaagtagttatgagtgtcttacaacgaatgtcaagatggagtcagcccatgccactggaagtcatttgaactattaaagaagtctctacaaccagttatagaattacttatttgcataattttcttatttgaaagatctttagttaccacctgatccaaccataacattttgtagaaaagagaagagagatcaaaataagtgaggatgttgcttagtttttgttgccaccagaaaaatcaatcctcttgactttgagcccactccttcttctactcaatccaattcttaatctaaaattccatgacactctctctctctctctctctctctctccctc

SEQ ID NO: 743 - DNA, 613 bp, Homo sapiens
atagcccttatcataacttaaaaaatcccttaataatgactaaagttaacatatcaacatttttgaaaaaaaatcawtcttttaaaaatcctgtctgtgtcaattagtaggtgatattttgtctattctatatttactacctgaaataaaataatcccaatagaaaacctaatttggccagaaaatgactttacaagctgttgcagaatatggatacaagtatcacagcttcaaactgtgaggagagatcaagccagagcttagctggaaatgttctgataatgaccacacatgggataaaacaactgaaaataattcactttcattggtatttaaagcattctagaaaggtttctctttcctttcctggagatgctacttaagaaccccacagttcatgaaaaatcgtgtgatgataatgccccagcctgctgatgtcctgcacccacacccacaccacccattgaggggacccgttcagtgagctgatatttggtccctagaggctctctttctacatactgttaatatagaccccctagtcaggagagtaaacttgactttaaaatatccaaactcttgagtttctttaagatttcgtaaagcttttcag

SEQ ID NO: 744 - DNA, 557 bp, Homo sapiens
tgcaatttatttaattgaaagtttacataatttttaatgatgactgtttaacaactagcttgaaaaatttcccatcagttctggtatgatacaagcatatgagcatataagttcttgtatgagtggtacaagcatattcattgagcattggtaaccttaagtacatatatatatatatatacacacacacacatatacatacacatacatatacactaaagttttacatttttatgtactttatcaaaattttgcggttttggcatttagtattgtattagaaaggtctcctcctgttagaatattattaaaatattcatattttcttccagcattttaatagtattattttttcatatcaaaattgttaatttatctgaaatttatttccatgtaaagtgtgaggtaaggatctaaacttttcccccaaatattagtctgttatcataatgtcttttatttgaataaaccatccttctacttyacctttatattacattctaatgaatatttagatccattctgtggacatctattctggcccattgattgatttc

SEQ ID NO: 745 - DNA, 603 bp, Homo sapiens
cttctagctggccttccttattagggatcaaactaactgagaaattgctacacaaaatcaaattctcccagctttattgagcacctactatgtaccaagtaccaaagcagatgcaagaggggactggggagggaaagattaggaaacttttagagtaaagatgactcagacctggttcgtgccttaagaagcttgtgagttacctgagaagcaaacaccagaaacaaaattattccctaagggcactttccatggattgtgacttccaaaggagaatccacatatgggggagtgttatctgcaaacacacaatacaaagcatttcacgctacttgatgtttatatagatcattttccaagaaaataaaagtggtttatatatggttcctacaacatctacacaattccctcacctgccaaggcctctgcttcccttcatacacacataggcctttaaytgacttcaaagggaacttggtgcataaagggagaggcacacagaggctgaaatgcacacacactgccattaatctcagaacacttctctgcgctgaggaggcaggaagtactgttatagccctttaaaaacaaaggaattggaca

SEQ ID NO: 746 - DNA, 398 bp, Homo sapiens
tttttcatccctaagccccgatgccctgaaccgtgtcctggttagaagaaagtctatcagggccgggcacggtggctcacgcctgtgatcccagtagtttgggaggccgaggcgggtggatcacctgaggtcaggggttcgagaccagcctggccaacacggtgaagccccatctctactaaaaatacaaaacttatccaggcgtggtggcaggcgccagtaatcccagctacctgggaggctgaggcaggagaattgcttgaacctgggaggcggaggttgcagtgagcagaratagtgccactgcactccagcctgggcaacagagtgagactccatcttaaaaaacaacaacaacaacaacaaaaattaaccaggcatggtggcaaatgcctata

SEQ ID NO: 747 - DNA, 624 bp, Homo sapiens
cttcacacaccttgcatgtacacgtacacatgtacttgcccctygccagggctcatgctgagggcttccttagtgttccctaggcaggtggtgccagtgtggatggccttaggaggattctgaggacagatggaccattatctggagttctggttggttggttggttggttggttggttggttggttggttggagttctggccagggaattggtgcacctggattccaggtctaaattcactgcccacggcgcaccctggataagtccctttccagattcagatctaggtttcctcatctgtgaggtgggaataatgccaactctagtggatgtttccgggatccaatctagagctgtcacagatgggaacatgctttgtggacacagagaggatcagtttgtattatccttgttctgctcaccgccatcattattgttgactgcccaggtcctttggggcgccgggaagccctgcccttgtgctggaaaagcttggtttgatcctggtaatcttgagcatttggcacccccacccctgccccaaatcactgcagccctgccagggtccagctcctcacccaggctgccctgcaacgagcctgtccagatgagcagcaccctgg

SEQ ID NO: 748 - DNA, 629 bp, Homo sapiens
tccaacaacaaagccacactggactaaataaatgatcaatgagacaggtctgctaaagggcctaggatacagtaactatcttaccactttctagcactgggaaatcctttaaaagtcaaaacgaggattccaacctcttgttagaaaggtcgaagaagggaaacaaaaaagcagggcttgatggcttatgcctgtaatcccagcattttgggaggccaaggcagatgaatcacctgaggtcaggagttcgagaccagcctggtgaacacggtgaaacccgtctctactaaaaatacamaaattggtcaggcatggtggcgggcgcctgtaatcccagctactcagaaggccgaggcaggagaatagcttgaacccaggaggtagaggttgtggtgagccgagatttcgccattgcactcttgttgccactgggcaacaagagcaaaactctgtctcaaaaaaaaaaaaaagaaaaaaagaaaaaagaaaacttaaagaagaagaaaaaaagtatagacactccaaaatggtcaaagcaattgcgttctaaactaagttttaaacctcaaagcaacaggttgctatacaaactcattctgttgctgccacacagttctcctggacaactg

SEQ ID NO: 749 - DNA, 1170 bp, Homo sapiens
tgcataactgattgcttcctctgccctattgttcacgtaaaaatgtaggttcactgagccagacacaattgtgtattcatcggaaggctgatcaaggactcaaaagaatgcaactttttgtctcttatctacttctggcctggaaaccccctacttcgaattgttccaccttactggactgaaccaatgtacatcttacatatattgattgatgtctcatgtctccctgaaatgtataaaagcaagctgtaccccgaccaccccggggcgcatgttgtcaggacctcctgaggctgtgtcatgggtgcgtcattaactttggcaaaatacatgttctaaattgagtaagacttgtctcatatactttttggyttacagcaatgatgacaatcatgatgtagcactagagacaactaaagggctcagaatctttctcacgtccccatcctctcagggcagtgtgccacccaccaaaaccaagagactgtgaaataaaatctacagaacaggcgcaaggcacactgatggacagtcacggaaccagcagcgacaaacaaaatgcagccagagacaccaagtaacaaccataaataatgatatccaagagtcagtgagtgcttcctatcacatcccttaatccttcccacggcttctgagataggtgttagttacaaatgaagaaactgaggcacaaagagactgaataactactaaggaggtggtggagtcaagatttaaacctaggcactctgagtccagagcctatgttgttaatccctatgtgagaaaatgttaaacataattactgggaagcacaatggttagccagaaaagatgagggagtgggtaccagataggactggaagcaggggaccaagtctttctactttgaaccctaaaaatctcagaggataggtcaagaactcaaaggctgtgggctacagatcctgcccaggcccaaagcctatggctcatgaaacaagggaaccaccatatttaaataagaaaggaacaacctcatggtttaaaatttttcctttcaatttatctatatttcctaattttttaggttttttttttacaatgaccatgtgaaacagtgaggaggcagggagggaggggaagaaagagacagacagacagatggatggggacagaggcaggctgact

SEQ ID NO: 750 - DNA, 1170 bp, Homo sapiens
tgcataactgattgcttcctctgccctattgttcacgtaaaaatgtaggttcactgagccagacacaattgtgtattcatcggaaggctgatcaaggactcaaaagaatgcaactttttgtctcttatctacttctggcctggaaaccccctacttcgaattgttccaccttactggactgaaccaatgtacatcttacatatattgattgatgtctcatgtctccctgaaatgtataaaagcaagctgtaccccgaccaccccggggcgcatgttgtcaggacctcctgaggctgtgtcatgggtgcgtcattaactttggcaaaatacatgttctaaattgagtaagacttgtctcatatactttttggcttacagcaatgatgacaatcatgatgtagcactagagacaactaaagrgctcagaatctttctcacgtccccatcctctcagggcagtgtgccacccaccaaaaccaagagactgtgaaataaaatctacagaacaggcgcaaggcacactgatggacagtcacggaaccagcagcgacaaacaaaatgcagccagagacaccaagtaacaaccataaataatgatatccaagagtcagtgagtgcttcctatcacatcccttaatccttcccacggcttctgagataggtgttagttacaaatgaagaaactgaggcacaaagagactgaataactactaaggaggtggtggagtcaagatttaaacctaggcactctgagtccagagcctatgttgttaatccctatgtgagaaaatgttaaacataattactgggaagcacaatggttagccagaaaagatgagggagtgggtaccagataggactggaagcaggggaccaagtctttctactttgaaccctaaaaatctcagaggataggtcaagaactcaaaggctgtgggctacagatcctgcccaggcccaaagcctatggctcatgaaacaagggaaccaccatatttaaataagaaaggaacaacctcatggtttaaaatttttcctttcaatttatctatatttcctaattttttaggttttttttttacaatgaccatgtgaaacagtgaggaggcagggagggaggggaagaaagagacagacagacagatggatggggacagaggcaggctgact

SEQ ID NO: 751 - DNA, 1170 bp, Homo sapiens
tgcataactgattgcttcctctgccctattgttcacgtaaaaatgtaggttcactgagccagacacaattgtgtattcatcggaaggctgatcaaggactcaaaagaatgcaactttttgtctcttatctacttctggcctggaaaccccctacttcgaattgttccaccttactggactgaaccaatgtacatcttacatatattgattgatgtctcatgtctccctgaaatgtataaaagcaagctgtaccccgaccaccccggggcgcatgttgtcaggacctcctgaggctgtgtcatgggtgcgtcattaactttggcaaaatacatgttctaaattgagtaagacttgtctcatatactttttggcttacagcaatgatgacaatcatgatgtagcactagagacaactaaagggctcagaatctttctcacgtccccrtcctctcagggcagtgtgccacccaccaaaaccaagagactgtgaaataaaatctacagaacaggcgcaaggcacactgatggacagtcacggaaccagcagcgacaaacaaaatgcagccagagacaccaagtaacaaccataaataatgatatccaagagtcagtgagtgcttcctatcacatcccttaatccttcccacggcttctgagataggtgttagttacaaatgaagaaactgaggcacaaagagactgaataactactaaggaggtggtggagtcaagatttaaacctaggcactctgagtccagagcctatgttgttaatccctatgtgagaaaatgttaaacataattactgggaagcacaatggttagccagaaaagatgagggagtgggtaccagataggactggaagcaggggaccaagtctttctactttgaaccctaaaaatctcagaggataggtcaagaactcaaaggctgtgggctacagatcctgcccaggcccaaagcctatggctcatgaaacaagggaaccaccatatttaaataagaaaggaacaacctcatggtttaaaatttttcctttcaatttatctatatttcctaattttttaggttttttttttacaatgaccatgtgaaacagtgaggaggcagggagggaggggaagaaagagacagacagacagatggatggggacagaggcaggctgact

SEQ ID NO: 752 - DNA, 517 bp, Homo sapiens
gacatgagatgggggcaggcactcaacatttttgggtttccaggtctycttgaacccttgaacatgtggtggtgttttttctcttggtacaaggtgtgtgcttatttctttttgtttggagagaatgtagaggactctgctttgctagaaaaaaacaagccccctcaggatctttctccattcctgaacaatagataaacaaatggtattaagttcaaacataatttaggaagtgctgtgtcttctaagagaggaagtaaactattccaagaagactctctaggacctagccaaaatacagcaggatgcataaagcaaaattcatactttttttgtttaataaaggtcaattttatatccatcaggtctactctactttgtttctactttcctggaagaggaaggtgttccaacaatgttttctcagagggaattgatttggagagacatactaaaagttaaagccaccgaggctcagagaggaaaagatcttaagttgctgcatcttttctttttc

SEQ ID NO: 753 - DNA, 587 bp, Homo sapiens
actagtaatttgaaacaaaggaatgtgttttgatttttgtatttctagtatccagctaatatctgatacatagtgataaataaacattcatgagagaaaacgtgtaagtgaatacctaagtataggattgactgaagtagaattgcttaaaaatcataagacagctaagcatagaggaattaaagacataaggtggaagatacccatttaaaataacagctacmaaaaaagtctccaaacccaggattctaatccagaatcccaagcaaatcatgaagtatttttgacatgttagaagaaaagaaaaaagtaaaagctgtctatgagggtacctttttgtaaacaaaagaaaagaaaattgatcaatttaaggaaagcaaagttcattacaaataaagagcccagagaagtaacagcaggtgagagtagtagtgttgggaaagagaaggcactgaagcagctcgctggggctgagacaggaacttcaggagtggtcatagtgcggccactgggaaggaactaactccagagctctgctttcttggcaccctgatccagattccatttccagggagggatcaaccaat

SEQ ID NO: 754 - DNA, 587 bp, Homo sapiens
actagtaatttgaaacaaaggaatgtgttttgatttttgtatttctagtatccagctaatatctgatacatagtgataaataaacattcatgagagaaaacgtgtaagtgaatacctaagtataggattgactgaagtagaattgcttaaaaatcataagacagctaagcatagaggaattaaagacataaggtggaagatacccatttaaaataacagctacaaaaaaagtctccaaacccaggattctaatccagaatcccaagcaaatcatgaagtatttttgacatgttagaagaaaagaaaaaagtaaaagctgtctatgagggtacctttttgtaaacaaaagaaaagaaaattgatcaatttaaggaaagcaaagttcattacaaataaagagcccagagaagtaacagcaggtgagmgtagtagtgttgggaaagagaaggcactgaagcagctcgctggggctgagacaggaacttcaggagtggtcatagtgcggccactgggaaggaactaactccagagctctgctttcttggcaccctgatccagattccatttccagggagggatcaaccaat

SEQ ID NO: 755 - DNA, 587 bp, Homo sapiens
actagtaatttgaaacaaaggaatgtgttttgatttttgtatttctagtatccagctaatatctgatacatagtgataaataaacattcatgagagaaaacgtgtaagtgaatacctaagtataggattgactgaagtagaattgcttaaaaatcataagacagctaagcatagaggaattaaagacataaggtggaagatacccatttaaaataacagctacaaaaaaagtctccaaacccaggattctaatccagaatcccaagcaaatcatgaagtatttttgacatgttagaagaaaagaaaaaagtaaaagctgtctatgagggtacctttttgtaaacaaaagaaaagaaaattgatcaatttaaggaaagcaaagttcattacaaataaagagcccagagaagtaacagcaggtgagartagtagtgttgggaaagagaaggcactgaagcagctcgctggggctgagacaggaacttcaggagtggtcatagtgcggccactgggaaggaactaactccagagctctgctttcttggcaccctgatccagattccatttccagggagggatcaaccaat

SEQ ID NO: 756 - DNA, 578 bp, Homo sapiens
gtttatatttcaattttttttgaaaatatattatttcactttaacaaaattttttagattttttttctgagctcaaaagtgtttagtacattactattcaaartctctttatttgcaaacaatacatttaaagctacaaattttacttctgcactatttggcttacactggcaaatgctgatatgtggtattttcattatgttcaattttatgtatttccaattttcatcatgatttcttctttgatgaaggaattctttagatgttcttaatttttaagtgtatagactttgtaaattaaatgttctataatcagtaaatgaggtctagaggggacttattctttgaaacctgtgaaatttgtatataccctaaatggctacattttgttatacccagatactcttgtaataaatgtctttccaattagatcaatttgcaaattatgttgtttaaaacttctatatacttgaaaatatttttgtttcctactttcatattttctcctgcccctcatcatcatgggttaggaagaggccttaagtaagaaacctagaccctaccctctcccctcccca

SEQ ID NO: 757 - DNA, 1312 bp, Homo sapiens
aaagatacatggcagaattctttcctaaaggaatgataaacagctgcttacataatcaaaaacctcagagcctaatagcatccagggtctttgtggttgaagaaaaacctcttgaagtcacagaaagaaaggtttcccttttatgtgaagatcttgatcttcggtaaatccagcagcactttcccaattaactagggctctctgcttgagcagatatcctaactaaggtggcaaagtgatgttgtttggactcataaggattcaatcttatagaaaccaccagagaatggtgactgagtcaggggacatggatagaaggaacaaatgtgctttcctacgtgaggaaggtttagtttccagggatgtcaaacattattccaacaagcactgatccaggagagctaatcaacttgaagagtaggatgtagactaaatatccaaatccctgtgggcaagagaagcaaaacctatatacacacatataggtaagagttaaaggaaaattctcttcccccttaaggaatctcaagtctctttcctcttaggttataaagagtagtctgtgtccagagctgtgtagaatacaaaatattttttcctgctaactaaaaatgacctctcactgttagactatgtttgctatgaagaaagagaatttgttttggaaaatttctctttgtcatatcttgatcatcaatagcaagttgaaaatataaacaaagaaagtaccatctccctaagaatgaaaatgagtttgaagggaatgaatgaaaactactccctgaataatgagtttttaatttttaatttccaaaatctctcattgtgtgtgcattgtgtatgtwtatgcacaataatttgtatacatgtaagatttctctatgcctgatttacaaaagtagtcgcattagaggatctagttgcaggccagcaactaacacaagcttggtggaaaaggagaccttctgggcaaataggaaagaaaagtactgtttgtctccagcttagttacagggctcatggtttgctgatgtcaaccctcatccatcttcacctccactgctaaaagatttgtatagagtaccacttgcataatgttgcctacttaaccacattgaagagcaaaatgcaatattgtctttttatcttctttaaatcatcttataagaacacaaaaaacaaaacaacaaaattttaaaaagctgcttgataaatatttctactccaagaggtgacatatttaaattagagcttaatccagagattctaaacctaaacctccaagaaccctttgaaatacaatgtcttttgc

SEQ ID NO: 758 - DNA, 602 bp, Homo sapiens
aaataatcacttagaacatagcaattaaacaaaattatcccagactgaaaatgcactctgaacagagagttatcgtcatcatcataatattaataataatyaaataataactcatacttcacatggaaatgcatgtatgttttccatgatttacacaggctggctgaatttaggtaaacccattaacttggaagattaaaaacatcatgggtagtgaactatgaaatgtggttctcatgaaggcaatcgtgtcagaaaactttatcataatgaaactgcttcttcttggaaatgctctatcagacttttggacagactatgttaattgcaaagaacagttattgactgtgtttctagagctcatatagcacagtaattattaaaacaaacaagatgaaattagttatttatctgttttgtcttatattctgagttcaaactctggaatcataggtgcattatataggaatcggtcattatattcactgatgcctaaggacatcattagatttttcttaaaacttactttctcaccctttaagctttcatcactcttatagatgtctcatatattcagtattctctccagcctttctttctca

SEQ ID NO: 759 - DNA, 602 bp, Homo sapiens
aaataatcacttagaacatagcaattaaacaaaattatcccagactgaaaatgcactctgaacagagagttatcgtcatcatcataatattaataataatcaaataataactcatacttcacatggaaatgcatgtatgttttccatgatttacacaggctggctgaatttaggtaaacccattaacttggaagattaaaaacatcatgggtagtgaactatgaaatgtggttctcatgaaggcaatcgtgtcagaaaactttatcataatgaaactgcttcttcttggaaatgctctatcagacttttggacagactatgttaattgcaaagaacagttattgwctgtgtttctagagctcatatagcacagtaattattaaaacaaacaagatgaaattagttatttatctgttttgtcttatattctgagttcaaactctggaatcataggtgcattatataggaatcggtcattatattcactgatgcctaaggacatcattagatttttcttaaaacttactttctcaccctttaagctttcatcactcttatagatgtctcatatattcagtattctctccagcctttctttctca

SEQ ID NO: 760 - DNA, 620 bp, Homo sapiens
gaatttattctaagctacctagaactgctttagaactataatggtctttctcctgctgtaccctgaggcctcaggttcattggctttttgtcagattgccataggtctcagtttgcctgtgacagttgcagttaataactattactgttgcttggtaactgttgcttgatataattgttaatagtgtcccttttattctcaaaagtgacctgrtttggacaataagttatagggttacctactaacttagctcttttactcctgaagtgtctcctctcccttgtattgaggtgtgctcattcctggtagtgctgagccttgggtgtaggcaactatcctcctacattccttctcctatgcctcttctaaggcaattggcacagaggcagagtgtactcacatttctaagtttctggaaaaaaaaatacattgaatacttctgggtttaaaaatgtgaccatttgcctctaagagctaatttgatagagcaaaataataataatgcaaattcatttttaatgaaaaatctattcagttctaaataggaaagaatatcagtgcaatgtaaatgaaggcattataaaatcttcagatcctttttgtcttcttggaattgtttt

SEQ ID NO: 761 - DNA, 549 bp, Homo sapiens
ctactccatcctacccagaactggaactcttcttgtttaactttttaaattgacctttcaaacagtattagtatcattatttttaatattatagtaatatttattggtgacatgtgagtcaataggttgttcagagattaattcaatagacagcatttatgagcagctacttcagctcaaagtttgaacatttaactaagtcataaatctatgctattatgttattgtttggttcattatatggattgctatgttctgttgtcactttgttttactgtaaatcactttaaatatattatactccaaatactacagtattattttttgagttaagtgaaaaaatcacatgcaagtcaattttgctctttacaagcaaagcagatatttcacaacttgaattataattataactttggctatgatggctagactgagaaagattggaaaaaccagataaacccaytagttggaagagttctcatagaagttaccaaaaatctccaaattaaggaatcccagatacgaaaacatctcagcattttggtagca

SEQ ID NO: 762 - DNA, 605 bp, Homo sapiens
cagcttctaattaaacatcagtggtcagggtgccagtaaatcttgttaaataaataaactaatttctcattagatgtcattcaggataggaatcatgttgtttttatgtccaaaagaaagttaaattaaaattttaaataatttcaatttattttttataccactatataatatcttaccagttgcttaaaatctcctcctatatactcttgtataacactctgtcaccttcccagcccagctcacaatgattttcaaggttatcatgcaacttccactctttcatttggctcagcactcacacttataattaaaccttacttggccactgtacatattttcccartttctccttctatcaggtaaatatagtctcaactctcaggattctgtcaaataaattatatctgtgtctattccatctggatcatcccatctcaaatttccagaacgtatcctcatccggttgtttatctttttccaatctatatcttagttatctctttaaaaatactaagaacagatataagaaattttaattattccaagtttcacaaagtttgagacttttattactgttttcaataaatacaacttgttattct

SEQ ID NO: 763 - DNA, 1082 bp, Homo sapiens
tgctaggtactgtgttacmtactgagaataagcactgaaaagatagatccctgctgtcctggagtgatacgtgctgttgaccatgaaaagtggttagtacaagcaagataaaaaaaggaaaaggtaaattttcaaaagaaaaacgctcactgcctttcaattttaaaatagccttctgagaccatggggtccagtggtcatccattctgtgcaaacaactgtaacctcactcatctttttgaaacactctttttcactggtcagttgaaggtcaggcttgaagagcttttttggttttttatttttctggttgcctcattctgtcttttaaaccatgacagaaaaggattaatagccaggagagcagagagcctgacaactcaattccatcacccatgagtccttactgagctgccacctggacagagcccagtgctagatgctcttgctaataatatgtggctgtgtcttctccctgcaggaccttggcacacacaagacttgacaggaaactgctccagagcccatggtgggtgtgggattagggcctgagatgagacttcacgtgtgaatctttgtggggagcaaggaaaaaagaggcaaatatgagtctaaggttaattactttccagagagttcacactttgagcaacattgtggagaagggctggctggtgaccatgtgaaggttaatggcactattatatactcaaagagtctatattgttctatgacaattaacagtaaagggatggacttctttttaataataacataattgatcataaccactcttctggtgcacagagacagggcagtaaaaacgggggcattattagaagacacaaacacacacacacacacacacacacaccccaagcactttgaaaggagactcactccactatcttcagcctctcagatgatcatggcatcagttaaaattgggagagcttaattattcttccggttattgggtgatatggtttggctctgtgtccccacccaaatctcatgttaaattgtaattcccaatgttgtgggagggacctgctgggaggtgatttgataatgggagtgga

SEQ ID NO: 764 - DNA, 1082 bp, Homo sapiens
tgctaggtactgtgttacatactgagaataagcactgaaaagatagatccctgctgtcctggagtgatacgtgctgttgaccatgaaaastggttagtacaagcaagataaaaaaaggaaaaggtaaattttcaaaagaaaaacgctcactgcctttcaattttaaaatagccttctgagaccatggggtccagtggtcatccattctgtgcaaacaactgtaacctcactcatctttttgaaacactctttttcactggtcagttgaaggtcaggcttgaagagcttttttggttttttatttttctggttgcctcattctgtcttttaaaccatgacagaaaaggattaatagccaggagagcagagagcctgacaactcaattccatcacccatgagtccttactgagctgccacctggacagagcccagtgctagatgctcttgctaataatatgtggctgtgtcttctccctgcaggaccttggcacacacaagacttgacaggaaactgctccagagcccatggtgggtgtgggattagggcctgagatgagacttcacgtgtgaatctttgtggggagcaaggaaaaaagaggcaaatatgagtctaaggttaattactttccagagagttcacactttgagcaacattgtggagaagggctggctggtgaccatgtgaaggttaatggcactattatatactcaaagagtctatattgttctatgacaattaacagtaaagggatggacttctttttaataataacataattgatcataaccactcttctggtgcacagagacagggcagtaaaaacgggggcattattagaagacacaaacacacacacacacacacacacacaccccaagcactttgaaaggagactcactccactatcttcagcctctcagatgatcatggcatcagttaaaattgggagagcttaattattcttccggttattgggtgatatggtttggctctgtgtccccacccaaatctcatgttaaattgtaattcccaatgttgtgggagggacctgctgggaggtgatttgataatgggagtgga

SEQ ID NO: 765 - DNA, 470 bp, Homo sapiens
taaccgtctgatggacaccttgattctcagcagctacgaccatgaacttggacaggaagttgcctggagacctgggaagattgtaaagggaatttgatagtgaccatttcattttggctcaacagatgacaaaagtgacccactgagaggggaaggtttatttagctaatctatatgacataaataaattcccacacctaggaatttgggaatcacctgccaaatgttgatttgattatctkgatgtgtgtttaacctgattcaaagcttcctggtagccaagatgaagagggaaatgtgaattataaactcatcatttgagaggagaaatgtactcaactttcgaaggaaactaggacattcataaagaaaattgcaaacattaaaaacatttgatttggcggggcacggtggctcacgcctgtaatcccaacacttcgggaggctgaggcaagtggatcacctgaggt

SEQ ID NO: 766 - DNA, 548 bp, Homo sapiens
agtctgaacacctgactcctagtctctgtatagccaccaattagtagtataatttatggcgctatttctctgagagttctctgtgactcagtttcccctgcaaaatgaggaggtagtactagatcagcatttctcaaaatgcagtccaagaaaagctagtcttttttttttttttttttgagatggagtctcactctgtcacccagtctggagtgcaatggcaccatctcagctccctgcaacctccgcctcccgggttcaagcgattctcctgcctcagcctcccgaatagctgggactataggcacgtgccatcacacctgggtaatttttgtattttttgtagagacggggtttcactatgttggccaggctggcctcgaactcatgacctcgtgatctgcctgcctcggcctcccaaagtgctgggattacaggcgtgagccactgcacctggctgaaaaactagtctttaaaatgttaataggtattccatgaatgaagaactaaaggtcaggtacatttggggaaatckacatgccatcatc

SEQ ID NO: 767 - DNA, 585 bp, Homo sapiens
ccccagtcagcatagtcttacaagaaatcttgggctaagtagacaaaactcaatgaagattaaggactccaaatgcactggttggtaagaacaactaacttttattaagtaccagttgtaactaaacactctttctaaacactttccctgtaatttttttgtaactgttaaaacaggcttgaaaatttttttttaacttwtaatttttgtaggtacatagtaggtatatatatttatggggaaaacaggcttcttatacccatttaacatatgaataaaacaagattgagaggttaagtagcttgcccaaggtcaatagctactgaaccaggattcaagcctaactaaactgatcaggctaatactaaaatcgacactttaaatcttctccctatgctgccttttgcatggataaagttagcaacctccttctgcaggggacactgacacaaagcaagatctgcattaaaagtgtacttaaagcaatgaagtttctggtttagaaataggtagatcaatgggacaaagtaacatgtaaagaaatatacttgaatatatataagaatttatataatttaatgcggt

SEQ ID NO: 768 - DNA, 585 bp, Homo sapiens
ccccagtcagcatagtcttacaagaaatcttgggctaagtagacaaaactcaatgaagattaaggactccaaatgcactggttggtaagaacaactaacttttattaagtaccagttgtaactaaacactctttctaaacactttccctgtaatttttttgtaactgttaaaacaggcttgaaaatttttttttaacttataatttttgtaggtacatagtaggtatatatatttatggggaaaacaggctycttatacccatttaacatatgaataaaacaagattgagaggttaagtagcttgcccaaggtcaatagctactgaaccaggattcaagcctaactaaactgatcaggctaatactaaaatcgacactttaaatcttctccctatgctgccttttgcatggataaagttagcaacctccttctgcaggggacactgacacaaagcaagatctgcattaaaagtgtacttaaagcaatgaagtttctggtttagaaataggtagatcaatgggacaaagtaacatgtaaagaaatatacttgaatatatataagaatttatataatttaatgcggt

SEQ ID NO: 769 - DNA, 544 bp, Homo sapiens
tttgtagttggtaatatataaccatgagcaatttctaaatcatgttaaactaaactagtgaccatactccatgccaagggccttagaaattattcaagttaggtataatgaaaataataataataatttgtattaccattattactatcattagttgagcacttactatatgccagattacatgtgttatcttaatttaatcattaaacaactcttagttgtctggggagctgtggtgttagatttgcctgagaaagttggctggagtatggcccaccgacagtagccatagaaaatagcaaagcaaactagcttcttaatctcacaatcactacccagaaaggaaagaataactttggacatacttaacctgactgaaatataaatctaatgtttgttaacctctgggaagaaagtataaaaaaggacaatatataaagaaagtataaaaacaacaaaaaagagttagaatattarctcctacagtggctcatgcctgtaatcccagcactttatgaggccaaggcaggagggttgcttgatc

SEQ ID NO: 770 - DNA, 606 bp, Homo sapiens
aacactggacctaaaaatgctggggcaatataaaatgaggagggcatacagagaaaattgttatgatagcaactttcactaggtyatgttgcggaaagaagcactgcaaaggtttgtttctagctctcactatatttgagcgatgggttggctgtggctctgttgctccttcatccaggattcaggctgaagtagaagccccatctgaaacatgccattcttatggcagaaggaataaaacaagagagctagcaaaaccgtatgataaacctatggtttctgctccgtgcatgtgcgtgtgagagagcatatatcaacccactcacattctattggccaaagcaagtcacggccaagcttgaagtcactggacaggtaaacatcatcattgctagggaggccctgggtcacatggcaatgcatgcttatgtagaatcctctcacatgtaggaaagtggatactggaaataataccattcatcacagccattgagcttgaaagcatccctttcagaaattatcctcattaagagactcagtagagaaaaccacctgatagatagtgattgaataaggtgaactggacccttgacctcctacacctca

SEQ ID NO: 771 - DNA, 606 bp, Homo sapiens
aacactggacctaaaaatgctggggcaatataaaatgaggagggcatacagagaaaattgttatgatagcaactttcactaggttatgttgcggaaagaagcactgcaaaggtttgtttctagctctcactatatttgagcgatgggttggctgtggctctgttgctccttcatccaggattcaggctgaagtagaagccccatctgaaacatgccattcttatggcagaaggaataaaacaagagagctagcaaaaccgtatgataaacctatggtttctgctccgtgcatgtgcgtgtgagagagcatatatcaacccactcacattctattggccaaagcaagtcacggccaagcttgaagtcactggacaggtaaacatcatcattgctagggaggccctgggtcacatggcaatgcatgcttatgtagaatcctctcacatgtaggaaagtggatactggaaataataccattcatcacagccattgagcwtgaaagcatccctttcagaaattatcctcattaagagactcagtagagaaaaccacctgatagatagtgattgaataaggtgaactggacccttgacctcctacacctca

SEQ ID NO: 772 - DNA, 606 bp, Homo sapiens
aacactggacctaaaaatgctggggcaatataaaatgaggagggcatacagagaaaattgttatgatagcaactttcactaggttatgttgcggaaagaagcactgcaaaggtttgtttctagctctcactatatttgagcgatgggttggctgtggctctgttgctccttcatccaggattcaggctgaagtagaagccccatctgaaacatgccattcttatggcagaaggaataaaacaagagagctagcaaaaccgtatgataaacctatggtttctgctccgtgcatgtgcgtgtgagagagcatatatcaacccactcacattctattggccaaagcaagtcacggccaagcttgaagtcactggacaggtaaacatcatcattgctagggaggccctgggtcacatggcaatgcatgcttatgtagaatcctctcacatgtaggaaagtggatactggaaataataccattcatcacagccattgagctygaaagcatccctttcagaaattatcctcattaagagactcagtagagaaaaccacctgatagatagtgattgaataaggtgaactggacccttgacctcctacacctca

SEQ ID NO: 773 - DNA, 642 bp, Homo sapiens
ttgcccatatattatatatacaactgagtatatatgtagctgaatatgtgtgtgtattcagctacatatatatatatatttcaactgaaaatatatatatatgtgtgtatatatatatatatatcatactctgaagcacaatacttgaaagaggcagtatggcactgtgattaagaacataagctttggacttagatgatctgagatcaaatttcaactccaccatcaggtgtgtgaccttgggcacgttacctaacttttttagcactcaatttcctcatctgtaaaatggggattaaaatgttaactacctaagaaggttatgaagattaaatgagataatgttagaatgttcataaagcatttagcatattgcttcactcagagtaaacattcaagaaatgttaggaattaytacaagcaataaaagttgatataatacagttaaccttcaaagcaaagttagttctgtttcctgctaccagggggtacatatagttctacaaatcttaatttatgagtgattactttttccaaacttcacctctagtattataccagatgttttagggcatgacttcccaaatacacaagtttaacaagaaaaatcaactatcttgaaaaccactagcctgtgtcccc

SEQ ID NO: 774 - DNA, 1253 bp, Homo sapiens
acaaccaccccatgaagtaggtactgttatcatcctctcttatcagatgagacttagggagatyaactgccttgaatgagagagactggctcaaaggagcacagccaatggcaaacacatccatcaaagttatcttccaaaaaaacaaactggttttcttcccctccctaaggataaaatctgaattaaggcaataccagtaagcatgaagagaagaaagccaattttagaaaggtataatctacagacttaggctagccacagcagcactaggatggctgggtctgctttgttttgctgtgggagcgacacatatcattgtacagaccattgggtttgaggcagcaccaagtagtaaacacaattgtctctgccaactctgggacaacagtagctcctgtctaacgtttcctacgaaatctgggcagctgaaggacaggtcacaatgggcaagaagaaaaggaacatgcagtaagaaagacaatttagaagctggtggtgagaaaaacaaaccttaggctgttcgccagttaaataaaagagaattttgtttacccatcacttttaaagtactacagttccccaaaagagtttttttttttcttctgggaaagtgggagtatgcactctcccatccccatggaggataacattgaggtttctggcttgagtaaaggtggaagagttcttgaagtggggaacacaggaaatttgagggaaatgatacgaactccaaatggacacacattacaagtgagaggggctggagataccaatcttggagtcaccagtcctctgggttaattgcatgggtaagatttaagttaattgcatagttattgcaagagagaacttgtccaacaaaaagactaaaaactgaactttggggaacacaatatttagtgctggaagaaaaaggtgacatcagtgacagggatggacaagaactccaaagctcatgctcttaacctgaaggctttactgcatccataatgtgtgtgaacagatttctacaacctttccggaaataggtttattgatgtgtatccagagcctaaaaagtataaatacatactctttgacctatcaatttcatatctaggaatttatcctgtggtaattatcaaagctatgcacaaagctttacatgtaaaagtgtgaaccacagcattatttatcttagtgatttattagaataacatgaatattcaactgaaggcagttggttaagtaaatcatagcacattcacata

SEQ ID NO: 775 - DNA, 1253 bp, Homo sapiens
acaaccaccccatgaagtaggtactgttatcatcctctcttatcagatgagacttagggagattaactgccttgaatgagagagactggctcaaaggagcacagccaatggcaaacacatccatcaaagttatcttccaaaaaaacaaactggttttcttcccctccctaaggataaaatctgaattaaggcaataccagtaagcatgaagagaagaaagccaattttagaaaggtataatctacagacttaggctagccacagcagcactaggatggctgggtctgctttgttttgctgwgggagcgacacatatcattgtacagaccattgggtttgaggcagcaccaagtagtaaacacaattgtctctgccaactctgggacaacagtagctcctgtctaacgtttcctacgaaatctgggcagctgaaggacaggtcacaatgggcaagaagaaaaggaacatgcagtaagaaagacaatttagaagctggtggtgagaaaaacaaaccttaggctgttcgccagttaaataaaagagaattttgtttacccatcacttttaaagtactacagttccccaaaagagtttttttttttcttctgggaaagtgggagtatgcactctcccatccccatggaggataacattgaggtttctggcttgagtaaaggtggaagagttcttgaagtggggaacacaggaaatttgagggaaatgatacgaactccaaatggacacacattacaagtgagaggggctggagataccaatcttggagtcaccagtcctctgggttaattgcatgggtaagatttaagttaattgcatagttattgcaagagagaacttgtccaacaaaaagactaaaaactgaactttggggaacacaatatttagtgctggaagaaaaaggtgacatcagtgacagggatggacaagaactccaaagctcatgctcttaacctgaaggctttactgcatccataatgtgtgtgaacagatttctacaacctttccggaaataggtttattgatgtgtatccagagcctaaaaagtataaatacatactctttgacctatcaatttcatatctaggaatttatcctgtggtaattatcaaagctatgcacaaagctttacatgtaaaagtgtgaaccacagcattatttatcttagtgatttattagaataacatgaatattcaactgaaggcagttggttaagtaaatcatagcacattcacata

SEQ ID NO: 776 - DNA, 1253 bp, Homo sapiens
acaaccaccccatgaagtaggtactgttatcatcctctcttatcagatgagacttagggagattaactgccttgaatgagagagactggctcaaaggagcacagccaatggcaaacacatccatcaaagttatcttccaaaaaaacaaactggttttcttcccctccctaaggataaaatctgaattaaggcaataccagtaagcatgaagagaagaaagccaattttagaaaggtataatctacagacttaggctagccacagcagcactaggatggctgggtctgctttgttttgctgtgggagcgacacatatcattgtacagaccattgggtttgaggcagcaccaagtagtaaacacaattgtctctgccaactctgggacaacagtagctcctgtctaacgtttcctacgaaatctgggcagctgaaggacaggtcacaatgggcaagaagaaaaggaacatgcagtaagaaagacaatttagaagctggtggtgagaaaaacaaaccttaggctgttcgccagttaaataaaagagaattttgtttacccatcacttttaaagtactacagttccccaaaagagtttttttttttcttctgggaaagtgggagtatgcactctcccatccccatggaggataacattgaggtttctggcttgagtaaaggtggaagagttcttgaagtggggaacacaggaaatttgagggaaatgatacgaactccaaatggacacacattacaagtgagaggggctggagataccaatcttggagtcaccagtcctctgggttaattgcatgggtaagatttaagttaattgcatagttattgcaagagagaacttgtccaacaaaaagactaaaaactgaactttggggaacacaatatttagtgctggaagaaaaaggtgacatcagtgacagggatggacaagaactccaaagctcatgctcttaacctgaaggctttactgcatccataatgtgtgtgaacaratttctacaacctttccggaaataggtttattgatgtgtatccagagcctaaaaagtataaatacatactctttgacctatcaatttcatatctaggaatttatcctgtggtaattatcaaagctatgcacaaagctttacatgtaaaagtgtgaaccacagcattatttatcttagtgatttattagaataacatgaatattcaactgaaggcagttggttaagtaaatcatagcacattcacata

SEQ ID NO: 777 - DNA, 618 bp, Homo sapiens
ttaatgagcagaaaatactatcttttccagatgtggctactcaatacaatgtgaaggagaacaaaataacgttgtattctttctgaagtcatgtttttgttttgtgatctcctccacccaccctccttagagaaatttgacaatgaagtctcctctttctgtgttagcatgaatgcaaaaaaacaaaacctaagccttctccaacaatgctgctcttcaagattgctgagcatacttgcaaaaacaactgtaccctggaaatattctgacgatatgagcatccccattgtggtgacatagtttaagaattctattctcttcaatttcttggaaaggatcaaaattgcccatataatggaaatacccactgcagaaaactggatatatatttccttttgctcctaagtgtccactgtgaccctgctgctcttgccagtttcccctattccaactattttaaggtttgtyataaaaatctgtctctgtccttgacatttctaactcaaaaatgtcacagccatttctttttccttcattgaacagggttcctacttacttattttggcaattcgcataaatccataggttttcccaaataatgggttaaaaagtttttta

SEQ ID NO: 778 - DNA, 933 bp, Homo sapiens
tgcatacaagatagatgttggcccccccaatcttatctgcctgataaagggaagtgctgctgagggatggggagggcctccgtggaaagtgaattagggcttttggtgtggaagcaagcctctctctgctaggactaacatgccatatagggtgggtattctaaatgcaaagcaagtccccaaagttactctatcactaactgatcctgtgaattatcttgcccttaaaaagttcgtcattctgcttgactcttcaggctgatttttcttcctcagaaaaaagcaaaggagagaacgaaggaactagtcagggttgcctgggccttgaataacaggctgcagtgccacctgtctactctaatttctccttcatgtggacctgggctattcatagggaaaaataaggttttcctctttctggttttactcttttgttgttactataacacagaaaattaatattgatggaatgtatatgtgaatcaaagcaactagggaatgctctgaaaagaacatgtcataaaacagacaagaaaaaataaatgattaaattactgacattcggtcctagctgaggatctgccctctcagcacttcaggctacatgttggaaaggcattcactttcaatgacaacaaacagttaaactccaaatgcttcaatgccaggaatccatacattagttgtcattagttgtggacttgagcctaattcagggcaaacagtttgatttgtaagagctcactgaatatacrttcttcactgccattcacctgggcatctgctctttcccagttcagagcagcaaaatggagggaaggtgctttttgcttttccagagagctagacagattggaaattaactataactaacagttatgataatcaacaatgggcaaacatattaacttagattgaatactattacatgca

SEQ ID NO: 779 - DNA, 578 bp, Homo sapiens
ctatccctgcagttacttggtaagagtgagttagaagccctgaataaaaaaagtccatgtggggattaggatcagagactggagggaggcacacacattacctttttctgaatattggtgattcagtctttcaattattcaacatttaaaagcatatgttaaggctctcatttatttgtaatgtaaacaagatattatctctgtgcttaaaaagctcacagactattttgagtaaacattatctcaacagagatacctgtgatgctaaattggttcactatctctcattcattcaacaaataattattgaatatctagctgactaggaattcttctaggtcctggggacactatsgtatataaaacaaagttcctgttttagtagagctgacatttctttgaacaagacagaaaagaggcaaatgagtaaatatgtaatgttagatgatgatcaatgctgtggaaaaattaatgagtgtaagggagagagggaatgactggttggaaggagcaagtcgaagtgtattggaaaaagtgatcatgtgatactggagtagagaattgagtgaaagaaaatg

SEQ ID NO: 780 - DNA, 1175 bp, Homo sapiens
gaggcatgacctttcagggtcagagatgagcatttcaagatggggctgggaacgaagcatgaagtgagagagagatgtgggagtgtcaagtgagacagcaatcccacccaaatgatgggagaacagcaacaagaacctgattcatgattttttwaaaaaaaaattgaaaaataaacaagtttcctctgttcacaggtcagccatcacattataaaaatgtgtattacataagcagtaaaagacgacataaaagagacaaaatgccagcttcatagtgaagagtaggtgaaggtaagaaaagagatttaaaatataattcccccaaagcttggcaagctatcaatagcatcaagaagttaagaacttaaatattttccaaattgaatatttaggttaaatcaccttgtctatcttaacgggacaaaaggaagagaagattcacagtagaaactgaaaatgaaaaaactataatatcacaatatagaaaacagaggggcaacctcacagaggtttatgcaaatttataaacaattgttaatactccctatattaatctattaaaaccaaccatcaatttaaaaaaaacaaaattcaatcatcttttgtcaaggaaaaacactaagaaaatgaaaagacacagagtaaaatgatagcataatctttggtttatcaggcacattttgtgctagaaaggaagggaataggacaaagtaattttttttttagtaaaaagaattgagaaagtaacatggagactccacaagagtgaaagttacaataaataatgaaaacttaaaacactcaatttctgttccaattagcacagcaaacaagtacataatgggaccatgcaggaaatgcaaaagaaattttaaaaaatggaaatataatgtagctggagcccttagtgcccctcctgtggaatacccatgatcaaaatagacagaaattagagctctgaacaacccaactaataaggtagactagcagatcagggagaagtacatcataaatcaagggtctatgctctctttagaagaatagaagtgtctttcacaaaatttaccccattcccgagcacaggcaatggcaattttacactcctcattctcggaccacaaagaaaatagctgtttgttggtcctgaccacttagctgcagtgccatattaaaaa

SEQ ID NO: 781 - DNA, 1175 bp, Homo sapiens
gaggcatgacctttcagggtcagagatgagcatttcaagatggggctgggaacgaagcatgaagtgagagagagatgtgggagtgtcaagtgagacagcaatcccacccaaatgatgggagaacagcaacaagaacctgattcatgatttttttaaaaaaaaattgaaaaataaacaagtttcctctgttcacaggtcagccatcacattataaaaatgtgtattacataagcagtaaaagacgacataaaagagacaaaaygccagcttcatagtgaagagtaggtgaaggtaagaaaagagatttaaaatataattcccccaaagcttggcaagctatcaatagcatcaagaagttaagaacttaaatattttccaaattgaatatttaggttaaatcaccttgtctatcttaacgggacaaaaggaagagaagattcacagtagaaactgaaaatgaaaaaactataatatcacaatatagaaaacagaggggcaacctcacagaggtttatgcaaatttataaacaattgttaatactccctatattaatctattaaaaccaaccatcaatttaaaaaaaacaaaattcaatcatcttttgtcaaggaaaaacactaagaaaatgaaaagacacagagtaaaatgatagcataatctttggtttatcaggcacattttgtgctagaaaggaagggaataggacaaagtaattttttttttagtaaaaagaattgagaaagtaacatggagactccacaagagtgaaagttacaataaataatgaaaacttaaaacactcaatttctgttccaattagcacagcaaacaagtacataatgggaccatgcaggaaatgcaaaagaaattttaaaaaatggaaatataatgtagctggagcccttagtgcccctcctgtggaatacccatgatcaaaatagacagaaattagagctctgaacaacccaactaataaggtagactagcagatcagggagaagtacatcataaatcaagggtctatgctctctttagaagaatagaagtgtctttcacaaaatttaccccattcccgagcacaggcaatggcaattttacactcctcattctcggaccacaaagaaaatagctgtttgttggtcctgaccacttagctgcagtgccatattaaaaa

SEQ ID NO: 782 - DNA, 638 bp, Homo sapiens
cacactggctcatgcctgtaagcccagcactctgggaggtcaaagagggaggattgccagaggcaaggagtttgaaaccagcctggccaacatagaaagaccccatctctctctttttttttttaattagccaagcacggtggcacacacctgtagtcccagttatttggcaggctgaggcaggaggattgcttgagcccagaagttagagtctgcagtgagctaggattgtgccaccgtactccagcctaggtgacagaggsaaactccaccacaaaaaaaaaaaaaaaaagtttagattcttttttttttgtatgggcgggggttccacaaaaagtactttgtgagacttcaactggaactaccttaaatttttttattaatttggggataaatgatatccttgagctttgtttacttaggtcttccattatgtcccttagtaatccttttcttcataaaaatacatattttattagatttattcctatctatctcactgattttgtagttcttataaatagtacaggttgagtatccctgaaatgcttggaaagaagagtttcagggccggatgcggcagctcatgccctgtaatcccagcactttgggaggtcaaggcgggtggatcacctgag

SEQ ID NO: 783 - DNA, 651 bp, Homo sapiens
agactctgtctctagaacaaaaaagcaaatgaaataaaaactatacttacgactttttaaaaagtatacatggaggtgagaataacaaagaaatatgtcaaagtgctgagagtaattgtgttaggatggtaggatcctggataatcaaaatttgaggagaaaaagcaattatttaaggggggaaaaagggttaaaaaaaaaaaaacagttcaatgtgccctaattaacatcaccaattcaatagttttcagtgaggaacaaccgtttttggtatttaattataaagatgatacagttattcagtgtaactaaaggtaattttttccccccgagatggagtttcgctcttgttgcccaggctggagtacaatggcataatcttggctcactgcaacctcctcctcytcccaggttcaggtgattctcctgcctcagcctcccaaatagctgggattacaggcgtgtgccaccacgcccagctaatttttgcatttttagtagagacagggtttcaccatgttggtcaggctggtctcgaactcctgatctcaggtgatccacctgccccagcctcccaaagtgctgggattacaggcgtgagccaccatgcccggccaactaaaggtaatttaatacatacatgcctttact

SEQ ID NO: 784 - DNA, 1057 bp, Homo sapiens
tgcatatcacttgtaaccaaaattttttcaaattatgaatacaaagctttccttatatccccatgacaaaactttgtgttaaatccatggtgcattggttgggagaccaaagactgtaacaggttgcctccctttactattgagtagggctcaaggtggcttcctggcagcattcacaactgttattctcctttaattctttctttctttctttctttttttcgtgaaagtcttgctctgttgcccaggctggagtgcagtggtgtgatctcagctaactgcaacctccacctcccgggttcaagtgattcttgtgcctcagcctcccaagtagctgggacaacaggcacacgacatcacacctggctaatttttgtatttttagtagagatggggtttgtccrtgttgcccaggctggtctggaactcctgatctcaggtgatccacctgcttcggcctcccaaagtgctgggattacaggcataatccactacacaccttgcctcccttaattctctttgtgaatctgttcagttatcaaatgataaaatagaaagacaatatgcacagacacacacgcagagagtgttctcttaaaacatttctttagattacactggggagacaaagaagggacctaaagtgaaaaataggtagatctctcatcagaactctgatctaagggcttaggaaggggcaggatccaattatgagggcttcaggacaccaggattcagaatggaagatatgaggcaaagcacagtgcaagaccttgatccactggccacagtcaaaggggttctccattacccctggtattgcccatgatacagccccccaacatgtgccaccttactgctactattattgtttttcctggattaaataagctaccatgggtgtctgactttaaaaatggggacctatggaagcagtcagaaccaggtcagaatcccttgtgaacatgggcaagtatcttagcttttttggtctgtggtttcctcatctttaaaataaagataattggcctctgaagacctttgtaatatcagagat

SEQ ID NO: 785 - DNA, 1057 bp, Homo sapiens
tgcatatcacttgtaaccaaaattttttcaaattatgaatacaaagctttccttatatccccatgacaaaactttgtgttaaatccatggtgcattggttgggagaccaaagactgtaacaggttgcctccctttactattgagtagggctcaaggtggcttcctggcagcattcacaactgttattctcctttaattctttctttctttctttctttttttcgtgaaagtcttgctctgttgcccaggctggagtgcagtggtgtgatctcagctaactgcaacctccacctcccgggttcaagtgattcttgtgcctcagcctcccaagtagctgggacaacaggcacacgacatcacacctggctaatttttgtatttttagtagagatggggtttgtccgtgttgcccaggctggtctggaactcctgatctcaggtgatccacctgcttcggcctcccaaagtgctgggattacaggcataatccactacacaccttgcctcccttaattctctttgtgaatctgttcagttatcaaatgataaaatagaaagacaatatgcacagacacacaygcagagagtgttctcttaaaacatttctttagattacactggggagacaaagaagggacctaaagtgaaaaataggtagatctctcatcagaactctgatctaagggcttaggaaggggcaggatccaattatgagggcttcaggacaccaggattcagaatggaagatatgaggcaaagcacagtgcaagaccttgatccactggccacagtcaaaggggttctccattacccctggtattgcccatgatacagccccccaacatgtgccaccttactgctactattattgtttttcctggattaaataagctaccatgggtgtctgactttaaaaatggggacctatggaagcagtcagaaccaggtcagaatcccttgtgaacatgggcaagtatcttagcttttttggtctgtggtttcctcatctttaaaataaagataattggcctctgaagacctttgtaatatcagagat

SEQ ID NO: 786 - DNA, 1057 bp, Homo sapiens
tgcatatcacttgtaaccaaaattttttcaaattatgaatacaaagctttccttatatccccatgacaaaactttgtgttaaatccatggtgcattggttgggagaccaaagactgtaacaggttgcctccctttactattgagtagggctcaaggtggcttcctggcagcattcacaactgttattctcctttaattctttctttctttctttctttttttcgtgaaagtcttgctctgttgcccaggctggagtgcagtggtgtgatctcagctaactgcaacctccacctcccgggttcaagtgattcttgtgcctcagcctcccaagtagctgggacaacaggcacacgacatcacacctggctaatttttgtatttttagtagagatggggtttgtccgtgttgcccaggctggtctggaactcctgatctcaggtgatccacctgcttcggcctcccaaagtgctgggattacaggcataatccactacacaccttgcctcccttaattctctttgtgaatctgttcagttatcaaatgataaaatagaaagacaatatgcacagacacacacgcagagagtgttctcttaaaacatttctttagattacactggggagacaaagaagggacctaaagtgaaaaataggtagatctctcatcagaactctgatctaagggcttaggaaggggcaggatccaattatgagggcttcaggacaccaggwttcagaatggaagatatgaggcaaagcacagtgcaagaccttgatccactggccacagtcaaaggggttctccattacccctggtattgcccatgatacagccccccaacatgtgccaccttactgctactattattgtttttcctggattaaataagctaccatgggtgtctgactttaaaaatggggacctatggaagcagtcagaaccaggtcagaatcccttgtgaacatgggcaagtatcttagcttttttggtctgtggtttcctcatctttaaaataaagataattggcctctgaagacctttgtaatatcagagat

SEQ ID NO: 787 - DNA, 1057 bp, Homo sapiens
tgcatatcacttgtaaccaaaattttttcaaattatgaatacaaagctttccttatatccccatgacaaaactttgtgttaaatccatggtgcattggttgggagaccaaagactgtaacaggttgcctccctttactattgagtagggctcaaggtggcttcctggcagcattcacaactgttattctcctttaattctttctttctttctttctttttttcgtgaaagtcttgctctgttgcccaggctggagtgcagtggtgtgatctcagctaactgcaacctccacctcccgggttcaagtgattcttgtgcctcagcctcccaagtagctgggacaacaggcacacgacatcacacctggctaatttttgtatttttagtagagatggggtttgtccgtgttgcccaggctggtctggaactcctgatctcaggtgatccacctgcttcggcctcccaaagtgctgggattacaggcataatccactacacaccttgcctcccttaattctctttgtgaatctgttcagttatcaaatgataaaatagaaagacaatatgcacagacacacacgcagagagtgttctcttaaaacatttctttagattacactggggagacaaagaagggacctaaagtgaaaaataggtagatctctcatcagaactctgatctaagggcttaggaaggggcaggatccaattatgagggcttcaggacaccaggattcagaatggaagatatgaggcaaagcacartgcaagaccttgatccactggccacagtcaaaggggttctccattacccctggtattgcccatgatacagccccccaacatgtgccaccttactgctactattattgtttttcctggattaaataagctaccatgggtgtctgactttaaaaatggggacctatggaagcagtcagaaccaggtcagaatcccttgtgaacatgggcaagtatcttagcttttttggtctgtggtttcctcatctttaaaataaagataattggcctctgaagacctttgtaatatcagagat

SEQ ID NO: 788 - DNA, 589 bp, Homo sapiens
tgttttactaatattattccgctagcggccagctagataggcactatgtcacatttagaaatacatgtcatgatatcgcagaactaaatcaatcatccagatggcatgtctaccaaatgtttattctcttctactcgaacacttctgcctgagatagcctcatccatttttggacagccytaataattaaaagctcttctgtattttgagctaaaatttgttttctgtagtgtctactcatttatccgagtgtaattgtgcttccacatgacacagcttttcatatactcagaaatgggcctcttactttccctatatcttctctttgctaagctaagcattcttcaatttttcacatgcttatcacatggcattgttttcagtctctaatcactcaccctacctccctttaaaatggccacggttttggtatccagaattattcaccataatactctgaatttagttgatcaatacagacacaactatcaggtattttaggataggcattgtatttctatggaagcagagcaagctaaataggtttttggcaggaaaatgacatcatgggtgcatattctacttgcaa

SEQ ID NO: 789 - DNA, 651 bp, Homo sapiens
tggatattagtgttgcacagtctggttaccaggaagtattactacagtgttttctgctttaaacaaagaactaaaaatatgccctgcaactctttatcaggtaagaatatcaattgtctgatgtgatttaatatctatcatttacagatttattatgtctttctcttgaaatcacaaatgctcaaaaaacctcctattcatgtaattcatgtaaaatatgatggcttatgattggacactttgtttttactctgagaagttagattattattgaaaatatataaatgcgtatagctaatttgccaaaagctgtgttttaaatccagtaaatgtgtttttaaataatgcaacttctgacctggttagtattcaaaaccaaaaactgaaattctgccaccctctttgcagtctattgatttgagaactacagctgctgaaattaaactttattgttagcatagagctttcagctgaggaagcaatttcaaattggtttcttttctagcccagcttaatattaagtaaatatgtgcctataagtgtctctagctagattattacctaaagtggtgcatgcaastttgcaggtgcagctccgggaaacgaaaatctactttggtgatgaatcttcctatccaatgggtaaacaca

SEQ ID NO: 790 - DNA, 757 bp, Homo sapiens
agccggctctgcctcattcacagctgtatcccctgcggctgacacagagctgggacagagcagccattcaataaacatctgatgaagtgacttaaggtagcgcctctgccaggcaaagggccacaccaaatggctaacactcgagtgaggaaaggtatcacaaactgagcttgccacttctggcatttgattcttttagcctttaatccaatatagtaatcccactattcagtgtttcctggtgttgctttaaattagaaaccctgccctgagagcttgatgagctgacagacacttctgtcatccctctgcttgtctctgtttgcttctgttgttttgattgtgagtctgtcgaaacctgtcaactcaactaaagaaaaaagaaaggtgctatcacaacaggctaacagctactacgaaaactgcatctctatcgcaaactgtggggggtgggagtgggctgctccaggacaggwatcctagcctctctttgctaggcatcctagcctctctgtgacttttcccagcttcttggcccgcaggcttgaagatatgtgccccaggccccatggcctgttctgggcctggcagaagggctctttccactgctgggcccacaccccagccccctccctcagcaggtgtctgacacagcattatttcctcttctggagaagacccaagtctctcaagcacttcatccatgctgactctttggaaaggagtgctattaccaaaggctttgtcaaagaaaata

SEQ ID NO: 791 - DNA, 393 bp, Homo sapiens
caacaagaccattgcttcgacaaatagaaaatttgcaagcaaccctgggatcccagacatcgtcgtgggagaaattagagaagaatctttctgataggcttggtaactgctttagtttttatgctcgatgcagaagctcttccatcttgtttatagaattagaataatggtatgaaattgaaattcatttgatctgatagttacattttgtgtctaatatgtagatttttacattttctctttttctacatgtatttttaatacctttattatgtctctttcaaaccattttttcccattacacaatggtatcagatactggctaaagtacttccatgtcattctttcattcagttcttttttwtttttttttttgatacaaagtctcactct

SEQ ID NO: 792 - DNA, 1578 bp, Homo sapiens
taattgagacaggatctcactctgttacccaggctagagtatagtggcaccatcacagctccctgcagccttgacctctgagctcagatgatcctcctacctcagctttccaagtagtggggactataggtgtgtgctgccacacctggctaatttttgtggggtgtttttttttttttttggagagatggggtttcgccatgttgcctaggatggcctcaaactcctgggctcaagcgatgcatccgccacctcggcttcccagagtgctgggattacagacatgagctaccacactggcttagaatcttttgtgatgctgggaattagataatattaatctataagagtttcaaggcctcttcattcactctccactctctacaacctgctgaaggggattgtggttttgattcatcagattctttccttcctcaggcgtataagggaattttttctttcccagaccaattccggggttgtctcagaagacagggcataatccagataaaataaaacagaaagaaagtgcagagaggccaagtagacccaggtaacacagaaccaagagggaggggaagagggcagagagaatagcacatgtgctgggtattggggaaggttggggcactggggtgctatagactggcacaagaggatctggaggatgagcagaaaaccaggatttggattggagaaggaacagcttcgctgtggttcatgaactgaaattccattaatgttgttggcgagatgggacaagtagagatggacttttgtggttggtctgtgccaagcggcggttgtgggttggagagcagctgcttttatgtttttgtatttccttttttatatattcattttatttctgattatgaaataatatactaattatagaaatttctatttcttttttttttggaaacagagtctcactctgtcacccaggctggagtgcagtggcgcaatctcggctcactgcaccctctgcctcccgggttcaagtgattctcctgcctcagcctaccaagtaactgggactacaggtgcctgccaccatacctggctttttttttttttttttttttgagacatagttttgctcttgttgcccaggctggagtgcaatggcaccatctcggctcactacaacctccgcctcccaggttcaagcaattctcctgcctcagcctcmgagtagctgagattacaggctcccgccaccgagcccaactaattttttgtatttttagtagagacagggttttaccatgtaggccaggctggtcttgaactcctgacctcaggtgatctgcccgcctcagcctcccaaagtgctgggattacagacatgagccaccatgcccagcccaggcccagctaatttttgtatttttagtagaggtggggtttcaccacgttggccaggctggtctcaaactcctgacttcaaaagatccacccaccttggcccccacaaagtgctgggattacaggcttgagccactgtactcagcctagaaacttctacttctgagctatctaacttatatgataaatctacctaacagacaatgc

SEQ ID NO: 793 - DNA, 1578 bp, Homo sapiens
taattgagacaggatctcactctgttacccaggctagagtatagtggcaccatcacagctccctgcagccttgacctctgagctcagatgatcctcctacctcagctttccaagtagtggggactataggtgtgtgctgccacacctggctaatttttgtggggtgtttttttttttttttggagagatggggtttcgccatgttgcctaggatggcctcaaactcctgggctcaagcgatgcatccgccacctcggcttcccagagtgctgggattacagacatgagctaccacactggcttagaatcttttgtgatgctgggaattagataatattaatctataagagtttcaaggcctcttcattcactctccactctctacaacctgctgaaggggattgtggttttgattcatcagattctttccttcctcaggcgtataagggaattttttctttcccagaccaattccggggttgtctcagaagacagggcataatccagataaaataaaacagaaagaaagtgcagagaggccaagtagacccaggtaacacagaaccaagagggaggggaagagggcagagagaatagcacatgtgctgggtattggggaaggttggggcactggggtgctatagactggcacaagaggatctggaggatgagcagaaaaccaggatttggattggagaaggaacagcttcgctgtggttcatgaactgaaattccattaatgttgttggcgagatgggacaagtagagatggacttttgtggttggtctgtgccaagcggcggttgtgggttggagagcagctgcttttatgtttttgtatttccttttttatatattcattttatttctgattatgaaataatatactaattatagaaatttctatttcttttttttttggaaacagagtctcactctgtcacccaggctggagtgcagtggcgcaatctcggctcactgcaccctctgcctcccgggttcaagtgattctcctgcctcagcctaccaagtaactgggactacaggtgcctgccaccatacctggctttttttttttttttttttttgagacatagttttgctcttgttgcccaggctggagtgcaatggcaccatctcggctcactacaacctccgcctcccaggttcaagcaattctcctgcctcagcctccgagtagctgagattacaggctcccgccaccgagcccaactaattttttgtatttttagtagagacagggttttaccatgtaggccaggctggtcttgaactcctgacctcaggtgatctgcccgcctcagcctcccaaagtgctgggattacagacatgagccaccatgcccagcccaggcccagctaatttttgtatttttagtagaggtggggtttcaccacgttggccaggctggtctcaaactcctgacttcaaaagatccacccaccttggcccccacaaagtgctgggattacaggcttgagccactgtactcagcctagaaacttctacttctgakctatctaacttatatgataaatctacctaacagacaatgc

SEQ ID NO: 794 - DNA, 668 bp, Homo sapiens
gaatcctattaatccttcacaaaggcagctttaccccctcaaaaattccagagacagggcccggcatggtggctcacacctgtaatccttygggaggccgatgcgggtggatcacttgaggtcaagagttccagaccagcctggccaacatggtgaaacctcatctctactaaaaatacaaaaattagctgggtgtggtggcaggcacctgtaatcccagctactcaggaggctgaggcaggagaatcacttgaatccaggaggcggaggttgtagtgagctgagatcgtgccattacactccagcctgggtgacagagcaaaaactccgtctcaaggaaaaaacaaaagaaaaaaatatccagagacaggaagtaattggaatatgggtccttgaattggttattctttgctgacaactccatctcccaactctaatctattttctgctcttgcctgtgcttctgcttggctctctgtcctctggagctgatggactgaacctctagattccctcacccctggtttctaattgggtttggccaatgaagtgtcttcttttgtggcttcaggcccacaggtggtgatagcttcccatgatttctaacccctaagggcttcaccgccccttcctggttttcttcactcaagccatgcctttgcaaagag

SEQ ID NO: 795 - DNA, 617 bp, Homo sapiens
gattagtagcccttgtctgctcatttaatccaagtagttatgtacctgaaaaattaactctttggaggtacatataacgggatgtgcaaaattaaggctaatggatcacaagcctcaaatatttcctatcttcagttccttccattatgtattataatgctagaaaactcacttcagttttaactcatggaggacacacttacatcaacttcttcatcaacagtttcctggtcactgtctttgtcatcctccctctcctcctgcttcctttctttccgttttggcaattcttcatgtatgtccttttcttctattattccatttgtcagaccggaagactggaaaaggatgctattggccaaatgagggcccttgatggctgggaaagaaagcaagcccatgtaaacaggtaagagctccactggcctgtcagctgatgaagacagcagcgacacacaattctcacctcttatgctctgtgcattgttcttttccagttcttccagattgaagccrcttttcatgtctaccacaatactctcattaaaatatggaggaggagtccaagatgtagggggatggcaatagtaagctaatgaggcactgatattaaaaat

SEQ ID NO: 796 - DNA, 1563 bp, Homo sapiens
  misc_feature (1)...(1563): n = A,T,C or G
ctgtatgcccatatttatttcttataaataagcctgattctattaccaggtaggttcccttcaaggctacacgatttttcccaattggattataggttgtggttacagatgtgcattacatgatggaattcacctaacaacaaaatgaaatatattctgctcaagaggtggcctcttgttcgcttgtcttaactttaatcgtggggaagccaaagtaaaagttgatatatttatgtcgtgtgtacttttcacatgccacaggaacataattgcttctactttccttaacattaaatgaatgaaaagctacattgcatgcccataaaaatgaaattctcttaactgtcttcagcttacttcttacctgagtactgacataagttgattatttttgccaatatagagggaacatatcccataaactcagagttggaaaatgcagaaaaacagaaacatgtaaattagttataactccttcacacacagatatgctatgttgttttcttttctatatatttttttgtttgtgtgtttcacacagtggtaatcttattacataaattattttgtatctggcgttaacactttccatacctgtccacgtgacttttaagtttgaccagtgaaaaaagcaatgtatttaatataaatatctattagtactgttagaaaattttatcagggcaagttacacacacaaacaagcaggcattaagtaagcagtaactaatgccattcactgggtggtttataatttacacacttatgagggaatcagtagttattagttattaaatttatttgtgtgtttgtttattgattgattgtgaaaagttactaatggtgaactactaagagcnnnnnnnnnnnnnnnnnnnnnnnnnnnnnnnnnnnnnnnnnnnnnnnnnnnnnnnnnnnnnnnnnnnnnnnnnnnnnnnnnnnnnnnnnnnnnnnnnnnngaataagtggtactcatcccacattttttttcagagacaccaagcctaacattattcgtttacctgcaaaactgagccttgctgattcttgcacaggaatctcgggaaatcaaccaaatttaagataaagaatggacttgtttcactgattcatgtttcaacatcatgggacaaacaagagacataatctatgggtgacctgcatgtctcaacacagaacartggtgcaattgcacagtgaactctctgatcgctacaaccacctgcgtgttttattgcatattaggtgtcctaaggacactttcatgacaacaaaccagaaaaaggccataagcagttcaagtatgaacttgaaatgaggttatcagagtatgactgtaaaaggctctccccatttcagaatttaagagaggagtcatcctgaactgataatgaatgacacctctgaggaagggaaaggaggcgtatttccagggaatgctttttatgtcacagtcattttgtttgagcagaaagggatttgctgtcggtctttaaataaacagttctttgttctctgcctctgtgtgcgactcttctttctctaactctaaagcaaaaggct

SEQ ID NO: 797 - DNA, 2263 bp, Homo sapiens
tagtgtgcctgaagtggtaatatatttatgagctgctttgagaatgaacgcaaattattaactgggcagcacgcaagagaattgattaacggaagagctgttttctatgtctccagtgccacccatcaccttgcaaacactgaacaaaatacttttgccttagaggtaatttaactaacaatgagactaaactagcagaagatactttgcatgttactaattagaaaatgcactcgttcctgtcctcgcccctccttctctcccaagctaacatgtctttattattcagatatctagttctcttctccttcaagaatcttcactgatcctcacagctgggttaaatgctgctgctgtctcagctatggggctctgggctggctgtccccaccccgattgctgcattgcatcccagctctctatttcttcatttgccgccctggttggtaattgtgagctccatgagtgtgggaactattcattttatcccagaatccacagcacctagctcgctgcctggtcgatgtggacattcaccaaactttgttaagcaaatgaataaatggacgagtcaatgaatgaatcaaagaatgagtggaagggcccctttaataaagcattgcagtgctaggtacacagtagtcatttatagaactggtggcattgaacagagagctaactaggaggcgatgctcgactacagagagcttagaaattctattgagattatgttgagtactatatgcctgtcatgtttgtattggcagctacaagaatgtacttcttgccttaaatttttttttttttttttttttttttgtgagaccgagtctcactctatcaccaggctggagtgccgtggtgcaatctcggctcactgcaaccttcacctcctgggttcaagcaattttcctgcctcagcctcccaagtagctgggactatgcaccaccatgcccagctaatttttatatttttagtagagatggggtttcaccatgttggcraggatggtcttgatctcctgacctcgtgatccacctgcctcagcctcccaaagtgctgggattacaggcatgagccactgcgcccagtcaaaatattttgtattttaaagtaagactgcaataggattcaaccattacggtaataatggtaaaaataataccatattgtaatcatcctgtacatttgttccaataaagctttatatttatgcattattttaaaataggtcatcttgtgtaatttcccccattttctgagaagaaacagagctctgagagattacggaactttccctgggtaataggcctgtggcctcccagggtctgtaagaaaccagtgtctatactggcctaataccccttggaagctgtctatgctgtttgtgattattaccagactgattctgtggtaagatcgacatgtttttctgaaagctgatgataattaaagagtaaatttgtcaaaaataaattgaccaaaatgacaagtgttctcagtcaaaactttcttcacataatgttaatttttgaacacaatgatccagtattcaagctttgtatgaatctttttaagcattggcatctgtgcctcagaatttatttttacttttaaaacaattgtgcgtatcttttatgttgctataggatttgtttttcatactttttcttttctaattctaatttaccttcaacttcaattatgctagcttccacttttctaaaaatgttgtgacatatctaattttcatgtaaaagaaaaaaatttcaaaaataaaagctgagaatcacaacttccaatcatgatgatttcttggcaactctacattgatttttttaatctatgttagtttgtccattttctaagttcttttactaaaatgtgttttaattttacattcatttcagatagctattcctattttacttcttttgattttgttttcaccatgttagactctgaatttattttattttaaattactcttatgtaatgtaagcataatttttgccacctcatggcattatattgccatcatttgatagaaattctgaagtctgaattaaagccctcgtaaaagttatgttccatgcagatttaagacaaaccataggcttagaaaaataaaccaaaatgaatgttcccaatgaaagcatgtaaagattcacaaataattgaaaagaacatgagaaacataatgagagctcgaagataggcaaaagtatacacaattactcaatggtgtgccaagttaccaat

SEQ ID NO: 798 - DNA, 1234 bp, Homo sapiens
tatcacttattcgaccccaactggtggggagaagagagtcggtatgattagtccatatacccactatgactgtgccaaacttttggagatgttccaacccgtagcattctttagattgttttcttttcttcacaaatgtgaagaccttccattgctaagaaaagtaaatatgtcagtctgctctgtgctcaccaccctcactatgtaatataaaattttcaaagtaaaattactgatttatttctgcttcttactcaccagaagaatgattacaccagtgtcatatagatggccagcagggtgttagaattctgtctcagaatgttaacattctttttctgcctacttccccaatattactttccagtttttgaaagctcctggctttgtgaactcacagtagcaaaccatgaatgatagatgagaagaaaaattctatcctttctaactaataaactggaggatttcagacaatgctcccaatttctcagacaaaaggagattccgattatttgcaggaatataataacataaaaaacaacaacaacacttgtatggaaaacaaaatkattttcatggggcagaggaaggaaataaaaataaaagaggagaattagaaagagaggtaagtaatttatgttgcaaaaggtataatttttttcctttcatgtttcaatgcttttgtctacaacaaggcaatctgaaaataaaaattgtttacatagacgcccctcacctgtcctactcaaatctatcttctttgcctactgcatggtattttaaaaattgggtctactttattttccattgtgttcattttaattcaaccaacgtcatgatggaattgtgactatttcttaatcaaagcaaacagcacacaactcaatccatccggactttcaccaaccatgctggctccatgagactgttcagctctggccacactgagccgcccacctccctgtggctttgatcctgggcttgatcctgaggcagccagggcaggagcccaaaaggaccagactgctggaaaccactgattccctctcttccccacagagacacatttcagagttttcattcctgttttgccatttagcagctttctaatcataggcaagttacttaaactccatgagtctatttttttctaatcaataagttgaagacagcaatgtcagctaaagtctcctattaaaaactagctgtaacatatgcaaagcatatagtgtct

SEQ ID NO: 799 - DNA, 1234 bp, Homo sapiens
tatcacttattcgaccccaactggtggggagaagagagtcggtatgattagtccatatacccactatgactgtgccaaacttttggagatgttccaacccgtagcattctttagattgttttcttttcttcacaaatgtgaagaccttccattgctaagaaaagtaaatatgtcagtctgctctgtgctcaccaccctcactatgtaatataaaattttcaaagtaaaattactgatttatttctgcttcttactcaccagaagaatgattacaccagtgtcatatagatggccagcagggtgttagaattctgtctcagaatgttaacattctttttctgcctacttccccaatattactttccagtttttgaaagctcctggctttgtgaactcacagtagcaaaccatgaatgatagatgagaagaaaaattctatcctttctaactaataaactggaggatttcagacaatgctcccaatttctcagacaaaaggagattccgattatttgcaggaatataataacataaaaaacaacaacaacacttgtatggaaaacaaaattattttcatggggcagaggaaggaaataaaaataaaagaggagaattagaaagagaggtaagtaatttmtgttgcaaaaggtataatttttttcctttcatgtttcaatgcttttgtctacaacaaggcaatctgaaaataaaaattgtttacatagacgcccctcacctgtcctactcaaatctatcttctttgcctactgcatggtattttaaaaattgggtctactttattttccattgtgttcattttaattcaaccaacgtcatgatggaattgtgactatttcttaatcaaagcaaacagcacacaactcaatccatccggactttcaccaaccatgctggctccatgagactgttcagctctggccacactgagccgcccacctccctgtggctttgatcctgggcttgatcctgaggcagccagggcaggagcccaaaaggaccagactgctggaaaccactgattccctctcttccccacagagacacatttcagagttttcattcctgttttgccatttagcagctttctaatcataggcaagttacttaaactccatgagtctatttttttctaatcaataagttgaagacagcaatgtcagctaaagtctcctattaaaaactagctgtaacatatgcaaagcatatagtgtct

SEQ ID NO: 800 - DNA, 695 bp, Homo sapiens
cttccytcaggctctgttagttaactaaacctttgtccctaattaactttctcttctcataggttgtgttttcttcagaaagctgaggccccatgcatgtgccagatgtgccaagtgaagcccagtggtggtcagatgtccaggagacccagactgggctccctcactacacacacacatacacacacacacacacacacacaagcacacacccttctcaaagtgaatatctcttctgtgcaaagcaaaaactgtgtatctttgccagaacagaagctatagtttgtgtgtgacccatacttaagccatgcaaacagcttttaccttgagactgaccatgcaaatggacatatcctttccaggaaagggtgcgtatcctaagctttgtctgaaagctccagctgcggggaatgcaaagaagaaggccagggaggatggatgatgcagtgctcagccatgttgaggatcctaatgcaatctcccctttaagaagaggggacagggggttgcttccaagatggccaaacaggaactgctccagtccacagctcccagcgagattgacatagaagacaggtgatttctgcatttccaactgaggtacctggttcatctcactgggacaggttggacagtgggtgcagcccacagagggcaagttgaagcagggcagggcgttgtctcacccgggaagc

SEQ ID NO: 801 - DNA, 703 bp, Homo sapiens
acatggggaggggaacatcacacaccagggcctatggggggtgggggggctaggggagggataacattaggagaaatgcctaatgtaggtgatgggttgatgggtgcagcaaaccaccatggcatgtgtatacgtatgtaacaaaactgcacatcctgcacatgtaactcagaacttaaagtatgaaaaaaaaaaaaaaaaaaagaggggacaatgatggacagtgataagggaagatggagagagggaaggaggatggcctccctccaccatgagcccatgtccccaagggaaccaatgtatttcctcatttcccccaggccaagcagccagaggacgccgtgctgtggggtctgcagagagcaggaagcctcagcatcagggtcgaggccgtccagtcgtggragagaatttcaaaacaggacaaggcacatgggggcagcctggcagcctgagcccctctgacttcccagagcccaggcctgccccggcagcttggcgttctttctcctgccagcctggatcacctgtcccttcaacgtatttcactgtttacataaatgcgtgaatttattccttcattcaatattctacacatatgtgttgaatatctagcctgtgccaggcattcttctgggcacttgggcagggcatgaaataaaccaagcaaacatctctaactctttaagcctctattttcctg

SEQ ID NO: 802 - DNA, 877 bp, Homo sapiens
aaacaagcccacactggtgtgagcatggctggggccccagaggagggtagacgtggaccaggggcaagagtgataaactagaaacagcttgagttgctggaaaaccaagtgtgctgtagacaagagctcagcatgaaaccrgacccgccagcaggccccagattgtggagagcttttaggtccagcttgattgatttaagaccacctggctggtgagtagcagagataagacttaggtcttctttctcccaatccagtgctaactctactaagtcataataatggctaacatgtattagtagtgataataagatactgagcacgttaaatcattcaatctttacaagcacccaataaaatagatattattattactaattccacttttccaataaaaactctgagacttaaatgggaagtttaagtattgctcaaagacacacagctggtaagtgagtatcagttttctttttcttttttttttttttttgagacggaagtttcgctcttttttgcccaggctggagagcaatggtgcgatctcggttcactgcaacctccgctccccgggttcaagcgattctcctgcctcagcctcctgagtagctgggactacaggcatgtgtcaccatgtccagctaactttttgtgagttattagtagacacggggtttcaccatgttggccaggctggtcttgaactcctgatctcaggtgatccaccggcctcggcctctcaaagtgctgggattacagatgtgacccaccgcacctggccaagtatcagttttcttaaccattgtcactgtcttatggttcttctgtgttgtcttctgtggcatgagtatgtacaggaaaaaaagatcggcttatataa

SEQ ID NO: 803 - DNA, 877 bp, Homo sapiens
aaacaagcccacactggtgtgagcatggctggggccccagaggagggtagacgtggaccaggggcaagagtgataaactagaaacagcttgagttgctggaaaaccaagtgtgctgtagacaagagctcagcatgaaaccggacccgccagcaggccccagattgtggagagcttttaggtccagcttgattgatttaagaccacctggctggtgagtagcagagataagacttaggtcttctttctcccaatccagtgctaactctactaagtcataataatggctaacatgtattagtagtgataataagatactgagcacgttaaatcattcaatctttacaagcacccaataaaatagatattattattactaattccacttttccaataaaaactctgagacttaaatgggaagtttaagtattgctcaaagacacacagctggyaagtgagtatcagttttctttttcttttttttttttttttgagacggaagtttcgctcttttttgcccaggctggagagcaatggtgcgatctcggttcactgcaacctccgctccccgggttcaagcgattctcctgcctcagcctcctgagtagctgggactacaggcatgtgtcaccatgtccagctaactttttgtgagttattagtagacacggggtttcaccatgttggccaggctggtcttgaactcctgatctcaggtgatccaccggcctcggcctctcaaagtgctgggattacagatgtgacccaccgcacctggccaagtatcagttttcttaaccattgtcactgtcttatggttcttctgtgttgtcttctgtggcatgagtatgtacaggaaaaaaagatcggcttatataa

SEQ ID NO: 804 - DNA, 886 bp, Homo sapiens
atacagagaaggaaacggacgccaaccaaggagatcaagatacartttccttctaaacacatggaaacacggacaacctgctaacttagtattttactgaattacaatacactgtcagataatataatagaagttgcactcacacagacttgggttcccgtcacagctcctgtacggttttaaccaaaatagttaacctattttagcctcagtttcctcaactataaactaagaaaaactagacgtacctcctaagagagtagatcttaaatgttcttatgcacacacacacacacacacacacacacacacagtgagaagtatgtgaggtgatggatatgttaatcagcttggtttaatcagtccacagggtatctatgtattaaaacatcgcactgaacaatatataccattctgactggtcaattataccttaataaagctggggaaaaaataaacttaccttatgaaattaattgagatcattgatgtgaagtgcaattcattagaaaatactcagtcaattttagcattacttttattaccattaattataatttgtctacccatgaattttattcaacatgagaagaaatgctagctcaccagtcaccacacagtgtgctgtgtcatcacggccacaggaagggaagggtcatgtacggcctgcaggattctgagggacatctcagttgcaccctttctctggagcaagattacagatatgatccaagtaattttgacaaggggttggacacagcatccaaaaagcacccaaaggaatccttgtctgaccaaagtgaatcttcactgtcaggccacctgacacagaaagccttcaataaattcttaccaagtggatgaatgaatgaataaatgaacaagt

SEQ ID NO: 805 - DNA, 573 bp, Homo sapiens
ttttccagctggggaaaaggcttgaaactttttgttcctcctttaacacacgatcttygctattgtggttgaaagcttactaagtatgagaaactgctaagcactaaaggcacataaagactgaggcttcattgccccaagcacctcgcaatctaagtgaggaacaaaggttgtgaaaaacactgaagattcaagaatagggtacagaatagagggcctttgatgtcaggacgaggtgccctatattcatcctgtagataatagtaacctaatgagaaggtggctttagaaagactaaactagctgggatgtccagggtagatggggcaggtaggagcctggaagtcaggagactggaaagggcttctgcatgaaatcagattagaggtggatgggggtacaggggaagacatgagatgggggcacacaaaggaggagaagcaaacattgcctataggaaagaagagagaggaaggtgtaaaaatgaaatcaacatgggggtaatgctaatcatgttggcaagagtaggaaagtgggaaggtgttaggaatagcgatgggtttgctttaacat

SEQ ID NO: 806 - DNA, 573 bp, Homo sapiens
ttttccagctggggaaaaggcttgaaactttttgttcctcctttaacacacgatctttgctattgtggttgaaagcttactaagtatgagaaactgctaagcactaaaggcacataaagactgaggcttcattgccccaagcacctcgcaatctaagtgaggaacaraggttgtgaaaaacactgaagattcaagaatagggtacagaatagagggcctttgatgtcaggacgaggtgccctatattcatcctgtagataatagtaacctaatgagaaggtggctttagaaagactaaactagctgggatgtccagggtagatggggcaggtaggagcctggaagtcaggagactggaaagggcttctgcatgaaatcagattagaggtggatgggggtacaggggaagacatgagatgggggcacacaaaggaggagaagcaaacattgcctataggaaagaagagagaggaaggtgtaaaaatgaaatcaacatgggggtaatgctaatcatgttggcaagagtaggaaagtgggaaggtgttaggaatagcgatgggtttgctttaacat

SEQ ID NO: 807 - DNA, 573 bp, Homo sapiens
ttttccagctggggaaaaggcttgaaactttttgttcctcctttaacacacgatctttgctattgtggttgaaagcttactaagtatgagaaactgctaagcactaaaggcacataaagactgaggcttcattgccccaagcacctcgcaatctaagtgaggaacaaaggttgtgaaaaacactgaagattcaagaatagggtacagaatagagggcctttgatgtcaggrcgaggtgccctatattcatcctgtagataatagtaacctaatgagaaggtggctttagaaagactaaactagctgggatgtccagggtagatggggcaggtaggagcctggaagtcaggagactggaaagggcttctgcatgaaatcagattagaggtggatgggggtacaggggaagacatgagatgggggcacacaaaggaggagaagcaaacattgcctataggaaagaagagagaggaaggtgtaaaaatgaaatcaacatgggggtaatgctaatcatgttggcaagagtaggaaagtgggaaggtgttaggaatagcgatgggtttgctttaacat

SEQ ID NO: 808 - DNA, 573 bp, Homo sapiens
ttttccagctggggaaaaggcttgaaactttttgttcctcctttaacacacgatctttgctattgtggttgaaagcttactaagtatgagaaactgctaagcactaaaggcacataaagactgaggcttcattgccccaagcacctcgcaatctaagtgaggaacaaaggttgtgaaaaacactgaagattcaagaatagggtacagaatagagggcctttgatgtcaggacraggtgccctatattcatcctgtagataatagtaacctaatgagaaggtggctttagaaagactaaactagctgggatgtccagggtagatggggcaggtaggagcctggaagtcaggagactggaaagggcttctgcatgaaatcagattagaggtggatgggggtacaggggaagacatgagatgggggcacacaaaggaggagaagcaaacattgcctataggaaagaagagagaggaaggtgtaaaaatgaaatcaacatgggggtaatgctaatcatgttggcaagagtaggaaagtgggaaggtgttaggaatagcgatgggtttgctttaacat

SEQ ID NO: 809 - DNA, 573 bp, Homo sapiens
ttttccagctggggaaaaggcttgaaactttttgttcctcctttaacacacgatctttgctattgtggttgaaagcttactaagtatgagaaactgctaagcactaaaggcacataaagactgaggcttcattgccccaagcacctcgcaatctaagtgaggaacaaaggttgtgaaaaacactgaagattcaagaatagggtacagaatagagggcctttgatgtcaggacgaggtgccctatattcatcctgtagataatagtaacctaatgagaaggtggctttagaaagactaaactagctgggatgtccagggtagatggggcaggtaggagcctggaagtcaggagactggaaagggcttctgcatgaaatcagattagaggtggatgggggtacaggggaagacatgagatgggggcacacaaaggaggagaagcaaacattgcctataggaargaagagagaggaaggtgtaaaaatgaaatcaacatgggggtaatgctaatcatgttggcaagagtaggaaagtgggaaggtgttaggaatagcgatgggtttgctttaacat

SEQ ID NO: 810 - DNA, 624 bp, Homo sapiens
tggctcaagcatataatccccgcactttgggaggccgaggcgggtggatcacttgaggtcaggagtttgagaccagcctggccaacatggcaaaatcctgtctctactaaaaacacaaaaattagctggacatggtggcgcatgcctgtaatcccaggtacttgggaggctgagcagggaggattgcatgaacccaggaggcataggttgcagtgagccaagatcgcaccactgcactccaatctgggtgacacggtgagaccctgtctcaaaaaaacaaaaacaaaatgctataacttcaaaaagatgaaacaatttctttcatttctggagaaaaatagtacctgtcaaatctcaaattagattacagtaaaatcttygtaaaaagaattttccaagtcttaacttacgtcttgtttatttgacagggaaaaaatagaatacaacaataacatgtaagagatttcaagtggttttgtttttgttttttgtgaagagctgtgctccattcatgctgaaaccttgattcatttgtgtatataaaattttcaggaagctcaaaattgttaagacttaggtgtgctcctgacatcatttgtccccctcactagtttgaggcccttt

SEQ ID NO: 811 - DNA, 584 bp, Homo sapiens
aagggtagtacagtattggccaggcatggtggcttatgcctgtaatcccagcactttgggaggctgaggcaggtggatcacttgaggtcaggagttcaagaccagcttggccaacatggtgaaaccccgtctctactaaaaatacaaaaattagtcaggtgtggtggcacacacctgtaaccccagctactcgggaggctgaagcaggagaatcgcttgaagccaggagacagaagttgcagtgagctgagatcccgccactgcactccagcctgggtgacagagtaagattctgtctcaaaaaaaaaaaaaaaaagtagtacagtacttagagctatagttaataatgtgcaactgtgtaccctggagaaggaaataactgcaagaaagttgaaagggttttaattagtttgtcttgttacctaaggagctacttgcataaatatatttctgtgacttgggtgtcatctacatattcctgtactcctaccccccgttcactttaatggttggaagaacsctcaatcagaaaaaaaacccacagtattgttttggtatttgttattacacgtgtaatgaattga

SEQ ID NO: 812 - DNA, 1216 bp, Homo sapiens
catacagatgtattaacgggaataggggagaatcacagagtgattacccaccagacaaatggtacacagatggttatatacccttcttaagggagagggagatggagaagtgtggatattttggtgggggggtggggcggtaaatgattttaggggaatttaatggccttgaagaacatacaatggcctgggacaaagtctgttaggtctgcaaaacaaacartggtttgggacaagtctgtccagttgtgttgacagactgcagcccttcttcctgtgataggagtttagttaatgaaaaactcagggaagggatcacaggtaattgttttctttggtgggtctaggctttaggcagataaatgaatttcagagaacagcttcatcctgggctatgggagagacagaggattaagagatgggggttgggggtatcagagagaccttgattcttcttcagttcaacatgtcaacatggggtatatgaacccagttcaacatggggtatatgtttctgtaccccaacagtttcattagaactatttttcttaccaataaataaaaagatctccttgctgagttgcatggtagcagaactctccttctgccactgaacgcactttgcatccttgatatttaaaactacgctaaaactaaatcaatcacagtaatgatggaaggagaactaatgttatttgttatatgtgcgcaaggcagcagttttgactaaccaattttattaatgaggaaaacagaggcttttaaaagttaaatacagtcatcagtcacttaataaagtgatatattctgaggactctgtcattgggtgatttttgtcgtcgttcattcatagagtgtgcttacacaaacctagatggtatagcttactatacacctaggctataagctatcgcctttcgctgtgagactacaaacctgtatagcatgttactgtactgaatactgtaggcaatgtaacacagtggtatttttgtatctaaacatagaaaagatacagtaaaaatgtggtacaaaagattaaaaatggcacacctgcatagtgcacttaccatgaatggagcttacaggactggaagtcactctgggtgagtcagtgagtgtgtggcgagtgaatatgaaggcctgagacattagtgtacactcctgtagactttataaataatgtacacttaggctatactgaatttattttaaa

SEQ ID NO: 813 - DNA, 1216 bp, Homo sapiens
catacagatgtattaacgggaataggggagaatcacagagtgattacccaccagacaaatggtacacagatggttatatacccttcttaagggagagggagatggagaagtgtggatattttggtgggggggtggggcggtaaatgattttaggggaatttaatggccttgaagaacatacaatggcctgggacaaagtctgttaggtctgcaaaacaaacagtggtttgggacaagtctgtccagttgtgttgacagactgcagcccttcttcctgtgataggagtttagttaatgaaaaactcagggaagggatcacaggtaattgttttctttggtgggtctaggctttaggcagataaatgaatttcagagaacagcttcatcctgggctatgggagagacagaggattaagagatgggggttgggggtatcagagagaccttgattcttcttcagttcaacatgtcaacatggggtatatgaacccagttcaacatggggtatatgtttctgtaccccaacagtttcattagaactatttttcttaccaataaataaaaagatctccttgctgagttgcatggtagcagaactctccttctgccactgaacgcactttgcatccttgatatttaaaactacgctaaaactaaatcaatcacagtaatgatggaaggagaactaatgttatttgttatatgtgcgcaaggcagcagttttgactaaccaattttattaatgaggaaaacagaggcttttaaaagttaaatacagtcatcagtcacttaataaagtgatatattctgaggactctgtcattgggtgatttttgtcgtcgttcattcatagagtgtgcttacacaaacctagatggtatagcttactatacacctaggctataagctatcgcctttcgctgtgagactacaaacctgtatagcatgttactgtactgaatactgtaggcartgtaacacagtggtatttttgtatctaaacatagaaaagatacagtaaaaatgtggtacaaaagattaaaaatggcacacctgcatagtgcacttaccatgaatggagcttacaggactggaagtcactctgggtgagtcagtgagtgtgtggcgagtgaatatgaaggcctgagacattagtgtacactcctgtagactttataaataatgtacacttaggctatactgaatttattttaaa

SEQ ID NO: 814 - DNA, 624 bp, Homo sapiens
cccaggctggagtgcagtggcatgatcttggctcactgcaacatccgcttccctggttcaagttattctcctgcctcagcctcctgagtagttgggattacaggtgcccaccaccatgcccggctaatttttgtatttttcatagagacagggtttcaccgtgttggccaggctggtctcaaactcctgacctcaggtgatctgcctgcctcggcctcctaaagtgctgggattacaggcgtgagccaccacacccagcctgtgctgagcattttaaaaggaaaacccatcatgggcaggaaagagaaaatacagaatattcaaagtaaatccttgagatacagcaagaagaaatgctaactaacaactggcaaattaaatagctgattacccttccatccaaatccagtttaattctgctaaatcagataggtagatccaattcartcttctctgaggtaagatcaaaaggtgataacccattataggctatttcatctggaatgctcacagataactagccttcccaaccacagaaatgtttggatgctctctggcggtatccctaacccagacctaaataacaaaactgaatatcaaactgtcttaaggcctgggcttaac

SEQ ID NO: 815 - DNA, 1322 bp, Homo sapiens
ggtcacaagagtgaaagatgtgtgcctgtacagctgttataactattttcatgataaatacttaccttcagtacaggaatttagcagcacactttaatttggatttgaaaagttaacataaattgtctgactttgacaatagctgcctaatatttcagttttgtaaactacttccaggttctaccttcaattctaccttcaagatgaacctagtggacgtattcatttttaaaagctatattccagaccctgtaccctaaaaccagtttctgacttgatgtttagggaattacatcagatcataatgaagtgggttcttaatwaatatttggtgactggcagggaaaaaagagacatgtaatttttaggtaaaattacactctccatcaactttattcatttatttttaaattatacttaaagattttaacttaaaaaatgaaaaagatttttcgtcttattttgagccatttgtgaatcaaggagtcaaacagttgacacaatgccatcccacctttagtctctatatagtcagcgttttcaaccaaaaatgtttatcttatactaccattcatacatctgattcagaggctgcagaagacacaggatccaaagatttctggagttaccaaactaggtaaatttgttaactcaaatgtatagacttcatagttaatgagtctcaccaaattcacaaaaccatacaataaaagaaagaaaaggcttataaagaagaaaaagtgtgttgtctccttaacactactatcaaaaggaatatatagcacttgttcctttgtgaatataataagtaaaaacatttttaaagttaccatatagtgaaacttgaaccagagtaaaaatgttacttgtaaattcaacaagttatatatttttctgtaaattattttctcctggaattcaaaaattaatgtttatttatctgttaacagtctaccaaagggcatacgtaattcctttgtatgaaatatgaggcaatttttgtgctttaattgtaaatgccatcagaaactttgaagcacataaatctcagcaagtgacataatgacatagtcaaacctgagaattatatagctacatttcatgcttaatgaaaagaaaatgtctaaagaggctgatatgccactgcttgtgagaatgtaaattttgtcttaatagattcaaaataatggcttaaggtgaccttcattttctatcacccatctagcaataaaacttttttaagagaaaacaagctaataaaccatagacaaatttctatttctattggcttgaactctctatagtttgctgaattaaatgca

SEQ ID NO: 816 - DNA, 402 bp, Homo sapiens
tgaatggggggttttgttttgtttgtttgtttgtttgtttgtttgttttgctagctttggcagaaaactccaagggagagcacatctagagtcacgtgtctgtgcttaaatcaatcattgtaccaggagatgtgatggtctgattggcctgacctggttcttgtatctcttctatgttgagggtgaggagaagaatcagaattggctccattgaagctaaatagaataggaagaggtaatgtatcatcagaggaatgtgaaaagatgctgggtgggccagaacacagatgcctcctgmtaaggaatgtaacaagacagtggtccatggatgaatctacagttagaaagagccaattttaaggagcaagtaaagtacttaaaataaaaattattcatatccca

SEQ ID NO: 817 - DNA, 634 bp, Homo sapiens
ctcattttacaggtgatgacactgaagtctaggtgcataaaggaactttccctaaatcatatgacttgcttatgaccaagccagagctaaaactcaggtctatttgttcagtttttccgattatatcaggtggccaaactcattttagcaattcggcactgaaactaagtagctagagtccatagggttttagtgacccatacaactttggagattaaaaaattgttggctccaaattataaaataaaacccgtaaaattaaaattgatgaarctcgattagatggctacaaaaggaaatgttagtcagttagctggaacatataaaactctctctctctctctctctctgtatatatatatatatatatatatatatatatatatatatatatatatatatttgtctgagattaaagtaattttttacttgatattattgaatattaagcaaaatatttgctttgttttaagcgaagggatgactagttggcagaaaaaaaagtgggtcaagtcaatggatgcagtgaaagttttataggccaccaagaaattatggagaggaaaataaaatatggatggaggaaacaatgtaaagaaacaatctattacagcttccaaagtgagataaacta

SEQ ID NO: 818 - DNA, 634 bp, Homo sapiens
ctcattttacaggtgatgacactgaagtctaggtgcataaaggaactttccctaaatcatatgacttgcttatgaccaagccagagctaaaactcaggtctatttgttcagtttttccgattatatcaggtggccaaactcattttagcaattcggcactgaaactaagtagctagagtccatagggttttagtgacccatacaactttggagattaaaaaattgttggctccaaattataaaataaaacccgtaaaattaaaattgatgaaactcgattagatggctacaaaaggaaatgttagtcagttagctggaacatataaaactctctctctctctctctctctgtatatatatrtatatatatatatatatatatatatatatatatatatatatttgtctgagattaaagtaattttttacttgatattattgaatattaagcaaaatatttgctttgttttaagcgaagggatgactagttggcagaaaaaaaagtgggtcaagtcaatggatgcagtgaaagttttataggccaccaagaaattatggagaggaaaataaaatatggatggaggaaacaatgtaaagaaacaatctattacagcttccaaagtgagataaacta

SEQ ID NO: 819 - DNA, 619 bp, Homo sapiens
gatgaacagcaattgcttagcaagtgccttccatgggctgtgtggtgttgctgtccccactttataggcaaggaagctggggctcagagaggccacaatcgccacggccatatgggtaggacttggcatagtttcartatgtcttctctgtccaaagcctctgcctttcctttgcatccccttgtccttcaacaacttgcactatggcccttcctgcctcagtttcctcttctgtaaaataagggtgcaatctggacagaagctcagtgttgaagggttattttagccccaccctcaaggatccttgcttcttgggtcatgcacagttcccagggcttccctgctgctgccttgtgtctagcagaaatggacatcccagttgcaggtcaagtcgtgcttggctggaggccgaaggaaggagaaatgccctagaatcaggaaggcatgacctgaccggaattcaccttctatctgtgacatccactgcccacccttgggcttctgactgcggtgcctgccttccaaaatttgtaccttttatgtgttccatgtttagaaataatttccttaaaaaatatttgtggagtttctaatgaggctaaaacagtaaagtcactag

SEQ ID NO: 820 - DNA, 604 bp, Homo sapiens
cagtcatggcaattaaaaatgtttccagacattttgccccaggtggcaaaatggccctcagatgagaaccactgctctagactaacatactgaacattttgtccaacattaatatacataaagtgatgtacctcagggttatgggttggtaaataaaagaagacaaaacaacctagaccacctgggatcgctatgggtcaacttcctaaaagccaatgtttgggaaaggattatgggaaaatgtaagcagagagagctgaaatcttaaaaatacattcctagaatcagaacaatggccacctaaattaaggggagttggaataaagcaacacacatctgttaatgcatttaattgtcatagttccgctgtttttttttttttttttagatggagtcttgctctgttgccgaggctggagtgcagtggcrtgatctttgctcactgcgacctctgcctcccgggttcaagcaattctcctacctcagcctcctgagtagctgggattacaggcgcctaccaccacactgagctaatttttgtatttttagtagagacgggtttcaccatgttggtcaggctggtctggacctcctggcctcatga

SEQ ID NO: 821 - DNA, 604 bp, Homo sapiens
cagtcatggcaattaaaaatgtttccagacattttgccccaggtggcaaaatggccctcagatgagaaccactgctctagactaacatactgaacattttgtccaacattaatatacataaagtgatgtacctcagggttatgggttggtaaataaaagaagacaaaacaacctagaccacctgggatcgctatgggtcaacttcctaaaagccaatgtttgggaaaggattatgggaaaatgtaagcagagagagctgaaatcttaaaaatacattcctagaatcagaacaatggccacctaaattaaggggagttggaataaagcaacacacatctgttaatgcatttaattgtcatagttccgctgtttttttttttttttttagatggagtcttgctctgttgccgaggctggagtgcagtggcgtgatctttgctcactgcgacctctgcctcccgggttcaagcaattctcctacctcagcctcctgagtagctgggattacaggcgccyaccaccacactgagctaatttttgtatttttagtagagacgggtttcaccatgttggtcaggctggtctggacctcctggcctcatga

SEQ ID NO: 822 - DNA, 635 bp, Homo sapiens
tggtttggtaacttgttttttacttatcaaatttttattaacatggaagtgatcctctttaaaatcagtttactgcctgcagagtattccattgaatgagaagaatcattctattgaatgagatgcaccatattacaaactatattgtgataacatatttttgcaatactgtctcactgtaagttagacttgggcagccagaatgaaatccaccggtcctcaagttgcatatggggcaggagcaggggagagtaagtacaaatatggkataggataagatagtgaggtgagagggggaggccattttcttaagctacctaccattaaggagagcagattccggaatatgctgctgacaatgtctgttatctttcaaacaagatttgcctgaccaagggcagatgtaggtcacagactgtcaaggtgtgatgctagtctctttcagacctgaagcggcctgaggcagtactctcctagccctaaaaggctgaatataaatcatgcttgttggcaatttctgctgacgtgctgcctgacacatggctaaaagcctttctcagagctgagaataaattccaagacagcaatgacagctataacaatgctgccacatgttaaagtgtttaaaagccctc

SEQ ID NO: 823 - DNA, 635 bp, Homo sapiens
tggtttggtaacttgttttttacttatcaaatttttattaacatggaagtgatcctctttaaaatcagtttactgcctgcagagtattccattgaatgagaagaatcattctattgaatgagatgcaccatattacaaactatattgtgataacatatttttgcaatactgtctcactgtaagttagacttgggcagccagaatgaaatccaccggtcctcaagttgcatatggggcaggagcaggggagagtaagtacaaatatggtataggataagrtagtgaggtgagagggggaggccattttcttaagctacctaccattaaggagagcagattccggaatatgctgctgacaatgtctgttatctttcaaacaagatttgcctgaccaagggcagatgtaggtcacagactgtcaaggtgtgatgctagtctctttcagacctgaagcggcctgaggcagtactctcctagccctaaaaggctgaatataaatcatgcttgttggcaatttctgctgacgtgctgcctgacacatggctaaaagcctttctcagagctgagaataaattccaagacagcaatgacagctataacaatgctgccacatgttaaagtgtttaaaagccctc

SEQ ID NO: 824 - DNA, 537 bp, Homo sapiens
gctgagtctgaaggttaattctggaataatggattgagctagcagtggagggtgattcacagcagaggcctgactcttgcaaatgagtcaggaaataggagtgtgaaatatggcaggcaatggctaaatagttcagggatggttattgttattagaatgtgtgaggcagtcttctcctatatatagcatgcgggtctgagcatttgttcaactcctacctccaaccaaagaactcaatgtgacatcaggctggggagagctgcttgtcyaggtgaaattacttagggaatgccaaaggagcttcaaattattcacatttcaatgacattttttcatgaacgatataggactgcttagagccagctgtcagacagataatgacactgaaatgtgctctgagcagggccctagacacttcagggttttatttctctaggtttatggccaggccaaggtagaatcttcagtaagcctctgtcctttactcactccgccctatgtcaaactggtccaagtaagttgccttttgtaatgtat

SEQ ID NO: 825 - DNA, 532 bp, Homo sapiens
ccagtaggagctcattccctcatgggttggggatgcgtatcatggatctttgaactaaattacctgctcactaactcatcccataccatgagtagtggtaggagtggtgctgcttagatccccaggtcactgtggggctggccccagttctcagttcccaccgacttcaaagtgaattccctctaatcaggtatggagagaaacacccacttgtgcgatttcagcagggcctycaggtggccgatttggcttctgattacattatttaaacactatttcacaaaggaggtgatttgatgtcacactaatgcaagctcgaattcactgcccatgatttgagtttgccagtgtaaagtaattctgcagtaatggtctttaccacatcagcctttttatgtttaaatttgatgttaaatttttaaaatctcaggagaagaaaaaagaagagagcctaacacattttaagaaaccacaaaaacaccttgtgaaaagtcaacttgtaaaatcccagctgttaaagtggtaaatttag

SEQ ID NO: 826 - DNA, 560 bp, Homo sapiens
ggacaattgcctcctagaaggcaggaaaagaagtggaatggaatactgtaaaacccaagggaaaaggaagttttggggaggtggatgttcgatggtcaggaatgttaaatatggtaagggccaagtgggatgagggctgaaaataagtcgcatatgacaatctccccatctgtttttaaacagaggatgcagggtgaataggtctaatatactttttgkgtagatttgctttttgtttttatcctgagcctagaatttgaactccacagatgctaattaaaattttattatttttattttggatatagtcttgaatttcgatcacaaccttgttttctttcagcctcctttggcatttttgccttgaaagggttgtctttgattgagcttgataagttacatgttggctttgtgaatgtgtctattgtttaaggttacatattttggttttggtgtttataagggaatgagacccaagctgctgagaatcattccattcacatatgtagacaggaaacagcatgtatattaacaaactgattggaataggagttatatct

SEQ ID NO: 827 - DNA, 560 bp, Homo sapiens
ggacaattgcctcctagaaggcaggaaaagaagtggaatggaatactgtaaaacccaagggaaaaggaagttttggggaggtggatgttcgatggtcaggaatgttaaatatggtaagggccaagtgggatgagggctgaaaataagtcgcatatgacaatctccccatctgtttttaaacagaggatgcagggtgaataggtctaatatactttttgtgtagatttgctttttgtttttatcctgagcctagawtttgaactccacagatgctaattaaaattttattatttttattttggatatagtcttgaatttcgatcacaaccttgttttctttcagcctcctttggcatttttgccttgaaagggttgtctttgattgagcttgataagttacatgttggctttgtgaatgtgtctattgtttaaggttacatattttggttttggtgtttataagggaatgagacccaagctgctgagaatcattccattcacatatgtagacaggaaacagcatgtatattaacaaactgattggaataggagttatatct

SEQ ID NO: 828 - DNA, 590 bp, Homo sapiens
gaaagcagacgctggcactatgcttcatgtacagcttgcagaaccrtgagccaaataaacctcttttctttgtaaggaaggcttgtggtcatttcttttagtctcaggtctacctgagtcttacacagtctcaggtattcctttatagaaacacaaacgaactaacagtggaaacgaaatgagtttgagcaataggggaaacgtaaatgaaactcaaaactgtgtgtggtaggcaaaaagcagtagcagaatattctagttcacatctcttttaactatttatatagatatgaaaattgccaaaaatatcagtctaagtgatttttcactattggtagttttaaatcttttacagtatgattagaatgaaaagtctaatactaactacatttgccctggaaaatgatacacatttcacagaattactagtggaaatgggtaaaaggaacttggcaacgaataaggaaattgagcaatattttaacttctgtgtttgtaaaattcagatatggaaaagttagagacattggaactatgtaacaataacccttgaaaagtttccataaaatactgtgaaatgcttaccaatt

SEQ ID NO: 829 - DNA, 595 bp, Homo sapiens
tggctaattttttgtatttttagtagagacggggtttcatcatgttggtcaggctggtcttgaactcttgacctcrtgatccacctgcctcggcctcccaaagtgctgggattccaggtgtgagcctaccgcacccggccactgaatatattcttttgatactcgctttttattctttcaatgttgcttttgagatttttagtgttgattcacatacacctagttcattcactacaactgccatatggtgtgctattttacaaatatattaaaatatttatgcaagtcccctagggatggccatccagcttgtttccaatttcttactgcctaagacggtgctaaagtggacatcctgatccatatctttttgcacataaatatgagacatttatgtcctagtgagaatcactaggacagtgattattaaaccttttggtctcaagacccctttacacttttaaaaatcattgaggaccccaaagagcttttgtttatgcatattatacctgccagtgttgaccctatttgaaactaaaactgagaaaatgttaggtatttattaaataattttataaataatgttactttaatt

SEQ ID NO: 830 - DNA, 595 bp, Homo sapiens
tggctaattttttgtatttttagtagagacggggtttcatcatgttggtcaggctggtcttgaactcttgacctcatgatccacctgcctcggcctcccaaagtgctgggattccaggtgtgagcctaccgcacccggccactgaatatattcttttgatactcgctttttattctttcaatgttgcttttgagatttttagtgttgattcacatacacctagttcattcactayaactgccatatggtgtgctattttacaaatatattaaaatatttatgcaagtcccctagggatggccatccagcttgtttccaatttcttactgcctaagacggtgctaaagtggacatcctgatccatatctttttgcacataaatatgagacatttatgtcctagtgagaatcactaggacagtgattattaaaccttttggtctcaagacccctttacacttttaaaaatcattgaggaccccaaagagcttttgtttatgcatattatacctgccagtgttgaccctatttgaaactaaaactgagaaaatgttaggtatttattaaataattttataaataatgttactttaatt

SEQ ID NO: 831 - DNA, 1354 bp, Homo sapiens
catggtagacagaataatggcccccccaaagacatcaaggtcagaggcatagatgcagaagttggggtgataagagcaatgaaccaagcaatacaaccatcctctagatgctggaaaagycagggaaacagattctcctttagagcctccagaaaggaaagcagctctgccaacccattttggacttctgatggccagagctgtaagataattaacttgtgttgttttaactaagttcatggcaatttgttatagcagcaaaatagaaactaatacaatcatatacccagagacagcatttgcctccttataatacatgcttatgtatgaatgagttttccttagaacaatccagtcattttattttaacctacttcttctaagtttggcttccctaccagactgttagaaagcaggctccttggctgtcgcatctactattgtgcctatctccagtgtccttgtccatctggttacccactacagcccaaaaacctgtcatggggcctggcacaaagtaggctcttgaaaaatatttgttgagggaatagtacatcttgacatattgttccacttatctattgctgtgtaataaactacttccaaaatgtagtggcttaatacaacaatatttatcttgctcgtgagctctgcaatttgggcaggcctcagcagggacagcttgtgtctgatctacttggcatcagctgggacagctcaaatgcttagggctggtgtcatctgaagtcccaatcactaccatgctggttgccagctgggacctgagctggggccggggccagaacacatacatgtgtcttctccaggtggcacttggcttccttccaaaatggtggctgggttccaagggtgagcatctcaagagacccatccaaagttgtgttaccttttaagtctcagcacagaagtcacatagtgctaccttcccaactgtcacaatcccaaccagattcaaggggtgagacggcaggtggggaacatggatgtagaacacatgggatgggacacattgttgcagccatctttgggaaatgcaatctgccacatacatattcatcacttacagacatttatgaagtatgctccatatgctgaatactgggtttacaatggtgaatcatacagatggggtttctgttgccatagagtttgcatttcagttggagtgttgtcgggggaggatttagacacataaacaaatacataagataaaacctgtatgcatgggttacaaggaggatgctgtttatatacatcggtcaaggaaggcctttctgggaacataacaactttctgaggctggactaactggaaggaggcatctgggccagca

SEQ ID NO: 832 - DNA, 1354 bp, Homo sapiens
catggtagacagaataatggcccccccaaagacatcaaggtcagaggcatagatgcagaagttggggtgataagagcaatgaaccaagcaatacaaccatcctctagatgctggaaaagtcagggaaacagattctcctttagagcctccagaaaggaaagcagctctgccaacccattttggacttctgatggccagagctgtaagataattaacttgtgttgttttaactaagttcatggcaatttgttatagcagcaaaatagaaactaatacaatcatatacccagagacagcatttgcctccttataatacatgcttatgtatgaatgagttttccttagaacaatccagtcattttattttaacctacttcttctaagtttggcttccctaccagactgttagaaagcaggctccttggctgtcgcatctactattgtgcctatctccagtgtccttgtccatctggttacccactacagcccaaaaacctgtcatggggcctggcacaaagtaggctcttgaaaaatatttgttgagggaatagtacatcttgacatattgttccacttatctattgctgtgtaataaactacttccaaaatgtagtggcttaatacaacaatatttatcttgctcgtgagctctgcaatttgggcaggcctcagcagggacagcttgtgtctgatctacttggcatcagctgggacagctcaaatgcttagggctggtgtcatctgaagtcccaatcactaccatgctggttgccagctgggacctgagctggggccggggccagaacacatacatgtgtcttctccaggtggcacttggcttccttccaaaatggtggctgggttccaagggtgagcatctcaagagacccatccaaagttgtgttaccttttaagtctcagcacagaagtcacatagtgctaccttcccaactgtcacaatcccaaccagattcaaggggtgagacggcaggtggggaacatggatgtagaacacatgggatgggacacattgttgcagccatctttgggaaatgcaatctgccacatacatattcatcacttacagacatttatgaagtatgctccatatgctgaatactgggtttacaatggtgaatcatacagatggggtttctgttgccatagagtttgcatttcagttggagtgttgtcgggggaggatttagacacataaacaaatacataagataaaacctgtatgcatgggttacaaggaggatgctgtttatatacatcggtcaaggaaggcctttctgggaacataacaacttyctgaggctggactaactggaaggaggcatctgggccagca

SEQ ID NO: 833 - DNA, 573 bp, Homo sapiens
tgttactaaaattataaggacttaaaaaaaggcacttgctgattgaccaatggatcaaatagtcttacatggaggataaatatatttgagttaataataacagctaaaatgtgttgggtacttactacgtgacaggcactattctaacagctttatatgtattaactaattaaatgttgataaccaccctataagttagataatattattatcctcatcttacaaataaactaagacacaagaagattaagtaacaggcccaacatcacaagctaataagtgacacagtcaggattttagcccatagatttaattactacactatactccttctctggttaaatattaattactccaagaatacataccctgcaagyttaatcatttcttttaatagcacaggtttttttttagtatttagctcttttaatgaaactaacacaataaaagcgtggaccaaaaagaaaaaaacttggagaggggtggataatgctcttcgaatatttgaagacatttattgtggcaacagaaattcattttgtgttgctctaaatagatttggtataaaactaa

SEQ ID NO: 834 - DNA, 1722 bp, Homo sapiens
aaaaaaaggccaggcgcagtggctcacacctgtaatcccagcactttgggaggccaaggcgggtggatcacgaggtcaggagatcgagaccaccctggctaacacggtgaaaccccgtctctactaaaaatacaaaaaaattagccaggcatggcggcgtgcacctgtagtcccagctgctggggaggctgaggcagaagaatggtgtgaacccaggaggtggagcttgcagtgagccgagattgcaccactacactccagcgtgggtgacagagcaagactccgtctcaaaaaaaaaaaaaagagtagttaggcatcaattatttcaaaaccaaactgtttttatggcaacatgcgatagtatttaaacaaccaatcttaaatagttatatgaaaacaatatctctgctattaaagatatacagtataactgacacgaaggagttaatttccatgaatcacatattaatattgatcccattgttcttacaataagaccattcatttagtttgtggttaaccatgctgataggctctgagtcataaaattcttgataaaataatggaccagattttctccccaattttgaaaacaattttaatcacttttaggaaacttttaaagtaatctcttctaaatttattaattcattcaatgaatatgcattcagtgtctagtatatgctaggcgccaaggatctaatgaggaacaaaactaacagaggttttattctcagggatctttgttaatggtggagaaaagcatttaattaaattactatccaagtgtaataaattcaaactgtgataaatgctatgaagaaaaaggacagagcacccccaaaagctgagcattgcaaaagtacagagaatcccaaattcaaaaatccaaaatgctccaaatctggaacttttttagcactgacatgatgctcaaaggaaatactcattggaacatttcagccttttggatttgggatgctcaaccggcgtaatgcaaatattacaaaatttaaaaaaaaatgtgaaatctgaaacacttctcgttccaagcatttcagataaggaataatcaacccaaattataaaagcaaataacagaggtttgaagcaatttaataaagacagaaataacaatagsttaacatttattgccagtgctgcattgagcacattacatattccagcttatttagttctcaaaactattactcacccaattttcagttaaggaaactggacagggaaattaagcaacttgcccaaagtttgcagctagtaagtggtgatactgggatctgaatccaggtagtcaacttccaagacccttatgagtaaaatttgagttccccaaactttctgtagaagatacaaattacaggttctaggccaggcgcagtggctcacacccgtaatccctgcacttcaggtggatcacctgaggtcaggagttcgagaccaacctggccaacgtgatgaaaccccatctctactaaaaatacaaaaaattagctgggtgtggtggcaggtgcctgtaatcccagcttctcaggaggctgaggcaggagaattgcttgaacctgggaggtggaggttgcagtgagccgagatcgcaccactgcactccagcctgggaaacaagagtaaaactctgtttcaaaaaaaaaaaagtacaggttctactcctaagcaattctgctgctcagtataaagtgaaatgca

SEQ ID NO: 835 - DNA, 1631 bp, Homo sapiens
tcaccctgttcacatcattctatactctctgcttgatctctattaggctatgccaacaaggtgtgctagagggagactggaaggctggaggacaaaaatgaatatgatgcttctgttcttctccatggcaaccctggcctgatgtctactatcctgcattggcagtttgtttcagtcatagcagttgcggtaaatctagtttgtagtatttccaacacttgcagaaacagacttctgcactcctcagagacacctgcaccaggtgtctgggtcccaggcctacagggctgctcttccaagcccagaggtattaataccagcttaaacagtattcctttctcagagatctgagtttatactccacagggcccctcctctgagtttgtacaatttaataatttcagccacaatcctttgttccacagccttaggaatggcagctagttctcacagttgctatctctgtgaaaactttagcatcttatttttgctacttaaatctctgttagcaatactttatattatttgttaaaaataactggtgtggtttctgtttcctgaccaaatcctagttgatttacatttcaagtcccatcagccagaaactatcattactattaacatcaataaagctgttaaagcttgttaatttaaaaaagagaggccgggcgcggtggctcacgtctgtaatcccagcactttgggaggccgaggcgggcggatcacgaggtcaggagatcgagaccatcccggctaaaacggtgaaaccccgtctctactaaaaatacaaaaaattagccgggcgtagtggcgggcgcctgtagtcccagctacttgggaggctgaggcaggagaatggcgtgaacccgggaggcggagcttgcagtgagccgagatcccgccactgcactccagcctgggcgacagagcgagactccgtctcaaaaaaaaaaaaaaaaaaaaaaaaaaaagagagaggccgggcatggtggctcatgcctgtaatcccagcactttgggaggccaaggcaggcagatcacctgaggtcaggagtttcagaccagcctggccaacatggtgaaaccctgtctctactaaaagtacaaaaattagccgggcgtggtggtgggtgcctgtaatcccagctactcgggaggctgagacagaagaatcgcttgaacccgggaggtggaggttgcagtgagccgccgagattgtgccactgcactccagcctgggcgacagatcaaaaaaaaraagtgggggaaaagattctgtaaagcagtcttgttccatcatcttaacttagaagtctgttggatacaacatccatgttcttttccttcatcttcataaacctatgaggtaggtgtgaaagtaaaataaaccttagaaccccaaaatcactaagccaagggaaaggtcaagctgagaactacgtagctaggcaaacctgcctcccattctattcctaaataagatagcaacaaagataaaaaaaaaaactacatacctccctcacgatttgctcacaaggaagagttctgttgaatttcaccctgccaatgtaaactgatagcttatcttcaaagatgtgggacagaaagtcatctctgctcatctgagacaa

SEQ ID NO: 836 - DNA, 1803 bp, Homo sapiens
tgcatcaggactatatattgtgagttgatcccttatgcgctgatacgtagtgcattatctaaaggaaataacttgcttcttgattgaggtttgcaaactgggcatgttttcttttcacagtattaaagaaatataaaatttttacaaaaattccgtgactttcacaccttacaatttagtgagttagcaaaaacatcagttcaaaatgttgaactaaatgacaactaggagattggtttctgttctcaagttataagtagttcctattttctacctgaagcattagaaaaaagcttacttcaagtgagtaaaaaatactcatattgtgaagcaatttggacttcagaagttttatcaccactggattgagacattggggataagccatacaaatatgttgctaaactaataaaatcttgaagatttagaaatatatagatttctttaattcttatgttttaaagtttatgtttggaactatttaataaaaaagcaacattaggaaaaaatttttttctaatgaaagcagataaagtgggagctggtcagaaatctgttcaattcaggccttttgcaacctcatcaaaagtcaaattattttacaatgaatagttttgaattattatatttcttgcaaggtgattttctctctcttgttaggaagagtgacttccattcttaacaaagtaacgggaaaagaagaggtaagaaaacgtcaacaggctaaaattgtatgatctataatggtgtttcagcgtaaatttggaaacattggctaggagcagctgaagtccaaaactcatgatgatcacgttgatttgagttttccctaagcctgttccataacaggctttcatgtttaccgtagacataaattcactgtggttcttaagtaagggctatgtttgaaagaagtgactagaatgccaggattttctctcaagattaccccttcaaggaaagctccgtgcaactttccttcccagggctgcgcacacaaaatttcaggaaacagcaggtcttaattaggcctccagtttatagtttcacctgaaaaaatacatttaaaaaaatcatatatattcggctgtctagatttttcacgtcaataaattcttgctaattaatcacattaacggtgctccttaaaagttgaaacagaatcagaaaacaaaccaaattccccataaatatccaacataaagacctattcactgatgcattttcagtttctaagaattttacaagtgtttttttctccctaacaggacacacacayacacacacacacacacacacacaaaatatcactatctgtagctctcattctctgaagaggaaaacaattctggtggcaaattttaatacttcagaatgatgtcactgtgtgagtactttcctgcttagtgcccatgcgcataactgttttaagggattagagcctagaaaccctgagcagcaacatgtcatgtcatctcagatcctcccaactccccacaaaagggaaaaactaacaatgtgggagtgaagaaaagaaggtaaactgggaaggcaggagctaaagggacgaatggacttcctcctgtttgtgtaccattgcattcttcaaaagagccatcattcttgatataaattcactgcactaatattctattagaagctttggtctgctgtggcacctgctgtataaaagcaggattacttaaatcctcttcagaaacataaataaatagatttaaaatctcacttccctctgtggtatgtttcctgagaatagtgctactgctgttcattaagaaaata

SEQ ID NO: 837 - DNA, 634 bp, Homo sapiens
tgtcttcttggtgaactcttatcattatgtaatgtcctttatctctgcagattttccttattctgaagtctatcttatatgacattaatatagccatgttagtttttttcattagtgttttcgtggtatgtctttaaccatccttttactttagactagctatataatttttgaagtgaatcatttttaaaatccattctaataatctttgtctttttaaagaaaagtggctttgagatataattcacataccaaacaattcatttaagcatacaattcagtgtttttagtatattaacagttgtgcaaccaccactataatctaattttagaacacttttgtccccctaaaagaaacttggtacccattagcagtcaatccattcttctgtcctctctcccaagcrctaaccaaccacttgcctactttgtttctataaatttgtctattttggacgtttcatataaatggaatcatacaatatgcaatcttttgcaaatgacttcttttagtttaatattttcaaggtttatccatgttgtagcatgtattagcacttcattgctttttaattgctaagtaaaaatattccattttatgaatacaccacattttgtttatccattcatcact

SEQ ID NO: 838 - DNA, 589 bp, Homo sapiens
tttacattaaatctttcattttaaaaaatgctaatatttattttaaatgggrattatcagatagataactatgatttcataccattgagtcttagctggtatttctcgattatcttcagaagttcagtgcatgtctcttgaacagagtgaaaaaccttgagatataaattttattaggacaatttaaagaactataaacaaatatatgttataagcaccccaaaagcataacattttcttctaagtattatgtctgttttaaaaacattatgtctatttttcttggctatgacatgcttcagttttggttttacttccgatgtagaaagcacattcccccatgagagctggaaaaaaatgataaatatatgggagcaaacaaaaaattaaaactgaagagtttgtcctcatctcagctcctgtcctcatctcagctccaaactatctaaataacaacaacataaatctaatataaactgcatcaaatattgccaaccacagatgagagtgcagataaccttacaaagtattaactcgaagtctggcttttctctcatactggtctaaacaaaacagattagtgaattta

SEQ ID NO: 839 - DNA, 644 bp, Homo sapiens
taaaaaacacaaaacacagataccaactcatgatgttgagtacctgataacggatgggtgggatgagacttcagctttattggaaatgttttatttccttatctaaaaaaatactagaaagaaatacaacaaaatgttaacagttgttawtgtcggcctctgtaaatatagatattgtgttactttagtcttttttttaatctcaactaaattaaaaaaggaattttagtctttttttatctcaactaaattaaaaaaggaattttaaaaccctagtgttacatgcaagtgagtcaataatggcaaaataataatgagatacatagaaggtgactaaattttaatggtgaatactggatccaagtacaagtttgaaaattttgatttccgaaaaaaacacaaaacttaagtgatgaatgaaaaatagacaaaatggaagagggtaataagaatattattaaataacaaaatctacttcgaacgaggaaatctttccagttacagatatatttaaaactcacatatcccatctgttgttgttaaagaatataaaaagaataaaattttaaaggaagcgcagtgagtactgaaaaagctaaagtataaaagtacagaaaaaatgtaaatatagaatcacacaatga

SEQ ID NO: 840 - DNA, 2352 bp, Homo sapiens
tggtgtgttcactggagttgtscacatgctcacttgaggcgcccttcccttaccagttgaatgtccctaaaacttcatgtaccagttaaaccttgcccttttgcctcttagtgcacctgcttgagcccacttgcccaactcctgagatcttatcagaaagctgctgttcactagtttcaggtttttttctatctattgggagactgccattccttagtgccagctgtgaccaacttttattttggagagacagtgtaacaaccgcctgaccatcacctgatggttgcttgacattcctggttgtggaggggagccctttcttgccctgctcatatctgcctattacctactgtaacaaagggagaagggtaaggggaaggtgagagtgatctccctgtttctgctgtttgctccaaagccaaggtggcatattttagggtagtgtgtcctgaaccccatcaaaggttattgtttttagggctgtgacctcctatgaacccatgtgtggcagagaatgcaaaccaccttaggtgaaacacatgaaatgtatataaatctctgtcaaggtctagatattccaaagactgggaattagaacaaaacgagaaattagagaaaagaccagacattgactaggcaatgatggtgatgctgcaaagtcaaggacatatatggaagggtagagcagcttttgctagggctttatgtctctgcaatgcacaggagatattcctggcttattatctcttcatatgcgtaaagagattgcaaaagtttaagagaatttcattatttttgagactctgtagaggctaaagcaagtccactttggatgctaatccaccatgttggcttctgattaaccctagttctgggagggcctctaggatttccagtttatctatggttcctgtgtaataccaggtacttactacaaatcctgttcttaggtcaaacaacctcgaagttatcatacttcagttgtcctatacatcccttctgaacaaccccttctctgtggtagataagtcctggttctgaggggtaatggcatggagatccaccatcttgtctcaccactgctggagacacaaacatagctcttgtttgtaagtctctgttaagtgttttctcctaagaaactgggtttgtcagcctctttcttcagcctttcagcttcctcaaactttggtgtaaggtttgcatagacctgccctccttgaaacagacctcctcccataactggggaagagaaaaacaaaagagaaacaaaatgtcactattgtgcatactagttctctctggagaccatgggaaaaataaatattgtgtgggattattcagtaaataagtatttattgaataaatgttgcaaaagaggcaaccaatgtttttttatggaacatcgcattgaacattttattgaacattatatatgtgacatgctttctacatatctcatcttgttcattgttcactacaaaccagaggtagatttgcattgccctcatttaaaaaaaaataatacttttctcattttagagagcacaagagattcagtagcatgtccattagcaagtcattaaactagaaaaagtcattggatgccaggtctaactccagacagacattggaagacttattccttgcacaggcactagaagtataattgcatgcatgatagaactcctgccctcaaggagctgacagttctttggggaatacagatggagtaagtgatgtgtgggtgctatgggatcacataagcaaaagccctcactcagaataaaatatttagcctttatgacacatactgagccttttaagcatagtgggaaatgtactttgctcaatatatgagcaaagcaatccttgcagctaaaaacctcccatgtctgaggttgtttttagctgcaaggatggcgtcttgggagatggacctggaaggtttttagctgcatggactgcagcttatctgtgagctacaccacagtgtaagtaggttcagtacacctgcttcaaagagagtacatgggcccaaatccacttaacaccatgtgacttttggtattctgtgcctcagctttctcatctattaaagagagatgctaataattatactattcctaggaaagtatctttacaaggcacttagaatagtgcctgtcacataagtactcaactatatatttgacttcttcctcttgccagccagcatgcctggcaacagcaggcactcagtcaatgtttctgagtcaaaacaaaggttttggaaactcagaatgtattttagacaaccctgtaaataaactcagactcaatggaataaaaagccaatctggcacaaaataa

SEQ ID NO: 841 - DNA, 2352 bp, Homo sapiens
tggtgtgttcactggagttgtgcacatgctcacttgaggcgcccttcccttaccagttgaatgtccctaaaacttcatgtaccagttaaaccttgcccttttgcctcttagtgcacctgcttgagcccacttgcccaactcctgagatcttatcagaaagctgctgttcactagtttcaggtttttttctatctattgggagactgccattccttagtgccagctgtgaccaacttttattttggagagacagtgtaacaaccgcctgaccatcacctgatggttgcttgacattcctggttgtggaggggagccctttcttgccctgctcatatctgcctattacctactgtaacaaagggagaagggtaaggggaaggtgagagtgatctccctgtttctgctgtttgctccaaagccaaggtggcatattttagggtagtgtgtcctgaaccccatcaaaggttattgtttttagggctgtgacctcctatgaacccatgtgtggcagagaatgcaaaccaccttaggtgaaacacatgaaatgtatataaatctctgtcaaggtctagatattccaaagactgggaattagaacaaaacgagaaattagagaaaagaccagacattgactaggcaatgatggtgatgctgcaaagtcaaggacatatatggaagggtagagcagcttttgctagggctttatgtctctgcaatgcacaggagatattcctggcttattatctcttcatatgcgtaaagagattgcaaaagtttaagagaatttcattatttttgagactctgtagaggctaaagcaagtccactttggatgctaatccaccatgttggcttctgattaaccctagttctgggagggcctctaggatttccagtttatctatggttcctgtgtaataccaggtacttactacaaatcctgttcttaggtcaaacaacctcgaagttatcatacttcagttgtcctatacatcccttctgaacaaccccttctctgtggtagataagtcctggttctgaggggtaatggcatggagatccaccatcttgtctcaccactgctggagacacaaacatagctcttgtttgtaagtctctgttaagtgttttctcctaagaaactgggtttgtcagcctctttcttcagcctttcagcttcctcaaactttggtgtaaggtttgcatagacctgccctccttgaaacagacctcctcccataactggggaagagaaaaacaaaagagaaacaaaatgtcactattgtgcatactagttctctctggagaccatgkgaaaaataaatattgtgtgggattattcagtaaataagtatttattgaataaatgttgcaaaagaggcaaccaatgtttttttatggaacatcgcattgaacattttattgaacattatatatgtgacatgctttctacatatctcatcttgttcattgttcactacaaaccagaggtagatttgcattgccctcatttaaaaaaaaataatacttttctcattttagagagcacaagagattcagtagcatgtccattagcaagtcattaaactagaaaaagtcattggatgccaggtctaactccagacagacattggaagacttattccttgcacaggcactagaagtataattgcatgcatgatagaactcctgccctcaaggagctgacagttctttggggaatacagatggagtaagtgatgtgtgggtgctatgggatcacataagcaaaagccctcactcagaataaaatatttagcctttatgacacatactgagccttttaagcatagtgggaaatgtactttgctcaatatatgagcaaagcaatccttgcagctaaaaacctcccatgtctgaggttgtttttagctgcaaggatggcgtcttgggagatggacctggaaggtttttagctgcatggactgcagcttatctgtgagctacaccacagtgtaagtaggttcagtacacctgcttcaaagagagtacatgggcccaaatccacttaacaccatgtgacttttggtattctgtgcctcagctttctcatctattaaagagagatgctaataattatactattcctaggaaagtatctttacaaggcacttagaatagtgcctgtcacataagtactcaactatatatttgacttcttcctcttgccagccagcatgcctggcaacagcaggcactcagtcaatgtttctgagtcaaaacaaaggttttggaaactcagaatgtattttagacaaccctgtaaataaactcagactcaatggaataaaaagccaatctggcacaaaataa

SEQ ID NO: 842 - DNA, 1595 bp, Homo sapiens
tgcattgtatagtctgggtctctctctgccccactcctgcttcctctccacttcctttttacatatattagatctaaaggctttccactcaatttttcttattcatcattttatcttttacagtatgtataaccmaataagttgttgtcacccttaattctgtctcaatgtctgtttcccaagggtcctatctgatgcagaactccagaatatgttacaagtatatttgttaagattattcagcatcaaggtaaattttagctgaagggcttttcacaatatcttgtatgacacatgcttcaattggaaatcaattacgcttgcaatttctttggggtttgtcctccatattaccaatatgcacttcatttctttgatagtctatttttctcctccctttgttgacatgctcctattttatgtccttttattatctttcaccattttttcctgagttctcatttttgcttcaagattttattcatattaatattcctgcaataactttctttaattcatggtgatacagctggtgaccaattgattcagttctatatctgtatttttctggtgattctactctaaagaagtttttcctcttctttttctcctctttataacattattttatagaacgtatttcatttattattattattgttaatcttcgaatgaggcgttaaagaaaatctgagctatatttcaagtcagaaagaacttttcctggttcacgtaaagttccttataaagcacaaagttgtaggaatgaatgacttgatgtttttctggacaaaagtgattgatagctgaaatattgctcatttccctccatttgtttcctgaacataggtgtgtcttgtgcttctatatttggcagctcttctcttccttcttaaactccaactaagtctaggggatctcctgccaatagacgcaccatgtttctattgttgaaaataagaaatgttggttttctcttctaataattgttatctactttgcactgcaatgtcctgtaggtctctccttagatctgcacctctgtttaatttttttttttctttttctttttttttttttttttttttttttgagacggagtcttgcccttgtcatctaggctggagtgcagtggtacgatctcggctcactgcaatatccacctcccgggttcaagcaattctcctgcctcagcctcctgagtagctgggattataggtgcctgccaccatgcccggctactttttgtacttttagtagagatggggttccgccatgttggccaggctggtctcaaactcctgacctcaggtgatccacccacctcggtttcccaaagtgctgggattacagatgtgagccaccatgtctggccacctctgtttaatttttatggtatttgacaacccattctttcacattatagttgatattcatatgacttttagttttatccaaaaggaagataacatattttcctttcctttctctttattgcttgaggataatttccaagaagagaaagactttaaactgtctgtctacttcaatattttaaaaccagagttttatatttatattttacacgtaatgca

SEQ ID NO: 843 - DNA, 1595 bp, Homo sapiens
tgcattgtatagtctgggtctctctctgccccactcctgcttcctctccacttcctttttacatatattagatctaaaggctttccactcaatttttcttattcatcattttatcttttacagtatgtataacccaataagttgttgtcacccttaattctgtctcaatgtctgtttcccaagggtcctatctgatgcagaactccagaatatgttacaagtatatttgttaagattattcagcatcaaggtaaattttagctgaagggcttttcacaatatcttgtatgacacatgcttcaattggaaatcaattacgcttgcaatttctttggggtttgtcctccatattaccaatatgcacttcatttctttgatagtctatttttctcctccctttgttgacatgctcctattttatgtccttttattatctttcaccattttttcctgagttctcatttttgcttcaagattttattcatattaatattcctgcaataactttctttaattcatggtgatacagctggtgaccaattgattcagttctatatctgtatttttctggtgattctactctaaagaagtttttcctcttctttttctcctctttataacattattttatagaacgtatttcatttattattattattgttaatcttcgaatgaggcgttaaagaaaatctgagctatatttcaagtcagaaagaacttttcctggttcacgtaaagttccttataaagcacaaagttgtaggaatgaatgacttgatgtttttctggacaaaagtgattgatagctgaaatattgctcatttccctccatttgtttcctgaacataggtgtgtcttgtgcttctatatttggcagctcttctcttccttcttaaactccaactaagtctaggggatctcctgccaatagacgcaccatgtttctattgttgaaaataagaaatgttggttttctcttctaataattgttatctactttgcactgcaatgtcctgtaggtctctccttagatctgcacctctgtttaatttttttttttctttttctttttttttttttttttttttttttgagacggagtcttgcccttgtcatctaggctggagtgcagtggtacgatctcggctcactgcaatatccacctcccgggttcaagcaattctcctgcctcagcctcctgagtagctgggattataggtgcctgccaccatgcccggctactttttgtacttttagtagagatggggttccgccatgttggccaggctggtctcaaactcctgacctcaggtgatccacccacctcggtttcccaaagtgctgggattacagatgtgagccaccatgtctggccacctctgtttaatttttatggtatttgacaacccattctttcacattatagttgatattcatatgacttttagttttatccaaaakgaagataacatattttcctttcctttctctttattgcttgaggataatttccaagaagagaaagactttaaactgtctgtctacttcaatattttaaaaccagagttttatatttatattttacacgtaatgca

SEQ ID NO: 844 - DNA, 532 bp, Homo sapiens
  misc_feature (1)...(532): n = A,T,C or G
tccaaatggcgccttggaggactaactgatatcattaacacagactcgtagagatgtcatcattttcttcttcatcatcytcgtcaagattagttttaagtgttgggagtccgaggtgggtggatcacgaggtcaggagatcgagaccatcctggctaatatggtgaaacctggtctctactaaaaatacaaaaaattagccgggtgtggtgggtgcctgtagtcccagctactcgggaggctgaggcaggagaatggtgtaaacccgggaggcagagcttgcaatgagctgagaccgcgccactgcactccagcctgagcgacagagcgagactctgtctcaaaaaaaaaaaagattagttttaagtgaaccatgtactagttctcaaatcaaccacatcgggtaggttccattattatttaattctgcagatgtgaatacaaggccacaagttcgtaagtgatactgccggggctcaaaccacttatgtattatgtcaaaagccatgctcttagccattgcnctatnctc

SEQ ID NO: 845 - DNA, 532 bp, Homo sapiens
  misc_feature (1)...(532): n = A,T,C or G
tccaaatggcgccttggaggactaactgatatcattaacacagactcgtagagatgtcatcattttcttcttcatcatcttcgtcaagattagttttaagtgttgggagtccgaggtgggtggatcacgaggtcaggagatcgagaccatcctggctaatatggtgaaacctggtctctactaaaaatacaaaaaattagccrggtgtggtgggtgcctgtagtcccagctactcgggaggctgaggcaggagaatggtgtaaacccgggaggcagagcttgcaatgagctgagaccgcgccactgcactccagcctgagcgacagagcgagactctgtctcaaaaaaaaaaaagattagttttaagtgaaccatgtactagttctcaaatcaaccacatcgggtaggttccattattatttaattctgcagatgtgaatacaaggccacaagttcgtaagtgatactgccggggctcaaaccacttatgtattatgtcaaaagccatgctcttagccattgcnctatnctc

SEQ ID NO: 846 - DNA, 532 bp, Homo sapiens
  misc_feature (1)...(532): n = A,T,C or G
tccaaatggcgccttggaggactaactgatatcattaacacagactcgtagagatgtcatcattttcttcttcatcatcttcgtcaagattagttttaagtgttgggagtccgaggtgggtggatcacgaggtcaggagatcgagaccatcctggctaatatggtgaaacctggtctctactaaaaatacaaaaaattagccgggtgtggtgggtgcctgtagtcccagctactcgggaggctgaggcaggagaatggtgtaaacccgggaggcmgagcttgcaatgagctgagaccgcgccactgcactccagcctgagcgacagagcgagactctgtctcaaaaaaaaaaaagattagttttaagtgaaccatgtactagttctcaaatcaaccacatcgggtaggttccattattatttaattctgcagatgtgaatacaaggccacaagttcgtaagtgatactgccggggctcaaaccacttatgtattatgtcaaaagccatgctcttagccattgcnctatnctc

SEQ ID NO: 847 - DNA, 1112 bp, Homo sapiens
tgtaaacccagaatcctgccaagcccttctgaggaggtccctgtgaagccaggcaggccattgagggaacctgagggcagagccttggctcaggccctgggcatcaggkggtgctcgccctcaggtgatgtagctgcaggactctgttctgatgagagaggatggtctttctctgtggtctcctgcctcatgggggagatggtttgtgagaatataaaggcacaagttgggctgggtttggtggctcacacctgtgaattttaggaggccaaggtgggagaattagttgagcccaagagttcaagaccggcctgggcaacatagtgagaccctgtctttacagaaaacaaaacaaaaaaattagccaggtgtggtggagtgtgcctgttgtcccagctattctggaggctgaggtgggaggatcacttgagcctaagaggtataggctactgtgagctgtgattgcaccactgcactcagtctgtgtgacagagggagaccctgtttcagaaaataaataaataaaagcacaggcaacatcagcaagaggaaggtccctattctgaaaagcccagacttgccagtcaccagaacagggtttttcctggataagctgtcaagggcagggcagccacttggcagaggacctggtgtccagggagcatgcacaggacctggagactggggagaccatgaagactcagtccttcctgcagaggggaggtagccagagtctcagttaaggagggatgttgaaattctgccgtatggtcagcactggcccctctcgggtgcccaagctgccccctggcttctgccttctgatgcatccacccccatccctggcagtatggcagcctggacgtgcggaacaagacagtggaggaagtctatgtggagatgctgaagcccagggatggcgtccgcctgaaggtgcagtaccgccctgaggagttcacgaaggccaagggcctgcctggtgacagcttctacatcaggtaccagtggctggggaatcggtgggagatttggaaccagaggagaggctttcactggagactcttttcctggtgaatggctctctgtttcttgccccccaaggctggggccat

SEQ ID NO: 848 - DNA, 662 bp, Homo sapiens
tgcatgagtgactatggcccagtcagtgtcctgcagacaggcatctgttctgttaggacaatgacacaaatacttcaaatgtcatctcacaaggggccctatcatcccttaccctcatcccccagggcagttaggaaggggagatgacccatttccaaagtgggtaccgttgactgtgagagagttagacttcttraacaaccttttaagggcttattttcaagatttttttttttttaaagaattcaaccagaagtgattgctagaaataggcaggtggcctggtggcatgggtgcattttccaaatgttttgtcaacaaagctgcagggtcctgctacttttgtgtgtagatcagagcccaaaccaggatctttgcttggaggagaacctccacaaaagcccctcttagctgtgtccctccgcaagatgagtgggcagccttgccctgcgagcttggacaaaactaaaactccaagctccccggagacagggtggttccgtgtgcattcctcctcggaggccagcttcctctggatttgttcttaggcttttgcagctgagggccactgcaaagaaaggttatccaaggagatgacatggcggcgagggctctagctggccctgtagatgagcctaaaaggcgagattagagcagctcag

SEQ ID NO: 849 - DNA, 709 bp, Homo sapiens
cagcagtcaggacaagaagcttaccttggttgatcctggttaattgaaagtgacagacaaagcctctcagacttccccccctcatctcaggctggatgctggtgagcttattcagcactggttacagcaagtcctgttccattgaccaaccagctctcttgccacatgggccatctgtccattaatatggggtgtgaccatttatggaaatgactacaaaccctcatcctactcacagcctcaacatctattgtatcttggtggccaagtaggaataagtagcaaagttaatttcattgtgactgtattcttttttttggtcctccctgtcttcactttattcatataagtaaagaaaactcctattaaaggcaaaacaaacaaaaaacaggcagccaaggagtttgagagtaatgtagtttcataaacagcaccttcagatatgtatgatctcccgtgatttgcgggtataccacaaacagttttttcttaaaagtatgggacacacagtttgatgtcaaattaytgagaggaagatcaaaccctgcagatttcagatttcagatttcccttgatagtggctgttttactctgacatgcctaaaattaacatatgtcacatttaaaaatgtattacacatattcacgtaagcttaagaaagggtatcatgaaacaaggaaattgaaacacacgtcagtgatagaagtt

SEQ ID NO: 850 - DNA, 1169 bp, Homo sapiens
tgcatgtccagccaattccctctctgtgtgggattgggcatgtccttcccctgcctgggtctcagtgtcaccccctacagggaggggactttggccacctgtgtcctggatttggtcagacttcaccactcaccagatagttacacaggactctttccccacctataaagtgggactcataagagcattgctgaggactgcatgaggcaatgtatgttaaggcgcagtccctggcatgtcatgaatacgccgtagatgctggtttcaaaaaaatcaccagaacgaagacccaccacggaaacagggcggggttggagtctggaagatgtgtgctcccagcctggctccacctctcagtggccagaagcctccggagacctttcaaccctgggcctcactctgctcttgtgcaaaatgggaacagcagagccccctttggagaggagaaggtcggtcaggaagaaagaggatgagtctggtgaaggagagtgtgttgcccacagcaggtcagtaaccagggctataatcccccaagcccctcccaagggcgaaaccccagtctgccacatggaaggatgtgccccaggcctcaccaaggcagcccctaatctcaggccagacccagcgcctgctcctgctcagagttaggggctggggctagagagatggatcaaaggcggagaaaattagcatgacagtgaacccaagaagggaggccaggattaattcactctcctctccctgctgtcccttctgcagcccagggagcctgccagggttgcaggaagggtcaccttttaccccaatcccctaccacacacctgaggcccagttcttacagaagacggcagggcagggacctgccatgagaagcggatccgctgtgcacacattccagagccgtagtcttgaagggataggaatgaaggcacctgggcagaagggacatctgcagaggctggagcctggacatgggtccagggggtgcactgtgagtccacagaccccaccatgtcgtgtcaggcacactggagcccgtgtgaacgcgtgggtgtgtatccgtcattctgggaatgggacttgttggtgcttggttgtcagtctgaggcccaaagcccacaygtgccctatgtgtgcatctgcggcagggtgggtgtggtgcctgcaga

SEQ ID NO: 851 - DNA, 605 bp, Homo sapiens
ccccaggggacaggataacaagatgggtggaagtttataggaggaagacaagttgcaaccccttggctcatctgttaatccaatactcacagcagcttctcctttcattgcaatatatattgaggttatacagggaaacagtctsatgaagtaattaaaaggtcgagacatactgacataagcctgtagtcttagctacttgggaggctgaatcaagaggattgtttgaacccaggagttcaaggctgcagtgaattatgatcacgacactgaactccagcctgggcaacagagtaagaccttgtctctaaaaataatttttgtaaataactgtttttaaaggtcaggatataatgctttttaaaaaggagttaaactttttctctagcaattgcctactctaagttatatgaagtccctagctatgacactcaaactaaaaaaagctgggattcatgggctaattttcccaggtggagcacagggctgagtctcaactttatgagtcaagaaacgtgttactgtccttgtactcagagataatgaatgtgagataatattccttggaaaactgagtctcatgttcttgactcaacctgtttttt

SEQ ID NO: 852 - DNA, 587 bp, Homo sapiens
tggcttcttgctgttgtttgagacatttcttcctaacayagcatcttgagtgctgatgttttccagagtttcatgtttattccttcctttttatcattcagtaaactacatggttaatttactaattaccatgacctcaatttccacaaatgtgaacattttgccaagtcttcaatagttacgtatggccaattcatacaatgtaaatgtgtcagagataactaactggtgggtgacactcaacattcaattcactcattccaaaggtcttattatgccttctcagtcctgaatgtacccttcttactaatctgaattaagaggattggttcccttttgacatttgccttgccaataatattgcctgccatttaacccaaggtttccaatgcctggcagatagtctctgtcaccacacacagcactggtcacatagtgtgttctcaatacatgtgtgtttaacgaaactgaaaagaatacatagcaggatataagaagatgctaagccacatgaaaggatagtaataatggcagcttaatgtactgggtgaaatggtcagagagacatgagggctggcactaatcaa

SEQ ID NO: 853 - DNA, 587 bp, Homo sapiens
tggcttcttgctgttgtttgagacatttcttcctaacacagcatcttgagtgctgatgttttccagagtttcatgtttattccttcctttttatcattcagtaaactacatggttaatttactaattaccatgacctcaatttccacaaatgtgaacattttgccaagtcttcaatagttacgtatggccaattcatacaatgtaaatgtgtcagagataactaactggtgggtgacactcaacattcaattcactcattccaaaggtcttattatgccttctcagtcctgaatgtacccttcttactaatctgaattaagaggattggttcccttttgacatttgccttgccaataatattgcctgccatttaacccaaggtttccaatgcctggcagatagtctctgtcaccacacacagcactggtcacatagtgtgttctcaatacatgtgtgtttaaygaaactgaaaagaatacatagcaggatataagaagatgctaagccacatgaaaggatagtaataatggcagcttaatgtactgggtgaaatggtcagagagacatgagggctggcactaatcaa

SEQ ID NO: 854 - DNA, 619 bp, Homo sapiens
aagtatagctttaaaatgactccagatccatgaacagttgaaagcttttgtgataaaataacataaaatatacataattatgaacttaatattaaaaaccacaaatgcttcaaataaattactaaaagaacacctttgcaaagaccctctgctccaaagtttagtatacagcaagagaaaattaagaaaactggacttgattctgacaaatgtgtaagtgtccagtagaagaaataatagttatacaaaggaagcaaagctggtcctatcagggctaacactggtgcctttatgcaaattacaacaaacggaaaaatcagtatcttctctaggtggacttgcctccaggaatacactgcttaggaaataactatttcttatttgtatcagttaagaaaaggaccccccatattgtagattgatgaagccctatcctagggagtgtgcttggcaaacagaatgtagtctggattccaatccctacctgctctttcagtttatgccttcatgcagtgaaaaacttgtataactgcatgttggccttgtaagccttgggtscataacgggtagcgaaggcagtcattcaaatagtatgtctagagatcccgaagaacgacat

SEQ ID NO: 855 - DNA, 619 bp, Homo sapiens
aagtatagctttaaaatgactccagatccatgaacagttgaaagcttttgtgataaaataacataaaatatacataattatgaacttaatattaaaaaccacaaatgcttcaaataaattactaaaagaacacctttgcaaagaccctctgctccaaagtttagtatacagcaagagaaaattaagaaaactggacttgattctgacaaatgtgtaagtgtccagtagaagaaataatagttatacaaaggaagcaaagctggtcctatcagggctaacactggtgcctttatgcaaattacaacaaacggaaaaatcagtatcttctctaggtggacttgcctccaggaatacactgcttaggaaataactatttcttatttgtatcagttaagaaaaggaccccccatattgtagattgatgaagccctatcctagggagtgtgcttggcaaacagaatgtagtctggattccaatccctacctgctctttcagtttatgccttcatgcagtgaaaaacttgtataactgcatgttggccttgtaagccttgggtccataacgggtagygaaggcagtcattcaaatagtatgtctagagatcccgaagaacgacat

SEQ ID NO: 856 - DNA, 599 bp, Homo sapiens
tggaagtcatgacagctagtcccttccccacattcctgctggggcggcctaatggcaggtgggaactgacttcatctgtgaggaccacacaagcaccccctgtgattctgatgcctgtccatgaaatctgtgtcctcctgtctctagggcatagaggagcagctggtgacttcagaggcagaggcccagcaaaaggagcacacatagaagagggggtgctttgggaaaatgtggtctgcacggcaggsggggagtgctcttccctgctggcaccatgcagagctagctgaggagaagggagcagggtgggaagtggggttgggggctgtgcctctattaagagtgtcccttgactgctggtcctaccagggagagaagagaggacaggaaggtgaaggagagctaagcatgcattgtgtactcctccattgtgggcctccaagagcaagagggaggctgggggagccgggttgaagatctttgggccactggtgctgccctccatgcagccctagcaggacggcctgagagcgacaggtgggaagtggggttgcggggctgtgctctttgacagatggaggtgcccagggctgactgaa

SEQ ID NO: 857 - DNA, 999 bp, Homo sapiens
tgggtcacagtgcccttgatttatgagtatttcaccttacatttttttcgtctttaattagaagcttaaagagaagtttgtagaatgtactcataagtggatgggataatactattaagttctgatattctgatattgtttgaaatactcttaataattctacatttggtaagtttttttatatcagtattaaaatagtaatttggtttattacatttttatacatagaatttgccagttactttctgactacaaagaaaaacagatgctaaaaatctcttctgaaaacagcaatccaggtaagacttgtgatagtgaattactttagtcagttgtccccaacctttttgacaccagggaccggttttgtggaagacaatttttccatgggctgggggaaggtggggatggtttcaggattattcaatcatgttacatttattgtgctactttatattattatcacattgtaatatataatgaaataattacacaacttaccataatgtagaatccgtggaagctctgaactmatttttctgcaactggatggtctcatctgggggcaaagtgagacagtgacagatcatcaggcattagattctcatacgaagcacacaacctagatccctcagatgggcagttcacaacaggttcatgctccaatgagtatctaatgctatcactgatctgactggaggcagagtacaggcggtaatatgagccataaggagtggctgtaaatacagatgaagcttccctggcttgcctgctgctcacctcctcctgtgtggtgtggttcataatagtccatggactggtatgagtgtgtggcctgggagttgaggacccctgctctgcgtggtcctaccatagataaaaaagtaaaagtaaggaatttttgatcacaaaagaacactgaagcacaagtcatgttacatatgcttgtcccaataaggtctcactattattgacttcattcctcctcatttgaagttg

SEQ ID NO: 858 - DNA, 999 bp, Homo sapiens
tgggtcacagtgcccttgatttatgagtatttcaccttacatttttttcgtctttaattagaagcttaaagagaagtttgtagaatgtactcataagtggatgggataatactattaagttctgatattctgatattgtttgaaatactcttaataattctacatttggtaagtttttttatatcagtattaaaatagtaatttggtttattacatttttatacatagaatttgccagttactttctgactacaaagaaaaacagatgctaaaaatctcttctgaaaacagcaatccaggtaagacttgtgatagtgaattactttagtcagttgtccccaacctttttgacaccagggaccggttttgtggaagacaatttttccatgggctgggggaaggtggggatggtttcaggattattcaatcatgttacatttattgtgctactttatattattatcacattgtaatatataatgaaataattacacaacttaccataatgtagaatccgtggaagctctgaactcatttttctgcaactggatggtctcatctgggggcaaagtgagacagtgacagatcatcaggcattagattctcatacgaagcacacaacctagatccctcagatgggcagttcacaacaggttcatgctccaatgagtatctaatgctatcactgatctgactggaggcagagtacaggcggtaatatgagccatarggagtggctgtaaatacagatgaagcttccctggcttgcctgctgctcacctcctcctgtgtggtgtggttcataatagtccatggactggtatgagtgtgtggcctgggagttgaggacccctgctctgcgtggtcctaccatagataaaaaagtaaaagtaaggaatttttgatcacaaaagaacactgaagcacaagtcatgttacatatgcttgtcccaataaggtctcactattattgacttcattcctcctcatttgaagttg

SEQ ID NO: 859 - DNA, 999 bp, Homo sapiens
tgggtcacagtgcccttgatttatgagtatttcaccttacatttttttcgtctttaattagaagcttaaagagaagtttgtagaatgtactcataagtggatgggataatactattaagttctgatattctgatattgtttgaaatactcttaataattctacatttggtaagtttttttatatcagtattaaaatagtaatttggtttattacatttttatacatagaatttgccagttactttctgactacaaagaaaaacagatgctaaaaatctcttctgaaaacagcaatccaggtaagacttgtgatagtgaattactttagtcagttgtccccaacctttttgacaccagggaccggttttgtggaagacaatttttccatgggctgggggaaggtggggatggtttcaggattattcaatcatgttacatttattgtgctactttatattattatcacattgtaatatataatgaaataattacacaacttaccataatgtagaatccgtggaagctctgaactcatttttctgcaactggatggtctcatctgggggcaaagtgagacagtgacagatcatcaggcattagattctcatacgaagcacacaacctagatccctcagatgggcagttcacaacaggttcatgctccaatgagtatctaatgctatcactgatctgactggaggcagagtacaggcggtaatatgagccataaggagtggctgtaaatacagatgaagcttccctggcttgcctgctgctcacctcctcctgtgtggtgtggttcataatagtccatggactggtrtgagtgtgtggcctgggagttgaggacccctgctctgcgtggtcctaccatagataaaaaagtaaaagtaaggaatttttgatcacaaaagaacactgaagcacaagtcatgttacatatgcttgtcccaataaggtctcactattattgacttcattcctcctcatttgaagttg

SEQ ID NO: 860 - DNA, 999 bp, Homo sapiens
tgggtcacagtgcccttgatttatgagtatttcaccttacatttttttcgtctttaattagaagcttaaagagaagtttgtagaatgtactcataagtggatgggataatactattaagttctgatattctgatattgtttgaaatactcttaataattctacatttggtaagtttttttatatcagtattaaaatagtaatttggtttattacatttttatacatagaatttgccagttactttctgactacaaagaaaaacagatgctaaaaatctcttctgaaaacagcaatccaggtaagacttgtgatagtgaattactttagtcagttgtccccaacctttttgacaccagggaccggttttgtggaagacaatttttccatgggctgggggaaggtggggatggtttcaggattattcaatcatgttacatttattgtgctactttatattattatcacattgtaatatataatgaaataattacacaacttaccataatgtagaatccgtggaagctctgaactcatttttctgcaactggatggtctcatctgggggcaaagtgagacagtgacagatcatcaggcattagattctcatacgaagcacacaacctagatccctcagatgggcagttcacaacaggttcatgctccaatgagtatctaatgctatcactgatctgactggaggcagagtacaggcggtaatatgagccataaggagtggctgtaaatacagatgaagcttccctggcttgcctgctgctcacctcctcctgtgtggtgtggttcataatagtccatggactggtatgagtgtgtggcctgggagttgaggacccctgctctgcgtggtcctaccatagataaaaaagtaaaagtaaggaatttttgatcacaaaagaacactgaagcacaagtcatgttacatatgcttgtcccaataaggtctcactattaytgacttcattcctcctcatttgaagttg

SEQ ID NO: 861 - DNA, 660 bp, Homo sapiens
aaccatggcttggtgagtggctgcccctgggggctcaccatctccactgatgcctacactcctccctgcctctggcaagcgccatctccaagggatcatgaaaagatcttttctgacttttaccccaggggaaataagcaggagacacattattttctaatttttaatgttcttctggttggaaccagaacaaatggctatgatcacatcagactttccagtaaatccaacaaaactgattctaactttgttatttcaaaatatatgccaatttgagttagggtgggtttaaatttatctggtttatttatctctacatyatctgggcagagaagcttggctaagtagcctgaagaacaaaacagaatgacaaggtttaatctacttacaaaaatgtgttcttttcaagggtttcagtacattctttaattacaaaggtcttgggtggttcattaaaacaatgagctaagagcagttaattcctactatgaaataaaatggcatttctccaaatgactcccattcccaattttgcattaatttaaactaagcccaagtcaaccaaattagcaagctagataattacatagttttcagaatgggattctatctcagatgcagcagtcacctagtctgagactttaaccacccttttcccca

SEQ ID NO: 862 - DNA, 1902 bp, Homo sapiens
tgataactatttatttctctcatgctaatgtcctcacttattagctctggctctactccttgttgctttccctgtagaactcagggtaatggagccttctctctctggaattgtgtcactgaagagagaaaagagacatgaaagaccacacataggctcttaaaacttttgcctctcatcaactcacatcacttcatgaacatatcatgggcccaaacaagtagcatacctactcccaagttcaacagcgtgaggatgtggaaacatcactctcagagggacattacaagaagggaaataataatatttaaccttacagtaaataacaacactcatctctcattccctcagctatctcagattaagtaatttccaccactactccatttgaaccatctatactcatgtcatttcttatatatcatggtgttagccccttaagagagttgaaattctgtctcctcacacaacctcttgaatcgttactcaaggagtgatggaaatatttcacttaaatgagactgtaggagatgtatattgttcaaaggcaaaaacgcattgtcatccacttgtaaatgggcaggactttctctgtgctgagctagagtggtctggtactattggtggcctggatcatgctctttcttagagatgctaaggccatttgtatttactttctctctcccttttggattccctcccacatagccaggtaggatgggtgagtgaaacgaggataagaccagttatagcttaataaaaatcggagataactattctgttaaatctcttgaatcttttgtctgctccttttggaaaaggtggccttatcttggtttgaatagacagaacatgtgactactatttggcctttggtctagaagtagaaagagatttcctatttaactatttagttccagaacttttggacttgaatatacactaggttctttctaaaacataaataatgattgtttttggcttatgagattatatatgagtttttaaattttattcttgtagtttttcagatctttcaaatatttatttcacaataacaacattattacttttatagtaataataatagaataaaattattttggaaaacaacgtaagaaaaagtaaagagtaaagagaaaaactatgggagaatgacatcagggaagacagggataattccaagtcctttgagtgtctatataataccttgtttacttatatatttagcatagttctcatgttgaaagatgttagttcgaccttatggtggtatggtcctagtgatccacaaatatccaaaatggtatggtcctagtgatccataaatatccaaaatctacaccagacaaatcagctatttttgtagttcttggtaaaaatgaacagaaaaggtaacacaagggaaaagatactacaggaatttctaggtctttaggaatactccaatgcataactcttatgagttatcctgaaacataaagatggagaccattttagatggagtccagaaatctggactcagcacacctaagaaactggaagcaaagaagtctgcctatgtgtcctatgttgttattcccttactgaagtatgaatatgtttgaggatttctaattcagagtacaccaaccagttaggaaaggagagtgcaaaacaagacgccctttctccaagccttggctgcttattttgaacattttcttaggcayagagaagatatttgcttttgggtctgtttatctaacggaaggaaaatgaagagagattgactcagcagagtaaaggacttcaagaaggagatacaggatagagaaagagagagagagacacacacagagagagattgcatgatcttaggaaggaaaggtccagaaaaagtatgcattcactagcaaaatg

SEQ ID NO: 863 - DNA, 657 bp, Homo sapiens
gtgccctgccaaaaaattacatttaaaaagaaacaaccaatgtattaatagacagatatgagctacaaagagaaatactgggaatgaagaagtagtcattgaaattaaaaaatctactagatgagagttctagactggacagagtcatagagataattagtgatgtttgatacttgttttgaataattcactcagaatatatcacagcaatggaacagaatagagagcctagaaataatgctgcacacctacaaccatctgatctttcacaaagctgacaaaarcaagcaatggggaaaggacttcctattcagtagatggtgctggcataactggctagccatatgcagaagattgaaactggaccacttcctcacaccatatacaaaaatcaactcatgatggattaaagacttaaatgtaaaactcaaaagcataaaaacccttgaaggtcacctaaaaaatatcactctggtcattctggacagaggacctagcaaggatttcatgataaagatgccaaaagtacttgcaacaaaaataaaaataaaaaaaagggacctaattaaactaaagagcttctgcatagcaaaagaaactatcaatagaataaaaatacaatccacagaatgagaaaaaaaatttgcaaactatgca

SEQ ID NO: 864 - DNA, 1305 bp, Homo sapiens
tatgtatataattgttagatatattactgtactggattgtttcacacaaaagggagctgacatgtgactgtaccataatttacttagttactgattgattgtcagtattaccagtgacgatgggtgaacatcttgacatgtgtccatttctcctcttgggttgtatttcctttaagtgctcagttgatcagcctgccttttgaattttatttctgaagtagttgaaccagtttgtattccctgggtttgagtgtgcccattttcccaaatyttcactgagtttagatatcagacatcgattttctcttcatcaacatgattgatggaaaaattgctcatttgtatttgcaattacaaatgtatttgattgcaaataactgcaaatacagatgcaaatagtattttcaaatagttatctatgtgtgttttcctttgtgaattgctaattgattgtcatttgtttagaaggagatgctggacctgctggccaagataagtctgaggtgccagagactccagaaattcctaatgagctttcatccaacatcaggtctgtgtgctttgaatccctttccctcagcagagtgatcacacctaggacactgctgtgcttctctttctggctgctgctatttatttagtgcttgagctaacttatgaggaattacttatacaaagaatacaagaagtatatcagttttctgtactggagttatatcactatatagtgatataatattttggagatttaggggaattcaaaattatagctgaattatgtgatgttttgattagtgacagttgttggtattttgaaattactgaaaatacaagtggaaagatggacactttctgattggtcgggttactgggacgttcctcctcttctgcagagtagcgtgtcctaaccagcacattgattatggcttggagatgagagttaacattcacctgggctttcttttccagtttgaaatgtataagcctttcatactccttttttggttttccaatatttgggtttagaagaattcctcggcctgggagtgcaagaccagcccctccccgggtcaaacggcaagacagcatggaggcgctacaaatggataggtaaggctggctcagcagggcagttccagccacacagtgtgttctccagtgggcatggtgcctccgctaagagaagggggagggaagcagcacatggtgctggaaacatgctattgaggaacaaaaagtgagggtaggccctcgcctcacaccataggccaacagacatgtcagatggatgaaagagaaaaacca

SEQ ID NO: 865 - DNA, 1495 bp, Homo sapiens
  misc_feature (1)...(1495): n = A,T,C or G
aaaggactataatgtattaacattccatcaatgaaaaaacaaactgcagaaggcatttctcctttcagcaaggcaaacagtggtgctgtcagcaaagcctccgccgacaacattctccagttattattgttaaaagggctccctctactgttagtctcaattgcacagttctcattggctatttcaggccctagctttgtgacaaactaggacatgttaagcaaaattatctaaaacaaccattaattcagctggggagaaatacatatatgtgtgcatgtgtgtgtacgtatgtgtgcacacatccctatatataaaacttttttaaattgttgagttattaggctaaatatccaagaaacttctgtttaaaagaaaaaaaaaattcttcttcctctttaaagtgactgtaagagaaacctggctgtggcatttgagacacaccctgttggcccacaggtgcccgccctagtggtcatgtgcccaaggaaagggtagtggctggcaagaggccacaggtcccaacaaaagcacatcacacatgtgtgagggagactgcggggaaccaggtacaatagaacatgtatttaaaaaaaagacttaaaaacattcccggccaggcgcggtggctcacgcctgtaatcccagcactttgggaggccaaggtgggtggatcacgaggtcaggagatcgagaccatcctggctaacacggtaaaaccccgtctctactaaaaatacaaaatattagctaggagcagtgtcgagcacctgtagtcccagctacacgggaggctgaggcaggagaatggcgtgaacccgggaggcggagcttgcagtgagccgagatcatgccactgctctccagcctgggcgacagagcgagactctacctcaaaaaaaaaaaaaaaaaaattcccagtctcttactttgcaatcagccaggatcaggcagccagcctcccagtctgcaaacaggacctgggagaagggatgggcaaggccagaaggggagagtcagggagtcagagcccaacagccctttggctcttggctcctgagctccccaagtaagccgctgccccctcccaagacggggctggataccaggccagggaagtagccccacagaggaagtcccacactttatatcctcccaactgggaggagggaggaatggctttttttttctttctgaggcagggtcncactccgtygcccaggctggaaggccgtggcacaatctcaatccactacaacctccacctcccaggttcaagcgattctcctgcgtcagccccccaagtagctgggactacgagcatgcgccaccacacccgggtaatttttgtattttttgtaaagacagggtttcaccatgttgcccaggctggnnnnnnnnnnnnnnnnnnnnnnnnnnnnnnnnnnnnnnnnnnnnnnnnnnnnnnnnnnnnnnnnnnnnnnnnnnnnnnnnnnnnnnnnnnnnnnnnnnnnta

SEQ ID NO: 866 - DNA, 1495 bp, Homo sapiens
  misc_feature (1)...(1495): n = A,T,C or G
aaaggactataatgtattaacattccatcaatgaaaaaacaaactgcagaaggcatttctcctttcagcaaggcaaacagtggtgctgtcagcaaagcctccgccgacaacattctccagttattattgttaaaagggctccctctactgttagtctcaattgcacagttctcattggctatttcaggccctagctttgtgacaaactaggacatgttaagcaaaattatctaaaacaaccattaattcagctggggagaaatacatatatgtgtgcatgtgtgtgtacgtatgtgtgcacacatccctatatataaaacttttttaaattgttgagttattaggctaaatatccaagaaacttctgtttaaaagaaaaaaaaaattcttcttcctctttaaagtgactgtaagagaaacctggctgtggcatttgagacacaccctgttggcccacaggtgcccgccctagtggtcatgtgcccaaggaaagggtagtggctggcaagaggccacaggtcccaacaaaagcacatcacacatgtgtgagggagactgcggggaaccaggtacaatagaacatgtatttaaaaaaaagacttaaaaacattcccggccaggcgcggtggctcacgcctgtaatcccagcactttgggaggccaaggtgggtggatcacgaggtcaggagatcgagaccatcctggctaacacggtaaaaccccgtctctactaaaaatacaaaatattagctaggagcagtgtcgagcacctgtagtcccagctacacgggaggctgaggcaggagaatggcgtgaacccgggaggcggagcttgcagtgagccgagatcatgccactgctctccagcctgggcgacagagcgagactctacctcaaaaaaaaaaaaaaaaaaattcccagtctcttactttgcaatcagccaggatcaggcagccagcctcccagtctgcaaacaggacctgggagaagggatgggcaaggccagaaggggagagtcagggagtcagagcccaacagccctttggctcttggctcctgagctccccaagtaagccgctgccccctcccaagacggggctggataccaggccagggaagtagccccacagaggaagtcccacactttatatcctcccaactgggaggagggaggaatggctttttttttctttctgaggcagggtcncactccgttgcccaggctggaaggccgtggcacaatctcaatccactacaacctccacctcccrggttcaagcgattctcctgcgtcagccccccaagtagctgggactacgagcatgcgccaccacacccgggtaatttttgtattttttgtaaagacagggtttcaccatgttgcccaggctggnnnnnnnnnnnnnnnnnnnnnnnnnnnnnnnnnnnnnnnnnnnnnnnnnnnnnnnnnnnnnnnnnnnnnnnnnnnnnnnnnnnnnnnnnnnnnnnnnnnnta

SEQ ID NO: 867 - DNA, 1339 bp, Homo sapiens
tgcataaaatatattctttacacagcatttataaggaaaacaatatttaagattgagacatctcattaatatcctgaaaaaatatttaaaagtcaagatactgaaattattttgaggaatgaaaatatatcaaagtgtcagcaaataaaaagagtgaatgaaactataaaatacttgttagttttaaatttatttgaccttgtgcttattgaaagtatgcaagtggacattttgtgaatagttaaatgataagtattatggggaaacaaggcaatggaagaccactcttctcatgatgaatttatattataataattaaacaagtcaacaatataagaatgatcctgaggcaaaaagattcattcaatatttattataattgaaatatatctgcattgtatggataaagttcctgtcatacagaaagtttcaatgctttattgaggctacacagctaaatggaagtacagtcataagtagaacccaggtctctggacatgaagttcagggataattttttactcaaggatctgcacatgaaagtaaatagcgtggtaataatgttttattaagcatggtagagattcaaaaatgagaaaaaaatttagtgtcagtatccccaaagtctttctggaaattatacaattgaagataggtcttgaagggtggttgaatatagagacagaggacttggggaggtgaaataggctaagaaaagcaacaatttaaattttgggtttgaataccagtgattagagagttagcatgactcaagtgttaatataaataaataagtgtggaaactaagtttcaaagactgtgtattataaggaaaacaaacttcacataataaattacaaagggggttttggaagagagaagtgtattagtgwtctaccctgtaactatagttttgaaaaccacagtttaaaaatgttatgcaaaaataataaaaagcaaatagatgaagaagtgattgcagttttgatatgagaactgacatatttattgttggttgggggcaattaaaagatacatatgtatatgtataaaagatatgatagactcactgaatttcatacttaaggacatttatttcaactaactaaacattgcccaaatctcttctacaatacagatctagtatttggttttctggtgcatgtttgaaaaccccaagaccactacattagtattttcttccagtagccaactcagtttttgaatatttctggctcttgaaaaaagttttccttattcaggtctaaaattgtagttcagtgcttagagtgttttctaattttctttttcaacctgtatacttatattttcttcaacc

SEQ ID NO: 868 - DNA, 642 bp, Homo sapiens
tgttttgtatgtgttatccaaggataggtattatttatctcctttacagattaacaaaatgaagctcagagcaacttgcctgaagtcgcatagctagaaagtgggatgactcaaactagaacctgggtctgcctgactccaaatcccatgccctttccactgccaaatcacacctttcacattcacctctactagccccatgtggattaaagggtggggaaatggaagggggagctgatgcctgagctagagagagcttaacaaaggytggcagtgagttcaaaagctaggacagtaatgtatacctgaagtcagggatatttcacaggtgcatttagagagggtatattctaaatgaatgtattactaattaattcgttcattcacactcatgaatttctttaacatatatttatgtggccaggtactgagactacaaataaaagaacacatccctcccctctaggtggagtaggtggacacgcagcctgtggtgagacaaacaccataaaagaagtatgtggggaaggcgcctattcgggaaaggcaatgtttaagcaaaaccatgaggaatggagagggaattgtcatgcttttaaccaatgtgaaaaagagagaacagggaaaaaaataatctcttcg

SEQ ID NO: 869 - DNA, 479 bp, Homo sapiens
  misc_feature (1)...(479): n = A,T,C or G
ctagtgaaatatgaaacagctaagaaataagcctttaaaaaattcctcttaagctccataatgcagaagctggctctgtctcgtctcttgtgacaagttacacntcttcgtctttttaaagttctaccctaattatagcatgggaaagtttcattttttgtctctaaaatagacatcttaaaatagaggggcagccatcagatgggtgagaagacagatgtctagcttcagaggaaagcagcaggctttcccaccgagcccctcctgtggcagttttggaagaaaagctcttcaaagtggcaaagtctgtcagtagtggagaagccggggtttccagctgttcagartggtgctatttttattatcacttctcttgccaaacagaattactactacttaaaatctgagagatttaatgaaagtttttcagaagctaagggtatgtgcagtggttggattcagcaatgggaatttgtgta

SEQ ID NO: 870 - DNA, 631 bp, Homo sapiens
tatttccagcacccagcagagtgcttggaatagaactcaatgataatgtaagtttattggattataaaaataggtcaggatgctctacacaaggctagctggcccacctaatataagccctcatagctcctttggataggtagccacatttcggccatttataaggaagagagagtggatcttgggccctgaatgccaagaaaaggcaagttttggtgaggcaatacccagaggaaaggtcttgatcacagatcattgcttaagtgtaccaagttgcaggcccagggcaagatgaaatcttggctccctagggaaacctacaagttaagaggaaaagcttgctaaaagcaaagaggcatctaaaatggaaaagtggctttgcagcttcacagactcccctagggatatgtctatagaaaaatctccagtaaggcagattgtattttccaagatggtacaacatgatctcccattccacatgttcttctcrtaatatgacactgatgctcttcccatcaaaaagtgagcctgtgtttcctccccttaaatctaggcaggcctgagactacaataaaagtgaaactgtgtaactcccaaggctaggtcataagggtgatactacttctgtctg

SEQ ID NO: 871 - DNA, 1760 bp, Homo sapiens
ccagacttaccacattctattctgtattcatttagacaaatcattttatcctgttcatagtggttcatctaccaaatatatctgcaacaaatagagctgttataatttcacaaatgaatgacataagaacttttctcgcatcttgcaggttggtatgaacactaaaataaatgtttataaaaaattacaaaataaaattctattgccaaagaattatgtgtcatagtgtttcctagtagaccatttctccataagggtaggaactacatctactgttttaactttagtgccttaacaatgcccagcacttagtaggcactgactactgtcaggtgaataaataaaggaatgaagtaacagatgctgaagcacctgaagtgagtggctcttggtagatattttcctctgagaatttgttggttagtatgtattcagaatttggagctgcttatgtctcagggatacaagttcattttgggccagagtggtcaaatcagaagtacccaaaacttaagattaatcaattgttttccatctrgcaaattttcatgaatgagtaggacctttgggagggattaaggaattgactggaccatttaaatcagcagatccaataatgcatactgtgtatcgaacagtgccccagatattagctggctaatagatatggactgactggggcaccctagtcctagatagtttgaaggtacagaggaatgtacttccggggcccagctattctaacatagcttagtaggaaagatctggttcaaatggatcatgcctcatatggcatatttagatgccacctggaaaaactccaaccacctgaattcaaattctggttttactactttctagctatgtgatcttggaaaatttgctatacttttgtgcctcatgtcccttagctgaaaagttgtgacaaattttaatttttctgcctccctcatagtttttataaagataaaatgaaataatctatgtaaaacatttattagtctgcctggtatataattatagctcagtaagtgttagaagctattattattattaatattagtactgcctcattgaggtataaaaccaagttgttaaggtatttggtgagtataaaatgagtttcaactctttttggaaaccaaggtatgtcatgtggctccataatcaatgggtttctggttagtctctttcattacagtataggttccttacaaactcacctgccagattttaattgcctttgacttccactcatccagtatagtgattgtcacatggtaggttttcaataaatatttggtgaatgagaatgagtgaaacttacacaaagctgcagagtgtttatgtaccataaaaaatgcccacggtcatatttagtgttgggttttgttctatgataagatttcagaagtctttagaaattttctttaaaatgtttttgtttaaaagtaagataaattaaaataaatctccctaaaatataattggccatgtttatttttagaaaagaaactactactgtgtttggataggaacaatctgtacttctccataaatatgtcacatttttgaactaccaagaaaaaaaacaatagaaagaaaaattcaatctcctgttgtttcaaattccatccaatttagagattttgtttttgtttttttttttgtttttaccactcctggtgtcagctgggatgcagtgctgggtgatacacatggatgaggccaggtctgggtgtgaaccaatctgcagttag

SEQ ID NO: 872 - DNA, 1760 bp, Homo sapiens
ccagacttaccacattctattctgtattcatttagacaaatcattttatcctgttcatagtggttcatctaccaaatatatctgcaacaaatagagctgttataatttcacaaatgaatgacataagaacttttctcgcatcttgcaggttggtatgaacactaaaataaatgtttataaaaaattacaaaataaaattctattgccaaagaattatgtgtcatagtgtttcctagtagaccatttctccataagggtaggaactacatctactgttttaactttagtgccttaacaatgcccagcacttagtaggcactgactactgtcaggtgaataaataaaggaatgaagtaacagatgctgaagcacctgaagtgagtggctcttggtagatattttcctctgagaatttgttggttagtatgtattcagaatttggagctgcttatgtctcagggatacaagttcattttgggccagagtggtcaaatcagaagtacccaaaacttaagattaatcaattgttttccatctggcaaattttcatgaatgagtaggacctttgggagggattaaggaattgactggaccatttaaatcagcagatccaataatgcatactgtgtatcgaacagtgccccagatattagctggctaatagatatggactgactggggcaccctagtcctagatagtttgaaggtacagaggaatgtacttccggggcccagctattctaacatagcttagtaggaaagatctggttcaaatggatcatgcctcatatggcatatttagatgccacctggaaaaactccaaccacctgaattcaaattctggttttactactttctagctatgtgatcttggaaaatttgctatacttttgtgcctcatgtcccttagctgaaaagttgtgacaaattttaatttttctgcctccctcatagtttttataaagataaaatgaaataatctatgtaaaacatttattagtctgcctggtatataattatagctcagtaagtgttagaagctattattattattaatattagtactgcctcattgaggtataaaaccaagttgttaaggtatttggtgagtataaaatgagtttcaactctttttggaaaccaaggtatgtcatgtggctccataatcaatgggtttctggttagtctctttcattacartataggttccttacaaactcacctgccagattttaattgcctttgacttccactcatccagtatagtgattgtcacatggtaggttttcaataaatatttggtgaatgagaatgagtgaaacttacacaaagctgcagagtgtttatgtaccataaaaaatgcccacggtcatatttagtgttgggttttgttctatgataagatttcagaagtctttagaaattttctttaaaatgtttttgtttaaaagtaagataaattaaaataaatctccctaaaatataattggccatgtttatttttagaaaagaaactactactgtgtttggataggaacaatctgtacttctccataaatatgtcacatttttgaactaccaagaaaaaaaacaatagaaagaaaaattcaatctcctgttgtttcaaattccatccaatttagagattttgtttttgtttttttttttgtttttaccactcctggtgtcagctgggatgcagtgctgggtgatacacatggatgaggccaggtctgggtgtgaaccaatctgcagttag

SEQ ID NO: 873 - DNA, 1760 bp, Homo sapiens
ccagacttaccacattctattctgtattcatttagacaaatcattttatcctgttcatagtggttcatctaccaaatatatctgcaacaaatagagctgttataatttcacaaatgaatgacataagaacttttctcgcatcttgcaggttggtatgaacactaaaataaatgtttataaaaaattacaaaataaaattctattgccaaagaattatgtgtcatagtgtttcctagtagaccatttctccataagggtaggaactacatctactgttttaactttagtgccttaacaatgcccagcacttagtaggcactgactactgtcaggtgaataaataaaggaatgaagtaacagatgctgaagcacctgaagtgagtggctcttggtagatattttcctctgagaatttgttggttagtatgtattcagaatttggagctgcttatgtctcagggatacaagttcattttgggccagagtggtcaaatcagaagtacccaaaacttaagattaatcaattgttttccatctggcaaattttcatgaatgagtaggacctttgggagggattaaggaattgactggaccatttaaatcagcagatccaataatgcatactgtgtatcgaacagtgccccagatattagctggctaatagatatggactgactggggcaccctagtcctagatagtttgaaggtacagaggaatgtacttccggggcccagctattctaacatagcttagtaggaaagatctggttcaaatggatcatgcctcatatggcatatttagatgccacctggaaaaactccaaccacctgaattcaaattctggttttactactttctagctatgtgatcttggaaaatttgctatacttttgtgcctcatgtcccttagctgaaaagttgtgacaaattttaatttttctgcctccctcatagtttttataaagataaaatgaaataatctatgtaaaacatttattagtctgcctggtatataattatagctcagtaagtgttagaagctattattattattaatattagtactgcctcattgaggtataaaaccaagttgttaaggtatttggtgagtataaaatgagtttcaactctttttggaaaccaaggtatgtcatgtggctccataatcaatgggtttctggttagtctctttcattacagtataggttccttacaaactcacctgccagattttaattgcctttgacttccactcatccagtatagtgattgtcacatggtaggttttcaataaatatttggtgaatgagaatgagtgaaacttacacaaagctgcagagtgtttatgtaccataaaaaatgcccacggtcatatttagtgttgggttttgttctatgataagatttcagaagtctttagaaattttctttaaaatgtttttgtttaaaagtaagataaattaaaataaatctccctaaaatataattggccatgtttatttttagaaaagaaactactactgtgtttggataggaacaatctgtacttctccataaatatgtcacatttttgaactaccaagaaaaaaaacaatagaaagaaaaattcaatctcctgttgtttcaaattccatccaatttagagattttgtttttgtttttttttttgtttttaccactcctgktgtcagctgggatgcagtgctgggtgatacacatggatgaggccaggtctgggtgtgaaccaatctgcagttag

SEQ ID NO: 874 - DNA, 1140 bp, Homo sapiens
gtataaagagctaaatttaccactttaacagctgggattttacaagttgacttttcacaaggtgtttttgtggtttcttaaaatgtgttaggctctcttcttttttcttctcctgagattttaaaaatttaacatcaaatttaaacataaaaaggctgatgtggtaaagaccattactgcagaattactttacactggcaaactcaaatcatgggcagtgaattcgagcttgcattagtgtgacatcaaatcacctcctttgtgaaatagtgtttaaataatgtaatcagaagccaaatcggccacctgraggccctgctgaaatcgcacaagtgggtgtttctctccatacctgattagagggaattcactttgaagtcggtgggaactgagaactggggccagccccacagtgacctggggatctaagcagcaccactcctaccactactcatggtatgggatgagttagtgagcaggtaatttagttcaaagatccatgatacgcatccccaacccatgagggaatgagctcctactggaaggcagatgcccattgagaacacaggtgtggcctagaggggttcaatggtcctcacacaggagttccatttcccaccaagcttcaactcaccttccttctctggtatcccctcagctcatcatcagcacaaccattcaccacacagaatgtgctgggaactgagttggacactctgttggagacctccctccagtggttgaccatctgataagagagccaaggcacgtacacaaaaggctaaataattacaaccctagcataaccaaagcaccagtgaagctagtgaagccataaataattatggagttcagagaagggtattgtggtaaattacaatgaactatgaggcccttttttcctttgacggaatctgaatccttttccacatttgattatatttcattatttagggcaggtttatggtccaccttcatttcaataagaaaggaggaagaaagcagaagaatctgaattataaaacacgagttgaacacctactgcaactacgtggtaggcactggaataaaaagacaattggaacatgatgcccagtgttgtaattgaacctcaccttaagggttatatcccagttgaaa

SEQ ID NO: 875 - DNA, 1140 bp, Homo sapiens
gtataaagagctaaatttaccactttaacagctgggattttacaagttgacttttcacaaggtgtttttgtggtttcttaaaatgtgttaggctctcttcttttttcttctcctgagattttaaaaatttaacatcaaatttaaacataaaaaggctgatgtggtaaagaccattactgcagaattactttacactggcaaactcaaatcatgggcagtgaattcgagcttgcattagtgtgacatcaaatcacctcctttgtgaaatagtgtttaaataatgtaatcagaagccaaatcggccacctgaaggccctgctgaaatcgcacaagtgggtgtttctctccatacctgattagagggaattcactttgaagtcggtgggaactgagaactggggccagccccacagtgacctggggatctaagcagcaccactcctaccactactcatggtatgggatgagttagtgagcaggtaatttagttcaaagatccatgatacgcatccccaacccatgagggaatgagctcctactggaaggcagatgcccattgagaacacaggtgtggcctagaggggttcaatggtcctcacacaggagttccatttcccaccaagcttcaactcaccttccttctctggtatcccctcagctcatcatcagcacaaccattcaccacacagaatgtgctgggaactgagttggacactctgttggagacctccctccagtggttgaccatctgataagagagccaaggcacgtacacaaaaggctaaataattacaaccctagcataaccaaagcaccagtgaagctagtgaagccataartaattatggagttcagagaagggtattgtggtaaattacaatgaactatgaggcccttttttcctttgacggaatctgaatccttttccacatttgattatatttcattatttagggcaggtttatggtccaccttcatttcaataagaaaggaggaagaaagcagaagaatctgaattataaaacacgagttgaacacctactgcaactacgtggtaggcactggaataaaaagacaattggaacatgatgcccagtgttgtaattgaacctcaccttaagggttatatcccagttgaaa

SEQ ID NO: 876 - DNA, 1140 bp, Homo sapiens
gtataaagagctaaatttaccactttaacagctgggattttacaagttgacttttcacaaggtgtttttgtggtttcttaaaatgtgttaggctctcttcttttttcttctcctgagattttaaaaatttaacatcaaatttaaacataaaaaggctgatgtggtaaagaccattactgcagaattactttacactggcaaactcaaatcatgggcagtgaattcgagcttgcattagtgtgacatcaaatcacctcctttgtgaaatagtgtttaaataatgtaatcagaagccaaatcggccacctgaaggccctgctgaaatcgcacaagtgggtgtttctctccatacctgattagagggaattcactttgaagtcggtgggaactgagaactggggccagccccacagtgacctggggatctaagcagcaccactcctaccactactcatggtatgggatgagttagtgagcaggtaatttagttcaaagatccatgatacgcatccccaacccatgagggaatgagctcctactggaaggcagatgcccattgagaacacaggtgtggcctagaggggttcaatggtcctcacacaggagttccatttcccaccaagcttcaactcaccttccttctctggtatcccctcagctcatcatcagcacaaccattcaccacacagaatgtgctgggaactgagttggacactctgttggagacctccctccagtggttgaccatctgataagagagccaaggcacgtacacaaaaggctaaataattacaaccctagcataaccaaagcaccagtgaagctagtgaagccataaataattatggagttcagagaagggtattgtggtaaattacaatgaactatgaggcccttttttcctttgacggaatctgaatccttttccacatttgattatatttcattatttagggcaggtttatggtccaccttcatttcaataagaaaggaggaagaaagcagaagaatctgaattataaaacacgagttgaacacctactgcaactacgtggtaggcactggaataaaaagacaattggaacatgatgcccagtgttgtaaytgaacctcaccttaagggttatatcccagttgaaa

SEQ ID NO: 877 - DNA, 1271 bp, Homo sapiens
ctgtcaagtatcaagacagctataagaatgcttattgtaaaactgctgtaataagaaaaagaaaaaaagggaaaaaaagaaggaaggaagaaaggatggaatgaaacaaagaaggaaagaaaagaaaaaaggaagaagagagggaaggaaggggagaaaataaagagaaagaaagaagaagggagagaaagagagagatgcaggaaagaaagaagggaaagagaaataaggaaagagagacctcaaatgttcagaaaaaaatgggcatgtagaaggattcattcacccaytcagctattttgcatgtgtaaatgaatgaaataaagatatgtggtacaatacgcatgaatatgatataatcaatccaggagacctacttacagtaagatactgcttttacaaaggtccaaaagaagataaactggcaattgaatgtttatgaatgaatatataagtattgtatgtaaataaaaataaaaaaggatataaagatagcattcatagtgcactcacatttgtgggagaggcaattgtaaggaggaacacttggatgaaatggtattgtaaaattttactttataaattagatggaggtttcatggatattcattttattattgtgctttagtatatgatacaggtatgttacactttttcatggatcaaatactattacattaaaatgtaataccttacattattaaacataaacaaatatgtaaatacgcacaccaacaaatggtgagttgagaaggaagatgataatgtcattttctttggaactttcttacgactccctgaaccactgtccctttcctacctcttccatatctccattatagcgccatttgtttaatctccttatgatttcctctttggctcagctgtttagtgcagaacaattcatgagtttgttcaatctctgctcagtgtggtgccttactcctcattagtggatgcacaacagatgagaaatgataaatgagtaactgttcgagattgcggaaatattgcaagtgataattctatggaattttttaagctgaacacccacctatttggttccaaattacataagtcatcttgaaagtaggttttgttctagctctcaagaaacagcacggtctgacatatctgtagggaaattggatttttcataatattttcttaagagaaagcagtaaaaagagcttcataaaaaagagaagcaaaacgcatatgcacccttctgaaaatgtaaaagctgatgatgatatttctcctttgggcat

SEQ ID NO: 878 - DNA, 1675 bp, Homo sapiens
atggtgcaccactttcatagaggaatgacagataagcagcaactcactttgccaatggtcaagttatacaggcccaattcaaacaataatgtactaatacatataaataataaattatgagctaccgtttgtgtcatatatgtaaaatrtaggggaatggccatggtaaaacttattccataaagtatttttttaagaggcatcctccgaagtgaagggaggagtgctgtgtcaaacatctacatggctctcccaggcactacaactctctactagcagagtgaataaagaagtgggaataagccagtgttattcttagggaaaattccatcctcacagtaattggtaatggttaaataatattccactttaactacaaatgtcattggtgttattttatggatgaagacttgggtagattggattacaagtaaatatgacagccttgtgaggtaagttgaataccttagactataaaagcaaacactggaaggctcccctatagcaatggtttgtagttagaaagggacttcaaaaccacctgaagatctttactaagcatttgctgaagatttactcatgggaagatatttttcaggcaaagtggggttactgaggcacgtcatcaaaaaatattaaggataagcttttgtaataataaagacgtgtattctgtacccaaaataatgctattctgaaattaggactagataataaatttactgcataattaagggatattctagataaatagtttgaggtcacatataaatattgattacttactataaattaggtataaattacatattttagatatacagaatgatttgaattatattttgtctttaaaaaaattactatgctggaaagtcattttctcccttctcttttttgattccaggattgctcagtagcaacgctcagaattccaacatggatggaactctgagccttgaagacaagtagccttgtgttcaaggctcagaaattctccatggtgattctaattgaaagagttctcgctatctttcaaaaagccatttgaattgccagctcttactgaaaaaaaatttattgatagctcaagtccatggacaatcagtattgtctgtatatattatgctatggttaaaggcatcttgaaaaatgcaatcatgtctaacacagagagaaatgtattatttcctttgctttttttcttgcatgttgacaaattatagtcatatatatttatgggatacaaaatggtgttaccatttttgaacaaaatgtggaacgattaaattaagctaataaacatatctatcacctcaaatatttaacttgttttgtgataagaatatttaaaatttactcttagtgacattgtaatgtgcattactcagttattagctatatttaccatcctgtgctattgatctaaaaatatataatttattccttttaccagacttaagcttagtactctttgactatcaattccacattcctcaccagcatctggtaaccaccattctactcttgcttctatgggtcccatcgttttagagtccacatataaatgggaacatgcagtatttgtctttctgtgtttggcttatttcacttagggtgatattctctaattccatctttgttgtcatgaataacagaattttttccctttttatga

SEQ ID NO: 879 - DNA, 700 bp, Homo sapiens
tgtgatgggagtttaaccaagtattagacaatggcaaatttctttgctatataaggtaatgtaactaaggtttccttctattaaattcacactttttaaaaatatagcaggcaaagactgtcaggttcaagcattaagtatttatttacttataaaatgcacacactgtgaggtctaatgaaaaaataacataacccagcattcaaatgctcatagtaggcatcagaggaaggtgaatactaattcagcataagtacttctttgtgcattgctctctattgacatagaaaacacagataatctaaaattatcttctatatagagatataaaaattgagagactatataaagtgcccyctcttttcaaaagtggaccttaaacacacaacagtgaaagtactgtatgccaaatgaacacaggagccaactgtgaaagagctcccaatgcccaaagctggaataatttgagccaaaaaataaatcatggctagtatgggaatataagccaaaatatgaaataaatatccatgagttcatactaatataaatagacaattgaataagtaaataaataaataaatagcagataatagacaaatcttccatgaagagttccaaaattaaaagtatgtgtatactcctagttcaagaagatggcatatagccccaacttcttgactacaggatgccacagtgactt

SEQ ID NO: 880 - DNA, 658 bp, Homo sapiens
caaccatgatattttgcacattataggcactcaacttggtgacagtaaaataaaaatagggatgagcagaggataatacaaataagtggtacagaagaggacagaagtcaaaggaaaagggctgacacataatattggtaatactaaaagctaaaagaagtatcagacatgtggaaagtgctctgcattttaccaaaatgtgaaaagagtaagaggaaggctgtcctctacttgagagaattgtttttgggaaatagtttcaggagaaaatgagaagttataatttattgagggtagtagtgatggcagggtcagcctatgtggagccrccactgccatgatgctggctgcagtgggggaggtgcactgcatgggagtggggcagcatgctccataaggccagtgggagccaggagcaggcaggagccctgccctccaggtcacagctgcatttgcccaagccctaactgcagacccaggtatccctgtgctcttgggggccaggagctagcaggagccccaccctcccaggcagagctgcagacacccaagcttcccaaaccactgctgtggacctgggcatccctgtgctcttgggttcgggagccagcaggaatcctgccctcccaggcacagctgtagctgcccaagcctcagc

SEQ ID NO: 881 - DNA, 1633 bp, Homo sapiens
atcttgaaaagaaaaaaaggtaaaattgaattcatcttccatgaaaatttcatggacaactactgataaaaaaagcaatttctggcagaaccattttaaaggcaaaaagctgtaggtgcaaataatccaaatagcaaatggatttgctctctcatcttgaaggtaaatttcatgttttcagcactaaaaatttattagtacaattttttcccctcttccttagctcaagtggacaccagtaaacctttgcataaagttttggactactgccaatgcacatacatctttgcttccctctctcctgattctgttcagctcgggattctttgcatagggagtttgggattcctctctcaagccactttcaagggtggaatttatttacctagtgatggtaattgggccttggtggtcttgtttataacccttaaattccagtcatcaatctacacctcatttagaagccttgtctactgtattttggcaatttgccaatgactaaaatgcacagtaaaaatttctacatgtgaaaatgagaaaaagcagtcttgaattaagttgtcaatcctaaagcacattctaatttgctctgaaaccttaatttaaaaatcacagagttgacttttcttcacctataaagtaaaactttatctgacgaatatttttcctaatgggatagagatatcaaaacttaaaaacaatcagcaattatttcttagatgtaaggaaaatcagataacctattacaatctaatgagcttcctgttaaaaataatattaagtcaaaaataaatgttgagatacccttatatgacttataacatcaaacactatgtacagtgactatatttttcatttgcaatccatatatttcaatagtgatataagtgaaaaaaattaaatttcactatacattgcactcgtgtgtacaccagaacttgaaattctacaacttataatagttctgctgggcacggtgactcatgtctgtaatcccagcatctaccccatctctactaaaaatacaaacattagctgggagtggtggcgtgctattcgggatgctgatgcaggagaatagcttgaaccccgaaggcggaggttgcagtgagccaagattgtgccaccattgcacaccagcctgggcgacagagcgagactctgtctcaaaaaaaaaaaagaaaaaaaaatctgtttatttgggtttatgatgaaattatcttaagtatgttttaaatctttattttaatttcattattcaatatttgcaatctagggaatgtgatgctgcttctttaactatagcagtttataggagaagataacttgaactgtcttataagacaagtccttagatgtttacaacttcagcttaattctaggggttgtacttggatttcaaaagacaccttatcatctttcagaagagagtagrtttctcttctgtaaaggcagaatgaaaagcatacttttcaaatttgaaaaatatagtcaggttgatttaagtgacattttcttgctttaaattatattaaataggcatactctttttacgtttcatctgtagtaaagtgagagttagaaagaatggcaaagttctactcttcaaaagaccaaagcaccaactaagcct

SEQ ID NO: 882 - DNA, 1088 bp, Homo sapiens
cacactcacacacatacacaccaaggaaattcctgttgytatacagggaatacttaagttatacagctaatgcctttcagggccccttctccagcttggatgtgccagcctactatgtcattctccagggtttctccatcctgtttgaaggtgatactgatttctgatgtttacttgcttatttgctgcattttttcttttcttttcttcctttgttttttttttttaattcacagaacaggcagtggtgacatgcatgacaggcatttgggatcagatgttgctgatccagaagcctaggtgtggccattttgtcatggcaactgttaagcaagtaaatagggtagagtagtcatctgacttatctccagcgatgttcagtttgttttgaatttctactctgtgacacttctgctctgaagccaagcatagatagatggtacctttcgttcaactcccaagttttcatttctctcaaatgaagttaagaggtttttaaaatagaaacacatcgatgtgagccattttcagactggatgggtttcctgaaccttgtctttttaatgctttacttctgctcttttagatcaatttctaagcgccaagaagagctattactcctttctcctagcagagaattctctaagatagaaaatgacacatgtagtcattgtataaattcttttattttcctgtaagcatcttgaccctctactatttgcagctgtttctggggaggagtagtttggataaccaacaaaccttgccacttcttcagtgggactcaaggcagcagaagaagactactgtctaaggatctgttagcttttacccagggtcctatgtctcttcatatgctgtgctttaaaaaaaaaaaaaataagtgaaagggcgtaagctgtgtttgagtgaggaagaaaaccttggaacttatttctctggtctgcagagggccgagctgctacctctgactgcagacttaagacagcccaatattggccaactactttactggccattgtgaggccatggtcaacatagagcataacatcttcccattgatgttcaaactgagaattgcctgagtg

SEQ ID NO: 883 - DNA, 585 bp, Homo sapiens
taaaaaagaaaatcttcttagttgtatacttgggagcatcctttctcttgggcggatccctgttagacatatacaacttttaatgtttgcacctttaastgtagggatggtctctgagtatgcccacattcgtatctaagatattcaacgcctgtccttcagacacttaacaaggactctgagttccaaatctcccttgagtgctgcagtgcatgctgacgctctttaaaagccatagcactccctcactgtgaaataaaactgctctgtctcttgctggttggctctcctcttagcaatgctgggcttgctcatgaaggtttcagagaccgtggacttgacggactccatggagttgctgtactggaagcagtcagacacatcgaagtcctcgacagtcacaatgtcctggatggtttgcagggtggcctccattgtcttctttacctgccacgacaagggccaacaggatgcatgaagggtgggttgttaaacagcaggtgatggagaagcttgaagagagtgggctggggaaggccacaggatgccatcagagtgtgcagctctgcttcccactggacagtg

SEQ ID NO: 884 - DNA, 585 bp, Homo sapiens
taaaaaagaaaatcttcttagttgtatacttgggagcatcctttctcttgggcggatccctgttagacatatacaacttttaatgtttgcacctttaactgtagggatggtctctgagtatgcccacattcgtatctaagatattcaacgcctgtccttcagacacttaacaaggactctgagttccaaatctcccttgagtgctgcagtgcatgctgacgctctttaaaagccatagcactccctyactgtgaaataaaactgctctgtctcttgctggttggctctcctcttagcaatgctgggcttgctcatgaaggtttcagagaccgtggacttgacggactccatggagttgctgtactggaagcagtcagacacatcgaagtcctcgacagtcacaatgtcctggatggtttgcagggtggcctccattgtcttctttacctgccacgacaagggccaacaggatgcatgaagggtgggttgttaaacagcaggtgatggagaagcttgaagagagtgggctggggaaggccacaggatgccatcagagtgtgcagctctgcttcccactggacagtg

SEQ ID NO: 885 - DNA, 585 bp, Homo sapiens
taaaaaagaaaatcttcttagttgtatacttgggagcatcctttctcttgggcggatccctgttagacatatacaacttttaatgtttgcacctttaactgtagggatggtctctgagtatgcccacattcgtatctaagatattcaacgcctgtccttcagacacttaacaaggactctgagttccaaatctcccttgagtgctgcagtgcatgctgacgctctttaaaagccatagcactccctcactgtgaaataaaactgctctgtctcttgctggttggctctcctcttagcaatgctgggcttgctcatgaaggtttcagagaccgtggacttgacggactccatggagttgctgtactggaagcagtcagacacatcraagtcctcgacagtcacaatgtcctggatggtttgcagggtggcctccattgtcttctttacctgccacgacaagggccaacaggatgcatgaagggtgggttgttaaacagcaggtgatggagaagcttgaagagagtgggctggggaaggccacaggatgccatcagagtgtgcagctctgcttcccactggacagtg

SEQ ID NO: 886 - DNA, 1101 bp, Homo sapiens
cttccacctgctcccagacgggcagcagcaaaagtttcaacagggaaactaagagtgtggctttgagcctcctaaggaagaaactcacctcttcgttttcaatctttagagtggataagcgagactgcagttgttggcatctctgtagcagctcactctggacaggctgctgggcacagagctgggaagcctaacaaaagaaagcaacaccaggtcagaaagaggatacagtccctttggcagttccagagttcccattactggcaatgaaactacccatattcaaggtataaggctcgtggtttctatgttgaagcaaaacccaaagccaacttgtgtgagcctcttccaggaccaaacagtacatgaaaggaatgggtagggggatctgtttggagcccggcaggggtaggtctaggtagggtctgcagctccatggaaggctgaggaggctggagaagagtgcctcaggcagctccggctccagaaacacaatgctttggcacagtgaagatttcctgccaaaggtccaagtggccacctctctggcccctccctcatcccccttcatacaccagagtgaaagcaggagagaagtgggtcaggaggctaacttgccactgctggcagccagcatgtgtttacaaatccaggccatgcatgagagctttgattcaatgagaaagcgtgaagccaggaacaagttcgttgcctatgctwgagggcccgagagggtatggaatctgaaggagcttggcattttccaaagagccatcattttaccaggccttccctagatctgtaagagaggagtctgaccttcccgcaaggattattgccaattagctttcccctgtgtgaaggaatggctgttccactgtctcccattggagatgtggttatgggatgaggtcatccacagtcccctggatgacagatgaggagcagaaggctgagagagttgggaggcaggacccatgtggagacagctcctgtcaccttgttaccgttcgtcctttagcctcttgcctgcagagagacatctggatagaaatggcctccttcctcctcagcaaagagtgggcacattcacatgcccac

SEQ ID NO: 887 - DNA, 1101 bp, Homo sapiens
cttccacctgctcccagacgggcagcagcaaaagtttcaacagggaaactaagagtgtggctttgagcctcctaaggaagaaactcacctcttcgttttcaatctttagagtggataagcgagactgcagttgttggcatctctgtagcagctcactctggacaggctgctgggcacagagctgggaagcctaacaaaagaaagcaacaccaggtcagaaagaggatacagtccctttggcagttccagagttcccattactggcaatgaaactacccatattcaaggtataaggctcgtggtttctatgttgaagcaaaacccaaagccaacttgtgtgagcctcttccaggaccaaacagtacatgaaaggaatgggtagggggatctgtttggagcccggcaggggtaggtctaggtagggtctgcagctccatggaaggctgaggaggctggagaagagtgcctcaggcagctccggctccagaaacacaatgctttggcacagtgaagatttcctgccaaaggtccaagtggccacctctctggcccctccctcatcccccttcatacaccagagtgaaagcaggagagaagtgggtcaggaggctaacttgccactgctggcagccagcatgtgtttacaaatccaggccatgcatgagagctttgattcaatgagaaagcgtgaagccaggaacaagttcgttgcctatgcttgagggcccgagrgggtatggaatctgaaggagcttggcattttccaaagagccatcattttaccaggccttccctagatctgtaagagaggagtctgaccttcccgcaaggattattgccaattagctttcccctgtgtgaaggaatggctgttccactgtctcccattggagatgtggttatgggatgaggtcatccacagtcccctggatgacagatgaggagcagaaggctgagagagttgggaggcaggacccatgtggagacagctcctgtcaccttgttaccgttcgtcctttagcctcttgcctgcagagagacatctggatagaaatggcctccttcctcctcagcaaagagtgggcacattcacatgcccac

SEQ ID NO: 888 - DNA, 1101 bp, Homo sapiens
cttccacctgctcccagacgggcagcagcaaaagtttcaacagggaaactaagagtgtggctttgagcctcctaaggaagaaactcacctcttcgttttcaatctttagagtggataagcgagactgcagttgttggcatctctgtagcagctcactctggacaggctgctgggcacagagctgggaagcctaacaaaagaaagcaacaccaggtcagaaagaggatacagtccctttggcagttccagagttcccattactggcaatgaaactacccatattcaaggtataaggctcgtggtttctatgttgaagcaaaacccaaagccaacttgtgtgagcctcttccaggaccaaacagtacatgaaaggaatgggtagggggatctgtttggagcccggcaggggtaggtctaggtagggtctgcagctccatggaaggctgaggaggctggagaagagtgcctcaggcagctccggctccagaaacacaatgctttggcacagtgaagatttcctgccaaaggtccaagtggccacctctctggcccctccctcatcccccttcatacaccagagtgaaagcaggagagaagtgggtcaggaggctaacttgccactgctggcagccagcatgtgtttacaaatccaggccatgcatgagagctttgattcaatgagaaagcgtgaagccaggaacaagttcgttgcctatgcttgagggcccgagagggtatggaatctgaaggagcttggcattttccaaagagccatcattttaccaggccttccctagatctgtaagagaggagtctgaccttcccgcaaggattattgccaattagctttcccctgtgtgaaggaatggctgttccactgtctcccattggagatgtggttatgggatgaggtcatccacagtcccctggatgacagatgaggagcagaaggctgagagagttgggaggcaggacccatgtggagacagctcctgtcaccttgttaccgttcgtcctttagcctcttgyctgcagagagacatctggatagaaatggcctccttcctcctcagcaaagagtgggcacattcacatgcccac

SEQ ID NO: 889 - DNA, 1212 bp, Homo sapiens
cagaatcctttacatggcatgaatttttccagtaacacttttgcgtagagctttttagtcttataaatgctatttctgtagtgcagggscatctgttgtcagatgccaggaaggaggaggcatgtcagaaaccctagtctgcagctaaggcctgtcctaggatgttgggcattggtggggatgatgacccacagagtcagctccccattctctccttctcccatctagagttgagcttgcatacattagctgctgttgcaatactcctgctttcagaaccctgaaatggcctggcttggttgctatatagtgatttaaccacagtaagcctcagtgagtggcaggttgtatttttattgttgaattttgttataatgacaaccccagataaacctgaaaatgaaagaggattctctttaactctcaattcttctcatgtttatgaaatagcgcttaattaaataatgtcattttatccttatgagtcttcttcctcctaaccacctcacagccctgtagggtgtgtttaaccgttgaattgggagtcaagaactgagaactctcacccagaccttggaagtcggaatgtcagccgtctttctactgcacagccaagcctattgatgtggtcagatctgccctctggaccaccttccttttctgccaagccttggggctgtccatggtgtgctcatgtgccttctccttcccacagcagtgttgtgacttaggctaccatgcaagtctgaaccgggctctacgcaccttcctctctgctgagttaaacctggaacagtcgaagcatgagggtctggatgccatcgagaatgcagtagaaaacctggatgccaccagtgacaagcagcgcctcatggagatgtacaacaacgtcttctgcccccctatgaagtttgagtttcagccccacatgggggatatggtgaggccctttccctatacccccaccctcaaggggcttgagtggacttgtctagattaattacacagaaggcacattattctggggtgggagaggcctgggcccggctttttgtcaggtgggtgaggcacattccccttattgagcaaacagttagtgagtgcctgctgtcagacactcgggcttgggtgcagacatgggggattaaagccctcggggagcttacagtctggggaataaggtcgctaaggcttgaggagggttcgaactat

SEQ ID NO: 890 - DNA, 597 bp, Homo sapiens
tacccacacaccacgcattctgcacacactacataccacacatatcacacatatattatatattcactgcccacatacacaccacacaaatacaccacacacacacacactacacacacactatacatacatcacatagacacagacacatacacatagcacacctaggcacactatgcacatgtcacacacacatcacacacacacagagagcgtacatactaaacacacatcacatatacacatacacacaccacacacacatactacacacacactatacaaacakcacagacacagacacatacacatagcacacctaggcacactatgcacgtcacacacacatcacacacagagagcatacatactaaacacacatcacacatacacatacacacaccacacacacatactgtttatttccttgctttaataaaaaaataaaaagagagagaactttaaaaggaagcagaggaaaataggcatttggaaaattagccccatcctaccatgatagctcctataaaacatcttctagagtctgattttcccacatctaaaaattatttctttttattctgttgttgtttggca

SEQ ID NO: 891 - DNA, 551 bp, Homo sapiens
tccctcagaccctacctttcctggccccaaggctgcctctggctagtgtgacagacacaccctgggcccctgaagtctgaaagccacatttttygaggggaacctggccactatgagtgtggaatattggggccttaaatttcctgcctgtagaatgaggcatttgggctaggggagtggttcatagactttttgtgggataatcaatgaatttttataaaacagaatatcacaaggccaccagctttttattttgacaagcaaaaacataaaaaaagaaactgtcaaatgccagctctgccaccattgtcatttcattaaaaggacatgttaatacccaacaaaggagtaacgatataatgtcaaagaaaaggacagttcttcctgggagaggcccttcatcagttgtcttccactgacacacacagtgcgctgtactgaggcttttcattccgtaccacatcaggggcagcactgccctgtggccatgcaggacccatgggaacagagcacctgtgagctacctgcaggagcctttgctgaggagagtg

SEQ ID NO: 892 - DNA, 551 bp, Homo sapiens
tccctcagaccctacctttcctggccccaaggctgcctctggctagtgtgacagacacaccctgggcccctgaagtctgaaagccacattttttraggggaacctggccactatgagtgtggaatattggggccttaaatttcctgcctgtagaatgaggcatttgggctaggggagtggttcatagactttttgtgggataatcaatgaatttttataaaacagaatatcacaaggccaccagctttttattttgacaagcaaaaacataaaaaaagaaactgtcaaatgccagctctgccaccattgtcatttcattaaaaggacatgttaatacccaacaaaggagtaacgatataatgtcaaagaaaaggacagttcttcctgggagaggcccttcatcagttgtcttccactgacacacacagtgcgctgtactgaggcttttcattccgtaccacatcaggggcagcactgccctgtggccatgcaggacccatgggaacagagcacctgtgagctacctgcaggagcctttgctgaggagagtg

SEQ ID NO: 893 - DNA, 1006 bp, Homo sapiens
cattgagagagagtgatacgtaagagtgccttgtcatttatccataatagacccaaaatgcttgttgaatattatacaattatacattacctctagactaccaatgaaaatgttttctctttatggaattgactttatcttttgcttatagaataaaatatttttaaaatatatttttcaaactagtaccctttattaaattggtagagattaagagcaatttgtactcattcttgcacagtaggggaaaaaacttccttataaacaacctaaggtaaagacaggtgtaaattggtgcaatcttattaccatgctrcacaacttcagggctccattcaccaggcacttctgcacagaaggtcactcagcagcagtcatagtgaggttttatgagcatccctgtcaacagttcaagactctgtgccaaggaaacaactgggaaatacacaaagttatatgtagaaatcccttcagtatagcaatgttcatcctcgtaataagctaaagtcagtaaaatttccttgggtagggggtgagttaagtatgtaatggtgcatgtctctagtggaatatgaggctacaactcaaactcagaaaatcaatctgcctttaagatgaacattatcccatggtgcatacgtacctcattttctttaaccaatccactgttgagagtccacagccttataaaataatgaaattattatatattttgcagcaatatgggtgcagatagaggccataatgccataatcctaagggaattaatgcagaaacagaaaatcaaatactgcatgttctcatttgtaagtgggagctaaacattggttacacatggacataaagatgggaacaacagacaatggggactcctagaggagtaagaatggaagggggagtgtgggtagaaaaaccactcattgggtactatgcttagtgcctgggtaataggatccataccctaaaccccagcatcacgcaatacacccatgaaataaacctgcac

SEQ ID NO: 894 - DNA, 1006 bp, Homo sapiens
cattgagagagagtgatacgtaagagtgccttgtcatttatccataatagacccaaaatgcttgttgaatattatacaattatacattacctctagactaccaatgaaaatgttttctctttatggaattgactttatcttttgcttatagaataaaatatttttaaaatatatttttcaaactagtaccctttattaaattggtagagattaagagcaatttgtactcattcttgcacagtaggggaaaaaacttccttataaacaacctaaggtaaagacaggtgtaaattggtgcaatcttattaccatgctacacaacttcagggctccattcaccaggcacttctgcacagaaggtcactcagcagcagtcatagtgaggttttatgagcatccctgtcaacagttcaagactctgtgccaaggaaacaactgggaaatacacaaagttatatgtagaaatcccttcagtatagcaatgttcatcctcgtaataagctaaagtcagtaaaatttccttgggtagggggtgagttaagtatgtaatggtgcatgtctctagtggaatatgaggctacaactcaaactcagaaaatcaatctgcctttaagatgaacattatcccatggtgcatacgtacctcattttctttaaccaatccacygttgagagtccacagccttataaaataatgaaattattatatattttgcagcaatatgggtgcagatagaggccataatgccataatcctaagggaattaatgcagaaacagaaaatcaaatactgcatgttctcatttgtaagtgggagctaaacattggttacacatggacataaagatgggaacaacagacaatggggactcctagaggagtaagaatggaagggggagtgtgggtagaaaaaccactcattgggtactatgcttagtgcctgggtaataggatccataccctaaaccccagcatcacgcaatacacccatgaaataaacctgcac

SEQ ID NO: 895 - DNA, 1006 bp, Homo sapiens
cattgagagagagtgatacgtaagagtgccttgtcatttatccataatagacccaaaatgcttgttgaatattatacaattatacattacctctagactaccaatgaaaatgttttctctttatggaattgactttatcttttgcttatagaataaaatatttttaaaatatatttttcaaactagtaccctttattaaattggtagagattaagagcaatttgtactcattcttgcacagtaggggaaaaaacttccttataaacaacctaaggtaaagacaggtgtaaattggtgcaatcttattaccatgctacacaacttcagggctccattcaccaggcacttctgcacagaaggtcactcagcagcagtcatagtgaggttttatgagcatccctgtcaacagttcaagactctgtgccaaggaaacaactgggaaatacacaaagttatatgtagaaatcccttcagtatagcaatgttcatcctcgtaataagctaaagtcagtaaaatttccttgggtagggggtgagttaagtatgtaatggtgcatgtctctagtggaatatgaggctacaactcaaactcagaaaatcaatctgcctttaagatgaacattatcccatggtgcatacgtacctcattttctttaaccaatccactrttgagagtccacagccttataaaataatgaaattattatatattttgcagcaatatgggtgcagatagaggccataatgccataatcctaagggaattaatgcagaaacagaaaatcaaatactgcatgttctcatttgtaagtgggagctaaacattggttacacatggacataaagatgggaacaacagacaatggggactcctagaggagtaagaatggaagggggagtgtgggtagaaaaaccactcattgggtactatgcttagtgcctgggtaataggatccataccctaaaccccagcatcacgcaatacacccatgaaataaacctgcac

SEQ ID NO: 896 - DNA, 1006 bp, Homo sapiens
cattgagagagagtgatacgtaagagtgccttgtcatttatccataatagacccaaaatgcttgttgaatattatacaattatacattacctctagactaccaatgaaaatgttttctctttatggaattgactttatcttttgcttatagaataaaatatttttaaaatatatttttcaaactagtaccctttattaaattggtagagattaagagcaatttgtactcattcttgcacagtaggggaaaaaacttccttataaacaacctaaggtaaagacaggtgtaaattggtgcaatcttattaccatgctacacaacttcagggctccattcaccaggcacttctgcacagaaggtcactcagcagcagtcatagtgaggttttatgagcatccctgtcaacagttcaagactctgtgccaaggaaacaactgggaaatacacaaagttatatgtagaaatcccttcagtatagcaatgttcatcctcgtaataagctaaagtcagtaaaatttccttgggtagggggtgagttaagtatgtaatggtgcatgtctctagtggaatatgaggctacaactcaaactcagaaaatcaatctgcctttaagatgaacattatcccatggtgcatacgtacctcattttctttaaccaatccactgttgagagtccacagccttataaaataatgaaattattatatattttgcagcaatatgggtgcagatagaggccataatgccataatcctaagggaattaatgcagaaacagaaaatcaaatactgcatgttctcatttgtaagtgggagctaaacattggttacacatggacataaagatgggaacaacagacaatggggactcctagaggagtaagaatggaagggggagtgtgggtagaaaaaccactcattgggtactatgcttagtgcctgggtaataggatccataccctaaaccccagcatcaygcaatacacccatgaaataaacctgcac

SEQ ID NO: 897 - DNA, 582 bp, Homo sapiens
tgtgcctctgtcttctggacttaagtattttataacttagaatataattgtttgtccagctggtagagtaatggaacagagtggtgatatcagtatctgggttatatctgactcacagccctgctacctcatgtatttgttatatgtagatcctccctaaatttcatctctcctgtgaaaartgggataataaccactgtgacagattctgttggttggttgatcggtccaacccccttcatgggtgtagaagctagaaagccaaaaacagcaattttcagactcagctgaaattaaaattttagatgtattgtcagatctgccaaccagaattagttggaattttggagtttgtaaatacatcctatgggtagagatggtgtgtgggaaacccattctgtttttgtgttttgggagctgcagctacgctggctttcagaaacagctgtgatgtcctgattttgggagggccagtggctcccctgatggctcaggtctacacgtgatgatggccgtccacattcagatctcagtctagagctgcttttctttagtccttctggcaaccaataagtataataa

SEQ ID NO: 898 - DNA, 1162 bp, Homo sapiens
ccccaagtagcatgttataaggggaggggtattgtttctttcagagtaatggaccctaaacaaagacagggtcccttagagaaaggaaggaagcttcagttttaggtctttcattctttcagaatgttgggtatgagagaagctgtgtgagccctaaataccagctgtcatgattaaagaagggggctgtgctgagattctcaaatgactgaaatgaaacaaaaaggcagatgttccattgttgtcttcttaagcaacaagcccggttttttttttctttggtaggaaaaacggtatttaagacttcccgggtctggggaaaggctcacacttccccgcccacctgcacaacccttgcaatttggcaggcatgcttgggttcctggttcccttctaggcaaacctgcagagatgccctggtggggcctccggtgcacaggaggccctgtgagctctggctgctgctatgagggacagtggctacccctgcttctgcaaaggcctggcactggccccccggagccctgccggagccaccagcaccacttggtatttggatcacgtctccttttcctagtaccaatttgaaaatgataacaatcacagctatttttatttctctccaatggaagagcaagatttcttcttctcctgtttccctttcttgctcacatatattcraagactggcctctggttgaactccattgctctgaaaacgtgcatccctctgtggattagcacagccgcagaaacgcttccagtttatgaaaactgcaaatttgtatggcagataaaagtgtctgcatgtcaaactgaatattcccacaaaatgtggaactgccaattattggatagtgagagagttgatcttctagttatccatcctggaggctcttaaagctttgagtcagaccatgtaacattaaaggaaagaagccacctacctttttaaggttataaaagatgatggtaacgtatgtgttgggggtgtttgagtgaaatatggtatagaaaggcaggtacacctacctttttgaggtggtaaaagatggggaagtatgtgctgggtgagtgcacaccccaacaccccactggcaagccaaggaggcttctttttctagcagcaccaaagcatatgtttggggttacagaaaaaataa

SEQ ID NO: 899 - DNA, 1162 bp, Homo sapiens
ccccaagtagcatgttataaggggaggggtattgtttctttcagagtaatggaccctaaacaaagacagggtcccttagagaaaggaaggaagcttcagttttaggtctttcattctttcagaatgttgggtatgagagaagctgtgtgagccctaaataccagctgtcatgattaaagaagggggctgtgctgagattctcaaatgactgaaatgaaacaaaaaggcagatgttccattgttgtcttcttaagcaacaagcccggttttttttttctttggtaggaaaaacggtatttaagacttcccgggtctggggaaaggctcacacttccccgcccacctgcacaacccttgcaatttggcaggcatgcttgggttcctggttcccttctaggcaaacctgcagagatgccctggtggggcctccggtgcacaggaggccctgtgagctctggctgctgctatgagggacagtggctacccctgcttctgcaaaggcctggcactggccccccggagccctgccggagccaccagcaccacttggtatttggatcacgtctccttttcctagtaccaatttgaaaatgataacaatcacagctatttttatttctctccaatggaagagcaagatttcttcttctcctgtttccctttcttgctcacatatattcaaagactggcctctggttgaactccattgctctgaaaacgtgcatccctctgtggattagcacagccgcagaaacgcttccagtttatgaaaactgcaaatttgtatggcagataaaagtgtctgcatgtcaaactgaatattcccacaaaatgtggaactgccaattattggatagtgagagagttgatcttctagttatccatcctggaggctcttaaarctttgagtcagaccatgtaacattaaaggaaagaagccacctacctttttaaggttataaaagatgatggtaacgtatgtgttgggggtgtttgagtgaaatatggtatagaaaggcaggtacacctacctttttgaggtggtaaaagatggggaagtatgtgctgggtgagtgcacaccccaacaccccactggcaagccaaggaggcttctttttctagcagcaccaaagcatatgtttggggttacagaaaaaataa

SEQ ID NO: 900 - DNA, 1162 bp, Homo sapiens
ccccaagtagcatgttataaggggaggggtattgtttctttcagagtaatggaccctaaacaaagacagggtcccttagagaaaggaaggaagcttcagttttaggtctttcattctttcagaatgttgggtatgagagaagctgtgtgagccctaaataccagctgtcatgattaaagaagggggctgtgctgagattctcaaatgactgaaatgaaacaaaaaggcagatgttccattgttgtcttcttaagcaacaagcccggttttttttttctttggtaggaaaaacggtatttaagacttcccgggtctggggaaaggctcacacttccccgcccacctgcacaacccttgcaatttggcaggcatgcttgggttcctggttcccttctaggcaaacctgcagagatgccctggtggggcctccggtgcacaggaggccctgtgagctctggctgctgctatgagggacagtggctacccctgcttctgcaaaggcctggcactggccccccggagccctgccggagccaccagcaccacttggtatttggatcacgtctccttttcctagtaccaatttgaaaatgataacaatcacagctatttttatttctctccaatggaagagcaagatttcttcttctcctgtttccctttcttgctcacatatattcaaagactggcctctggttgaactccattgctctgaaaacgtgcatccctctgtggattagcacagccgcagaaacgcttccagtttatgaaaactgcaaatttgtatggcagataaaagtgtctgcatgtcaaactgaatattcccacaaaatgtggaactgccaattattggatagtgagagagttgatcttctagttatccatcctggaggctcttaaagctttgagtcagaccatgtaacattaaaggaaagaagccacctacctttttaaggttataaaagatgatggtaacgtatgtgttgggggtgtttgagtgaaatatggtatagaaaggcaggtacacctacctttttgaggtggtaaaagatggggaagtatgtgctgggtgartgcacaccccaacaccccactggcaagccaaggaggcttctttttctagcagcaccaaagcatatgtttggggttacagaaaaaataa

SEQ ID NO: 901 - DNA, 555 bp, Homo sapiens
atgaaattttatattgcttcctaagtttaaaatagtatttcttttcttcaattttaattattaaagatagccaatgcttctttctctcatctactctgtcttcctggagataaccacagctagtaggttggagtttctctttagcccttttgctaagcatatgtatatatgtatggawatgtttgaaaagaaggctatatgtgtctgtgtgtgttatctatctacacacacacacacacacacacacgttaaaacataaatgagatcaagctatgcaaattatttgtccagttttttgtttttgttttttttttgagacagggtgtcactgtgtcacccaggctgagtacagtggcgccatcacagctcattgcagcctcaatttctcaggctaaggtaatcctcctccatcagcctgagtagctaggactacaagcacaagtcagcacacccggctgcttttttttttttttttttttttcaaagacggagtctcactctgttgcccagcctggaggtctgtggtgagatcttggctcacagcaacctccgcct

SEQ ID NO: 902 - DNA, 1085 bp, Homo sapiens
agtgattatccttgacactggacacagaagtagcacccttcttattatagtctgtaggaagtgtagactttctacaggcagattaaagtccagcatccaagtctgtacacagatgtgtacatctgtgtgttcacttgccctgagtcctggggacgaggtaggtattcaggaaatgactccagttcatctgtctctggcttctattgtatttgtttgctctttagtaattaggcaaggagggaggattgttcaagctcaaagagcttattctgttccagaaaatttgttttataatttaaagtgagaaatatatctttcatgatggaggatcagatgtttaaaaatagtaaatcagaaaacaagtcaccactagggtgtcgattccaagtatagaaaggatgcattgctttacattaactggcagaataggagtccacagcttgtttcctccaggggatattttgaattgtaaaatctgaaaaaaaatagatgtgatatgtaaagaaagttgtaagaaatgctccttttgtcacaaaagactgcttcctctttggtgagacggtacagtggtgtgacaagaaacgtaagctctggaggcagagtggcttaaaacttagtagctatattcccttggtcaagtcactcgaaccttctgtgcctcsgttttctgatctataaagtgaggataataatagtacttgcttggtgcggcagctgttaagatcatatgagttcacacatatgaacacttagtacctggcacatggtgaggaccctatatgtgttttctgtttttattatttctaccatctgactcagtacatataatcaagtatatataaaatttattgttcctgtttgtttagaagtctacctccactaattatactgagagttccttgtaggaataagcacttagggtatatttggcggaataaacaatctataactttgctgctcaggaagaaaaagataggattagagacatagctctggaataataaataataacagcgatcatttattgaatacttataatatgccaagcagttctaaatgcttcacatgtattatctcattcaatt

SEQ ID NO: 903 - DNA, 671 bp, Homo sapiens
gctgctagtgcctgtctgtactgaggttcagagagactgtgggaatatgggggaattagaggctatctgaggctcttcaacacaataacccaagaagctatttaaatgctctttaaggtatttacataaatattactattctcattgtgcttttattttgtgttatcatgattataattgaagtgtctactgttactgcctcctgatctttgctagctatggagcatggactgggcttttagagcagcagccccaaaggaacctaaacattaaagcagagctgccctcaatggtttaacctgtgtgactctgcctatgacagccccacccacccatcttcactggatccaaatcaggagcaaggccgttggggtacctggtgggggtgatgctgtcaggggaggagcccaaaagggcaagctcaaatttgaatgtgaagggccaatgcactgtcagactragacagagaaccatcattaattgaagtgagatttttctggcctgagacttgcagggaggcaagaagacactctggacaccactatggacaggtaaagaggcagtcttctcgtgggtgattgcactggccttcctctcagagcaaatctgagtaatgagactggtagctatccctttctctcatgtaactgtctgactgataagatcagctt

SEQ ID NO: 904 - DNA, 703 bp, Homo sapiens
tatttgatttggaggtgagggggaggctatttctgccattagttagaaaaaacaacttgagaaataaagaggatatattttagtagaaaatcatcctttttttattctaaaggggtagacaatacgtaaatacagaaagagtcaaaaactactaaggtggtaaccataaaatgtgtctttaaagtataattttatattcaaaataataaagctctataaatatgatggaaagaattttggagtatgttgaaatacagattatctcaaagatttatccttgtaaaaggaatgaaatactttgtaactactgtatacttttttatctgaagatcataaaattatttaccaaccgtaactaatcagtcctcccagttctccccaccactaccccacatccactcccaggtcttgttggaatgggtactgagaaaaagccaagctgcagccaggtaaccatagacatccagaacttyggtaactggacatcagaatctgcagttgggtacctgcagacaaccagatgaaaaccacaaattttactcagaactttggcagatttagaaggtagttggtagcggaataccttagtcgtggagccctcctttcagtggttactgtgctattttcatgcagactgcagaaaattaaggtgtccttattaggtattgtaagaagctagatttacccacagtcaaattccaac

SEQ ID NO: 905 - DNA, 566 bp, Homo sapiens
tgagctcaaggccacacagctagtaggtagtagggctggacatgaactargtctggcacagtccctgctcttaaccactgcactattttgcttttctagccaaagagcagacaaaagtagcgcttctagagcatcttgatatgtactgcctgtccagcttcagtgatgtttttgagctccacaatagagttggagaaattccaaagcttaggctttcatgtggttatcacatttgagcatgaatggcccatatcctttccctgcaaagatcattttaaaagactctcgcatacatatggaaatgtttacagatgaaatgataggctagtcttggatttgcttcaaaacaaagtgaagggaaatggatgatggtatagattaaaatggattggccatgataatttttgaagctgagtgataatatatagaggttcattatattgttatctctacttttgtatattttggaattttccataatgagttaaaaaataaaaaataggctgggcgcggtggctcacgcctgtaatcccagcactttgggaggcagaggcaggcggatcatg

SEQ ID NO: 906 - DNA, 566 bp, Homo sapiens
tgagctcaaggccacacagctagtaggtagtagggctggacatgaactaggtctggcacagtccctgctcttaaccactgcactattttgcttttctagccaaagagcagacaaaagtagcrcttctagagcatcttgatatgtactgcctgtccagcttcagtgatgtttttgagctccacaatagagttggagaaattccaaagcttaggctttcatgtggttatcacatttgagcatgaatggcccatatcctttccctgcaaagatcattttaaaagactctcgcatacatatggaaatgtttacagatgaaatgataggctagtcttggatttgcttcaaaacaaagtgaagggaaatggatgatggtatagattaaaatggattggccatgataatttttgaagctgagtgataatatatagaggttcattatattgttatctctacttttgtatattttggaattttccataatgagttaaaaaataaaaaataggctgggcgcggtggctcacgcctgtaatcccagcactttgggaggcagaggcaggcggatcatg

SEQ ID NO: 907 - DNA, 1586 bp, Homo sapiens
tctaattttctcaggttggtacttttttactctctctgcaatcagttcttagaaaatctgaactgtgcctgctgagtatccaaaaaatcatcatttaaattrtcttcctttcctttcagatttgtgtttcattggcagaggggatgttggacacatatccaaagaaatgttcttataatgcaatcaaccttttagtgagattctagccttcctgaaagtctggtgttatgtgctgtgctgctttgctcactgttattcagagtggcacctgcattctgtacaacagaacatccacttctcagtactatactctggcggcgtttgaaaaattgttttatttattgcttagtctgaggttcaacatctttaaaatgtcttctttcttggcctcatccctgtaatcccagcactttgagaggccaaggcaggaggccaggatttcaagaccagcctgggccacaaagaccccatctctacaaaaaataaaataaattagctgggtgtggtggtgtgtgcctgagtcccagccacctgggaggctgagatggaagaatctcttgagctcaggagttcaaggctgtggagagttatgatagcattactgcactccagcctgcacgacagaatgagacctggtctccaaaataaaaaatttttaaaaatttctggtcctttaaataattacaaaccacctacactgctttggacaatgagatttattctaaatagacgttggatataaatgcccccaagatattttatgaactaggtaaataaggaatgtttttgtttgtacccaatgattttagtcttctcttggtattactggatcattaataaagtcatatgattttttttacagtcagccattgagaaattaacccatgattacataaatttgtttcacttcccaccactaattaaggtaagtaaggtttttcttaccgacactaatgctacctttattgacacatgcacctgctgcatccacacctaaatttgccaatgtcagtaatggttgtttgaagtgaaatttcatcatatctgtctaacaaaaggccctttgaagcaagggaagtgtataaattgaacacccttgttccccacaagttgaaatattaacaatttgttcatgataagaacaacacaccttactttagtggctaggagttgtaagtgccaacattatcggtgaggtcctgtggcctcccacctggccctggatacttttcaacatgtaagtcactgagagaattcataccctggagcgctcgatcgtcaactttcataggggatgggaggtttactgtttgaataacatattagtatacttaacattttgaatctagtttaaaggaatatggcatactttgtttaaaatcagcaaatacttgcaattcatacacagaactttacttattcactaacagctatagtttttcatctctaagccctcaaagactcgttttgttcctctgcttcatcctccatccacatttgcatcctccatccactgcgtaatccgtctttgggaatagcttgtaaatgccctgggtattgtgaacctctgaagttgaaatctcaca

SEQ ID NO: 908 - DNA, 972 bp, Homo sapiens
aatggcagataagctcctggggcggggattttagtagtataatgaggcaagaggttaggatgggtcattttcttggttttgtgtgcatgcgggtgacagggttaactcccttgagattgatggtggaatgctgcttctcagtttcgtcacacaktttacaagttctcacggtcagtgaggatgtatggaaaaaaatatactagttgggagggtagggttgagccccgtccctaccctgtcttatatatgtatctccaaactcatcaggttatatacattaaataggtagagcttttcatatatcagtcatatctcaataaagtggttttttaaaaatgagaaagaaacacaagttttaattgagcaaagaagcaaatgcagttcagaattttacaactgcataagtcactgctgatttctaattacagagtgtggcaatgtactttgtcaaatgggttggacagccacctatagagctagagagctagagcagaactaggcgaggtgctcagtgcatacctgctgaatggattgacagtcctgcatacaagctagcatgccaggaagtgtctaacaatgggagaaagccctggtttgtagcatgtgtagatctccatggtgtgaaaaattcccactatggccgatttcaagttaccaatctggcatcactggatttgaagttgggaatggctgtaagcaatcagctcatgagagctggctccagcacactattgggtctctcttagtcttcttaatcaagattacgaattccttttaaaatagtgatgtacatgataaaacataggctcaaataaattacaagcacattattgctggttaccaactataataataagtgtctttaactcaaagagagctccagtctcctaatgaatccattgtcagttggcttaggtctctggatcaccattgtctcattttgtcatattgtctcatactgaccataatgca

SEQ ID NO: 909 - DNA, 972 bp, Homo sapiens
aatggcagataagctcctggggcggggattttagtagtataatgaggcaagaggttaggatgggtcattttcttggttttgtgtgcatgcgggtgacagggttaactcccttgagattgatggtggaatgctgcttctcagtttcgtcacacattttacaagttctcacggtcagtgaggatgtatggaaaaaaatatactagttgggagggtagggttgagccccgtccctaccctgtcttatatatgtatctccaaactcatcaggttatatacattaaataggtagagcttttcatatatcagtcatatctcaataaagtggttttttaaaaatgagaaagaaacacaagttttaattgagcaaagaagcaaatgcagttcagaattttacaactgcataagtcactgctgatttctaattacagagtgtggcaatgtactttgtcaaatgggttggacagccacctatagagctagagagctagagcagaactaggcgaggtgctcagtgcatacctgctgaatggattgacagtcctgcatacaagctagcatgccaggaagtgtctaacaatgggagaaagccctggtttgtagcatgtgtagatctccatggtgtgaaaaattcccactatggccgatttcaagttaccaatctggcatcactggatttgaagttgggaatggctgtaagcaatcagctcatgagagctggctccagcacactattgggtctctcttagtcttcttaatcaagattacgaattccttttaaaatagtgatgtacatgataaaacataggctcaaataaattacaagcacattattgctggttaccaactataataataagtgtctttaactcaaagagagctccagtctcctaatgaatccattgtcagttggcttaggtckctggatcaccattgtctcattttgtcatattgtctcatactgaccataatgca

SEQ ID NO: 910 - DNA, 583 bp, Homo sapiens
atgattggattgtaattgcatatcttttgggtrtttttggtcatgacttggaccagatgaatcaaccatgcgtatgtgatctaagctattatggaaggctttcctaaatgtgttcaggaaaagtggaagtgggagggaaaaagcgattggttaaattcaattatatttgattgttgtctttgaatttgtaacccgtattgcataataggtatacaaaatgatcctgtggtacagggtcatgagggaatccagtctctaagagccatggaagcacactattggtaaaaagcttgttctttaatctttcactgatacaaccttcaataccacatggacaacatctatggggaaacttgggatttggggatgaaatcacagaatacaaagtactgtaacatacatctaatgtactgtaaatattgtctcttcttgtcaatataaagtccttgaaaatcatttaatgagtcaaaatacaaataattattacatttaaaagaattatcccaaacacatggttttgaataccttaaccaaaagaaagtccctagtttttatcccctagaagatgatattaagatgagat

SEQ ID NO: 911 - DNA, 583 bp, Homo sapiens
atgattggattgtaattgcatatcttttgggtatttttggtcatgacttggaccagatgaatcaaccatgcgtatgtgatctaagctattatggaaggctttcctaaatgtgttcaggaaaagtggaagtgggagggaaaaagcgattggttaaattcaattatatttgattgttgtctttgaatttgtaacccgtaytgcataataggtatacaaaatgatcctgtggtacagggtcatgagggaatccagtctctaagagccatggaagcacactattggtaaaaagcttgttctttaatctttcactgatacaaccttcaataccacatggacaacatctatggggaaacttgggatttggggatgaaatcacagaatacaaagtactgtaacatacatctaatgtactgtaaatattgtctcttcttgtcaatataaagtccttgaaaatcatttaatgagtcaaaatacaaataattattacatttaaaagaattatcccaaacacatggttttgaataccttaaccaaaagaaagtccctagtttttatcccctagaagatgatattaagatgagat

SEQ ID NO: 912 - DNA, 583 bp, Homo sapiens
atgattggattgtaattgcatatcttttgggtatttttggtcatgacttggaccagatgaatcaaccatgcgtatgtgatctaagctattatggaaggctttcctaaatgtgttcaggaaaagtggaagtgggagggaaaaagcgattggttaaattcaattatatttgattgttgtctttgaatttgtaacccgtattgcataataggtatacaaaatgatcctgtggtacagggtcatgagggaatccagtctctaagagccatggaagcacactattggtaaaaagcttgttctttaatctttcactgatacaaccttcaataccacatggacaacatctatggggaaacttgggatttggggatgaaatcacagaatacaaagtrctgtaacatacatctaatgtactgtaaatattgtctcttcttgtcaatataaagtccttgaaaatcatttaatgagtcaaaatacaaataattattacatttaaaagaattatcccaaacacatggttttgaataccttaaccaaaagaaagtccctagtttttatcccctagaagatgatattaagatgagat

SEQ ID NO: 913 - DNA, 1408 bp, Homo sapiens
aaatgttctaaaaaattttagcatgatgcagcagaatatagaattcaaagtgggacaggtgttgtggttcatgcctgtaatcctagcactttgggaggccaaggtggtaggatcgcttgaggccagaagttccagactaccctgggtaacatgccaagacctggtctctaaaaaagaaaaaaaattagcctgatgcagtggcttgcacccgtagtcccagctactcaggacattgaggcgggaggatcacttgagctcaggagttcaagattaccatgagctatgattgtgtcactgcactccagcctggacagcagagtgagattctgtctctaaaaaaaaaaaaaaaaaatagtgaaaggaacctgagcctgggtttagatctgggctccaccattaattgtaagatattgagaaagatagttaatcttcctgagcttcagttccttcatatgtaaaatgtttgtatctcatagggcctttcatgaggattcaacatgacaccaaatataaaagtgcccaccaataattggcactttacaggcaatgagtaaacgttagtgttcttccttccactcccgcacaccatgactgcaaaagtcatggaaaaaaatactttgaagaaaatgcatctaggaaggcagagtttattatgctcaaaagaagtcatctgtcttctatggagatgcactaccatatttagccaaaagtaaagcaggaaaagaaacattttttgcttgaagatttgcagccccatttaggccaaaaaaaaaaatckatgtttatttcttagtgtattattcatcataagtattacctaacattcggaatatgaagggtcagtaatagctactgtgaacaaaatacatgtcgtttgtgatctgaaaagattctcctgtaaggggaccaaagcacctgaaccacagattcttatttacctgctttctataacctgtatttacaagtacagctataaatctaaatttattttatcggaggaactcaaacaattttaggattggaaactagaagttatctaactgtcatatatactttttttgagacagagtcttgctctgttgcccaggctggagtgcggtggtgaatctcagctcactgcaacctccgcctcctgtgttcaagctattctcctgcctcagcctcccaagtagctgagaccataggtgtgcgccaccaagcccagttaatttttgtatttttagtacagacagggtttcaccatattggcgaggccggtctcgaactcctgacctcaagtgatccacccccggcttggcctccccaagtgctgggattacaggcatgagccaccgcacccggcctcatatatacttttcaactaccatttccttcaagaattccttcaaacaatttatatttcatgtct

SEQ ID NO: 914 - DNA, 1408 bp, Homo sapiens
aaatgttctaaaaaattttagcatgatgcagcagaatatagaattcaaagtgggacaggtgttgtggttcatgcctgtaatcctagcactttgggaggccaaggtggtaggatcgcttgaggccagaagttccagactaccctgggtaacatgccaagacctggtctctaaaaaagaaaaaaaattagcctgatgcagtggcttgcacccgtagtcccagctactcaggacattgaggcgggaggatcacttgagctcaggagttcaagattaccatgagctatgattgtgtcactgcactccagcctggacagcagagtgagattctgtctctaaaaaaaaaaaaaaaaaatagtgaaaggaacctgagcctgggtttagatctgggctccaccattaattgtaagatattgagaaagatagttaatcttcctgagcttcagttccttcatatgtaaaatgtttgtatctcatagggcctttcatgaggattcaacatgacaccaaatataaaagtgcccaccaataattggcactttacaggcaatgagtaaacgttagtgttcttccttccactcccgcacaccatgactgcaaaagtcatggaaaaaaatactttgaagaaaatgcatctaggaaggcagagtttattatgctcaaaagaagtcatctgtcttctatggagatgcactaccatatttagccaaaagtaaagcaggaaaagaaacattttttgcttgaagatttgcagccccatttaggccaaaaaaaaaaatctatgtttatttcttagtgtattattcatcataagtattacctaacattcggaatatgaagggtcagtaatagctactgtgaacaaaatacatgtcgtttgtgatctgaaaagattctcctgtaaggggaccaaagcacctgaaccacagwttcttatttacctgctttctataacctgtatttacaagtacagctataaatctaaatttattttatcggaggaactcaaacaattttaggattggaaactagaagttatctaactgtcatatatactttttttgagacagagtcttgctctgttgcccaggctggagtgcggtggtgaatctcagctcactgcaacctccgcctcctgtgttcaagctattctcctgcctcagcctcccaagtagctgagaccataggtgtgcgccaccaagcccagttaatttttgtatttttagtacagacagggtttcaccatattggcgaggccggtctcgaactcctgacctcaagtgatccacccccggcttggcctccccaagtgctgggattacaggcatgagccaccgcacccggcctcatatatacttttcaactaccatttccttcaagaattccttcaaacaatttatatttcatgtct

SEQ ID NO: 915 - DNA, 1018 bp, Homo sapiens
gacaagcctggccaacatggtgacactgttaccagtagaagatggccaggttcttggcatcttgaacaaagaattggacaaaacgcacaaacaaagcaaggaaggaacgaagggtgttattgaaaatgaaagtacattctgcagtgtggragcaggcctgagcgtggggctcaaaggccctgttacagagttcttgtgagtttaaataccctctacctggggtatgccctatgtaaatgaaagaggatgaagtaaagttataaagacatttattcggtgtatgccctgtggagaggatatttcctctcatggctgaagtgtgaatcggccttatgttccctgcctccagaccctattttcttgcctcaaaatcctgtgtctactaaaaaaaatacaaaaattagccgggtgcggtggcacgcacctataatcccagctatttgagaggctgcagcaggagaatcgcttgaaccctggagacagagactgcagtgagctgagattgcgccactgcactccagcctgggtgacagagcaagactccgtctcaaaaaaaaaaaaatactctatcatttatgtcctactcgtttatatcaaataatcaaagggttagtggactttgtaggtttcatagtgactaccaaatatcatgtgtgacttgaggccaggagtttgagaccagcctggccaacatggtgaaaccccatctctactaaaaatacacacacacaaaattagctgggtgtggtggcgtgtgcctgtggtcccagctactcaggaggctgaggcaggagaatcacttgaatctgggaggtggaggttgcaatcagccgagatcacaccactgcattccagcctgggcaacagagcaagactctgtctcaacaaacaaacaaacaaaaaaccaaatataatgtgtgagataggtgatcaacacctactgtaatttgtttttaattcaattcaaatcattttacacaaatatacttatgtactgataagcatacatatatatata

SEQ ID NO: 916 - DNA, 1438 bp, Homo sapiens
  misc_feature (1)...(1438): n = A,T,C or G
ttctatgaagtaaaaaagataaatttaccattcctattatataaaggagaaaacaaaagctcaaaacttaagactcacccaagagtcactatttagtaaaccctgataagacaaaatgcaaatcctgtgtgttccttcactaacctcacacaaataagctggttgatgtgtagattatgagggaaacacaaaatgcctttcctttcaatttttgtgaaattaagcaatattcttgaatagtcagaaccctcttgataatctktttcaaaagaaaaactacacctaaaagcaattttagcaatatcaaattatatgaaagttaacaaatttcacttactatgctaccaaaatgtgtttgacaaattatttcctaatgaggtcaacttatctgatttttctcttacgtatttttaaactaggtttatagaagctgggcatggtgccatgcacctatcatcccagctacttggggggctgaggtggggagactgtttgagcctaggagttcaagaccagctggacagcatagcaagaccctgtctcaattaaaaaaaagtttttatttttaaaaactaggtttatatgagcagataatactataaatagtacttctacaggagacctataagcattcctccttcctcctttggtaggcctgtgaatctctctcctttggcagaatcaaaagacaaattccagactcaattccacaattagtaaggaaaatttttctactgctggttacatttcaacacttctgagaagagatttcagacaccgggaaggccaaaaagcctctagcaaataccttccattgctatccacctttcctagactggccatgtatttttaaatgatatcaagttatttaaaattattaacaaactctttttgagaacagtactggcaagtgttagacattccaccagagaactaggctacatccatttattgtatgaacacagatgttacccttcctacacagcaggccattttagtcacttcttttgtaagcagtatgacccagtccctcatataagggaaagtaaaatatccatctgaaaaccactcttagttctaggtataataaatcacagccgctatcatatatctcatacattactatatctagtgtatcacagtatctaggacgaacagacatcaagtannnnnnnnnnnnnnnnnnnnnnnnnnnnnnnnnnnnnnnnnnnnnnnnnnnnnnnnnnnnnnnnnnnnnnnnnnnnnnnnnnnnnnnnnnnnnnnnnnnnctaacacccacagtttgatccttttttataaatcagtcagattttcaaccagtgacataatatacccataactctggacaatcagaggtagtaaatattaatatgttatcagtggtcttataaggatttaaccaagattatagatagctcaataccatcaattatcagga

SEQ ID NO: 917 - DNA, 490 bp, Homo sapiens
tatttatcttgaaacaaacaggccacatttcaccaaatctatagaatatagcattactgaataaacgaaagaaaaaatgctggaaattaaactatgacttcatgtgtcctttcatggactttttaaaacttagtcaaataactaataagatgataagaacataagatagttacagcacactttgattttttttttctttttttgagacagagtatcactgtcactcaggctggagtgcagtggccccacatcggctcactgcaacctctgcctcctgggttcaagtaattctcctgcctcagcctcctgagtagctggtattacaggcayacaccaccatgcctggctaatttttctatttttagtagagacggagttttaccacattggccaggctggtctcaaactcctggcctcaactgacatgcccgcctcagcctcccaaaaagctaggattacaggtatgagccaccatgcccagcctccactt

SEQ ID NO: 918 - DNA, 1189 bp, Homo sapiens
tgatagcctttaaaaaatgttgaaagatttcctatgaggatatagaaaagcattttaaaacagtaatatttgaattaaccagaattctgacaaacagaatattgtttgggctatctgaattttccattaggtgaattaaatggattctagttaaccaaaggatggctttatgagcctagattctctctttgcttcattattgcttactacctattcagtcttctcaaaagcttagaggttaacacatcactacatttaattaacacctacagtgaaatgttaattatggtacacacaactttggcactagtgataaagagtttatagcacataggaagttcactttctttaagagaaactgagaataagtcctagggtaagcctaacctaggttcaaatcctgattccttcatttaaacactagagagacagtgagaagtatgacactgagaaaactgcatttagttttctcttcagagaaggcaattaacaggccagctgcggtggctcccaaagtgcctgtaatcccagcactttgggaggcctaggcaggcggataacctgasgtcaagagttggatatcagcctggccaacatggcgaaaccccgtctctactaaaaatacaaaaaattagccgggcgtggtggcaggcacctgtaattgcagctactagggaggctgaggcaggggaatcactttgaacctgggaggcagaggttgcagtgagccgagattgcgccattgcaccccagcctaggtgacaagagcaaaactccatctcagaagaaaagagagagagagaaaagaattaacaattacctcaatggctgggcacagtgactcacgcctgtaatcccagcactttgggaggccaaggcggacagatcacaaggtcaggagatcaaaaccagcctgaccaagatggtgaaaccctgtctctactaaaaatacaaaaattagctgggcgtggtggtgtgcccctgtagtcccagctacttaggaggctggggcaggagaatcgcttgaacctgagaggtggaggtggcagtgagccaagatcgcgccattgcactccaccctgggcgacagagcgaagaccactccaccctgggcgacagagcaagactccgtctcaaaaaaacaaaaaacaattactccaaaaggatgtgagatctaaatcagaatgca

SEQ ID NO: 919 - DNA, 1189 bp, Homo sapiens
tgatagcctttaaaaaatgttgaaagatttcctatgaggatatagaaaagcattttaaaacagtaatatttgaattaaccagaattctgacaaacagaatattgtttgggctatctgaattttccattaggtgaattaaatggattctagttaaccaaaggatggctttatgagcctagattctctctttgcttcattattgcttactacctattcagtcttctcaaaagcttagaggttaacacatcactacatttaattaacacctacagtgaaatgttaattatggtacacacaactttggcactagtgataaagagtttatagcacataggaagttcactttctttaagagaaactgagaataagtcctagggtaagcctaacctaggttcaaatcctgattccttcatttaaacactagagagacagtgagaagtatgacactgagaaaactgcatttagttttctcttcagagaaggcaattaacaggccagctgcggtggctcccaaagtgcctgtaatcccagcactttgggaggcctaggcaggcggataacctgaggtcaagagttggatatcagcctggccaacatggcgaaaccccgtctctactaaaaatacaaaaaattagccgggcgtggtggcaggcacctgtaattgcagctactagggaggctgaggcaggggaatcactttgaacctgggaggcagaggttgcagtgagccgagattgcgccattgcaccccagcctargtgacaagagcaaaactccatctcagaagaaaagagagagagagaaaagaattaacaattacctcaatggctgggcacagtgactcacgcctgtaatcccagcactttgggaggccaaggcggacagatcacaaggtcaggagatcaaaaccagcctgaccaagatggtgaaaccctgtctctactaaaaatacaaaaattagctgggcgtggtggtgtgcccctgtagtcccagctacttaggaggctggggcaggagaatcgcttgaacctgagaggtggaggtggcagtgagccaagatcgcgccattgcactccaccctgggcgacagagcgaagaccactccaccctgggcgacagagcaagactccgtctcaaaaaaacaaaaaacaattactccaaaaggatgtgagatctaaatcagaatgca

SEQ ID NO: 920 - DNA, 1189 bp, Homo sapiens
tgatagcctttaaaaaatgttgaaagatttcctatgaggatatagaaaagcattttaaaacagtaatatttgaattaaccagaattctgacaaacagaatattgtttgggctatctgaattttccattaggtgaattaaatggattctagttaaccaaaggatggctttatgagcctagattctctctttgcttcattattgcttactacctattcagtcttctcaaaagcttagaggttaacacatcactacatttaattaacacctacagtgaaatgttaattatggtacacacaactttggcactagtgataaagagtttatagcacataggaagttcactttctttaagagaaactgagaataagtcctagggtaagcctaacctaggttcaaatcctgattccttcatttaaacactagagagacagtgagaagtatgacactgagaaaactgcatttagttttctcttcagagaaggcaattaacaggccagctgcggtggctcccaaagtgcctgtaatcccagcactttgggaggcctaggcaggcggataacctgaggtcaagagttggatatcagcctggccaacatggcgaaaccccgtctctactaaaaatacaaaaaattagccgggcgtggtggcaggcacctgtaattgcagctactagggaggctgaggcaggggaatcactttgaacctgggaggcagaggttgcagtgagccgagattgcgccattgcaccccagcctaggtgacaagagcaaaactccatctcagaagaaaagagagagagagaaaagaattaacaattacctcaatggctgggcacagtgactcacgcctgtaatcccagcactttgggaggccaaggcggacagatcayaaggtcaggagatcaaaaccagcctgaccaagatggtgaaaccctgtctctactaaaaatacaaaaattagctgggcgtggtggtgtgcccctgtagtcccagctacttaggaggctggggcaggagaatcgcttgaacctgagaggtggaggtggcagtgagccaagatcgcgccattgcactccaccctgggcgacagagcgaagaccactccaccctgggcgacagagcaagactccgtctcaaaaaaacaaaaaacaattactccaaaaggatgtgagatctaaatcagaatgca

SEQ ID NO: 921 - DNA, 1031 bp, Homo sapiens
tgtggaaagacatggatgttcaatgtcatgtggttttgaagggcttgtttctgacccttaattatgatctgtcatttatacagaatatagggttcttgccacatgtgagcatgaaacgtggacccactgatgtcttccccacacatatccccttcaccttaaaatacttcctgccatcaatgagtgaattcatcccccaaggagctgagtctacaggattcagaatttgattttgggcagaagagcaaattcaaattctagatatkctgctatgaaggcaaagattatgatagtcaaacattatcagctttctataggcaaaaacatgtaggtgaaatccttctagagaatgaacgctctacacatgattttctctatttgattttctttatttgatttgtaagaacacattcacaggagcccttcctcctagcattaaaactaaattatggatattaagccattaattccattgaggctaatttgtttttaactttctgtgatatttagacgacacagaatcaaatgatctggaatcctaattgtgctggattagagttgaacacactttcatggtcagaaccgtgatacttctactgggtttatctccacaaaaagattcataacaaaggccaattgctgttcttcaaacccctagtcagccgtatcccaaaggacccgggcagatggtaaaggggactgcagagaagtcacctggcggatgggagggcattggccagtgttccagcttcacttctgagtccaacgggctctgtaaccttggaccgggcaccttttctctctgggtcccagtttcttttcttcattcataaaatgggtagaactagattattctttaaatcccacatttaacagtttaaaagcaactggggcatgttgcggtggcttatgcctgtaatcccagcactttggatggccgaggcaggaaagtcacttgagcccaagagtttgagaccagcctgggcaacgagggagaccttgtctctacaaaaaataaaaaaacattagcc

SEQ ID NO: 922 - DNA, 982 bp, Homo sapiens
tgaagacaaaatttatttgtgataaagcattgagaatccttgtgaataccttcatggtgaagggattgaaacagttgaaataattttttaatgacataatattttagtattgattaagggtgacagtaggttgctgacagaagagaatgctaaaggaaataatttgatctaagggatcagggttgtaaaakgtaaatatcagcatgtttgatagatttaataaaaggtgtagctgggcagagtagaaacaggtaattttttaagtttttatcaatagggttgatagaggatgcccttacaaacaaaataaagtaccactgtatttttcacccaggaaggtatttatttattaagttgataacattttgaaaagcaatgaatataatttttgggacagcagtttgcaggagcgataacactcctggaattgtagacagcctccatgatcatttgtccttgagatacactaagcaccattgttatgacatcacttaggtggaagtaaaggttaaatcggaagtagttcagggtctttttcttgctatagaataattgtagtctttgccatgcagtctttgctttttgctacagacttagattaaagaaaaatattcttgaactctttctttagactttttgggggaaaaaccccacaacaacgcagtattcttcaggaatataaaagcctttttaatagcagtgataatctgatgcagtctcattgctagaaatgtttctaataagaaaataaatgagggtcattctttgcacacgtgacacgagttgtatatgtgtgtaagtgtactttgtactgcctgctggttacgtgctgaaggcacgcgtaggtgtgcagaacaggacttgttctcatacctgtagatatggaggcacctgtgatacatgcacagtcatatgtgaccaagcccggggttgtgatgccatggtgtccaattgtttatgcaccccacactgaaatagaaaa

SEQ ID NO: 923 - DNA, 982 bp, Homo sapiens
tgaagacaaaatttatttgtgataaagcattgagaatccttgtgaataccttcatggtgaagggattgaaacagttgaaataattttttaatgacataatattttagtattgattaagggtgacagtaggttgctgacagaagagaatgctaaaggaaataatttgatctaagggatcagggttgtaaaaggtaaatatcagcatgtttgatagatttaataaaaggtgtagctgggcagagtagaaacaggtaattttttaagtttttatcaatagggttgatagaggatgcccttacaaacaaaataaagtaccactgtatttttcacccaggaaggtatttatttattaagttgataacattttgaaaagcaatgaatataatttttgggacagcagtttgcaggagcgataacactcctggaattgtagacagcctccatgatcatttgtccttgagatacactaagcaccattgttatgacatcacttaggtggaagtaaaggttaaatcggaagtagttcagggtytttttcttgctatagaataattgtagtctttgccatgcagtctttgctttttgctacagacttagattaaagaaaaatattcttgaactctttctttagactttttgggggaaaaaccccacaacaacgcagtattcttcaggaatataaaagcctttttaatagcagtgataatctgatgcagtctcattgctagaaatgtttctaataagaaaataaatgagggtcattctttgcacacgtgacacgagttgtatatgtgtgtaagtgtactttgtactgcctgctggttacgtgctgaaggcacgcgtaggtgtgcagaacaggacttgttctcatacctgtagatatggaggcacctgtgatacatgcacagtcatatgtgaccaagcccggggttgtgatgccatggtgtccaattgtttatgcaccccacactgaaatagaaaa

SEQ ID NO: 924 - DNA, 638 bp, Homo sapiens
ggcatgtgtataactccctgaacacactgcgcgtgctcaattccaaagggtaaggaaagcacggggcatgagaaagcccaccctaagggaagtatcatgggaaagaggcgagcccataaagtcctaggatcaaggtaaaagggccttttttttctgtcttcttttgctgtcttttttttttaacttatttatttatttttcctttttttaaattatactttaagtcctagggtacatgtgcacaacgtgcaggtttgttayatatgtatacatgtgccatgttggtgtgctgcacccattaactcgtcatttacattaggtatatctcctaatgctatccctccccaccccacaacagtccccggtgtgtgatgttccccaccctgtgtccaagtgttctcatagttcaattcccacctatgagtgagaacatgcagtgtttggttttttgtctttgtgatagtttgctgagaatgatggtttccagcttcatccatgtccctacaaaggacacgaactcatcctttttttatggctgcatagtattccatggtgtatatgtgccacattttcttaatccattctatcattgatggacatctgggttggttccaagtctttgctattgtgaatagtgc

SEQ ID NO: 925 - DNA, 638 bp, Homo sapiens
ggcatgtgtataactccctgaacacactgcgcgtgctcaattccaaagggtaaggaaagcacggggcatgagaaagcccaccctaagggaagtatcatgggaaagaggcgagcccataaagtcctaggatcaaggtaaaagggccttttttttctgtcttcttttgctgtcttttttttttaacttatttatttatttttcctttttttaaattatactttaagtcctagggtacatgtgcacaacgtgcaggtttgttacatatgtatacatgtgccatgttggtgtgctgcacccattaactcgtcatttacattaggtatatctcctaatgctatccctccccaccccacaacagtccccggtgtgtgatgttccccaccctgtgtccaagtgttctcatagttcaattcccacctatgagtgagaacatgcagtgtttggttttttgtcyttgtgatagtttgctgagaatgatggtttccagcttcatccatgtccctacaaaggacacgaactcatcctttttttatggctgcatagtattccatggtgtatatgtgccacattttcttaatccattctatcattgatggacatctgggttggttccaagtctttgctattgtgaatagtgc

SEQ ID NO: 926 - DNA, 1814 bp, Homo sapiens
ttctggcagagtgggttttgctatctaaaacctgctttttctaatagaggcaacttctcatctccagatactccgtgactttcaggaagaaaggcatataacttaaattgaagtgatagataatataaacccatggcctttttggcttttgggtcaggcccctgtgaagttagcaaaggcagcagaagcagctatgcttgcatcagaatgcagaatgatgctcatcctcaggaagcatttcacacccacttcctttccatccatggagtaaggggacagggaagttaattatgagaagggggataaactaatcctatactcattctctggccttctataaaaacactggttggtttttagcaggaaagttatgccagttatattaggattctccaaaaaaacagaaccagtaggatgtgtgtgtgtgcatgtgtcaagtgtatgtcacatatgaacacatgtgtatgtgtgtaagtgtatgtcacacacatgtacttatatacatatgcatgtatatatctatatctatatagttgtaggggctaagtgtgaactttgtggggcaggttgacagtctggagattccgggaagagttgatgctgcagtcttgagtctgaagacagtctggtggcagaattcctgctttcttaggagacctcagtcttttttcttaagccttcatttgaytggatgaggcccacttatgtaatagatggtaatctgctttattcaatctactgatgtaaatgttaatcacgtctaaaaagaacctttgcaacaacatctagactggtgtttgaccagagtactgggtgccatagcctagccaagatgacacataaaattagtgaccacgttggggcccagactggtctgcatgatataggctggagaggagaggaagaccctgctactgagctatgctcatctctgagaaaacaaattttatcttgcaagttatatctgatattcattgaacaaacgtggaacacctgctatgtgcaaagttctttgccaattattctctgcttttagtgggtcttctgctgttgtaaatcgaaggaagagtacagatgcagacagacaccctgggaagcaacttagtgtggtggaaaggcactgagttgtagagacaagagtaccggttttggctgtgtgactttgtgcaagttttcacccttcaaaactcattggtgattccactttatcaagatctgcaaactgtctaagccttatatttatctataaaaccatcatcatcatcagcagcagcagcagcatcattgccccaggatttaaccgaataaaacatgtaacaatttctgatatattacgagtcaccaacaattgttctttgtcttccttctctatcacattgctaagtaaaaaggggtgtgagaaactatgatatgagaggcagagtgagggaaatggcaccaggcatgatgtttgtgtcttaagtctgaaggtagactggaggcagaaaattggaacctttaatcaggtgtaccccatagtcaactggccagctgactatacagggcaggtctgtggtgcaggtgaggcttcatatttatctattatttggtaaaaatgaggtgctgttcctgaaatctagaatcatgatggtatgactatacacatttcagaatgattctcacccttttcaatcccttatgtcacaatctccatttatagttttgagttttgaattttaagccatgttctaaaaattccgaagttcaactcttagaaaatcccaagtagtctaagagtgttttacaccaaaatagtcacaagattatgttagaca

SEQ ID NO: 927 - DNA, 1814 bp, Homo sapiens
ttctggcagagtgggttttgctatctaaaacctgctttttctaatagaggcaacttctcatctccagatactccgtgactttcaggaagaaaggcatataacttaaattgaagtgatagataatataaacccatggcctttttggcttttgggtcaggcccctgtgaagttagcaaaggcagcagaagcagctatgcttgcatcagaatgcagaatgatgctcatcctcaggaagcatttcacacccacttcctttccatccatggagtaaggggacagggaagttaattatgagaagggggataaactaatcctatactcattctctggccttctataaaaacactggttggtttttagcaggaaagttatgccagttatattaggattctccaaaaaaacagaaccagtaggatgtgtgtgtgtgcatgtgtcaagtgtatgtcacatatgaacacatgtgtatgtgtgtaagtgtatgtcacacacatgtacttatatacatatgcatgtatatatctatatctatatagttgtaggggctaagtgtgaactttgtggggcaggttgacagtctggagattccgggaagagttgatgctgcagtcttgagtctgaagacagtctggtggcagaattcctgctttcttaggagacctcagtcttttttcttaagccttcatttgattggatgaggcccacttatgtaatagatggtaatctgctttattcaatctactgatgtaaatgttaatcacgtctaaaaagaacctttgcaacaacatctagactggtgtttgaccagagtactgggtgccatagcctagccaagatgacacataaaattagtgaccacgttggggcccagactggtctgcatgatataggctggagaggagaggaagaccctgctactgagctatgctcatctctgagaaaacaaattttatcttgcaagttatatctgatattcattgaacaaacgtggaacacctgctatgtgcaaagttctttgccaattattctctgcttttagtgggtcttctgctgttgtaaatcgaaggaagagtacagatgcagacagacaccctgggaagcaacttagtgtggtggaaaggcactgagttgtagagacaagagtaccggttttggctgtgtgactttgtgcaagttttcacccttcaaaactcattggtgattccactttatcaagatctgcaaactgtctaagccttatatttatctataaaaccatcatcatcatcakcagcagcagcagcatcattgccccaggatttaaccgaataaaacatgtaacaatttctgatatattacgagtcaccaacaattgttctttgtcttccttctctatcacattgctaagtaaaaaggggtgtgagaaactatgatatgagaggcagagtgagggaaatggcaccaggcatgatgtttgtgtcttaagtctgaaggtagactggaggcagaaaattggaacctttaatcaggtgtaccccatagtcaactggccagctgactatacagggcaggtctgtggtgcaggtgaggcttcatatttatctattatttggtaaaaatgaggtgctgttcctgaaatctagaatcatgatggtatgactatacacatttcagaatgattctcacccttttcaatcccttatgtcacaatctccatttatagttttgagttttgaattttaagccatgttctaaaaattccgaagttcaactcttagaaaatcccaagtagtctaagagtgttttacaccaaaatagtcacaagattatgttagaca

SEQ ID NO: 928 - DNA, 1814 bp, Homo sapiens
ttctggcagagtgggttttgctatctaaaacctgctttttctaatagaggcaacttctcatctccagatactccgtgactttcaggaagaaaggcatataacttaaattgaagtgatagataatataaacccatggcctttttggcttttgggtcaggcccctgtgaagttagcaaaggcagcagaagcagctatgcttgcatcagaatgcagaatgatgctcatcctcaggaagcatttcacacccacttcctttccatccatggagtaaggggacagggaagttaattatgagaagggggataaactaatcctatactcattctctggccttctataaaaacactggttggtttttagcaggaaagttatgccagttatattaggattctccaaaaaaacagaaccagtaggatgtgtgtgtgtgcatgtgtcaagtgtatgtcacatatgaacacatgtgtatgtgtgtaagtgtatgtcacacacatgtacttatatacatatgcatgtatatatctatatctatatagttgtaggggctaagtgtgaactttgtggggcaggttgacagtctggagattccgggaagagttgatgctgcagtcttgagtctgaagacagtctggtggcagaattcctgctttcttaggagacctcagtcttttttcttaagccttcatttgattggatgaggcccacttatgtaatagatggtaatctgctttattcaatctactgatgtaaatgttaatcacgtctaaaaagaacctttgcaacaacatctagactggtgtttgaccagagtactgggtgccatagcctagccaagatgacacataaaattagtgaccacgttggggcccagactggtctgcatgatataggctggagaggagaggaagaccctgctactgagctatgctcatctctgagaaaacaaattttatcttgcaagttatatctgatattcattgaacaaacgtggaacacctgctatgtgcaaagttctttgccaattattctctgcttttagtgggtcttctgctgttgtaaatcgaaggaagagtacagatgcagacagacaccctgggaagcaacttagtgtggtggaaaggcactgagttgtagagacaagagtaccggttttggctgtgtgactttgtgcaagttttcacccttcaaaactcattggtgattccactttatcaagatctgcaaactgtctaagccttatatttatctataaaaccatcatcatcatcagcagcagcagcagcatcattgccccaggatttaaccgaataaaacatgtaacaatttctgatatattacgagtcaccaacaattgttctttgtcttccttctctatcacattgctaagtaaaaaggggtgtgagaaactatgatatgagaggcagagtgagggaaatggcaccaggcatgatgtttstgtcttaagtctgaaggtagactggaggcagaaaattggaacctttaatcaggtgtaccccatagtcaactggccagctgactatacagggcaggtctgtggtgcaggtgaggcttcatatttatctattatttggtaaaaatgaggtgctgttcctgaaatctagaatcatgatggtatgactatacacatttcagaatgattctcacccttttcaatcccttatgtcacaatctccatttatagttttgagttttgaattttaagccatgttctaaaaattccgaagttcaactcttagaaaatcccaagtagtctaagagtgttttacaccaaaatagtcacaagattatgttagaca

SEQ ID NO: 929 - DNA, 1814 bp, Homo sapiens
ttctggcagagtgggttttgctatctaaaacctgctttttctaatagaggcaacttctcatctccagatactccgtgactttcaggaagaaaggcatataacttaaattgaagtgatagataatataaacccatggcctttttggcttttgggtcaggcccctgtgaagttagcaaaggcagcagaagcagctatgcttgcatcagaatgcagaatgatgctcatcctcaggaagcatttcacacccacttcctttccatccatggagtaaggggacagggaagttaattatgagaagggggataaactaatcctatactcattctctggccttctataaaaacactggttggtttttagcaggaaagttatgccagttatattaggattctccaaaaaaacagaaccagtaggatgtgtgtgtgtgcatgtgtcaagtgtatgtcacatatgaacacatgtgtatgtgtgtaagtgtatgtcacacacatgtacttatatacatatgcatgtatatatctatatctatatagttgtaggggctaagtgtgaactttgtggggcaggttgacagtctggagattccgggaagagttgatgctgcagtcttgagtctgaagacagtctggtggcagaattcctgctttcttaggagacctcagtcttttttcttaagccttcatttgattggatgaggcccacttatgtaatagatggtaatctgctttattcaatctactgatgtaaatgttaatcacgtctaaaaagaacctttgcaacaacatctagactggtgtttgaccagagtactgggtgccatagcctagccaagatgacacataaaattagtgaccacgttggggcccagactggtctgcatgatataggctggagaggagaggaagaccctgctactgagctatgctcatctctgagaaaacaaattttatcttgcaagttatatctgatattcattgaacaaacgtggaacacctgctatgtgcaaagttctttgccaattattctctgcttttagtgggtcttctgctgttgtaaatcgaaggaagagtacagatgcagacagacaccctgggaagcaacttagtgtggtggaaaggcactgagttgtagagacaagagtaccggttttggctgtgtgactttgtgcaagttttcacccttcaaaactcattggtgattccactttatcaagatctgcaaactgtctaagccttatatttatctataaaaccatcatcatcatcagcagcagcagcagcatcattgccccaggatttaaccgaataaaacatgtaacaatttctgatatattacgagtcaccaacaattgttctttgtcttccttctctatcacattgctaagtaaaaaggggtgtgagaaactatgatatgagaggcagagtgagggaaatggcaccaggcatgatgtttgtgtcttaagtctgaaggtagactggaggcagaaaattggaacctttaatcaggtgtaccccatagtcaactggccagctgactatacagggcaggtctgtggtgcaggtgaggcttcatatttatctattatttggtaaaaatgaggtgctgttcctgaaatctwgaatcatgatggtatgactatacacatttcagaatgattctcacccttttcaatcccttatgtcacaatctccatttatagttttgagttttgaattttaagccatgttctaaaaattccgaagttcaactcttagaaaatcccaagtagtctaagagtgttttacaccaaaatagtcacaagattatgttagaca

SEQ ID NO: 930 - DNA, 1814 bp, Homo sapiens
ttctggcagagtgggttttgctatctaaaacctgctttttctaatagaggcaacttctcatctccagatactccgtgactttcaggaagaaaggcatataacttaaattgaagtgatagataatataaacccatggcctttttggcttttgggtcaggcccctgtgaagttagcaaaggcagcagaagcagctatgcttgcatcagaatgcagaatgatgctcatcctcaggaagcatttcacacccacttcctttccatccatggagtaaggggacagggaagttaattatgagaagggggataaactaatcctatactcattctctggccttctataaaaacactggttggtttttagcaggaaagttatgccagttatattaggattctccaaaaaaacagaaccagtaggatgtgtgtgtgtgcatgtgtcaagtgtatgtcacatatgaacacatgtgtatgtgtgtaagtgtatgtcacacacatgtacttatatacatatgcatgtatatatctatatctatatagttgtaggggctaagtgtgaactttgtggggcaggttgacagtctggagattccgggaagagttgatgctgcagtcttgagtctgaagacagtctggtggcagaattcctgctttcttaggagacctcagtcttttttcttaagccttcatttgattggatgaggcccacttatgtaatagatggtaatctgctttattcaatctactgatgtaaatgttaatcacgtctaaaaagaacctttgcaacaacatctagactggtgtttgaccagagtactgggtgccatagcctagccaagatgacacataaaattagtgaccacgttggggcccagactggtctgcatgatataggctggagaggagaggaagaccctgctactgagctatgctcatctctgagaaaacaaattttatcttgcaagttatatctgatattcattgaacaaacgtggaacacctgctatgtgcaaagttctttgccaattattctctgcttttagtgggtcttctgctgttgtaaatcgaaggaagagtacagatgcagacagacaccctgggaagcaacttagtgtggtggaaaggcactgagttgtagagacaagagtaccggttttggctgtgtgactttgtgcaagttttcacccttcaaaactcattggtgattccactttatcaagatctgcaaactgtctaagccttatatttatctataaaaccatcatcatcatcagcagcagcagcagcatcattgccccaggatttaaccgaataaaacatgtaacaatttctgatatattacgagtcaccaacaattgttctttgtcttccttctctatcacattgctaagtaaaaaggggtgtgagaaactatgatatgagaggcagagtgagggaaatggcaccaggcatgatgtttgtgtcttaagtctgaaggtagactggaggcagaaaattggaacctttaatcaggtgtaccccatagtcaactggccagctgactatacagggcaggtctgtggtgcaggtgaggcttcatatttatctattatttggtaaaaatgaggtgctgttcctgaaatctagaatcatgatggtatgactatacacatttcagaatgattctcacccttttcaatcccttatgtcacaatctccatttatagttttgagttttgaattttaagccatgttctaaaaattccraagttcaactcttagaaaatcccaagtagtctaagagtgttttacaccaaaatagtcacaagattatgttagaca

SEQ ID NO: 931 - DNA, 749 bp, Homo sapiens
gcatttaatccagagattctattcaaaaattgtgaaaacatggtgtaggccaagtgaaatgtcagttattggattcaagttataggctgtattatatgaactttggtttattcctactgcattcttgtagttgtgcacctttggacttagaagtaaactgatcccagaccaatcacagaagccacaraggactgctctatggaaaacaagtgtgttctttacttcactgcttcttacccaggtcagtcctatctaagaagcaggctcaaagtttaggggaaattttcttctttttgtggcagtctgattgagatataattcacataccctatactataagctgaattgtgtccctcccctcctcactccatcaaatttatatgctgaagtcctaagccccagtaactcagaatgtaaccgtatttggagatatggtctttacagaggtaattaagatagaatgaggttattatggtgttctaatccaatatgactactgtccttataaaaaaaggaaatttgaatacagatatgtatagagggaagacaatgtgaaggcaggaagaagacagacaatgacaagtcaaaaagaaaggcctggaactggtccttccctcataaccctcagaaggaaccaaccctgccaaaaccttgatctcaaagttctagcctcccattctgtgaaagaatacatttcagttttttaatccacccacagtctatggtacactttgttatggcagcccttg

SEQ ID NO: 932 - DNA, 749 bp, Homo sapiens
gcatttaatccagagattctattcaaaaattgtgaaaacatggtgtaggccaagtgaaatgtcagttattggattcaagttataggctgtattatatgaactttggtttattcctactgcattcttgtagttgtgcacctttggacttagaagtaaactgatcccagaccaatcacagaagccacagaggactgctctatggaaaacaagtgtgttctttacttcactgcttcttacccaggtcagtcctatctaagaagcaggctcaaagtttaggggaaattttcttctttttgtggcagtctgattgagatataattcacataccctatactataagctgaattgtgtccctcccctcctcactccatcaaatttatatgctgaagtcctaagccccagtaactcagaatgtaaccgtatttggagatatggtctttacagaggtaattaagatagaatgaggttattatggtgttctaatccaatatgactactgtccttataaaaaaaggaaatttgaatacagayatgtatagagggaagacaatgtgaaggcaggaagaagacagacaatgacaagtcaaaaagaaaggcctggaactggtccttccctcataaccctcagaaggaaccaaccctgccaaaaccttgatctcaaagttctagcctcccattctgtgaaagaatacatttcagttttttaatccacccacagtctatggtacactttgttatggcagcccttg

SEQ ID NO: 933 - DNA, 640 bp, Homo sapiens
agaattaaaaacaaaatagtggtatatgttctcataaaatatgtaccccagaatgcatacataaacctgaaccctttagagactataatattatgaggcattaattttttttgttttttccgagtggctttcaatctgtagctgtatgttagctatatgaaggtgagtatacatacatattgtgaaagcaaaaattgcatccgacaaagttaagcagcaaggacaaatgctattcaagrcaattacaataggagagagaggccagaaatcagcctgctcaactccactataacaaggggtgggaggaactttagggactggtatgagctagtggaagggaactagagaacactggaggatgggggcaggttgatcactgggttgtgtgaagcacactgagtttgcaaaatacttttctctgtgattaggtcatctctgctggctaattggcacccattgaagttaggctcctactctcccttagagactggtagacaggggtgctatttttcatgatgattacatttcaaagggttggctcccagcaacttgagaaagacttccctgagtagtacaacaggcaagaggcttttaaaaatatttacatctcaaaggggcagagaaaggatttacaattaca

SEQ ID NO: 934 - DNA, 640 bp, Homo sapiens
agaattaaaaacaaaatagtggtatatgttctcataaaatatgtaccccagaatgcatacataaacctgaaccctttagagactataatattatgaggcattaattttttttgttttttccgagtggctttcaatctgtagctgtatgttagctatatgaaggtgagtatacatacatattgtgaaagcaaaaattgcatccgacaaagttaagcagcaaggacaaatgctattcaagacaattacaataggagagagaggccagaaatcagcctgctcaactccactataacaaggggtgggaggaactttagggactggtatgagctagtggaagggaactakagaacactggaggatgggggcaggttgatcactgggttgtgtgaagcacactgagtttgcaaaatacttttctctgtgattaggtcatctctgctggctaattggcacccattgaagttaggctcctactctcccttagagactggtagacaggggtgctatttttcatgatgattacatttcaaagggttggctcccagcaacttgagaaagacttccctgagtagtacaacaggcaagaggcttttaaaaatatttacatctcaaaggggcagagaaaggatttacaattaca

SEQ ID NO: 935 - DNA, 640 bp, Homo sapiens
agaattaaaaacaaaatagtggtatatgttctcataaaatatgtaccccagaatgcatacataaacctgaaccctttagagactataatattatgaggcattaattttttttgttttttccgagtggctttcaatctgtagctgtatgttagctatatgaaggtgagtatacatacatattgtgaaagcaaaaattgcatccgacaaagttaagcagcaaggacaaatgctattcaagacaattacaataggagagagaggccagaaatcagcctgctcaactccactataacaaggggtgggaggaactttagggactggtatgagctagtggaagggaactagagaacactggaggatgggggcaggttgatcactgggktgtgtgaagcacactgagtttgcaaaatacttttctctgtgattaggtcatctctgctggctaattggcacccattgaagttaggctcctactctcccttagagactggtagacaggggtgctatttttcatgatgattacatttcaaagggttggctcccagcaacttgagaaagacttccctgagtagtacaacaggcaagaggcttttaaaaatatttacatctcaaaggggcagagaaaggatttacaattaca

SEQ ID NO: 936 - DNA, 1098 bp, Homo sapiens
tagtaaatgctcagtaaatgacaaccaacatccccagctcagcttcttgaactcctggcctcaagaaatcctcctgactaagccttctgagtagctgggttacaagatgagctactgtgcccrgtgagctcagtttctctacctgcaaagaaaacttctgaagtgcaaatgtggtggttcccacatatgctagaagggaggcaagggaatgcaattcttgcatttgtttgacagagacagtcagatactctaagcctatggtgttgttgcagagaagcattgagggaaatggctgagcatcagagcctcttctgacaactgtgccactttcttagacctacaggtacacccaaatccacttgaaattacagaaacacattatcttctttcaattttcagttgtttgttcctagattctccttcttattgtgataagtttttaaaatgtgactttattgtagtgttagacaaggggcagtcttgagaaaattaaatgtgaggaaggtttggggaatgtacccctaaccttctatctagtacatctagaccagttaatccctgagtaccctgattgcagagatggatgtttctagacatgaaataatgcaaattggctttcatttctatgattctgttctcattcactggtataaaatcatgtctacttataggatatcaatttctgtcaatgtttcataagtattaattataaaatccattgtgtctggattaacaattctgctctcagaacattaccagctaacaccttcacctaagtaccagctccagtacagattcacttattcaggggtttttactggcatttattagtgctaggatgttcaccactgggctggggtatggacttcagacctcagaaggtttgggttgaatcctagatcagtacttcgtcactgaaccttggtttctttatctataaaatgttaacagtgggtgttcattttacagggtgatgggtgatgacgattagagatgatataaataatatatatgttgggtccattataagtgctcagcagtgtagatgaatatatattaatattaatatattactaattgagagactagtcattcagt

SEQ ID NO: 937 - DNA, 1098 bp, Homo sapiens
tagtaaatgctcagtaaatgacaaccaacatccccagctcagcttcttgaactcctggcctcaagaaatcctcctgactaagccttctgagtagctgggttacaagatgagctactgtgcccggtgagctcagtttctctacctgcaaagaaaacttctgaagtgcaaatgtggtggttcccacatatgctagaagggaggcaagggaatgcaattcttgcatttgtttgacagagacagtcagatactctaagcctatggtgttgttgcagagaagcattgagggaaatggctgagcatcagagcctcttctgacaactgtgccactttcttagacctacaggtacacccaaatccacttgaaattacagaaacacattatcttctttcaattttcagttgtttgttcctagattctccttcttattgtgataagtttttaaaatgtgactttattgtagtgttagacaaggggcagtcttgagaaaattaaatgtgaggaaggtttggggaatgtacccctaaccttctatctagtacatctagaccagttaatccctgagtaccctgattgcagagwtggatgtttctagacatgaaataatgcaaattggctttcatttctatgattctgttctcattcactggtataaaatcatgtctacttataggatatcaatttctgtcaatgtttcataagtattaattataaaatccattgtgtctggattaacaattctgctctcagaacattaccagctaacaccttcacctaagtaccagctccagtacagattcacttattcaggggtttttactggcatttattagtgctaggatgttcaccactgggctggggtatggacttcagacctcagaaggtttgggttgaatcctagatcagtacttcgtcactgaaccttggtttctttatctataaaatgttaacagtgggtgttcattttacagggtgatgggtgatgacgattagagatgatataaataatatatatgttgggtccattataagtgctcagcagtgtagatgaatatatattaatattaatatattactaattgagagactagtcattcagt

SEQ ID NO: 938 - DNA, 984 bp, Homo sapiens
aaatctgttagctccagcacctgtttgacttccttctagggctttgcattattgattatattcatgaaaaggactgagaaacatttcccagtgtggcaggaaggctctcgctggaccagtgctcaggagaccttcttttttattccaattctggaattgccrttggccaggtgtgtggcaacaggcacccatccttgctgggactgcttctttatcttcagcatgagtcccagacagcttgatttctaagatgtgtgccagctttaacatctcacagttctaagctaagagtatgaataagaaatgaggagcagaggtgacagatgacaccaatactctgggcttcgggtgattccttaaagtggtgtctcaggttcaagttcagagcaagctcccatgtgtcaccttttaggcctctgcattcattattttcacaggctgcataacttgattcattccattaaaggacacatgagcaaactgaaggctgagataaaaaaataaaacttcttcatgcaaggagaatcatccctgatggctgcatattctgcaaacggacctagtttgatcagtgatgtgtcaatcagaccatgtgcccagattggatttttgcagctccggagggtaattaatgagaatgggacaattccccttccaagaagtggctgtttcttccagttccagccttcatttttcttttgtcccttctccatcttgttatgatttataatcctgcctgtcccctgcagtggcttcggtgtaagatttttactaagtaggtgaatggctagcttccaaaaatgacaacctttgtccaggtctggggctgaggccaggtcagataagcatgatacctttctctcttcttacctgcaagttaacacattctttccaggtgcaggaggatgacagacccaaggcattcagctttagaaagtgtttttctcctctcactttgtttttgttttctcacttggactgttg

SEQ ID NO: 939 - DNA, 984 bp, Homo sapiens
aaatctgttagctccagcacctgtttgacttccttctagggctttgcattattgattatattcatgaaaaggactgagaaacatttcccagtgtggcaggaaggctctcgctggaccagtgctcaggagaccttcttttttattccaattctggaattgccgttggccagktgtgtggcaacaggcacccatccttgctgggactgcttctttatcttcagcatgagtcccagacagcttgatttctaagatgtgtgccagctttaacatctcacagttctaagctaagagtatgaataagaaatgaggagcagaggtgacagatgacaccaatactctgggcttcgggtgattccttaaagtggtgtctcaggttcaagttcagagcaagctcccatgtgtcaccttttaggcctctgcattcattattttcacaggctgcataacttgattcattccattaaaggacacatgagcaaactgaaggctgagataaaaaaataaaacttcttcatgcaaggagaatcatccctgatggctgcatattctgcaaacggacctagtttgatcagtgatgtgtcaatcagaccatgtgcccagattggatttttgcagctccggagggtaattaatgagaatgggacaattccccttccaagaagtggctgtttcttccagttccagccttcatttttcttttgtcccttctccatcttgttatgatttataatcctgcctgtcccctgcagtggcttcggtgtaagatttttactaagtaggtgaatggctagcttccaaaaatgacaacctttgtccaggtctggggctgaggccaggtcagataagcatgatacctttctctcttcttacctgcaagttaacacattctttccaggtgcaggaggatgacagacccaaggcattcagctttagaaagtgtttttctcctctcactttgtttttgttttctcacttggactgttg

SEQ ID NO: 940 - DNA, 2523 bp, Homo sapiens
tgcatatgctgaagtcctaactcccaggacctcaacaacgggattgtgtttggagacagagcctttcaagaggtaattgattaattaagtgagatcataagggtgggccctgatccaatatgactgctatcctcatgtgtagagatgaggacacagatgcccacaggtggaagaccatgtgaggacacagcaagaaggcagctgtctgtaagccaaagagagaggcctcacttcagaagaaatcaaccctgctgtactttgaccttggacttccagctttttgcactgtgagaaataaatgttgtttaagctccctagcctgttgcatttattaatagcagcctgagctaagacaacaggtaagaagaaaaaggttgggaggtcggctgattcattgaaaygagttatgaacagaggtcagtaaacacataggaatcaatataaacagcattacctccatgccatcatccaggaggaagtgtgaggatatcaggaaaggacagtccctggagtcccgcgaacactgaagctccaccaccacagcttcctggcctccctccattcccacctggaaaacaggatgtgctttcagaagctgcactcgggaaacatcaaactacatgtgccatttgaaaatgttgattataattataaaatatgttcatttagagatataatttagaaaatatagaaaagtatcaagaagaaaattaaaatctcctaaaatcccgagagcaatacgatcactattaatattttggtatgtttccctcctgtatttttaccatcccataaatagatctgtgtgtttataccataccacttttcatgttttccttatcaaagagggaaatgttattttcaagttacattttattaacatatctcaaaatacaaatggaacatcactttgaaggctagtgtcgatttatatctatatatatattttagagacaggtcttgccacattgcccagggtggcctcaaactcctgagctcaagagatccacctgccttagccccctaagtagctgggactataggcaagtgatgccacatcagacactagtgttgattttcatttgtggggaaaaaaaaaaaggattttgtttttctttctaatgcaaaaggaatggaaacgcaacatagtgtaaatacttagtgtcaaaccttccttttccaaatacaagaaactgttagtaacagggaagagcacttttatgtttaatgccatattgatattttatactgtttaaaatttttgctatgagcatgcattacttttataatataaacactaaaaatttaaactttaaattctaaacataaacattttcttgactgttaaaaatcaggtctgggtgcagtggctcatgcttgtaatcccagcactttgggaggctaaggagggaggatggcttgagcccaggagttcgagaccagcaaaatagtgagattctgtctccacaaaaataaatatataaataaaattaactcatattttaaggactatatgatattcaggatatgcataatttttcaaaacaatgagaaaatgaccgaataggaaaaacacccagaagacattcaaacaggtgtgtttttttttttttttgctaactagaaatcagattcttactttctccaaggtgttatattttgcaacttcaaaatcttgaggaagatgaggaatttcaacattctgcataccaaacctgaaatttgtagtgtataattaaaattttaacattaaatggattttaggctaaacagaatttcataaattttttcttgtacatctttacaaaatacatgatagattccttacaaaacacatggtaagtccacatggtaagtccctaaggcctccttagctcttccagaaattgttaaaagatcattggaaatgagctggatgcctcctctgcataatctccagctcagatacccagcactgtagcgtctgcactggaagatggtctccacgcggcagaggcagaaagaagtgggccgcacactctggggatgggctacttgtgtttgctttggatctgactcttagaagctatgtcactcctctccagaccacagtccattcctctctaaaataaaggagtcagacttctcataatctgtacttttcattttggattttcttctctttaaacactattattaacaaatacaacaagattgaatgtgatgcctaattaacccgatgttttgggtatgctttaagaaaccatatagaactttagactcccatactccatttgaggaaggctgttgttatttccatttttgaaaacatcaggcaaaagtaacaaactgtctttactctaaaggctgctcaggaaaataataggatgaaaataggtttttttttaaaagaattaaaaaaaaaacccactggttttctttttaaaaatcaattcaataattgcacccaatctcatttaatactgagaatttaaaataatgatcactatactagttgaagaaaaagactcaaataaaaaatca

SEQ ID NO: 941 - DNA, 2523 bp, Homo sapiens
tgcatatgctgaagtcctaactcccaggacctcaacaacgggattgtgtttggagacagagcctttcaagaggtaattgattaattaagtgagatcataagggtgggccctgatccaatatgactgctatcctcatgtgtagagatgaggacacagatgcccacaggtggaagaccatgtgaggacacagcaagaaggcagctgtctgtaagccaaagagagaggcctcacttcagaagaaatcaaccctgctgtactttgaccttggacttccagctttttgcactgtgagaaataaatgttgtttaagctccctagcctgttgcatttattaatagcagcctgagctaagacaacaggtaagaagaaaaaggttgggaggtcggctgattcattgaaatgagttatgaacagaggtcagtaaacacataggaatcaatataaacagcattacctccatgccatcatccaggaggaagtgtgaggatatcaggaaaggacagtccctggagtcccgcgaacactgaagctccaccaccacagcttcctggcctccctccattcccacctggaaaacaggatgtgctttcagaagctgcactcgggaaacatcaaactacatgtgccatttgaaaatgttgattataattataaaatatgttcatttagagatataatttagaaaatatagaaaagtatcaaraagaaaattaaaatctcctaaaatcccgagagcaatacgatcactattaatattttggtatgtttccctcctgtatttttaccatcccataaatagatctgtgtgtttataccataccacttttcatgttttccttatcaaagagggaaatgttattttcaagttacattttattaacatatctcaaaatacaaatggaacatcactttgaaggctagtgtcgatttatatctatatatatattttagagacaggtcttgccacattgcccagggtggcctcaaactcctgagctcaagagatccacctgccttagccccctaagtagctgggactataggcaagtgatgccacatcagacactagtgttgattttcatttgtggggaaaaaaaaaaaggattttgtttttctttctaatgcaaaaggaatggaaacgcaacatagtgtaaatacttagtgtcaaaccttccttttccaaatacaagaaactgttagtaacagggaagagcacttttatgtttaatgccatattgatattttatactgtttaaaatttttgctatgagcatgcattacttttataatataaacactaaaaatttaaactttaaattctaaacataaacattttcttgactgttaaaaatcaggtctgggtgcagtggctcatgcttgtaatcccagcactttgggaggctaaggagggaggatggcttgagcccaggagttcgagaccagcaaaatagtgagattctgtctccacaaaaataaatatataaataaaattaactcatattttaaggactatatgatattcaggatatgcataatttttcaaaacaatgagaaaatgaccgaataggaaaaacacccagaagacattcaaacaggtgtgtttttttttttttttgctaactagaaatcagattcttactttctccaaggtgttatattttgcaacttcaaaatcttgaggaagatgaggaatttcaacattctgcataccaaacctgaaatttgtagtgtataattaaaattttaacattaaatggattttaggctaaacagaatttcataaattttttcttgtacatctttacaaaatacatgatagattccttacaaaacacatggtaagtccacatggtaagtccctaaggcctccttagctcttccagaaattgttaaaagatcattggaaatgagctggatgcctcctctgcataatctccagctcagatacccagcactgtagcgtctgcactggaagatggtctccacgcggcagaggcagaaagaagtgggccgcacactctggggatgggctacttgtgtttgctttggatctgactcttagaagctatgtcactcctctccagaccacagtccattcctctctaaaataaaggagtcagacttctcataatctgtacttttcattttggattttcttctctttaaacactattattaacaaatacaacaagattgaatgtgatgcctaattaacccgatgttttgggtatgctttaagaaaccatatagaactttagactcccatactccatttgaggaaggctgttgttatttccatttttgaaaacatcaggcaaaagtaacaaactgtctttactctaaaggctgctcaggaaaataataggatgaaaataggtttttttttaaaagaattaaaaaaaaaacccactggttttctttttaaaaatcaattcaataattgcacccaatctcatttaatactgagaatttaaaataatgatcactatactagttgaagaaaaagactcaaataaaaaatca

SEQ ID NO: 942 - DNA, 634 bp, Homo sapiens
atgttctcagttacatctatacctaaggttattggggggaaagaataggactattaggaggtggaaaagaaaagaaatcttgtccttattaacctgaatgaccttggaccttggtttcttattttgtgaaagggagttaataatgtaactaataagaatgttatgagtaattggggaaaaaatggatctgaagtatctgggacaggcttaacagccagtgtgcttagttaacatcagcctgtccttacctgtttgtggttctggattcattaagtaagctgtgtgtgtggtcctaggctcccgaagggtagagcagcaacaatgggaagagctccgagyaggactcaggagctgtgaccctcacatcctccaccaacttcctccaggctcaggttcctcacctatccaatgaggaggttggactcatctctctgatttctcatggtgctaaaaggtcaacaaggctgggtgtggttgctaagtttgtaatcccagcactttgggaggctgaggtgggaggatcggttgagcccaagagtttgagtctgtagtgagctgtgattgttctgctgcactccagcctgggcaacagagtgataccctgtctcaaaaaaagtgttaggtttgtgggtag

SEQ ID NO: 943 - DNA, 590 bp, Homo sapiens
aaaaaaaaaaactctttctgctaacataaactgcattttgtaatttcttatttatatgtgtgcacatatataaagtataatacatagaagagacaaaaggcataatgtcatgaaaaagagtataagagagtatgtctttgttttaataaacattacaataaatgaattatgaattaaaattcttttcccaccctaaagaaacacatttttcaacttgacgagtcattgtaacagaactgcaagctccaagtcatttaaaaatagtgctgttttaatagaagagaacaaaacatactaaaatctccaatttgactgatgttcattttgytacttgatgacaaacccaatccaaccagccatgatttaagtgcattcacttttggactgtccaaaataaatcccctttgttttctttaggctaaacattgtactaaaacatcttacttccagacattgctctgtgtttttccagttgcttataaatgatatctggtgacttgctctaatactatatgggtgtacaaattaagctgatatactttctactatttttcctcaaatattcagcaaatatttactaagcaccaact

SEQ ID NO: 944 - DNA, 641 bp, Homo sapiens
tgggaagccattggaggattttaagtgaggagtgatgtgacatgaattatgctttgagcctattactttataaagagtagaggtgcagaaagtgaggtgcaaatgtgtaaacagaataattaggagactctgtagtattgcagatgagaaatcatgttgtcttgagctaatgtttaaactgtggattaagagccaatattattaaaaacaaatatacttttggccagtataaaactacatrttctatattaagtttctttgcttttgattcaaattatatcaactcataagatgattatgggggaaaccacttgatgaattcattttaataaatatagacttttcaggcttatggtttgtaagtggggaaatctctatttacaacagtgatttggggtgaagagttttgcaatcactagaccaccagctgctataatgcctcagttagacatcctttgcccactttgctttcaagccagttgcaagcataccagaaagttgggtcacaattcaaaccttatcagcactttaccttagagtcattaagtgttatcagatccttttctgctgacatattttttaaaaagagaaagaaagaagaaaaaagataaaacctggacttttgagggtaagacaggaaa

SEQ ID NO: 945 - DNA, 641 bp, Homo sapiens
tgggaagccattggaggattttaagtgaggagtgatgtgacatgaattatgctttgagcctattactttataaagagtagaggtgcagaaagtgaggtgcaaatgtgtaaacagaataattaggagactctgtagtattgcagatgagaaatcatgttgtcttgagctaatgtttaaactgtggattaagagccaatattattaaaaacaaatatacttttggccagtataaaactacatattctatattaagtttctttgcttttgattcaaattatatcaactcataagatgattatgggggaaaccacttgatgaattcattttaataaatatagactttwcaggcttatggtttgtaagtggggaaatctctatttacaacagtgatttggggtgaagagttttgcaatcactagaccaccagctgctataatgcctcagttagacatcctttgcccactttgctttcaagccagttgcaagcataccagaaagttgggtcacaattcaaaccttatcagcactttaccttagagtcattaagtgttatcagatccttttctgctgacatattttttaaaaagagaaagaaagaagaaaaaagataaaacctggacttttgagggtaagacaggaaa

SEQ ID NO: 946 - DNA, 641 bp, Homo sapiens
tgggaagccattggaggattttaagtgaggagtgatgtgacatgaattatgctttgagcctattactttataaagagtagaggtgcagaaagtgaggtgcaaatgtgtaaacagaataattaggagactctgtagtattgcagatgagaaatcatgttgtcttgagctaatgtttaaactgtggattaagagccaatattattaaaaacaaatatacttttggccagtataaaactacatattctatattaagtttctttgcttttgattcaaattatatcaactcataagatgattatgggggaaaccacttgatgaattcattttaataaatatagacttttcaggcttatggtttgtaagtggggaaatctctatttacaacagtgatttggggtgaakagttttgcaatcactagaccaccagctgctataatgcctcagttagacatcctttgcccactttgctttcaagccagttgcaagcataccagaaagttgggtcacaattcaaaccttatcagcactttaccttagagtcattaagtgttatcagatccttttctgctgacatattttttaaaaagagaaagaaagaagaaaaaagataaaacctggacttttgagggtaagacaggaaa

SEQ ID NO: 947 - DNA, 641 bp, Homo sapiens
tgggaagccattggaggattttaagtgaggagtgatgtgacatgaattatgctttgagcctattactttataaagagtagaggtgcagaaagtgaggtgcaaatgtgtaaacagaataattaggagactctgtagtattgcagatgagaaatcatgttgtcttgagctaatgtttaaactgtggattaagagccaatattattaaaaacaaatatacttttggccagtataaaactacatattctatattaagtttctttgcttttgattcaaattatatcaactcataagatgattatgggggaaaccacttgatgaattcattttaataaatatagacttttcaggcttatggtttgtaagtggggaaatctctatttacaacagtgatttggggtgaagagttttgcaatcactagaccaccagctgctataatgcctcagttagacatcctttgcccactttgctttcaagccagttgcaagcataccagaaagttgggtcacaattcaaaccttatcagcrctttaccttagagtcattaagtgttatcagatccttttctgctgacatattttttaaaaagagaaagaaagaagaaaaaagataaaacctggacttttgagggtaagacaggaaa

SEQ ID NO: 948 - DNA, 641 bp, Homo sapiens
tgggaagccattggaggattttaagtgaggagtgatgtgacatgaattatgctttgagcctattactttataaagagtagaggtgcagaaagtgaggtgcaaatgtgtaaacagaataattaggagactctgtagtattgcagatgagaaatcatgttgtcttgagctaatgtttaaactgtggattaagagccaatattattaaaaacaaatatacttttggccagtataaaactacatattctatattaagtttctttgcttttgattcaaattatatcaactcataagatgattatgggggaaaccacttgatgaattcattttaataaatatagacttttcaggcttatggtttgtaagtggggaaatctctatttacaacagtgatttggggtgaagagttttgcaatcactagaccaccagctgctataatgcctcagttagacatcctttgcccactttgctttcaagccagttgcaagcataccagaaagttgggtcacaattcaaaccttatcagcactttaccttagagtcattaagtgttatcagatcctyttctgctgacatattttttaaaaagagaaagaaagaagaaaaaagataaaacctggacttttgagggtaagacaggaaa

SEQ ID NO: 949 - DNA, 1342 bp, Homo sapiens
tttttaggtctccattattacttgtctgcaccttcctttgctttgtaggcataagctatcaataaccgggcattgaccacactgtgggggttctccccttccctcccatggaagctaagtctttagctgttaatttcagaaggttttaagccaaccactagttttcattattgtacatcaaaaaggcaggcaaatcgcagcagctgtaagttcaaaggacacaaaggtctcactgtgagcatcacagcaaatagttttgggttcccctcaccccaaaagtagcccatggtgggttaagtttttatttttaaatagatttagagttgaataactagcccttgtaagggacttcaacaaagaggctgtatattggcacatattaaatatgcccctatacaccccaaattgttttgtccaaaatgtctcgtttattataatttcattgataaagcccttgattgtagcccagggactttcacatattggctgcctcctgttggacccacaggcctctattggtgattccaaatcagccgtgcatggcccttgatcccctcctgtagagggactgggtgatggtatctataaaccaacagaatagctcttttccagtaaatcccccacagagtccagaaaaatatgcaagcagtccttttacttcaagtttctacccacacagggtcaacagagggaggagaggcagaggcagctgccctagaagcagccatcgtcccagtcccatagccagtgtgaaatcttagccctcttttccttacacatggccgtggccgctcttctagtcagcaccgaaatctcctccctgaagagcttctttctcttcctcccttcttccttcctccatttcttggtccactgaagtccctggagatcccctgggtcctgtcctctttgagttgtcattgtctttgcttctgttgctcatgccagggctacaggaaatttgctgcgtccccctaggtactgttgtcagagtggactctgggtcaaagagtcagacctttcattggtgtgcttcaagtctaagctttgcaagctctttctctatgttacgtctgcctccttcctctttagtttgtcttttatttgtcctagccttgaggagtgaaggttccaggaaattgaggatgggaatatagtggaaaatccattccccacaggaaaatattctgaaatttctggcttgggtgacaggctgtcattgatagagctagataaygatgaaggtgatgataatgatagccaatcctatgtagcactcattaagtaccaagcactattaagtgcttgagggagaataaatcatacaatcctatgtggctcg

SEQ ID NO: 950 - DNA, 1052 bp, Homo sapiens
agcttttagagcgggggaggataaagaagaaagaaagaaaatgaaagacttaagaagaggcagcaaaggtttcaccaatcattatatcattgagagggctcaaactacagatgaagttagaatacagatgattgtagaaagggtatttaaaattattaactgatcaaatatttgtagttgtcattaaaaaaaaaatacaacttagcaattcagttcagaaagaagaatatccccaggaacatacacatctgtttaatattacaagccaactgtcaacatcctaagtgaagttttaatttaatattttttctttcttgatgttttacctttaatcaatgcctcatgagagtatcaactttctataagaaactgttaaatataaagaaatgttattgtagcatgtttataaaatcatagttcgagaactttttatttttccaaagcctgaccacaacttaattatctgcaggacattccaggctcacaattgcaagctccagttcccaagcaattttaaacaatatctactgtacaggacagagggtacacaaaagaccgcaacatggttatatttccaaaagtcagcattaggccctttagacatggtttttattttcattaaacaatatttgtttcctcactaatcattaaatggttttcatcactattgcctgctttcctttcacatgtcagttgttagcatcagtgtttgtgttcataataaatataaaagtaatccaccccatcatttraaaatgaacacacacgacgtctggttcaatgagtgttaagagacttagcaatatactcacaccctgaatactgatctattttaatctagacacttaaaaaaacgtaatggagtaatagactatacagccctctcctttaaatcagatttaagcttcgtgcctgcttatgttattgtgggcacacagatctaatcagtggttcaagacatttacttgggaaaatgaaagaagaagacagtaagttcatatccctgaccataatggggaggagttgagaatattgccaattcctttagatgc

SEQ ID NO: 951 - DNA, 1263 bp, Homo sapiens
cacaatcaatttggttcatcccatctggacaagttcttgctgtgttttctcttgccagttttactcatttatgttgcctgcctggccccgtaagcttgtgagattgcaagcattgaattgtggtaatagwtgatggactcttacctgcatgaggaggaaatggaaagacagggagaagtaaaggcttataagagagtggttggattaattaattggactgaagttttgatgaggccaggaaaagttcaaaaaagtttttctagctgtgtgatgcagtcattaggaaagtctaaatgcaaatcactcaagggcaagcctgggctagaatgcagggaatcattttcctgacaaaacaacttctcttttttctctatatctgtctatatttatacatattcgaaagccacatcctcagaataaatagaacacacaaaatacccaaatttcaaagtaactataattttaaaaagataaaatatcaaattccagtgagcaaactttcacactcccacatttgaggtcagctgggacagttcaaaaaacctcaagagaagaatcagctcattgtataggcagtggttagaagttaacgggtactatgaaaaaccgagaagtcagatggcaaaagactacctaaggaaacactggactaggggtattcaataaagtataagtgtaaaggtaaccaacaaaacaataacagaaaccttccaaaatggaagaaataaaaggagaaaaagaaagaagaaaaaattaaacatacacatcaaatgaaaaatagcaaatagaatgcaattaaaaattattttgccacagttggaactagacatatagtcacactgataaattagaatcgatgttatccacttaataaaagaaaaacatttgaaatatacacaaaataagactaaaagatatgttgtatataatagatatacttaaaatgatttgaaatgtttggaaaaaaggtatgggtggataagggtatactaagaaactaaggtaattggaattaaaaataaagtaagtaaaaggaacatattcttatagtagacagaagagaattcaaaccaaaaaatcacattaaatgcagaaaatgtttaaaggctaaaagccacaattcacaataaagatatattatagagatctatgcaccaaataatgtagcaatcacctttaataagcaaaacccataggagattcaagaatacactttaacaatagagaattttaacacaacagtctcagtacaagaactatcaa

SEQ ID NO: 952 - DNA, 1287 bp, Homo sapiens
tgcatcacttaatgatgagcaaaatattgttatgtggagcaaaatattgttatgtggagcataactgaaacaagttattaaaaattttaaagttcataaaaagtagtgacataagacaacaatctgctgccatggtcatatttcttgtctatgtactttctaatgcacaaacctaaccatgactctctcctttttaaaatcttctaaatccctcaccctccttaccttgttcctactatctcacaagactcagctcttaccactccccaacccataccctggattataccatcctgagtttttttaatgtatcaggctctcccaagctcatgggctgtcaggggccccttacattgagcctgtagcactagtgttgggcctagtgcattggacatccagagaagattgttttaactctcctctataagatgaaacgattttcagttgaaatcacacaacaattaataacacttattagtttcctaacttgtttactagtttgaaaacagacaattcacaattcacaattttaaaagaagaataatgtcaatttagagggtattataaaaacctgcaacatatgtcacatttgaattaaatctgtccttatctgttacaaaataattacaacttgtagttggtactatttccctgttttttcattttgaacacaaatagtggtcacaatagcatgaagtaactttagccctgtcatctttcttgtggtgggaggcatgggaggaggaggactgacagtataactaggagttatctggattaacttctgtgtagaataaaacgtttcttaaagaacatgtaacaaaaatgcactaatttcctgcttatgtatatattattcaaactcaacagtaagttctacaattatttagaacttagaccaacaagtggtttttttaaatataattgatattatttagaattgccagtacctggtgataataaaaaatatgtaacatttagttgatttagttgattccattactgcttttagtttctccacagtgttccccctcatttcctgcacctggctgttcctcctgccagcccacctctgmgatgaaactacatagtaccctatgttttctcctctgattatcactatcaccctgcttcgtaatagcttactgatatatctatctcttctatgatattgtgagctctctgaaggcagagaccatgctttatttatttatcactatatccccaacatttgctgcacaatagattctcaataactgctgaaagaagtttcaataaatatatgca

SEQ ID NO: 953 - DNA, 587 bp, Homo sapiens
ggaaaccatcattctgagcaaactatcagaaggacagaaaaccaaacaccacattttctcactcataggtgggaattgaacaatgagaacactcggacacagggtggggaacatcacagggtggggaacatcacacaccagggcctgtcatggggaggaggagggggagggatagcattaggagaaatacctaatgtaaatgaagagttaatgggtgcagcacaccaacatggcacatgtatacatatgtaacaaacccacacattgtgcacatgtaccctagaacttaaagtataattaaaaaaaaaaagaataaccaaytacaaaatgtccaagatccaagcaaactataacaaggatacaaaacaaatggtatttgcgaaacaacattgttaccaaagaaaaggaaatatccaccatttgttttctggctcatgaggttgcctttaaaaggacgacctagtctgaaggattggatctagtttccagagctaggaaatatataccagacacagcacgcttgtaagactgtcaaaaagaattggagcccctctgaattgggaaaaggcacttctcctggtggcagg

SEQ ID NO: 954 - DNA, 1297 bp, Homo sapiens
tagggaaataaatttattataaggaattgactcatgcgattatggaggctgagagtcccaagatctgcagtcagtaagctagagacccrggaaagccaatgatatagttccagtacacgtctgaaagcctgagaaccagaagagccaatgttataagttccagtccaaaaagccagcaaacttgagacccaaaaggaaacaatgtttcagtttgagtctgaagtcagaaaaagaccaatgtccaagcttaaacaatcaggcaggagtgccctctttctctcaggagagtcagcttctttgctctatgtaggctttcaactgactgaatgaggtttacccacattagggaaaccattctgctttgctcagtctactgattcaaatgttaatatcatccaaaatatcctcaaagacacaaccagaataatgtttggccaaatatctgggcacgttatggctcagtcaagttgacacataacattaatcatcacgccatctccattatgtacataaaggaattgaaactgtataggtcccactcttcacctccaaaagcaaacaattcattatcttgtcaaatgaaacacttaccttctgaaagacacagggttcacccctgtgaagtcccactgatgccatttgtccattaccaagaaaaacagcttatttctggcactttatctcagtccagccttattttttaatataaaaatatattttgatggacactaatgaatagcaagcaaaagaagatgtgttttgcctggaaatgtcaaatagctatgtctgaaaaaggagacagagttgaatggctgataggttaagtggttaaatgatgaacaagcagcgagtgagtgaaatgttcagtgcctatgactagggtgtgctgcaagactgacttttacactatagtatatggcttttcatcaccattgttactcataatactgagaaggaaggttatttctatgaatagtcttctttgttcataatagcaatcagtctctatttgggtggttttaaaataggcaatcatttcacagcaggaacaatgagagcagaatagaattcagaatcttatcaccactcataaacactgacgtttattgtctagtagctagaaaaagcaagaatcactgcagtaaagatgcttaaaaatccatatgtgacttcatagttgaaatagaaaaggaatgtcagctatcaagtttacaaaaataaaatgcaatttatacttcaataatttataagcattttttttaaaaaagggaaaccagctacacacttgccaattttg

SEQ ID NO: 955 - DNA, 1372 bp, Homo sapiens
ataaatatactgtatattttctataatttttattatgtttgtttttaccaaatattaatttacaagatagatttcagaatttwattagcaatattttgaccccttggaatttaaactgcaattattcgatacttcagtggattttttactgtaataaatgataattttaaaaattatacagggaaagttcagctgtattttcttctgaatttttttcctcctagcattataaacatttaaaatggtaacatagtggttacaagcttatgatatctttgcattcaggcaatctgagtttgtattctgcttctaaagcttacaatatgacctcaggaatgttacttaattgtcttttgctcattgtcttcatcttcaacattgggtttataaaaagtaatacttactgaactgtatttgtttcctgttactctttcaaaaaagtagactactctagtggtttaaaacaaagcttgaatgttctctctaggagagaatcccttgtgttgctttttccagcttctagaattacattccttggcttgtgtaccgcacccctctctatcttttaagtcaagggggatcaagttgaggattcatgttgcatccctctgaccttgcttactgctacatattccctgactcttccgcctctatcttccacatttaaagaatcattttgattacacttgattcacctgaatggataatctactataatctatttatcgtctaattaataaccttaattctacctccaaccttaatttactgtggccatgtatattagctcattctcttacttctataaagaaataaatgagactgggtaatttataaagagaagaggcttaattggctcatgatttcacaggctgtacatggggctggtgaggcctcaggaaattttcaatcatgatggaaggtgaaggggaagcaggcatgtcttacacagccagagaaggaggaagagagcaaaaagagatgtattacacactttgatacaaccagatgtcatgagaactcactcactatcacaagaatagcaaggggaaaatccacctcatgatccagtcacctactaccaggcccctccttcaacaatgcggattacaatttgactggagatctgggcagggatacaaatctgaaccatattaccatgtaacaaactattcacaaatttctgatattaggatttggatatctttgggagcaggaggggaaatggtactctgcctagcataggtgcatgccgtatgcctggcactattctacaacttcttataaatcatatcttataacattaaattaaagtcataattttatatgactttatgattaaacttcataaaattaaagtatgaattatgca

SEQ ID NO: 956 - DNA, 1790 bp, Homo sapiens
tttttaattagaatataatctaatttttctatcaccttcatattttagaatgaaagcaaatcttaaatgtttattaatattccttcatcattctgcccttatattttttattaagtaaaaaaatgaaataaaccaattaagagcatttatacaaaaataagtaaatatataaaatgcatgtacataaacacaaaaacatgcrgatgcataaacatatacagtgaaagagataagtattgtttttctattccttattctcataaattactagatatatgtgacagagttagtaatatatttgtgtataataatgttagttgaaaacttatttttataataataaaagcaattttacatatttatatttagtactgttaaaaaccaacagttaaactatttacatgcatatttacatacaaatgaatacataaaaaggcacagacacagaggaagccattgccaatttacaaagaataaatatgcatacacatatattatatattcagcaaatatttttaaaaaaggatttcagagcttataaatatagacattactacttgggattacaaaagaaacattaaaatagaatatataagctaaaatataagaaaatatttagaaaatattaaaattatagaatttgagttgctttcttcactttatatctgttttatattaacaacatgtgttctcacatgtttagcatacaggagatctttcccgttctttgtcttttttttttttttttttgagacagagtcttgctttgtcgcccaggttggagtgcagtggctccatcttggctcactgcaagctccttctcccgggttcacgccattctcctgcttcagcctccagagtagctgggactatcggcgtctgccaccgcactttgctaatttttttatatttttagtagagattgggtttcactgtgttagccaggatggtcttgatctcttgacctcatgatctgcccaccttgacttcccaaagtgctgggattacaggcgtgagccaccgcgccaggcctcttttcttaaccgtaaagtttaaatatgaatggttttatatgaaaatgtagtcctgtattcccaggtatgttttatgactccctgattttttataacttacgagcctacctcttctcccttgagaccttgcttactctttagaatctttaaaattatttaaatctaaacaataattattcacacttgaataagtactctgaaattagatggggactttttaaatctcaaaatgagaatttccttatttataggaaaatttgggggctgtttttaaaaaaatcaccattaattgtttgtaaatattgtattacttaaagataatagcttcagatgctgttatcctggaatgaaaagcaggctggttcttttctgttactgagaaatttatcattatccctataaactgtaagcaattgctctctgaaacaaccatattcttgtagaaagccgatttgagttagggcagagcggtctttgtttatagctcatttacctcatttgtctaggaaagtttcagtagcacctttcttttcttagaatagtatacttaaagaggtcagtaagctaaattatagtgaagatgacaaagaaatattaagagttttgcagagcccacctaaatcttgatcgaaagtaagtaactgttttatgttttccacaaagcatttattttataaatgcagatgctgaaaccctgatcttgaacttccagactccagaactttgagaaaataaatatctgttgcttaagccact

SEQ ID NO: 957 - DNA, 492 bp, Homo sapiens
taatttgaattattcaccaacactagtgatattacaggaataaccacagatgagtgaatattttaattttttaagatggggtcatgctgttccttttatacattaaaaaaaaaaatcccagagaccaggaatagaaaagagagtgagaagtacatcacagcctatgaatatgcaagaatgagctggagttcttctgaaaagaagagtggcctgttgaactctgtgacatgcatccatagctgttgactcaagatccacagaggcagagtttctgccagttgagagaatgtcaaatgatcagcagaaaatgcaccttttagatacgttgtaactattgctgactataatgatatgctatatattttggaggcatttcaagtacctgagaggtatactaattattatasatatgaaaaaataatgtatgatgtttattttttactcacataatcttaaatgctatagtgtcaagtagttaaatatataattttt

SEQ ID NO: 958 - DNA, 617 bp, Homo sapiens
ttgagaatataggaataaaaacatctaaactgaggcccaaagaaaaaaatgtaacgtgataaaacgagagatcctcaatcacatagggaaaaatagccaacagtaattggagtaactgtataattagagamccagaagcagaggaaagaggaatgcaggggaaaaaaaaaaaaaaacttaaataaaggtatttctttttacaaagttaatgaaaagaatatactaaaaacccaaggaattaattgaaactgaaacaagacaagacatgtttgaattatggaaagccagtgatagagaatatcttaaaagcactttgaatttatatcatcctggagataaaagataagaaaatctacagacttttactcagaaataatgcaaaacagtagacattatatgtctactgcactttaacaaataatttgttatttgtgtgcagaaacacagacacacacacacacagagttaatctgtaagtctgtagccattcaaattatctttgaaaaatcaggtaaaataaaaatatttttgtgaaaaagtggacataacttataacttccaattttcactataagaaataatgtggctgggtgtggtggctcatgcctgtaatccca

SEQ ID NO: 959 - DNA, 605 bp, Homo sapiens
ataactattgggtactatgtttgacacctgggtgatgaagtcatctgtacagcaaacccccatgacamgagtttacctatataataaaccttcacatgtacctccaaacctaaaacaaaagttgaaagaaaagaaaaaaacaattcaatattgtcacacttctgacaatgttttagaaattgcatattcattattttatgtttaagatgtaatgttgaatatcaaatggtcaaaaaacgattatctattattaataaaagcaaacattttatgtatagtctttcatattcatacttacctttaagagtgataggtaagtattttcaaaacaaggatcaaacaagtttttgaatttattacttcattatatttattggctaatctccatgaaagagattggcagcataattttaaatgaatatgctagaattttaataaatatgctaaaatttaacccagccttgaaaattgacatgtggatgttgtttccaatattcagatattataaacaacatcattatgaccatcttgtagcacaaattgtggttcatttgtccaattatttctatattacttttcaggaaggaaattcctgtgttaaatgt

SEQ ID NO: 960 - DNA, 1080 bp, Homo sapiens
  misc_feature (1)...(1080): n = A,T,C or G
gcatatttggttataacaaatgcagaatttagaaaatttaaagtcagaacttagtggttatttaaacaaaaactctagtaaaaatgacagctttcccaattacttctggaattttaaagtacatcaataatttgaaattgtatttttcaatgcaagttcagcgtaaattgaggtacactcaagaattttttcaaatatggccacaaaataggtaattcactcagaatgattcacattattttaaattntaagataggtcttgaaaattatctagatgaacacttcatcttacaaattcaaacttaaaatataaggataagaagatactatgttatgcgctaatataaatttagatttttctttccctccacactagagtacagtgagaaaagctcccgtggaggatttcttcttttctgcaattaattacycccgggtctcttataatcaaactggtcagcttttggcaaactggaatttctttttttgctgcacatttagtgtgtacccatggctcccttaaaaaataatcggccaggggaggcagaggcaggagaattgcttgaacccagggggcggaggttgcagtgagctaagatcatgccactgtactccagcctgggcagtagagcgagactccatctcatctcaaataataataattataataataataatcagcctggtgcagtggctcatggctgtaatcccagcactttgggaggccaaggcgggtggatcaggaggtcaggagttcgagaccaacctgaccaatatggtgaaaccccatctctactaaaaataaaaaaattattgggtgtggtggcacatgcctgtagtcccccctgcttgggaggctgagacaggagaatcacttgaacccaggaggtggaggttgcagtaagccgagatcgtgccactgcactctagcctgggcgacagagtgagactgtctcaaaaaaacaaaacaaaacaaacaaacaaacaaaaaataacccttctaccactcagtttgattccagggagacagtaggaaagctttacagaacttagcaggccttgggagcttttagacactgc

SEQ ID NO: 961 - DNA, 1080 bp, Homo sapiens
  misc_feature (1)...(1080): n = A,T,C or G
gcatatttggttataacaaatgcagaatttagaaaatttaaagtcagaacttagtggttatttaaacaaaaactctagtaaaaatgacagctttcccaattacttctggaattttaaagtacatcaataatttgaaattgtatttttcaatgcaagttcagcgtaaattgaggtacactcaagaattttttcaaatatggccacaaaataggtaattcactcagaatgattcacattattttaaattntaagataggtcttgaaaattatctagatgaacacttcatcttacaaattcaaacttaaaatataaggataagaagatactatgttatgcgctaatataaatttagatttttctttccctccacactagagtacagtgagaaaagctcccgtggaggatttcttcttttctgcaattaattactcccgggtctcttatratcaaactggtcagcttttggcaaactggaatttctttttttgctgcacatttagtgtgtacccatggctcccttaaaaaataatcggccaggggaggcagaggcaggagaattgcttgaacccagggggcggaggttgcagtgagctaagatcatgccactgtactccagcctgggcagtagagcgagactccatctcatctcaaataataataattataataataataatcagcctggtgcagtggctcatggctgtaatcccagcactttgggaggccaaggcgggtggatcaggaggtcaggagttcgagaccaacctgaccaatatggtgaaaccccatctctactaaaaataaaaaaattattgggtgtggtggcacatgcctgtagtcccccctgcttgggaggctgagacaggagaatcacttgaacccaggaggtggaggttgcagtaagccgagatcgtgccactgcactctagcctgggcgacagagtgagactgtctcaaaaaaacaaaacaaaacaaacaaacaaacaaaaaataacccttctaccactcagtttgattccagggagacagtaggaaagctttacagaacttagcaggccttgggagcttttagacactgc

SEQ ID NO: 962 - DNA, 1080 bp, Homo sapiens
  misc_feature (1)...(1080): n = A,T,C or G
gcatatttggttataacaaatgcagaatttagaaaatttaaagtcagaacttagtggttatttaaacaaaaactctagtaaaaatgacagctttcccaattacttctggaattttaaagtacatcaataatttgaaattgtatttttcaatgcaagttcagcgtaaattgaggtacactcaagaattttttcaaatatggccacaaaataggtaattcactcagaatgattcacattattttaaattntaagataggtcttgaaaattatctagatgaacacttcatcttacaaattcaaacttaaaatataaggataagaagatactatgttatgcgctaatataaatttagatttttctttccctccacactagagtacagtgagaaaagctcccgtggaggatttcttcttttctgcaattaattactcccgggtctcttataatcaaactggtcagcttttggcaaactggaatttctttttttgctgcacatttartgtgtacccatggctcccttaaaaaataatcggccaggggaggcagaggcaggagaattgcttgaacccagggggcggaggttgcagtgagctaagatcatgccactgtactccagcctgggcagtagagcgagactccatctcatctcaaataataataattataataataataatcagcctggtgcagtggctcatggctgtaatcccagcactttgggaggccaaggcgggtggatcaggaggtcaggagttcgagaccaacctgaccaatatggtgaaaccccatctctactaaaaataaaaaaattattgggtgtggtggcacatgcctgtagtcccccctgcttgggaggctgagacaggagaatcacttgaacccaggaggtggaggttgcagtaagccgagatcgtgccactgcactctagcctgggcgacagagtgagactgtctcaaaaaaacaaaacaaaacaaacaaacaaacaaaaaataacccttctaccactcagtttgattccagggagacagtaggaaagctttacagaacttagcaggccttgggagcttttagacactgc

SEQ ID NO: 963 - DNA, 1080 bp, Homo sapiens
  misc_feature (1)...(1080): n = A,T,C or G
gcatatttggttataacaaatgcagaatttagaaaatttaaagtcagaacttagtggttatttaaacaaaaactctagtaaaaatgacagctttcccaattacttctggaattttaaagtacatcaataatttgaaattgtatttttcaatgcaagttcagcgtaaattgaggtacactcaagaattttttcaaatatggccacaaaataggtaattcactcagaatgattcacattattttaaattntaagataggtcttgaaaattatctagatgaacacttcatcttacaaattcaaacttaaaatataaggataagaagatactatgttatgcgctaatataaatttagatttttctttccctccacactagagtacagtgagaaaagctcccgtggaggatttcttcttttctgcaattaattactcccgggtctcttataatcaaactggtcagcttttggcaaactggaatttctttttttgctgcacatttagtgtgtacccatggctcccttaaaaaataatcggccaggggaggcagaggcasgagaattgcttgaacccagggggcggaggttgcagtgagctaagatcatgccactgtactccagcctgggcagtagagcgagactccatctcatctcaaataataataattataataataataatcagcctggtgcagtggctcatggctgtaatcccagcactttgggaggccaaggcgggtggatcaggaggtcaggagttcgagaccaacctgaccaatatggtgaaaccccatctctactaaaaataaaaaaattattgggtgtggtggcacatgcctgtagtcccccctgcttgggaggctgagacaggagaatcacttgaacccaggaggtggaggttgcagtaagccgagatcgtgccactgcactctagcctgggcgacagagtgagactgtctcaaaaaaacaaaacaaaacaaacaaacaaacaaaaaataacccttctaccactcagtttgattccagggagacagtaggaaagctttacagaacttagcaggccttgggagcttttagacactgc

SEQ ID NO: 964 - DNA, 1100 bp, Homo sapiens
ctgtctcttaaaattatgtctatggtatattttgtgtggcatttggtctacatgatgaataaatatcctctatgtctacatctgattcattttgccatatcataataaacaaggcattctgatgtattgctttgactaataactagaaggtttctgacttttatgtgagactgtcttattggacgataatgacctgattgaatgtgttttaactaccattgttgctcaactgcaattcaaaccgatctgagattggtagactactacaaaagaaatatgctttgtgatacctgtgaatcatatctagatccaaagtagaattttgaatttaatacagcagaaaaaaatcctatgtcagcaggatagaatgttcaaactcctttctcttttgctctcacatataagcataaaaggataagacctgtaaagaaatagtgccagatccaagagctcactcaatgtaccctgagagttttaaagacttcctgtgctgtaataatccctttgtatggccttactccactgtggagatgcccacatctaataagaaggcttcatcactgctgccactgtgctttctgaggttccactctaagtcgttctacctaatgctgctgcataggattatgatgctcgaggctgctgcatgctgcacagtatctgaatatctttgttaaaatatcaggcatttattccacttcacaaatctaaaggtacacaaaacttctgagtgtcttctgacacgagaccacccctgaagggagaatgagactgatgatctcataactcctattagctgctgttcagattaagagacgtcaayatggaaggtacagtcctcctgggagcatgatgtaatcattgacattctgttttttaggtaaaagagtcattgaatacaggtcattgtatcagtacttaaactgataagtgattcataccaaaattatttaggccctcatttctagaaagaacataagagaattttatgttaaattcacttcaattcaattaaaactgttcaagtatttatatttgaaacatatataagttaatctcaatgattgtgcaatttaaccatgcagacatctgtttttatt

SEQ ID NO: 965 - DNA, 564 bp, Homo sapiens
ttccttagttactgttgagtatttttaaagaagattccttctattgcttattataaagacctttttaaaaaacacaaatgtttactgagttatatgtaaaatttggtatttactgagatggtcatgtgttttatttttatttacagatctgctgaattatattgattccctaaaagggaaccacccttagcataaatgctacatgagattgatatatttttcttttastgtacttctatattcagtttactaatgttttatttaggatttttgcatctataagtgaaagtagtatatgtgtgtgtatatatatatgtgtgtgtgtatatatatatgtgtgtgtgtgtatatatatgtgtgtgtatatatatatatatatatatatactttttatactcatctagttttggtaccaagttttccagagttgtagatgtattcagaaattttttggctcttttattctctgaagttgtcaaaagaattatttgttcctttaaagcttgataaccttgactttaacaccctctgaaataggcctcagagaggggtggtaagtgacat

SEQ ID NO: 966 - DNA, 564 bp, Homo sapiens
ttccttagttactgttgagtatttttaaagaagattccttctattgcttattataaagacctttttaaaaaacacaaatgtttactgagttatatgtaaaatttggtatttactgagatggtcatgtgttttatttttatttacagatctgctgaattatattgattccctaaaagggaaccacccttagcataaatgctacatgagattgatatatttttcttttagtgtacttctatattcagtttactaatgttttatttargatttttgcatctataagtgaaagtagtatatgtgtgtgtatatatatatgtgtgtgtgtatatatatatgtgtgtgtgtgtatatatatgtgtgtgtatatatatatatatatatatatactttttatactcatctagttttggtaccaagttttccagagttgtagatgtattcagaaattttttggctcttttattctctgaagttgtcaaaagaattatttgttcctttaaagcttgataaccttgactttaacaccctctgaaataggcctcagagaggggtggtaagtgacat

SEQ ID NO: 967 - DNA, 564 bp, Homo sapiens
ttccttagttactgttgagtatttttaaagaagattccttctattgcttattataaagacctttttaaaaaacacaaatgtttactgagttatatgtaaaatttggtatttactgagatggtcatgtgttttatttttatttacagatctgctgaattatattgattccctaaaagggaaccacccttagcataaatgctacatgagattgatatatttttcttttagtgtacttctatattcagtttactaatgttttatttaggatttttgcatctataagtgaaagtagtatatgtgtgtgtatatatatatgtgtgtgtgtatatatatatgtgtgtgtgtgtatatatatgtgtgtgtrtatatatatatatatatatatactttttatactcatctagttttggtaccaagttttccagagttgtagatgtattcagaaattttttggctcttttattctctgaagttgtcaaaagaattatttgttcctttaaagcttgataaccttgactttaacaccctctgaaataggcctcagagaggggtggtaagtgacat

SEQ ID NO: 968 - DNA, 1172 bp, Homo sapiens
ctgtggtggcaagtattatgatcaaagtaaagaaaacttggcagttgggggaggtaagaggatgggcaaggaaggcttcctggaggggctacattttagtagaggtttgaaggaaaagtagagatttgccaagcaaagaggataggaagggtggaacaaaagacagctagtctatctggaaaacctgcaggtgttcgtcaaggtggagcaaaaggaatggtgagctggcgatgggagatggaagggttgatgggtctactatggactgaatgtgtccccccgaaattcatttatggaagtcctaacccccagtgtgatggtattggaggtggggcctgtgggagatccttagaactagataggtcttgaaggtggggcctttatgatagaattaatactcttctaaaaagaggaagaaacataagagcttgctctctctctctcttcaagcatatacaccaaggaaagggccctgtgagtgcacagtgagaaggtgaccatttacaagtgctaggacctgaatgtttatatccctccccaattcatataatgaaatcctaaaccccaatgtggtgctattaggaggtggggcattttggargtggttagatcatgagggtggagctcttatgaatgggatgagtgtccttataaaaagatttggagggagggggcattccctttgctctttctaccatgggaggacacagaagatggccatttgcagaagaaggccatcaccagaacccaatcatgctggcaccctaatcttggacctcacatcctctagaactgtgagaaagaaatttctgttgtttataagctagcctgtcaatgacgttttgtttcgacagcacaaatggactaagacaaaagctaggaagtgggtcctcaccagaaaccaaatctgcaccttaattttggacttccaggcctctggaactatgagaaataaatgtctgttgcgtaagcccctaagtctataatttgtttattgttgttgtttttgttgttagagctaagatagtaatggaccgttcagagcctgtgtctactggatgatttgcccaagtttttctctgaaacagagttgctaaaagttgaacagtattcaatgcaaaaacctattagagaaagtaagtaataccagtactttctggtaaagtagtttc

SEQ ID NO: 969 - DNA, 1172 bp, Homo sapiens
ctgtggtggcaagtattatgatcaaagtaaagaaaacttggcagttgggggaggtaagaggatgggcaaggaaggcttcctggaggggctacattttagtagaggtttgaaggaaaagtagagatttgccaagcaaagaggataggaagggtggaacaaaagacagctagtctatctggaaaacctgcaggtgttcgtcaaggtggagcaaaaggaatggtgagctggcgatgggagatggaagggttgatgggtctactatggactgaatgtgtccccccgaaattcatttatggaagtcctaacccccagtgtgatggtattggaggtggggcctgtgggagatccttagaactagataggtcttgaaggtggggcctttatgatagaattaatactcttctaaaaagaggaagaaacataagagcttgctctctctctctcttcaagcatatacaccaaggaaagggccctgtgagtgcacagtgagaaggtgaccatttacaagtgctaggacctgaatgtttatatccctccccaattcatataatgaaatcctaaaccccaatgtggtgctattaggaggtggggcattttggaagtggttagatcatgagggtggagctcttatgaatgggatgagtgyccttataaaaagatttggagggagggggcattccctttgctctttctaccatgggaggacacagaagatggccatttgcagaagaaggccatcaccagaacccaatcatgctggcaccctaatcttggacctcacatcctctagaactgtgagaaagaaatttctgttgtttataagctagcctgtcaatgacgttttgtttcgacagcacaaatggactaagacaaaagctaggaagtgggtcctcaccagaaaccaaatctgcaccttaattttggacttccaggcctctggaactatgagaaataaatgtctgttgcgtaagcccctaagtctataatttgtttattgttgttgtttttgttgttagagctaagatagtaatggaccgttcagagcctgtgtctactggatgatttgcccaagtttttctctgaaacagagttgctaaaagttgaacagtattcaatgcaaaaacctattagagaaagtaagtaataccagtactttctggtaaagtagtttc

SEQ ID NO: 970 - DNA, 696 bp, Homo sapiens
tgcatgcctgtaataccagctactcaggaagctgaggcaggagaattgcttgaacccaggaggtkgaggttgcagtgagccaagctcatgccactagactccagcctgggtgacaaagcgagaccctgtctcaaaaaaaaaaaaaaaaaaaaaaaaagaattaaagggggtttcttcatatgatgatatcaacccactatcagtccatccatccaccacccacccatccaatgactacttattgaatatactatgttcccagtatcaacctaggcacaggccatagaaagatgacaagtcactattcctttaaagaggtcttggtagaaagaaatgaaaaattataatatgatgtggtattatgtaatatactataaattatattgtcataaatgatatgaatacaaaatacagtaggagcataggagaagtatttaagtttggtgcaggaaggagagttagagaagatttctctaaggaagccacatttcgctggattttgagaggtaagtggttttttagttttctaaatgggcagccaagcagagagtgacttttatatataaacgggggcatagaatgaggtgtcaaagtgtgagaaactatgagtagcccaatattgttgggctgcccaaagtggagttagggatcaggggtgggaagctatggggaagcagctagactattaaacagtgg

SEQ ID NO: 971 - DNA, 696 bp, Homo sapiens
tgcatgcctgtaataccagctactcaggaagctgaggcaggagaattgcttgaacccaggaggtggmggttgcagtgagccaagctcatgccactagactccagcctgggtgacaaagcgagaccctgtctcaaaaaaaaaaaaaaaaaaaaaaaaagaattaaagggggtttcttcatatgatgatatcaacccactatcagtccatccatccaccacccacccatccaatgactacttattgaatatactatgttcccagtatcaacctaggcacaggccatagaaagatgacaagtcactattcctttaaagaggtcttggtagaaagaaatgaaaaattataatatgatgtggtattatgtaatatactataaattatattgtcataaatgatatgaatacaaaatacagtaggagcataggagaagtatttaagtttggtgcaggaaggagagttagagaagatttctctaaggaagccacatttcgctggattttgagaggtaagtggttttttagttttctaaatgggcagccaagcagagagtgacttttatatataaacgggggcatagaatgaggtgtcaaagtgtgagaaactatgagtagcccaatattgttgggctgcccaaagtggagttagggatcaggggtgggaagctatggggaagcagctagactattaaacagtgg

SEQ ID NO: 972 - DNA, 696 bp, Homo sapiens
tgcatgcctgtaataccagctactcaggaagctgaggcaggagaattgcttgaacccaggaggtggaggttgcagtgagccaagctcrtgccactagactccagcctgggtgacaaagcgagaccctgtctcaaaaaaaaaaaaaaaaaaaaaaaaagaattaaagggggtttcttcatatgatgatatcaacccactatcagtccatccatccaccacccacccatccaatgactacttattgaatatactatgttcccagtatcaacctaggcacaggccatagaaagatgacaagtcactattcctttaaagaggtcttggtagaaagaaatgaaaaattataatatgatgtggtattatgtaatatactataaattatattgtcataaatgatatgaatacaaaatacagtaggagcataggagaagtatttaagtttggtgcaggaaggagagttagagaagatttctctaaggaagccacatttcgctggattttgagaggtaagtggttttttagttttctaaatgggcagccaagcagagagtgacttttatatataaacgggggcatagaatgaggtgtcaaagtgtgagaaactatgagtagcccaatattgttgggctgcccaaagtggagttagggatcaggggtgggaagctatggggaagcagctagactattaaacagtgg

SEQ ID NO: 973 - DNA, 696 bp, Homo sapiens
tgcatgcctgtaataccagctactcaggaagctgaggcaggagaattgcttgaacccaggaggtggaggttgcagtgagccaagctcatgccactagactccagcctgggtgacaaagcgagaccctgtctcaaaaaaaaaaaaaaaaaaaaaaaaagaattaaagggggtttcttcatatgatgatatcaacccactatcagtccatccatccaycacccacccatccaatgactacttattgaatatactatgttcccagtatcaacctaggcacaggccatagaaagatgacaagtcactattcctttaaagaggtcttggtagaaagaaatgaaaaattataatatgatgtggtattatgtaatatactataaattatattgtcataaatgatatgaatacaaaatacagtaggagcataggagaagtatttaagtttggtgcaggaaggagagttagagaagatttctctaaggaagccacatttcgctggattttgagaggtaagtggttttttagttttctaaatgggcagccaagcagagagtgacttttatatataaacgggggcatagaatgaggtgtcaaagtgtgagaaactatgagtagcccaatattgttgggctgcccaaagtggagttagggatcaggggtgggaagctatggggaagcagctagactattaaacagtgg

SEQ ID NO: 974 - DNA, 696 bp, Homo sapiens
tgcatgcctgtaataccagctactcaggaagctgaggcaggagaattgcttgaacccaggaggtggaggttgcagtgagccaagctcatgccactagactccagcctgggtgacaaagcgagaccctgtctcaaaaaaaaaaaaaaaaaaaaaaaaagaattaaagggggtttcttcatatgatgatatcaacccactatcagtccatccatccaccacccacccatccaatgactacttattgaatatactatgttcccagtatcaacctaggcacaggccatagaaagatgacaagtcactattcytttaaagaggtcttggtagaaagaaatgaaaaattataatatgatgtggtattatgtaatatactataaattatattgtcataaatgatatgaatacaaaatacagtaggagcataggagaagtatttaagtttggtgcaggaaggagagttagagaagatttctctaaggaagccacatttcgctggattttgagaggtaagtggttttttagttttctaaatgggcagccaagcagagagtgacttttatatataaacgggggcatagaatgaggtgtcaaagtgtgagaaactatgagtagcccaatattgttgggctgcccaaagtggagttagggatcaggggtgggaagctatggggaagcagctagactattaaacagtgg

SEQ ID NO: 975 - DNA, 696 bp, Homo sapiens
tgcatgcctgtaataccagctactcaggaagctgaggcaggagaattgcttgaacccaggaggtggaggttgcagtgagccaagctcatgccactagactccagcctgggtgacaaagcgagaccctgtctcaaaaaaaaaaaaaaaaaaaaaaaaagaattaaagggggtttcttcatatgatgatatcaacccactatcagtccatccatccaccacccacccatccaatgactacttattgaatatactatgttcccagtatcaacctaggcacaggccatagaaagatgacaagtcactattcctttaaagaggtcttggtagaaagaaatgaaaaattataatatgatgtggtattatgtaatatactataaattatattgtcataaatgatatgaatacaaaatacagtaggagcataggagaagyatttaagtttggtgcaggaaggagagttagagaagatttctctaaggaagccacatttcgctggattttgagaggtaagtggttttttagttttctaaatgggcagccaagcagagagtgacttttatatataaacgggggcatagaatgaggtgtcaaagtgtgagaaactatgagtagcccaatattgttgggctgcccaaagtggagttagggatcaggggtgggaagctatggggaagcagctagactattaaacagtgg

SEQ ID NO: 976 - DNA, 1262 bp, Homo sapiens
tgcatagagcaaggtatgcgagaaggggcactgggcttccatgctcctctctggactagaccacgctctcagtacctctacatgttcagcaacctggaaactccctgaatgctgtcctttgggtttttatgaaggcgtccttacacaggcagaattgatcacatcattgccaattggtgatcarctctaacttcagcatctctccccttcccagaggtcagacagtaggctgaaaagctgaaagttctaaccccatcctgaggccacccagggcccctagtgttctcattagcatacaaaaagacacttatcactgaggagattttccaggggttcttggaactgtgtaccaggaaacagggaggaagacaaaaaatatatttcttattatattcaaaatattatactcttagctgataagggtcaattccctaaaaggtttaaacaccagaacgagccaagagacttgaatccgcaaagtttaagtcaacgcaccctattatagatggctgagtacatcctttccttgcctaaatccactttgtaagtacccaaagtggagactgaggaagaggagcaagtgaggggattgcttggaacctgtcctggaagctgtccaataagtaggggcaggtgacaagagaggaaccgaaaggcagcatagtttgcatgcctagggctcttgttgttctgactccatgcagtgactgtccatcctttgggtgagtgggaccctctcattacgtgaacccagggcttgttctggtggggcactcaccagaggctatggagcccggctatgccaagcaaggtaccatttgtggatggctgcaagtctcttgcctgcaccaggacacttctaagtctcccaatgggtctatgaaaatgtaagaggtagcagaaaggagctctcccacatgtccccaggatggggaggagggtggaccaggcatactaaagacttttgagtaagtagttatgaatacagatctctgttacatgccagaaaattgggcttctgtgcatggtaataaatactttttatgcaaaggaaggatctgacagtccttttatagctgccacatttcagtttacaacatcaatggctgccttggctcagggcatttcctaaaagctgacagcttcaaccttctctggcccatcaattcctcttctctgatcattaatctgtacaaacgtctgtggctgtcatcagccctgattagatataggctctaattgtgcatgtgtaattgatgaaa

SEQ ID NO: 977 - DNA, 1262 bp, Homo sapiens
tgcatagagcaaggtatgcgagaaggggcactgggcttccatgctcctctctggactagaccacgctctcagtacctctacatgttcagcaacctggaaactccctgaatgctgtcctttgggtttttatgaaggcgtccttacacaggcagaattgatcacatcattgccaattggtgatcagctctaacttcagcatctctccccttcccagaggtcagacagtaggctgaaaagctgaaagttctaaccccatcctgaggccacccagggcccctagtgttctcattagcatacaaaaagacacttatcactgaggagattttccaggggttcttggaactgtgtaccaggaaacagggaggaagacaaaaaatatatttcttattatattmaaaatattatactcttagctgataagggtcaattccctaaaaggtttaaacaccagaacgagccaagagacttgaatccgcaaagtttaagtcaacgcaccctattatagatggctgagtacatcctttccttgcctaaatccactttgtaagtacccaaagtggagactgaggaagaggagcaagtgaggggattgcttggaacctgtcctggaagctgtccaataagtaggggcaggtgacaagagaggaaccgaaaggcagcatagtttgcatgcctagggctcttgttgttctgactccatgcagtgactgtccatcctttgggtgagtgggaccctctcattacgtgaacccagggcttgttctggtggggcactcaccagaggctatggagcccggctatgccaagcaaggtaccatttgtggatggctgcaagtctcttgcctgcaccaggacacttctaagtctcccaatgggtctatgaaaatgtaagaggtagcagaaaggagctctcccacatgtccccaggatggggaggagggtggaccaggcatactaaagacttttgagtaagtagttatgaatacagatctctgttacatgccagaaaattgggcttctgtgcatggtaataaatactttttatgcaaaggaaggatctgacagtccttttatagctgccacatttcagtttacaacatcaatggctgccttggctcagggcatttcctaaaagctgacagcttcaaccttctctggcccatcaattcctcttctctgatcattaatctgtacaaacgtctgtggctgtcatcagccctgattagatataggctctaattgtgcatgtgtaattgatgaaa

SEQ ID NO: 978 - DNA, 1262 bp, Homo sapiens
tgcatagagcaaggtatgcgagaaggggcactgggcttccatgctcctctctggactagaccacgctctcagtacctctacatgttcagcaacctggaaactccctgaatgctgtcctttgggtttttatgaaggcgtccttacacaggcagaattgatcacatcattgccaattggtgatcagctctaacttcagcatctctccccttcccagaggtcagacagtaggctgaaaagctgaaagttctaaccccatcctgaggccacccagggcccctagtgttctcattagcatacaaaaagacacttatcactgaggagattttccaggggttcttggaactgtgtaccaggaaacagggaggaagacaaaaaatatatttcttattatattcaaaatattatactcttagctgataagggtcaattccctaaaaggtttaaacaccagaacgagccaagagacttgaatccgcaaagtttaagtcaacgcaccctattatagatggctgagtacatcctttccttgcctaaatccacyttgtaagtacccaaagtggagactgaggaagaggagcaagtgaggggattgcttggaacctgtcctggaagctgtccaataagtaggggcaggtgacaagagaggaaccgaaaggcagcatagtttgcatgcctagggctcttgttgttctgactccatgcagtgactgtccatcctttgggtgagtgggaccctctcattacgtgaacccagggcttgttctggtggggcactcaccagaggctatggagcccggctatgccaagcaaggtaccatttgtggatggctgcaagtctcttgcctgcaccaggacacttctaagtctcccaatgggtctatgaaaatgtaagaggtagcagaaaggagctctcccacatgtccccaggatggggaggagggtggaccaggcatactaaagacttttgagtaagtagttatgaatacagatctctgttacatgccagaaaattgggcttctgtgcatggtaataaatactttttatgcaaaggaaggatctgacagtccttttatagctgccacatttcagtttacaacatcaatggctgccttggctcagggcatttcctaaaagctgacagcttcaaccttctctggcccatcaattcctcttctctgatcattaatctgtacaaacgtctgtggctgtcatcagccctgattagatataggctctaattgtgcatgtgtaattgatgaaa

SEQ ID NO: 979 - DNA, 1262 bp, Homo sapiens
tgcatagagcaaggtatgcgagaaggggcactgggcttccatgctcctctctggactagaccacgctctcagtacctctacatgttcagcaacctggaaactccctgaatgctgtcctttgggtttttatgaaggcgtccttacacaggcagaattgatcacatcattgccaattggtgatcagctctaacttcagcatctctccccttcccagaggtcagacagtaggctgaaaagctgaaagttctaaccccatcctgaggccacccagggcccctagtgttctcattagcatacaaaaagacacttatcactgaggagattttccaggggttcttggaactgtgtaccaggaaacagggaggaagacaaaaaatatatttcttattatattcaaaatattatactcttagctgataagggtcaattccctaaaaggtttaaacaccagaacgagccaagagacttgaatccgcaaagtttaagtcaacgcaccctattatagatggctgagtacatcctttccttgcctaaatccactttgtaagtacccaaagtggagactgaggaagaggagcaagtgaggggattgcttggaacctgtcctggaagctgtccaataagtagkggcaggtgacaagagaggaaccgaaaggcagcatagtttgcatgcctagggctcttgttgttctgactccatgcagtgactgtccatcctttgggtgagtgggaccctctcattacgtgaacccagggcttgttctggtggggcactcaccagaggctatggagcccggctatgccaagcaaggtaccatttgtggatggctgcaagtctcttgcctgcaccaggacacttctaagtctcccaatgggtctatgaaaatgtaagaggtagcagaaaggagctctcccacatgtccccaggatggggaggagggtggaccaggcatactaaagacttttgagtaagtagttatgaatacagatctctgttacatgccagaaaattgggcttctgtgcatggtaataaatactttttatgcaaaggaaggatctgacagtccttttatagctgccacatttcagtttacaacatcaatggctgccttggctcagggcatttcctaaaagctgacagcttcaaccttctctggcccatcaattcctcttctctgatcattaatctgtacaaacgtctgtggctgtcatcagccctgattagatataggctctaattgtgcatgtgtaattgatgaaa

SEQ ID NO: 980 - DNA, 641 bp, Homo sapiens
  misc_feature (1)...(641): n = A,T,C or G
gtaaggaatcctggatggcttctctggcgctcccagccaccagctcccgttcatctttggtgttctcattgttgttcaggagagaacatcaagtcactcaaagttccacggtgaacaatgattgagttaaccgcatccagggtttctcaaattttgtctttccttcaggaacttcttgcaatgctgaatgaaagacaccatccaaagagagacagagaaagaaatgtttgctgagtcatcaaatatggtgktgattcttgtttttatgtatagaatttttttttaagttcttacatttgcaggggaagccccttttgaagaaacactggtggccactgtagtttcattcattgctctgtggatggggagtgcattgaggaaggggggatggcctctgtcatcctcaaatgaggaatagaaaggaatctgcagcagagacccagaacctggggttgagatgagggcaaggctcaggccagagaattcggagatctcagacacccttcccctttttccatctgngtgcaagaagctggccattttaaagaaattgtaataaaatacacctaacaaagctaggcctttgattaaaccttttttccctggctgagatgaagaacatttctttttttttttttttt

SEQ ID NO: 981 - DNA, 641 bp, Homo sapiens
  misc_feature (1)...(641): n = A,T,C or G
gtaaggaatcctggatggcttctctggcgctcccagccaccagctcccgttcatctttggtgttctcattgttgttcaggagagaacatcaagtcactcaaagttccacggtgaacaatgattgagttaaccgcatccagggtttctcaaattttgtctttccttcaggaacttcttgcaatgctgaatgaaagacaccatccaaagagagacagagaaagaaatgtttgctgagtcatcaaatatggtggtgattcttgtttttatgtatagaatttttttttaagttcttacatttgcaggggaagccccttttgaagaaacactggtggccactgtagtttcattcattgctctgtggatggggagtgcattgakgaaggggggatggcctctgtcatcctcaaatgaggaatagaaaggaatctgcagcagagacccagaacctggggttgagatgagggcaaggctcaggccagagaattcggagatctcagacacccttcccctttttccatctgngtgcaagaagctggccattttaaagaaattgtaataaaatacacctaacaaagctaggcctttgattaaaccttttttccctggctgagatgaagaacatttctttttttttttttttt

SEQ ID NO: 982 - DNA, 612 bp, Homo sapiens
agctaatacaatttccttcacagactaagaaatgagcaaagtcttagcataattcttgtaatgtctaaacacaaaatagaagttagcaatgattcatattactattattaatgttaaaattagtatgacatgataaaagcaaacattatctcaagataaacctggcattcttatttcaaagacaattttcccatgagacaggtraaaaaacatcttgtcacatacaaataaaagtcaaggtagtggtgtgagactcaggttgcctcctagtgattgccttagttgatgaacctggtttaccgtgctgtgtaccagcagtattctgtacaattatgtgaaaagacccaggatgttgactatgcaaaatcttaactttataatgatgagctatgtttggcagtactttttcaattgtgcaggtacacattctctttacctagaataatgttcatgagccttctctacactcttctgatcttctggggggaatcaactgtttatatcaaggagacatcaaataacagatttcaatttcagaagatgtgtcaaaatggctaagattactttgctcttcagagacttgaaaaataagacctgagagttactttgatg

SEQ ID NO: 983 - DNA, 822 bp, Homo sapiens
ccactctaatgtaggtagaaaaaaaatgcttctggactggatgtgagatgtgaatgaaatctcaaagtcaagatgcttccaaggttgggagccctgaaagaactggtaagttagaggcaggagattgggttttgcacatgttgagtcatcttactcttgcagcaggtggcatggagtggtcactgatgaaggaagtgttraacactgcaggtatcttgtgccaaatctggtgctcatatgatggcttcaactccagcattgagatctgtctagaagagaaggcttaatttatgggcgtggtaaccaacttcaatggattagcatcctttttctatgagacattagcccaatcctaaattaagctttcctaaattaagctttcttgagggttttaggagaaaaatttagtgtgtgagggattttcttgttgcacgtggctaggtgactgacacaaagtcatcaaagtcttgttagcctaccacattactctgtaaataattagtaattggtaaatagtgcatgatacacacattcaaagagcattaagattttgtgaacttctgtagaagaggctgtcctgaagaatggcacgtgtgcaaactagataatggagtaaaacttggaagttgctgctgttgataatgttgatttgaaattccctttagcctgtgccttggtgcatctctgctgtgtaccttatctccatcttccacacaccagggcagcctgcccagtggaacagacagtatcttcttactccctgcttgcagctctttcttcctttcatctatcctatgtcacagtctaactcagtcactcact

SEQ ID NO: 984 - DNA, 822 bp, Homo sapiens
ccactctaatgtaggtagaaaaaaaatgcttctggactggatgtgagatgtgaatgaaatctcaaagtcaagatgcttccaaggttgggagccctgaaagaactggtaagttagaggcaggagattgggttttgcacatgttgagtcatcttactcttgcagcaggtggcatggagtggtcactgatgaaggaagtgttgaacactgcaggtatcttgtgccaaatctggtgctcatatgatggcttcaactccagcattgagmtctgtctagaagagaaggcttaatttatgggcgtggtaaccaacttcaatggattagcatcctttttctatgagacattagcccaatcctaaattaagctttcctaaattaagctttcttgagggttttaggagaaaaatttagtgtgtgagggattttcttgttgcacgtggctaggtgactgacacaaagtcatcaaagtcttgttagcctaccacattactctgtaaataattagtaattggtaaatagtgcatgatacacacattcaaagagcattaagattttgtgaacttctgtagaagaggctgtcctgaagaatggcacgtgtgcaaactagataatggagtaaaacttggaagttgctgctgttgataatgttgatttgaaattccctttagcctgtgccttggtgcatctctgctgtgtaccttatctccatcttccacacaccagggcagcctgcccagtggaacagacagtatcttcttactccctgcttgcagctctttcttcctttcatctatcctatgtcacagtctaactcagtcactcact

SEQ ID NO: 985 - DNA, 822 bp, Homo sapiens
ccactctaatgtaggtagaaaaaaaatgcttctggactggatgtgagatgtgaatgaaatctcaaagtcaagatgcttccaaggttgggagccctgaaagaactggtaagttagaggcaggagattgggttttgcacatgttgagtcatcttactcttgcagcaggtggcatggagtggtcactgatgaaggaagtgttgaacactgcaggtatcttgtgccaaatctggtgctcatatgatggcttcaactccagcattgagatctgtctagaagagaaggcttaatttatgggcgtggtaaccaasttcaatggattagcatcctttttctatgagacattagcccaatcctaaattaagctttcctaaattaagctttcttgagggttttaggagaaaaatttagtgtgtgagggattttcttgttgcacgtggctaggtgactgacacaaagtcatcaaagtcttgttagcctaccacattactctgtaaataattagtaattggtaaatagtgcatgatacacacattcaaagagcattaagattttgtgaacttctgtagaagaggctgtcctgaagaatggcacgtgtgcaaactagataatggagtaaaacttggaagttgctgctgttgataatgttgatttgaaattccctttagcctgtgccttggtgcatctctgctgtgtaccttatctccatcttccacacaccagggcagcctgcccagtggaacagacagtatcttcttactccctgcttgcagctctttcttcctttcatctatcctatgtcacagtctaactcagtcactcact

SEQ ID NO: 986 - DNA, 822 bp, Homo sapiens
ccactctaatgtaggtagaaaaaaaatgcttctggactggatgtgagatgtgaatgaaatctcaaagtcaagatgcttccaaggttgggagccctgaaagaactggtaagttagaggcaggagattgggttttgcacatgttgagtcatcttactcttgcagcaggtggcatggagtggtcactgatgaaggaagtgttgaacactgcaggtatcttgtgccaaatctggtgctcatatgatggcttcaactccagcattgagatctgtctagaagagaaggcttaatttatgggcgtggtaaccaacttcaatggattagcatccttyttctatgagacattagcccaatcctaaattaagctttcctaaattaagctttcttgagggttttaggagaaaaatttagtgtgtgagggattttcttgttgcacgtggctaggtgactgacacaaagtcatcaaagtcttgttagcctaccacattactctgtaaataattagtaattggtaaatagtgcatgatacacacattcaaagagcattaagattttgtgaacttctgtagaagaggctgtcctgaagaatggcacgtgtgcaaactagataatggagtaaaacttggaagttgctgctgttgataatgttgatttgaaattccctttagcctgtgccttggtgcatctctgctgtgtaccttatctccatcttccacacaccagggcagcctgcccagtggaacagacagtatcttcttactccctgcttgcagctctttcttcctttcatctatcctatgtcacagtctaactcagtcactcact

SEQ ID NO: 987 - DNA, 1254 bp, Homo sapiens
cctggcccccatctgtgggtccatccccccatctccacctacccttgcgtgctgctgccatgggcccatctttccccaggcttctgctctggctgtcccatctgccaggaatgccttttctctcccagggctctccacctgcccaaagtctggaacagctagccatgccaccacctcatctttcgggtggaaggaggctttctcctgtggccctcatccattttacctgccctctcccgtggtggccaccagtccctgtgttcttcccacaagcagtttgagctacctgtcctggacckgtgtggctccatgggcccctgttttgtctcctttctttcttctacgagtcagatctctaagggccagtcctccgctgctatagccagcatggggcattgtaaacagtaggcgtgtaatatatgactcttcggcagctgcaccctctccctggggacaggtttcctagtcccagagttagcctggaggtgagctgaggttaaagccaggttccctgactcccacagttcttccccttaaatgtttctagttttaggttcatcctgaactcaccagtccaaccacaaaagttttctgaggagaagcagaatttaagtctctttcaggcccatcatcaaaattcccatatgtccttgacataaggctaaatagtctatggtgtggcttgtgctaggcttttgccatcaggtacctgcagggcacacagccacctgcactcattctgagggtctcctgcagcatatcgcaggttctcagcagtacagaggcgaagtgtcccagcacagtccagcacggagtggggatgggagtctttggtggctttgttttaggatgacatgcacttacctctcctttacttccctcccaggagatggctggccgagctctcaagcagactggcagcaggagcatcgaggccgccctggagtacatcagcaagatgggctacctggacccgaggaatgagcagattgtgcgggtcattaagcagacctccccaggtgagcccaggcctgcagcatagtgggcaaagatggtttgtggcttaaggacaacaaaaccacgtgcagaggggtccaacctggcctggcctggccagagccagtctcctggcacattgcctcattcagttaacaggcaagctgagcctgccctgccctgacagagtcaggccctggcgggagcagccccaagtggtagaccgtgggacacgcctggcgcttgccccatccagcc

SEQ ID NO: 988 - DNA, 1237 bp, Homo sapiens
taccctaaggcccaggaattccattctgaaggatgtaaccaacaggaacaagcacatatgtgtttcaagagacatcgacaagaacataacagcgctattcaccttagccccaaactggacttgactcaacgatctatcaataatagaatgggtaactaaataatgctataatcctacaatgggttactaaatggtgaagaaaatgaacaaattacagtataggtgacaacatgaataaatctcactgattcaatactgtgtaaaaaaaagctcccctccctctgtctctgtacaggggagcctccattttctgccttctcccatccttcttgcctattaaactttccgctccctaaaaccaaaaaaaaaaaaagatacatgcaaaattacatagtttttaaaattccatttataataaaattcaaatgcaagcaatactaacataatattcagggctgcatacttttgtgaaaatccataaggagaataattgaggacaatggttatcttagggagtagtgaggggttatgatgggaaagttgtaggaaaggtctgtgggagctggcgatgctcttcttctggatgcgagtggtgactgtgtgacttttcacttcctcatagttcaagagactatcatttgaggccaggagtggtggctcatgcctgtaatcccaggactttgggaggctgaggtaggtggatcacctgaggacaggagtttgagaccagcctggccaacacggtgaaaccccatctctagtaacaatacaaaaattaaccaggtgtggtggctcacgactgtaatcccagctactccggaggtcgaggcaggagaattgcttgaacccgggaggcagaggttgcagtgagccgagatcacgccactgcactccagcctgggcaacagaatgagactccgtctcttaaacaacaacaacaaaaaaaacactatagtttatattttgtgcatttttatctttgtgtatagtgtttcacacgcacaaaaaacttaaacttataccaggtattaattccttttctgaacagaaaacagatactgtcstagtaaacaaaaactctttaaactaaatgcaaacaactctgaaagcaacagaaagaaaatatttggagaagttttggaggctcatttatgtagggcctttatatgaattaggcaaagcactcttctttgggagtgtaatttagcaaaagctgtctccttgggtggaggcccca

SEQ ID NO: 989 - DNA, 1054 bp, Homo sapiens
cacaggcacacatggaacatgtactggcacaggcctactactgcccagggctggtggaagctggctgacattgtcccttaccatgtaaccttctgtcttcttctggtaccatttcagtacagcattgcacttgaaaccgccatattcccgggccaaggccaccagagggtttcttctttccacactggttagagagaagagcacgttaaggagaagatgctaatgtttagaatcctcaaattcacaagaactaaatacctactttagaaaagcaaatgtctggtttattcagccagaatctgaagaaacaaccacattagttacattaataatgtatttgatgtctcacagtgtgaaataaacatgaaattgtgcctcctgactgtcatgagtctggggagagttttgctacattttgttttaaaatccatctgttgctcatccatctagtcttttatttgtgtaaatataattcaggctagaactttaattcaaactcatttgaattaaggrtatctatacaaaagcattctacaggtttcaagactacatcagtatctaaataacatttaaaaggtagagacgggcacagcacagtggctcacgcctgtaatcccagcactttggaaagctgaggcaggaggattacctgagcccaggagcttgaaaccagcctgagaaacatagtgagacctcaactctgaaataaataaataaataaataaataagctgggcatggtagcgcacacctgtagtcccagctattcaggaggctgaggtgggaggactgcttgaggccaggagttcaaggatgtagtgaattatgattataccactgcactccatcctgggcaacagagcgagacccccatctctaaaaaataaaaaaaaatttttcaaggtatattggaagggcatattaaaaataccagatatcctgccattgctttatctcaatgagataaatgtaaaattgaaataaattgattttactaatttaacttttcactatgaaagataaaatatcagaagcatattaatatacccatagcc

SEQ ID NO: 990 - DNA, 1054 bp, Homo sapiens
cacaggcacacatggaacatgtactggcacaggcctactactgcccagggctggtggaagctggctgacattgtcccttaccatgtaaccttctgtcttcttctggtaccatttcagtacagcattgcacttgaaaccgccatattcccgggccaaggccaccagagggtttcttctttccacactggttagagagaagagcacgttaaggagaagatgctaatgtttagaatcctcaaattcacaagaactaaatacctactttagaaaagcaaatgtctggtttattcagccagaatctgaagaaacaaccacattagttacattaataatgtatttgatgtctcacagtgtgaaataaacatgaaattgtgcctcctgactgtcatgagtctggggagagttttgctacattttgttttaaaatccatctgttgctcatccatctagtcttttatttgtgtaaatataattcaggctagaactttaattcaaactcatttgaattaagggtatctatacaaaagcattctacaggtttcaagactacatcagtatctaaataacatttaaaaggtagagacgggcacagcacagtggctcacgcctgtaatcccagcactttggaaagctgaggcaggaggattacctgagcccaggagcttgaaaccagcctgagaaacatagtgagacctcaactctgaaataaataaataaataaataaataagctgggcatggtagcgcacacctgtagtcccagctattcaggaggctgaggtgggaggactgcttgaggccaggagttcaaggatgtagtgaattatgattataccactgcactccatcctgggcaacagagcgagacccccatctctaaaaaataaaaaaaaawttttcaaggtatattggaagggcatattaaaaataccagatatcctgccattgctttatctcaatgagataaatgtaaaattgaaataaattgattttactaatttaacttttcactatgaaagataaaatatcagaagcatattaatatacccatagcc

SEQ ID NO: 991 - DNA, 405 bp, Homo sapiens
ataacaaaaaatgcttctgtgcttccaagatgttatgcctaatgcattggacaatctgaactgtaagaggacacctttaatttagtacatattaatcaaagaacttctctaagttaggttttgcacgttatgggagacaaacatgaaatagacatagttttggtctttgaggtgctcataatagaatagagctttctctatttaatttctgtgttttttycaacagaattttcaaggaaatcatttattcatttgtccacttcacaaataattatcaaatgtcttttagtactaagcattttttttctaatgttacagaatacagacatttaaaaatactgttggggcctgtttcagtggtgcatgcctgtaatctcaccactttgggaggctgagatgggagga

SEQ ID NO: 992 - DNA, 405 bp, Homo sapiens
ataacaaaaaatgcttctgtgcttccaagatgttatgcctaatgcattggacaatctgaactgtaagaggacacctttaatttagtacatattaatcaaagaacttctctaagttaggttttgcacgttatgggagacaaacatgaaatagacatagttttggtctttgaggtgctcataatagaatagagctttctctatttaatttctgtgtttttttcaacagaattttcaaggaaatcatttattcatttgtccacttmacaaataattatcaaatgtcttttagtactaagcattttttttctaatgttacagaatacagacatttaaaaatactgttggggcctgtttcagtggtgcatgcctgtaatctcaccactttgggaggctgagatgggagga

SEQ ID NO: 993 - DNA, 405 bp, Homo sapiens
ataacaaaaaatgcttctgtgcttccaagatgttatgcctaatgcattggacaatctgaactgtaagaggacacctttaatttagtacatattaatcaaagaacttctctaagttaggttttgcacgttatgggagacaaacatgaaatagacatagttttggtctttgaggtgctcataatagaatagagctttctctatttaatttctgtgtttttttcaacagaattttcaaggaaatcatttattcatttgtccacttcacaaataattatcaaatgtcttttagtactaagcwttttttttctaatgttacagaatacagacatttaaaaatactgttggggcctgtttcagtggtgcatgcctgtaatctcaccactttgggaggctgagatgggagga

SEQ ID NO: 994 - DNA, 1616 bp, Homo sapiens
ctatcagggaactctatttcactattcccttgaaaccggtttgaagaggaaggcatgaacatcttgaataatttcctgccagctatatgctattttcttactgttgcttttcaggttattccataaagtagacttggccttacctaaaacttaaagcgcagatattatgtctgtgaattaaatcacaatcagcagtgaacaagctttaagagaaccatattaaattttcttgtatgagaaagaatttttcgtaatgcaaaaaaggagcacttgatttatttactttggacttggggaaaggcagagaaacagaagcattagggagaaggaactgatgaaggactgctgtgaagaaacggaatgagaagggaaaaggggatgagggtggccagaggagttacaagagtggggaattaggacactaacaatgcttaaagaacatcccattctagctcttattaaaccctgtgaagctgtatctttgctctaacagggctgcaggtaaaacccaaatgagttattttcattcagtgattcacagacaccatctcttcagtgtccaggttcaaacttttctcctagttccaatggaaagaagataaacaaatgatagaaagaagttcaaagggaaagaaggcaaaaaaaaaaaaatggcatggactacgcaatggtttgaatgtttgtccccctgaaaactcacgttgaggcagggcgtggtggcccatgcctgtaatcctagcactttgggaggccaaggcaggcagaatatttgaggtccggagttcaagattagcctggccaacatggtgaaaccccatctctacaaaaaatacaaaaattagacacagtggcgcacacctgtaatctcagctactggggaggctgaggctggagaattgttttaacctgggaggcggaggttgcagtcagccgagatcatgccactgcactccagcctgagtgacagagagagactcctcaaaaaaaaaaagaaagaaagaaaaaagaagttgaaatttaattgccaaaataatggtattgggaggtggggcctttaagaggtgattagacttttcaggctccaccctcatggatgggtttaatgacttaatgaaagggctttcaagaatgagttttctctcttggctcttcttctcttctgccgtaygaggaatagcacttctcccctgcagaggatccagcattcaggccaccatcttggaagaggacaccaggccctcaccagacaccaaaactgccagccttgatcttggaccaacagtccaatcttgctcttgaacttcctagcctccagaactgtgagaaataaatttctattttttataaactactcaggctgtggtgttctgtgatagcagtacaaaacagactaacactgactgtttcataattttggcttaatgaagtcattgtataatgaagtgcactctggctctcaaaggccttggcattcattagcaccacagacaactgtgaggcattcccagaagaatgcagcattgctccagatggcagtgtaaggttgaacaccagaggcaatcacaggaagtgcctttgcccatcctccatgtagctaatgggagaggaagaaaatg

SEQ ID NO: 995 - DNA, 1616 bp, Homo sapiens
ctatcagggaactctatttcactattcccttgaaaccggtttgaagaggaaggcatgaacatcttgaataatttcctgccagctatatgctattttcttactgttgcttttcaggttattccataaagtagacttggccttacctaaaacttaaagcgcagatattatgtctgtgaattaaatcacaatcagcagtgaacaagctttaagagaaccatattaaattttcttgtatgagaaagaatttttcgtaatgcaaaaaaggagcacttgatttatttactttggacttggggaaaggcagagaaacagaagcattagggagaaggaactgatgaaggactgctgtgaagaaacggaatgagaagggaaaaggggatgagggtggccagaggagttacaagagtggggaattaggacactaacaatgcttaaagaacatcccattctagctcttattaaaccctgtgaagctgtatctttgctctaacagggctgcaggtaaaacccaaatgagttattttcattcagtgattcacagacaccatctcttcagtgtccaggttcaaacttttctcctagttccaatggaaagaagataaacaaatgatagaaagaagttcaaagggaaagaaggcaaaaaaaaaaaaatggcatggactacgcaatggtttgaatgtttgtccccctgaaaactcacgttgaggcagggcgtggtggcccatgcctgtaatcctagcactttgggaggccaaggcaggcagaatatttgaggtccggagttcaagattagcctggccaacatggtgaaaccccatctctacaaaaaatacaaaaattagacacagtggcgcacacctgtaatctcagctactggggaggctgaggctggagaattgttttaacctgggaggcggaggttgcagtcagccgagatcatgccactgcactccagcctgagtgacagagagagactcctcaaaaaaaaaaagaaagaaagaaaaaagaagttgaaatttaattgccaaaataatggtattgggaggtggggcctttaagaggtgattagacttttcaggctccaccctcatggatgggtttaatgacttaatgaaagggctttcaagaatgagttttctctcttggctcttcttctcttctgccgtatgaggaatagcacttctcccctgcagaggatccagcattcaggccaccatcttggaagaggacaccaggccctcaccagacaccaaaactgccagccttgatcttggaccaacagtccaatcttgctcttgaacttcctagcctccagaactgtgagaaataaatttctattttttataaactactyaggctgtggtgttctgtgatagcagtacaaaacagactaacactgactgtttcataattttggcttaatgaagtcattgtataatgaagtgcactctggctctcaaaggccttggcattcattagcaccacagacaactgtgaggcattcccagaagaatgcagcattgctccagatggcagtgtaaggttgaacaccagaggcaatcacaggaagtgcctttgcccatcctccatgtagctaatgggagaggaagaaaatg

SEQ ID NO: 996 - DNA, 577 bp, Homo sapiens
acataagttcctggctcctgcttttatatttgactaggccctgcagcaactctttcaggaaatagcccttctcctcctttagcaaaatacactagagtatactggccaggttatcttgtgacaacaacagtgattagtctggcatccagaaggagaggtggagacagatcctgacttkcaaggcagcatcctctatatcttcaagcaggtcccagggagtttaattgacagcaatcagccatttctgcagacccagtggatatagggctatcttaaggtttcaaggttctggtatcattaattcacatgtccccattccaattctcaggttccagaccttgccaaccatgaccctgaccttggtaattgcacatttgctatgaatgagaattcaacctcctctggagctctgctacacttataattatatcctggcctgatcctcagctttttctgccctccagctgcaaagcctgggactctttttatatgctgccaaataggccttctgattttcacattttaccttaaattgttgattaatcaccatcagctttttatggtctttgtctaatgc

SEQ ID NO: 997 - DNA, 712 bp, Homo sapiens
agggacatcaagcaaatagtgtgatgcctgtgggtgcaatgttactccttcccttaggttgccaaaaaaatcaatacttcatagcattcctgaaacgaaaaagcttatgaaccattgtgtttagggcgtaagctatctattttgggctacccatcacagcttctctcctttggtagaataaagtgaactgaaccaccaygcctaaggtatttgccttatttcttcctcagctggttcatggttacattgtcaaagctggcaaagcattcaagacctgatttctcagaccgagtgtatgtgtgaatataatatactcatttgcacaaatataaaccctctgtcttaactgtgttctgcaaaaggcgtgataaatactttcaagttatatgtccttatcagtagaactaatggaatacacacagtatattatatggggaatttcagagaaggaaggaaaagtcaaccttttatttggcatcaggatagtagtaaaacattctacttgtgcatcagatagatttttatgacctaacctggacaagtaacttaactcttggtgcctcatgtttgaaagagggataacactctacagggtcattctaagaattaaatattgccaaaacacatgaaaagattctcaaccttgttagtaatcaaggaaatgcaaatgaagatcacaatgaagtcttcttttgtactcaattgattggtg

SEQ ID NO: 998 - DNA, 712 bp, Homo sapiens
agggacatcaagcaaatagtgtgatgcctgtgggtgcaatgttactccttcccttaggttgccaaaaaaatcaatacttcatagcattcctgaaacgaaaaagcttatgaaccattgtgtttagggcgtaagctatctattttgggctacccatcacagcttctctcctttggtagaataaagtgaactgaaccaccatgcctaaggtatttgccttatttcttcctcagctggttcatggttacattgtcaaagctggcaaagcattcaagacctgatttctcagaccgagtgtatgtgtgaatataatatactcatttgcacaaatataaaccctctgtcttaactgtgttctgcaaaaggcgtgataaatactttcaagttatatgtccttatcagtagaactaatggaatacacacagtatattwtatggggaatttcagagaaggaaggaaaagtcaaccttttatttggcatcaggatagtagtaaaacattctacttgtgcatcagatagatttttatgacctaacctggacaagtaacttaactcttggtgcctcatgtttgaaagagggataacactctacagggtcattctaagaattaaatattgccaaaacacatgaaaagattctcaaccttgttagtaatcaaggaaatgcaaatgaagatcacaatgaagtcttcttttgtactcaattgattggtg

SEQ ID NO: 999 - DNA, 951 bp, Homo sapiens
cccagctactcggaaagctgatgcaagaggatcacttgagcccaagagttggaggctgcagcgaaccaagattacatcactgcacttcatcctgggcgacaaaggaagaccctgcctcaaaaaagaaaagaagaaagaggaagaaaaagaagaaaggggaagggaaagggaaaggggaagagaagaggcctcctgattccctatgatgagtgatgaatgctgctccgtagaaagattttggcaatcttgaattccttcatctatatatagtcattcctcgaggactcattgtgaaaatgaatctagatgtagtgtacaaagcaaacgcaataaaccaaggccaaaatagccataaaatcaaaaagagaacatggcccccacagcaggcctcacttctgttgtcagtgacaacatcacagccaggctggtggttccactgttgggagcagtgatgtttaactctgaatagaaccaggctgccccagaagcatccatgcccatttcagatagtgaytgtgccctaggctttcccagtgcacagtgtggactaaatataccaaagcgtttgttgaagggaacagtaaaggaagccagctccaagaccacacacagatcacacttggtgtgaagacagcaatggacctcgtgagggggtcgatcaatatccatgctgcaacagcagcattctcaacagtgtgtgctcggaaggggtgaccagtgttccttaatggcacccagcatcgggaatgtagaacctctaccagcacatacaggcagaaagcaaattataacaaccaggacacagtgagtttcactaatagaattagacctacaatttggtctcaaccagatacaaactgtctgcttaggtctggtgtaatttacaacagcctcaaacatgtttctcatctcttcgtatgacaggcaggttaaactttctcagtgtcgcca

SEQ ID NO: 1000 - DNA, 951 bp, Homo sapiens
cccagctactcggaaagctgatgcaagaggatcacttgagcccaagagttggaggctgcagcgaaccaagattacatcactgcacttcatcctgggcgacaaaggaagaccctgcctcaaaaaagaaaagaagaaagaggaagaaaaagaagaaaggggaagggaaagggaaaggggaagagaagaggcctcctgattccctatgatgagtgatgaatgctgctccgtagaaagattttggcaatcttgaattccttcatctatatatagtcattcctcgaggactcattgtgaaaatgaatctagatgtagtgtacaaagcaaacgcaataaaccaaggccaaaatagccataaaatcaaaaagagaacatggcccccacagcaggcctcacttctgttgtcagtgacaacatcacagccaggctggtggttccactgttgggagcagtgatgtttaactctgaatagaaccaggctgccccagaagcatccatgcccatttcagatagtgattgtgccctaggctttcccagtgcacagtgtggactaaatataccaaagcgtttgttgaagggaacagtaaaggaagccagctccaagaccacacacagatcacacttggtgtgaagacagcaatggacctcgtgagggggtcgatcaatatccatgctgcaacagcagcattctcaacagtgtgtgctcggaaggggtgaccagtgttccttaatggcacccagcatcgggaatgtagaacctctaccagcacatacaggcagaaagcaaattrtaacaaccaggacacagtgagtttcactaatagaattagacctacaatttggtctcaaccagatacaaactgtctgcttaggtctggtgtaatttacaacagcctcaaacatgtttctcatctcttcgtatgacaggcaggttaaactttctcagtgtcgcca

SEQ ID NO: 1001 - DNA, 951 bp, Homo sapiens
cccagctactcggaaagctgatgcaagaggatcacttgagcccaagagttggaggctgcagcgaaccaagattacatcactgcacttcatcctgggcgacaaaggaagaccctgcctcaaaaaagaaaagaagaaagaggaagaaaaagaagaaaggggaagggaaagggaaaggggaagagaagaggcctcctgattccctatgatgagtgatgaatgctgctccgtagaaagattttggcaatcttgaattccttcatctatatatagtcattcctcgaggactcattgtgaaaatgaatctagatgtagtgtacaaagcaaacgcaataaaccaaggccaaaatagccataaaatcaaaaagagaacatggcccccacagcaggcctcacttctgttgtcagtgacaacatcacagccaggctggtggttccactgttgggagcagtgatgtttaactctgaatagaaccaggctgccccagaagcatccatgcccatttcagatagtgattgtgccctaggctttcccagtgcacagtgtggactaaatataccaaagcgtttgttgaagggaacagtaaaggaagccagctccaagaccacacacagatcacacttggtgtgaagacagcaatggacctcgtgagggggtcgatcaatatccatgctgcaacagcagcattctcaacagtgtgtgctcggaaggggtgaccagtgttccttaatggcacccagcatcgggaatgtagaacctctaccagcacatacaggcagaaagcaaattataacaaccaggacacagtgagtttcactaatagaattagacctacaatytggtctcaaccagatacaaactgtctgcttaggtctggtgtaatttacaacagcctcaaacatgtttctcatctcttcgtatgacaggcaggttaaactttctcagtgtcgcca

SEQ ID NO: 1002 - DNA, 1138 bp, Homo sapiens
ccgggaggcagaggctgcagtgagccgaggttgtgccactgcactctaacctgggagagagagtgagactccatctcaaaaaaaaaaaaaaaaaaaagagggcctgaatgtatcaaagcaaatagcacaatcgattacgatatttcccctagtcttgtaacagtaaaagagatcaaaaactttgaacaaaaataaacttaaaacaaatctgccactccgctgaacaaggactctgtatatctctagttcctaaaacgctgtgtatttagtttgatctccccctgggagtagcagtatgtcttaaaattttcgaagagagtgtggggaatcctctcactattgctcccttggggcaaatgctctcctgatgtagtttcctccacatgtttcagaatactacttccgactccacctactagtctggaagaaaatcactatgccatatagttgacagaaaaaaacggactttttaatatttttaaatataggtaaaagtagagaaaggggtaaaatgaaatccttaaagttaagctataatcctggtttaactgaaatccttaaaacttttctcactaataaaaagttttcrgccgggcgcagtggctcacgcctgtaatcccagcactttgggaggctgaggtgggtggatcacgaggtcaggagttcgagaccagcctggccaacatggtgaaaccccgtctctactgaaaatacaaaaattagccgggcgtgatggcgagcgcctgtaatcccagctactcaggaggctgaggcagaagaatcgcttgaacccggcaggcagttgcactccagcctgggcgacagggcgagactctgtctcaaaacaaaataaaacaaaaaaaagttttggctgggtgcagtcgtcacgcctgtaatcccagcactctgagaggccaaggtgggcagatcacgaggtcaggagttcgagaccagcctggccaacatggcgaaatcccgcctctactaaaaatacaaaaattagctgggactaattactggtggtgggtgcctgtaatcccagctactcaggaggctgaggcaggagaattgctttagaacccgggaggcggaggttgcagtgagctgagatggagcccctgcactccagcctgggcga

SEQ ID NO: 1003 - DNA, 1138 bp, Homo sapiens
ccgggaggcagaggctgcagtgagccgaggttgtgccactgcactctaacctgggagagagagtgagactccatctcaaaaaaaaaaaaaaaaaaaagagggcctgaatgtatcaaagcaaatagcacaatcgattacgatatttcccctagtcttgtaacagtaaaagagatcaaaaactttgaacaaaaataaacttaaaacaaatctgccactccgctgaacaaggactctgtatatctctagttcctaaaacgctgtgtatttagtttgatctccccctgggagtagcagtatgtcttaaaattttcgaagagagtgtggggaatcctctcactattgctcccttggggcaaatgctctcctgatgtagtttcctccacatgtttcagaatactacttccgactccacctactagtctggaagaaaatcactatgccatatagttgacagaaaaaaacggactttttaatatttttaaatataggtaaaagtagagaaaggggtaaaatgaaatccttaaagttaagctataatcctggtttaactgaaatccttaaaacttttctcactaataaaaagttttcggccgggcgcagtggctcacgcctgtaatcccagcactttgggaggctgaggtgggtggatcacgaggtcaggagttcgagaccagcctggccaacatggtgaaaccccgtctctactgaaaatacaaaaattagccgggcgtgatggcgagcgcctgtaatcccagctactcaggaggctgaggcagaagaatcgcttgaacccggcaggcagttgcactccagcctgggcgacagggcgagactctgtctcaaaacaaaataaaacaaaaaaaagttttggctgggtgcagtcgtcacgcctgtaatcccagcactctgagaggccaaggtgggcagatcacgaggtcaggagttcgagaccagcctggccaacatggcgaaatcccgcctctactaaaaatayaaaaattagctgggactaattactggtggtgggtgcctgtaatcccagctactcaggaggctgaggcaggagaattgctttagaacccgggaggcggaggttgcagtgagctgagatggagcccctgcactccagcctgggcga

SEQ ID NO: 1004 - DNA, 635 bp, Homo sapiens
tttctttatcgcctgggacagactttacaaacagacctgggagaagtcccctaaggggctgcatttatccccatctccctaggggtgatcagcattgtgacagctgggcagagcagtggtgaactgcacccatgtccctgctcacatctcctaagatctcagaattgcctgaggttctagcgtgggctccttctctccagatgatgccatccccacccccctcatttccacacagcatctgaggcatcctgcactaaaagatatatgtacagcaaaacaaaaatagaaaaccagcacagcagagtggaggtggggtataaatatacccagatccccgctgatttggttactcggggtgagcatcagatggaaatagaagtttccgggggccaagagagaaagagggatgtaacgacaattcttttcaaaacgtgtcccatggtatgcctcgtggaaaaaatggttcrttggtcaaatgaatttgggaaaatgctgtcaatatcaccgactcatggagcttcgcaaggcatcttagcttaataaaggttatgaaaagtcttgcagcaaagatgctgtttacccctgcttaatccagcactgcccaaactcattccaaataccagagcctctgtttg

SEQ ID NO: 1005 - DNA, 593 bp, Homo sapiens
tctccttttgcccgctccagagaatgcctgtcatctcttccgtgagaaattgcacttagactatgcagacagatacgttgctttcctgttctgagggccccttactgtcctttagtgctagtattgtgcagattgttgctcacacgtgcacaaaagtaaggattcatttgtctaaaactttgctactgcaggaagctctaaggtggaacttcggtaaccaaagcatttgttgctttttcttccatactctattaacttatttttatgtctttattttttttttaattgagagaacaaactcaccataactgagaatttccctctttttacgtgcctatgtttgtatgttcaaatgtcctcttactccctgtcctttgcatcccagagtaaacttgcaaactgctgccccctgtcccctgtaatgaaaatacctcggcagctcctcttggcatcttatggtcttgctctwtagttctaggaataaggcagtaaagtgtcctctttttcctgcttaaagaaaattcacacctgtaactgtagttagaactgaacacaggagccatattcttgcttgtcatcattcagttggccca

SEQ ID NO: 1006 - DNA, 648 bp, Homo sapiens
tgggaaaacatgtagcagcagtgagcactgagaagttgaagcacagaaatggtgtgtaatggtatgacttgagcagattataacagaaagcagttagaatagctgaatgaattgctttttggtaatggctctaggatacgggttctcgtgtcggttagaatcacagtcccggtcaatggaaactactggtgtacaattcatttggcaaactgagaagccactagtcaggccttgtgctagctggataggaaggtgtagtggaaggggctatcaaggagaagaagataaaagctctgccttcaagaacataagaccaaaagctaatgaaatggaaaaataagtagaatacacatytctgttttaatcacaagacattttgggtattaataaatgacaaagcatccagaaaggggtcgccaggatggcaaggagatgagaaactgcatcatagaaagaatgaacaatcaaaagaataggggtttgtattcctgaaaatcagaatactaccaaggactcagggtttgtgtgtgcatggcaataggtatatgtggggaaaggcaatattattgctattctggaatatttgaaaacacgtatggaaaaggcttactctgtgttctcggggccaacaagacagcaaatggcagg

SEQ ID NO: 1007 - DNA, 1454 bp, Homo sapiens
caggtatatctgacatccatctgatcatatcaattcatcaaatggtttcacactgctcttagggtaaggaataaaatttctcaaaatcttattaaaataattcgactctaaacataatwtttttttctaagactacccttttccactttctttgacacaactgaactagatctcatctgagagctttattctgtttcacatgtatggaagatttacattaacagccccactcttccccattccttacatccatacactttgccatgtaacatttcaatgctctcccactgttggtaacatgtaattccctgacgctgagttcaactgagtgacttgctttggtcaataaaattagaccagattcagagcccaggctccaagaggccttgcatgtttctacttgtcctcttgaacctctcccttcactgtataaagaatctgcttaattgatcccatggacccatgggagccctttgatcccatgagcaggataaggaacatttggagtggaactgctcagctaaacccagcctagaccaagtcacccccagggaacacagagatttataagaaacaataactgtctgttactttaagtggttttttatctagcaacagctagctgatacacagacataacaatttgcatttccctatggcttggtaagtatcttctacctttgttggtacaattaggccaacaaggattaaaatcaacaaagaatgtgtacatggatgttatccttactgctatgaatatcaaactattgcttgaggattgaggtccagtaataaaacagcagctatttctccaaaaaaatcctctgtgacttttcaaatgaaatgagggctttcctgccaatcccacaagtcaggaagataaaattgggcatggatctttcccttgctgctgcagaaactcttcatccctgtcagagatggcagatccattgctacaaccagggggccgtgctgaaagttcagagctggttttggaaatgacacagtctacttcattctggataagggcacagtctgtcataacaggttattttaaaggtcaccctagatttaaccaggacatcttgttcctttcttttatcctccaaatttttctttgaaaagctgttgcatatctctggcctttctattttctctaccagacaaaacctattactaagtggatgttaattaagccacagggccaagacattgacaattcaaaatgaaaactatgactgcatatggcattgtatcctgcccccaaatgctgtgctcttaaagggagactcttgaaatgaaaactcgtgcacctataaatgcgaagagtgacttgagtgctataaaacaaagtgcactggttaacacaccgtcagctttgttatgtcaggacagaaataaaaatctaatagtaaatagtcaacagatgtcatagcaccggagaaaataaatgc

SEQ ID NO: 1008 - DNA, 1270 bp, Homo sapiens
ttaaaagcatcaggcagcgaaaacctgtgatactgggagaagagaacgaatttgtggatcagacagacctgggtttgccacttactagttgtgtgtttttccgcacatctctccaggctttgatttcttcctttgtgaaagaaggtgatgctatctacctgtcctggaagggatgttgggcagtgaggccacctgtctggaaggggtccgccgtcctggcagggtccactcatctcttccctgttgacaggcccccttcactctgctgcctctcgctagtgcacctccagggcacgattcctatacggatgtttgctctttctgcagacccaaaatgccatcacagctcctttctgcctgccggtctgtgacatttcttaaaggccctacaggagccgggatgtcagcacttcctgttgcctgcggccttctgtacacagggcctttaatctcaaccatgacctgtcccagagccaagatggacagagaaagagatgctgtctctccaggctgagaaggtggagcagtgcaccctggtggagaaagaagtgactattttccctgcttaaatcctggctcctggcccggcattctgtgaatctctccgtgaaagcaccttgtcagccttcacagtcagccctgattttcaggccagcttcccctccagggagtggctctcaaaggctttcttcgtccgcggccggatgctagcaccgaggcacacagtaggtgtgcagtaaatgttgttggaaggaaggaagtgggtttccgtttgggaaaggaaactgggaggtaaaaagctaggagctgctccctccatctaaatgacttctttttttttcacctcattactaacatttttctccgaagtagaagtctgcccagaagacatgctcagactctaggrcctaactagtctcttctggaaatccaagtccagctcttttcctcattatcccgggaaattctgcagacagagtgtggtcaccagaggcagaggggttccatcagttcttcctcttcaggctcctttctgctccacttgtctctaccagcaatgctgcttgggcaaggcttcatagcagggggtgaattctgtgtgcatgagtgcgggagatggaaactctacagagatagtgacagggctgagggagacagacttcaaaagaaagagacaagactgaggtagagagacaaagagaatgaaaaagaaacagagacactcagagactggaagtggctggcatattaacagacacacaggcacaca

SEQ ID NO: 1009 - DNA, 1270 bp, Homo sapiens
ttaaaagcatcaggcagcgaaaacctgtgatactgggagaagagaacgaatttgtggatcagacagacctgggtttgccacttactagttgtgtgtttttccgcacatctctccaggctttgatttcttcctttgtgaaagaaggtgatgctatctacctgtcctggaagggatgttgggcagtgaggccacctgtctggaaggggtccgccgtcctggcagggtccactcatctcttccctgttgacaggcccccttcactctgctgcctctcgctagtgcacctccagggcacgattcctatacggatgtttgctctttctgcagacccaaaatgccatcacagctcctttctgcctgccggtctgtgacatttcttaaaggccctacaggagccgggatgtcagcacttcctgttgcctgcggccttctgtacacagggcctttaatctcaaccatgacctgtcccagagccaagatggacagagaaagagatgctgtctctccaggctgagaaggtggagcagtgcaccctggtggagaaagaagtgactattttccctgcttaaatcctggctcctggcccggcattctgtgaatctctccgtgaaagcaccttgtcagccttcacagtcagccctgattttcaggccagcttcccctccagggagtggctctcaaaggctttcttcgtccgcggccggatgctagcaccgaggcacacagtaggtgtgcagtaaatgttgttggaaggaaggaagtgggtttccgtttgggaaaggaaactgggaggtaaaaagctaggagctgctccctccatctaaatgacttctttttttttcacctcattactaacatttttctccgaagtagaagtctgcccagaagacatgctcagactctaggacctaactagtctcttctggaaatccaagtccagctcttttcctcattatcccgggaaattctgcagacagagtgtggtcaccagaggcagaggggttccatcagttcttcctcttcaggctyctttctgctccacttgtctctaccagcaatgctgcttgggcaaggcttcatagcagggggtgaattctgtgtgcatgagtgcgggagatggaaactctacagagatagtgacagggctgagggagacagacttcaaaagaaagagacaagactgaggtagagagacaaagagaatgaaaaagaaacagagacactcagagactggaagtggctggcatattaacagacacacaggcacaca

SEQ ID NO: 1010 - DNA, 2436 bp, Homo sapiens
acataaactgttccctttgtgtctattgtgaagcctggagtcaccatcggtcaaccaggcaggctgttggggaggaaggatggatgtagttgggaccaagtacaaactggaacctgtgtcaccaatcccaccttgaagccatgggaataatgggctgtgggaaaaacacacagcagcacccatatgtgccctgtacttggacaggctagaggtggctttgatggcaactgcaggtccatcaactcgcagatgagcaacagtgcacaccagctgcctcgttctgatgtcctgcactgccctttggaacctaagacatgtgatgccatttcacttctgctctccaaatctcagcaaatgtctcatgatcaatgctaaccttgaaccagccagggaaggaaatcctgggcaggtagttctagcttagctacgggaacacagtccagaaccaccacacttaccttgtgtatacctctcactgaagattagaaataccagaggtttgcttccccaattcaccttgcaacttgaacatacgccctaggataagccaatcagaggctgggatttcaatctggagccacaaggcagcaaagagtgtgaattctaactaactgttccttcagtctagttcccacagacagcagagcatggtgtacacagcatgaatcagaaccatgtagctggttttgaatcctggctgtaattattccctgggcctctgtgaccttgcacaagtctcctaagctctctgggctcgtctctccatctttcaaatgggcataaaatgtctaacatatcattatgtagaatgtgaattgcataaactgtagcaggttccaaacctcattgggttgttgcaaagtattttttccttgagtctgtaggattcctagtgattccttgggccactccgtagccttttctcaatgtattcaattttcagtcatcactcagtttgattctgttacctaatgaaggtataaaggtttcccactggaggtataggaagcattttgtggggtggggtcaggttgtgggttctgtgtactgtgtgactgtgttacgagcatgacttttgtccttaggctggctagctcctttctggtgtcactgctgtgttaacagtcgaggatctgcctataatccaagcactttaggaggccsaggcggaaggatcccttgagctcgagaccaggctgggcaacatagtgagacctcatcaatactaaaattcaaaaaaattagccatgcatggtggtgcacacctgtagtcccacctacttgagaggctaaggtgggaggatcacttgagcccaagaagtcgaggctgcaggggcactgatgctgccactgcactccggcctgggtaacagagatcctatctcaagaacaaatgaacaaacaaaactgttgatcttgccccgcctcaccaaaaggcaaaacagtaatgcttttttttgagatggagtcttgctctgtcgcccaggctggagtgcagtggtgtgatcttggctcactgcaagctccgcctcctgggttcacaccattctcctgcctcagcctcccgagtagctgggactacaggtgcctgccaccacgcccagctaatttttttgtaattaattttagtagagatggggtttcaccatgttagccaggatggtctcaatctcctgacctcgtgatccacctgcctcggccttccaaagtgctgggattacaggcgtgagccaccgcgccagctacagtaatgctttctgaggtaccacctcttaagaggtttgctgtcagcctctctctctcttcctgtgatcataaaggctcatttgctagagacttgagcatcgatcatcgttccagatggcccactggttgcagatgcaggttcacttggtaatgggtaccaaaatcttgtttataggccgcgtctttgggcttcacagtgagtgaatgtctagtccatggcaatcccagggtgagttcctggctctgagtaggaaatggaactcactgggcagttcctctcatgaatcagtaattttcttaaaaataaagacatagaacactgcagaaaataacagctttattgctacagatgtgagagcatttacaaaatgccaaggaaaaccattccgttttgagtctctggagcctgaactctcaccatgtaccagaaaagaatgcccctctttcgaactttcaaacagttgggattatttttgtttcttatcatcccaattatttgctcaagtttgcctccattgggccccgttcagagtttcttgggctgcttgtactagtcacagctccacttccatctcttctcaggaagaggtgggcacaagacacatctgagccccttagtattgtgatggtggccaggaaatgatcaaagggtagcatttaggaaatcagcaaactaaagcctcaaatcaa

SEQ ID NO: 1011 - DNA, 2436 bp, Homo sapiens
acataaactgttccctttgtgtctattgtgaagcctggagtcaccatcggtcaaccaggcaggctgttggggaggaaggatggatgtagttgggaccaagtacaaactggaacctgtgtcaccaatcccaccttgaagccatgggaataatgggctgtgggaaaaacacacagcagcacccatatgtgccctgtacttggacaggctagaggtggctttgatggcaactgcaggtccatcaactcgcagatgagcaacagtgcacaccagctgcctcgttctgatgtcctgcactgccctttggaacctaagacatgtgatgccatttcacttctgctctccaaatctcagcaaatgtctcatgatcaatgctaaccttgaaccagccagggaaggaaatcctgggcaggtagttctagcttagctacgggaacacagtccagaaccaccacacttaccttgtgtatacctctcactgaagattagaaataccagaggtttgcttccccaattcaccttgcaacttgaacatacgccctaggataagccaatcagaggctgggatttcaatctggagccacaaggcagcaaagagtgtgaattctaactaactgttccttcagtctagttcccacagacagcagagcatggtgtacacagcatgaatcagaaccatgtagctggttttgaatcctggctgtaattattccctgggcctctgtgaccttgcacaagtctcctaagctctctgggctcgtctctccatctttcaaatgggcataaaatgtctaacatatcattatgtagaatgtgaattgcataaactgtagcaggttccaaacctcattgggttgttgcaaagtattttttccttgagtctgtaggattcctagtgattccttgggccactccgtagccttttctcaatgtattcaattttcagtcatcactcagtttgattctgttacctaatgaaggtataaaggtttcccactggaggtataggaagcattttgtggggtggggtcaggttgtgggttctgtgtactgtgtgactgtgttacgagcatgacttttgtccttaggctggctagctcctttctggtgtcactgctgtgttaacagtcgaggatctgcctataatccaagcactttaggaggcccaggcggaaggatcccttgagctcgagaccaggctgggcaacatagtgagacctcatcaatactaaaattcaaaaaaattagccatgcatggtggtgcacacctgtagtcccacctacttgagaggctaaggtgggaggatcacttgagcccaagaagtcgaggctgcaggggcactgatgctgccactgcactccggcctgggtaacagagatcctatctcaagaacaaatgaacaaacaaaactgttgatcttgccccgcctcaccaaaaggcaaaacagtaatgcttttttttgagatggagtcttgctctgtcgcccaggctggagtgcagtggtgygatcttggctcactgcaagctccgcctcctgggttcacaccattctcctgcctcagcctcccgagtagctgggactacaggtgcctgccaccacgcccagctaatttttttgtaattaattttagtagagatggggtttcaccatgttagccaggatggtctcaatctcctgacctcgtgatccacctgcctcggccttccaaagtgctgggattacaggcgtgagccaccgcgccagctacagtaatgctttctgaggtaccacctcttaagaggtttgctgtcagcctctctctctcttcctgtgatcataaaggctcatttgctagagacttgagcatcgatcatcgttccagatggcccactggttgcagatgcaggttcacttggtaatgggtaccaaaatcttgtttataggccgcgtctttgggcttcacagtgagtgaatgtctagtccatggcaatcccagggtgagttcctggctctgagtaggaaatggaactcactgggcagttcctctcatgaatcagtaattttcttaaaaataaagacatagaacactgcagaaaataacagctttattgctacagatgtgagagcatttacaaaatgccaaggaaaaccattccgttttgagtctctggagcctgaactctcaccatgtaccagaaaagaatgcccctctttcgaactttcaaacagttgggattatttttgtttcttatcatcccaattatttgctcaagtttgcctccattgggccccgttcagagtttcttgggctgcttgtactagtcacagctccacttccatctcttctcaggaagaggtgggcacaagacacatctgagccccttagtattgtgatggtggccaggaaatgatcaaagggtagcatttaggaaatcagcaaactaaagcctcaaatcaa

SEQ ID NO: 1012 - DNA, 2436 bp, Homo sapiens
acataaactgttccctttgtgtctattgtgaagcctggagtcaccatcggtcaaccaggcaggctgttggggaggaaggatggatgtagttgggaccaagtacaaactggaacctgtgtcaccaatcccaccttgaagccatgggaataatgggctgtgggaaaaacacacagcagcacccatatgtgccctgtacttggacaggctagaggtggctttgatggcaactgcaggtccatcaactcgcagatgagcaacagtgcacaccagctgcctcgttctgatgtcctgcactgccctttggaacctaagacatgtgatgccatttcacttctgctctccaaatctcagcaaatgtctcatgatcaatgctaaccttgaaccagccagggaaggaaatcctgggcaggtagttctagcttagctacgggaacacagtccagaaccaccacacttaccttgtgtatacctctcactgaagattagaaataccagaggtttgcttccccaattcaccttgcaacttgaacatacgccctaggataagccaatcagaggctgggatttcaatctggagccacaaggcagcaaagagtgtgaattctaactaactgttccttcagtctagttcccacagacagcagagcatggtgtacacagcatgaatcagaaccatgtagctggttttgaatcctggctgtaattattccctgggcctctgtgaccttgcacaagtctcctaagctctctgggctcgtctctccatctttcaaatgggcataaaatgtctaacatatcattatgtagaatgtgaattgcataaactgtagcaggttccaaacctcattgggttgttgcaaagtattttttccttgagtctgtaggattcctagtgattccttgggccactccgtagccttttctcaatgtattcaattttcagtcatcactcagtttgattctgttacctaatgaaggtataaaggtttcccactggaggtataggaagcattttgtggggtggggtcaggttgtgggttctgtgtactgtgtgactgtgttacgagcatgacttttgtccttaggctggctagctcctttctggtgtcactgctgtgttaacagtcgaggatctgcctataatccaagcactttaggaggcccaggcggaaggatcccttgagctcgagaccaggctgggcaacatagtgagacctcatcaatactaaaattcaaaaaaattagccatgcatggtggtgcacacctgtagtcccacctacttgagaggctaaggtgggaggatcacttgagcccaagaagtcgaggctgcaggggcactgatgctgccactgcactccggcctgggtaacagagatcctatctcaagaacaaatgaacaaacaaaactgttgatcttgccccgcctcaccaaaaggcaaaacagtaatgcttttttttgagatggagtcttgctctgtcgcccaggctggagtgcagtggtgtgatcttggctcactgcaagctccgcctcctgggttcacaccattctcctgcctcagcctcccgagtagctgggactacaggtgcctgccaccacgcccagctaatttttttgtaattaattttagtagagatggggtttcaccatgttagccaggatggtctcaatctcctgacctcgtgatccacctgcctcggccttccaaagtgctggsattacaggcgtgagccaccgcgccagctacagtaatgctttctgaggtaccacctcttaagaggtttgctgtcagcctctctctctcttcctgtgatcataaaggctcatttgctagagacttgagcatcgatcatcgttccagatggcccactggttgcagatgcaggttcacttggtaatgggtaccaaaatcttgtttataggccgcgtctttgggcttcacagtgagtgaatgtctagtccatggcaatcccagggtgagttcctggctctgagtaggaaatggaactcactgggcagttcctctcatgaatcagtaattttcttaaaaataaagacatagaacactgcagaaaataacagctttattgctacagatgtgagagcatttacaaaatgccaaggaaaaccattccgttttgagtctctggagcctgaactctcaccatgtaccagaaaagaatgcccctctttcgaactttcaaacagttgggattatttttgtttcttatcatcccaattatttgctcaagtttgcctccattgggccccgttcagagtttcttgggctgcttgtactagtcacagctccacttccatctcttctcaggaagaggtgggcacaagacacatctgagccccttagtattgtgatggtggccaggaaatgatcaaagggtagcatttaggaaatcagcaaactaaagcctcaaatcaa

SEQ ID NO: 1013 - DNA, 1565 bp, Homo sapiens
  misc_feature (1)...(1565): n = A,T,C or G
tctttttctttggttaatcaagaccagagaataatccattagagagtatataccagtatttcttttgtggcaagcaatcctgtctcatctaatgaataaaaaacaaaatggtgaaaaaataaaataaaataaggttcttgtctaagctgccaaaatgaccattcacattgactccaagtaattggcttcttgaaaaggtcctgtttcacctgtctatcagcaccttccacacaatgccctccactgcagtgattcttccctacccccagggtggaaaggggacaaagaagggtgcagtgatggtagaaaatggaagacatttttaagactcttctgtgtagaaagaaataaaagctgattttccgaaaaatcagaaacctacaatgtgaaagcagagggaaattagcaggataaccatgaagtgatacaactgttcattgcatggagcagggaaatgtgatctcatgtctgttgaatgagttaaacaaggtctgttgttaacttgtgtgataggcagaggactagtccccctaaagaagtccaaactctatacccggaacttgtaaatatattacactatatggcaaagggatattaaggttgttagtcagctgactttaaaataggggaaggatcctggatgacccaggtgggcccggtggaatcacaagggtcattaatatggaagaggaagcaaaagaggaagtcagagagaagtgataggagaagagtgccccctgcccttgcgggcttggatccgcttcgatgatggaagagaagagccatgaaccaaggaatgtgggcagggcctttagaaactggtaaggactaggaaacagattcttctctcgcgttgctagaagggaagctgccctgctgacatcttgattttagctcattaaaacccacttcagacttctgacttctagaactgtaagatcataaatctgtagtgtttaagctattaaatttatggtaatttgttacagcagcaatatgagcctagtaaaacctgtatgatagattttaagtacctgacgtgaaatgttgagctagaagcctgcttagggattctttgttgtgggcaagagacattgaatgggattacacagatatagaggatccatttaagaaatgaccctttcagcaaaaacaggcaaacccctcccctccctgtcttccatctcaactcaaatctgggagagtcttatgccayaggaagaaccccctccacccacccatatctgcaagaaattcttaaacgtagccacggttgagatcagaggatcagagctgaagctatacacaggcttccccagtcaaagactaagggttgagctggaataatcaaggccctacacagaagtggactctgcaacacaggtgggcttggcatgagagctaaacattaccttagccacactagggaagggctggtgccatttcctgagtgaggggagcttgatggtgtatatatattcctctcaaggacctcactgagacggggttgcacattgtgatcagcaccccatccagaactttaccaantccccatcaactatcaa

SEQ ID NO: 1014 - DNA, 1343 bp, Homo sapiens
caccaagcctgactaatttttgtatttttagtaaagacagggttttgccatgttgaccaggctggtcttgaactcctgaatttaggtgatctgcccaccttggcctcccaaagtgttgggattacaggcatgagacaccacgcccggcctcaacaggtattttagaataaataaataacaataataacacatgactattttaaaaatatatatatatccatggcaggcagtaatgaaagaacaattttggtgagcactcacatagtcacaaactgacaactccccactggatgaactgtcctatagagtggtccagtcagagccagggtaggctgcttggttatgctccaaggtaggctcaaaggagttagcactgcagtgatacagtcagtccatttaagcaaagctttctaatgcttttacatcaaataacttggtggtttacttactaatgttggtaatttattaattcccttcacataatagaaatactctcataattctgcttaggtacccaaactttattttcccctacacacacataatttccctaaacttggaataggtaaaatttttacaccaatcagaagagaggaagagttataaagttactcaattaagccataaactgaccagattatagagcagagtcacaaggttgagtctggagatactcactttaatttataactactaattattaatgaaaaacatttctagaaacaacttattcagagaaggtggtttgtctaagagattaaactatagttctgctacaaaaaaagttgattatttatttatttatttatttttaagagacaagatctcactttctcacccaagctagagtgcatagctcactgcatccttgaactcctgggctcatagaatccttccacctcagcctcccaagtggctgagactacaggtgtgtgccaccatgcctggcctgaaatgactattttcagaaaactaagggacatgtcttgctatagaactgtggatatggtgctcatgtcatgtattttcaaatgtaggctcaatttcaaaaaccttatttaaaactagatttatggaggtttagggtgactgtctgaatctgaatatttttacacgctgtctmaaaaaacataagagcaacaaggaaggcaaataaaatcacatatgacccaagtattcagcattattaaaagtaaaaggatactaaaagagtcagattaggtgtaaataaataaacacccaatttctgacagagttcccatggctgttgcatacctgcaggtatggatgataggagaggggaggcttaagaaagtccatgaaaagaggacagagtaaatata

SEQ ID NO: 1015 - DNA, 708 bp, Homo sapiens
tggccttgaaattgatctgttctccattagcaatctgtgaattgtactcctgtctgaaattgagtagaggtcagagctatgaaggttgaattcaacaagaatttttatgaagtataactagagttagtgctctgctctaactgcttttggagacagactttccccagtgtatcccatcaaatcacagactaaaaacagtctatttccccttattcttggccagataggacctaggcacctgaatttttttttaaactagatttccaggaaattttattgaaggctaacagcatagcatttcatgttggataaagaagatgcacaagacgggacatggtaagacacacctgtaatcctaccactttggaaggatgaggcaggtggatcacttgagctcaggagttcaagaccagcctgggcaacatggtaagaccctgtctctccaaaacaaacaaacaaacaaacaaaaaaacaaaaattagctgggcatgatggtgtgcacctttagtctcagctactcgggaggctgaagtgggatgatcacctgagcccagggaggtcaaggctgcaatgagccatgattccaycactgcgctccagcctaggatacagagtgagaccctgtctccaaaaaaaaaaaaaaaaaaaaaaaaaaaggccatatgcagtggctcatgtctgtaatcccagcactttgggaggccaagg

SEQ ID NO: 1016 - DNA, 649 bp, Homo sapiens
atgatactcattgagatatttaaattagataattaactaaatcacatagaactgtgtctatatgtaaaataactgctagataaatgttaattattcttattttattccactatgcgaggcatatcagcagaagaaacattggcattatcatttacccatgggagcattgggaaatgattcattgagggaaggggtgatatttaaagacacaggggtttataatggaaacaatatgggctttaatgtttgtcaaatttgatattaaatttaggctttgctgaatttaactwtatgactaggatacaccatttgtactacaagagcatcagttttatcgcgtaaaaatcaacttaaatatctatctttctttaggtttttgtgggaattaaataaattatttagggcacaattgttaacaatacagtttttggagtcagccaatgagagtttaaatcctgcctcaatttcttcatctctaaaattgagatattgtcaacctcatagagttattaggaaattcaactattaccatgtctttacattacttaacacagtttctgatacagtaaggactttagaaacattaatttatttcctctcaaggcttagtgttggaagaaaaggcttgaaggcatttccaggaaagaga

SEQ ID NO: 1017 - DNA, 1617 bp, Homo sapiens
tgactgccagatcttcattataatttatataccttttacacttccaagtgctcatgtttgattgattgattctgtatgtgtgtctgtgtgtgtccgaatagtggtctatttaagagaaactggccctggctcacagagtgctgccttttccttcagcttaccctggggattggatgtttgtatgaggccagcatgtcttgccccatctttctgagacagctgcagggtaatcacaatagatgttttctcctctgcttattccacatgtctcttccagcaaagatggcaagcaatgtgatttcctcaatgagacctacctcccccacctctctttagtaacaaatggtggacaggagagtttctacagccagctcaaacatgttgtttctattgactcaaaccgaggactgtagattttcctctttagcatcccccaatgttctggaaaatgtttgcatttggctggctgtgtctgagatatgtaactgcatatgccctctgtcagtatcttcctgcacgctgatttgatatttattgcatttgacagctcttcatcttaaattgtgattcaagattatagatatccctatttttgtcaaaaacatggtttacatttttcttgttattcttgtttacatgatttcagaggagagaaagaggaagtatctttggtctcctttctcacagttaggattcccttatatctttgaaaattactgatgctttgagcttcactctaaacaaatgaaatcagaatttttaagactcagcccaagagatgtttaatttgataaactctataggtgatttttccgtgggaacgacgcccattgccttagccaaacaaatataggcttttaataatatttaaaatattctagttacgtttctttctttgtgtgtaccaaatgtgtattttgaggaatcttcttacattgtttgaagtttcttgtcacttctaaataagagtactaaattgacttccataaaagctagtcattttaatctaagaaagtatacatagctttaattattgaatatatgtctactgagagtttatggggagagaaagcctgttttggttctgtggaactctttggtattgaaatattctggtctttaaggaatgaacaaaatatcctttgaaacattcaacaatgatgatttaaatagtcaacccacaatagttatccaacccttctttgcagtataatcttcttttacactatcataaaatcgtatgcctagtaaaatgattgttttactgttcctctgttgcacatcatgcttttcctgatgaatgactttgctctaactttactgaaataaatcttctcaacttagttgataaattatacttcttgtgaraaaacacctccaaaatcaatttctcttccttcaaggtttcctgacccagatgttggttctccatttgtaaatacaatgggcaatttcatctgtatttttcttagcatgcttattatgttatattaatttgcatacttgacttttcccttagtgataaattgtaatgataatagaatatgtgatagttatttgtcatctacgaaattccgggtaacagattaagtcattatttgcattaatccttaaatg

SEQ ID NO: 1018 - DNA, 336 bp, Homo sapiens
ctgtaacacggaccctctctaccggctaccgaatctctgccctccccacccatggtggtcctggggatgcagacagaggaggggcactgcatattgctgagagggctggcatcctctctaggtggaacayaggtcatttgtaaagttgtaggcctgccaagcaatattggattcaacacattttctcaccttctcttaccagccaccctccagggttccctgactcacctccctgcagatggaggcaaggaggctccacagtcaaaccacagaagatgtatggcatgctgctggctaccagggctgttgggatgcacgttcacccttcccttcagg

SEQ ID NO: 1019 - DNA, 1193 bp, Homo sapiens
  misc_feature (1)...(1193): n = A,T,C or G
aaccttggggggtggggttccaaataaaccaagattgggtcattgcactccagcctggtcaacaagagcaaaactctgtctcataaaaaataagtaaataaactaaaaaataaagatattcactgaacctgttactatgatatatttaagcaagacagggtgaacctaaaaattagagatcattgaagaccaaagtaacaacatgtggtcattatttctcaaattgaagtacatanaatatataaaataaataaatttaattgcatgcttaggtaagaaaatattgataaaaatgattgaatatttttatcttatttcataattctaagcagggatttatcacaatatgaaaactagattattcatgtaatcaaaataaaagacaatttttattctaattttaactcagaaaatattttgctyatttaacaattttactgaaaggtaaacgagttaaataggacagattataattacctaacattgctatggtaacttatgtacaaatagctgttcgtcactgaaagtaaaaaaagtaaccagcactgaaacttaagatggatcatacaacagaaattagtaccaagttaccttatcttataatattatgttattaaaatgaaattttaaaacaacaccaaaaattaagttggggctatacaaagtgtgcagaaaagatttcatataacaggcaagagaattccatccttagaaaggcctgcatgcaaggctggcccttggctggtgtttaggaaattggaattaggagggtttccaccattccctgagaagagtggctcactgtgtctaaagtgtttatagaaacagtgtgttttctctgaacagctgctttccttgtaagagtctggaatttgggtacatgagagggagagtaacctccatagaaaaacttgggcacttagtctctaatgagactctagtactggtagacatcgctgcacatatgttgtcaaaatgtgagcctgggagaattaagcagatcctgggaactccacaggacagaactcctggaggcttgtgcctcgtttcctccagaattgaccacatgcactttttcctctactaattttgcttgtcccttttcttgttatcaattaaagatctgagtatgactatttgctgagtcctgtgagtccttctaatgaaccaacaaacctggggtggtcttggga

SEQ ID NO: 1020 - DNA, 1193 bp, Homo sapiens
  misc_feature (1)...(1193): n = A,T,C or G
aaccttggggggtggggttccaaataaaccaagattgggtcattgcactccagcctggtcaacaagagcaaaactctgtctcataaaaaataagtaaataaactaaaaaataaagatattcactgaacctgttactatgatatatttaagcaagacagggtgaacctaaaaattagagatcattgaagaccaaagtaacaacatgtggtcattatttctcaaattgaagtacatanaatatataaaataaataaatttaattgcatgcttaggtaagaaaatattgataaaaatgattgaatatttttatcttatttcataattctaagcagggatttatcacaatatgaaaactagattattcatgtaatcaaaataaaagacaatttttattctaattttaactcagaaaatattttgcttatttaacaattttactgaaaggtaaaygagttaaataggacagattataattacctaacattgctatggtaacttatgtacaaatagctgttcgtcactgaaagtaaaaaaagtaaccagcactgaaacttaagatggatcatacaacagaaattagtaccaagttaccttatcttataatattatgttattaaaatgaaattttaaaacaacaccaaaaattaagttggggctatacaaagtgtgcagaaaagatttcatataacaggcaagagaattccatccttagaaaggcctgcatgcaaggctggcccttggctggtgtttaggaaattggaattaggagggtttccaccattccctgagaagagtggctcactgtgtctaaagtgtttatagaaacagtgtgttttctctgaacagctgctttccttgtaagagtctggaatttgggtacatgagagggagagtaacctccatagaaaaacttgggcacttagtctctaatgagactctagtactggtagacatcgctgcacatatgttgtcaaaatgtgagcctgggagaattaagcagatcctgggaactccacaggacagaactcctggaggcttgtgcctcgtttcctccagaattgaccacatgcactttttcctctactaattttgcttgtcccttttcttgttatcaattaaagatctgagtatgactatttgctgagtcctgtgagtccttctaatgaaccaacaaacctggggtggtcttggga

SEQ ID NO: 1021 - DNA, 1193 bp, Homo sapiens
  misc_feature (1)...(1193): n = A,T,C or G
aaccttggggggtggggttccaaataaaccaagattgggtcattgcactccagcctggtcaacaagagcaaaactctgtctcataaaaaataagtaaataaactaaaaaataaagatattcactgaacctgttactatgatatatttaagcaagacagggtgaacctaaaaattagagatcattgaagaccaaagtaacaacatgtggtcattatttctcaaattgaagtacatanaatatataaaataaataaatttaattgcatgcttaggtaagaaaatattgataaaaatgattgaatatttttatcttatttcataattctaagcagggatttatcacaatatgaaaactagattattcatgtaatcaaaataaaagacaatttttattctaattttaactcagaaaatattttgcttatttaacaattttactgaaaggtaaacgagttaaataggacagattataattacctaacattgctatggtaacttatgtacaaatagctgttcgtcactgaaagtaaaaaaagtaaccagcactgaaacttaagatggatcatacaacagaaattagtaccaagttaccttatcttataatattatgttattaaaatgaaattttaaaacaacaccaaaaattaagttggggctatacaaagtgtgcagaaaagatttcatataacaggcaagagaattccatccttagaaaggcctgcatgcaaggctggcccttggctggtgtttaggaaattggaattrggagggtttccaccattccctgagaagagtggctcactgtgtctaaagtgtttatagaaacagtgtgttttctctgaacagctgctttccttgtaagagtctggaatttgggtacatgagagggagagtaacctccatagaaaaacttgggcacttagtctctaatgagactctagtactggtagacatcgctgcacatatgttgtcaaaatgtgagcctgggagaattaagcagatcctgggaactccacaggacagaactcctggaggcttgtgcctcgtttcctccagaattgaccacatgcactttttcctctactaattttgcttgtcccttttcttgttatcaattaaagatctgagtatgactatttgctgagtcctgtgagtccttctaatgaaccaacaaacctggggtggtcttggga

SEQ ID NO: 1022 - DNA, 655 bp, Homo sapiens
taaacagactcatttggctgggaatattcattgcaaccctcaaggctagacgtgtttttgtggctcatctcagtcattgcttccctcccattgtatctccattttatcattaaataaatgtaattcatctctaaatgaatacagaaaaaagaatctagaatctaaagcttatttctttagcaatttctttatgttgatctggttcagaayatcacaaggtgtatggctgaattagtttcccagctcatatgccacttggaagactgagagtgagacttaggttgattaatgaacaaacattatgagaacattctccagaaccattgtttagataacaggactaatctacttagacacataattacacatttagaaaatcccactgtaactgtacacatgagattttcttgaatggaaaatttgactaaatcaaataattgataaagagaaaaaagaagcagcaagtgaacctctgtctttttgaagttggattttctttttctccaaatccaggaactctacttgtaacatgcctacctaattcttttttagtattattatactttaagttctggtacatgtgcacaatgtgcaggtttgttacatatgtatacatgagctatgttggtgaccttggaatatcttgctgtaagtc

SEQ ID NO: 1023 - DNA, 1252 bp, Homo sapiens
ggggtggggagctggagactgaatcagtctccactggtcaaggcttgggtaatgaagcctccgagcttctgggttggtgaacacactgatatgctgggaggggatgcacccagagagggtatgcgggctccaggcccctttcctcatccctcgccctgtgcatctcctccatttggcggttcctgagttgtatcctttatgatggcaagagtaaggtaagtaccttcctgagtcctgtgagtcattctagcaaattacagaacctgaagtagggcaggttgtgggaacccctgactttgtagccaagtcagaccaaagtgtgggtaacttggcacctgaagacaggccagtattatgggactaaaccctatggagtgtcaagtcaactccgagtagttaagtgtcagaatcagcttgaaccataggacacccagttgatgccagaattggttggtgtctggagggtttcccaaggaaaattgggatgcacttataggtataaggcacatagatctgggtagcggcagtaacaggcacacttgttcccctgtgacagatgtggcttgccctgcccctgggatgagtcaggagtctctccagcatcacctggggcatgccagcagcatcccaggctgggacaagagacacccattgggggccattgggatgccttgggctgcaagtaacagaaaccctcactgacatgggcttccttgagaaggggatccggggaagaaagggttttggacagcctgcgtggcctttcacagtctttgtccccaaggccgtcttctctcacagctgcaagataaatgccagccgcaactggagcaaggcacttcctcattcctgctagatggggagagagaaagcattccctcaatggcwgaaaaaaaattcttatcttcagccattttttttccgttggtagagacggggactctctatgttgcccaggctgctctcaaattctgggctcaggagatcctcctgccttggcctcccaaagtgctgggattacaggcaagagccaccacacctggccttcagccaattttgatacctgcccaaccactctggacgaatagagtcaacaaggaaatgccagggctgattgctttaagcctgagcccctgactgcaacagcagataagatgacatcgcagaccggctggtgtgcttatgctgacttcccgaagggaggggactgtgtgaaggcagcgggttctgggtgggtgctctgtgtgtagag

SEQ ID NO: 1024 - DNA, 1252 bp, Homo sapiens
ggggtggggagctggagactgaatcagtctccactggtcaaggcttgggtaatgaagcctccgagcttctgggttggtgaacacactgatatgctgggaggggatgcacccagagagggtatgcgggctccaggcccctttcctcatccctcgccctgtgcatctcctccatttggcggttcctgagttgtatcctttatgatggcaagagtaaggtaagtaccttcctgagtcctgtgagtcattctagcaaattacagaacctgaagtagggcaggttgtgggaacccctgactttgtagccaagtcagaccaaagtgtgggtaacttggcacctgaagacaggccagtattatgggactaaaccctatggagtgtcaagtcaactccgagtagttaagtgtcagaatcagcttgaaccataggacacccagttgatgccagaattggttggtgtctggagggtttcccaaggaaaattgggatgcacttataggtataaggcacatagatctgggtagcggcagtaacaggcacacttgttcccctgtgacagatgtggcttgccctgcccctgggatgagtcaggagtctctccagcatcacctggggcatgccagcagcatcccaggctgggacaagagacacccattgggggccattgggatgccttgggctgcaagtaacagaaaccctcactgacatgggcttccttgagaaggggatccggggaagaaagggttttggacagcctgcgtggcctttcacagtctttgtccccaaggccgtcttctctcacagctgcaagataaatgccagccgcaactggagcaaggcacttcctcattcctgctagatggggagagagaaagcattccctcaatggcagaaaaaaaattcttatcttcagccattttttttccgttggtagagacggggactctctatgttgcccaggctgctctcaaatyctgggctcaggagatcctcctgccttggcctcccaaagtgctgggattacaggcaagagccaccacacctggccttcagccaattttgatacctgcccaaccactctggacgaatagagtcaacaaggaaatgccagggctgattgctttaagcctgagcccctgactgcaacagcagataagatgacatcgcagaccggctggtgtgcttatgctgacttcccgaagggaggggactgtgtgaaggcagcgggttctgggtgggtgctctgtgtgtagag

SEQ ID NO: 1025 - DNA, 1252 bp, Homo sapiens
ggggtggggagctggagactgaatcagtctccactggtcaaggcttgggtaatgaagcctccgagcttctgggttggtgaacacactgatatgctgggaggggatgcacccagagagggtatgcgggctccaggcccctttcctcatccctcgccctgtgcatctcctccatttggcggttcctgagttgtatcctttatgatggcaagagtaaggtaagtaccttcctgagtcctgtgagtcattctagcaaattacagaacctgaagtagggcaggttgtgggaacccctgactttgtagccaagtcagaccaaagtgtgggtaacttggcacctgaagacaggccagtattatgggactaaaccctatggagtgtcaagtcaactccgagtagttaagtgtcagaatcagcttgaaccataggacacccagttgatgccagaattggttggtgtctggagggtttcccaaggaaaattgggatgcacttataggtataaggcacatagatctgggtagcggcagtaacaggcacacttgttcccctgtgacagatgtggcttgccctgcccctgggatgagtcaggagtctctccagcatcacctggggcatgccagcagcatcccaggctgggacaagagacacccattgggggccattgggatgccttgggctgcaagtaacagaaaccctcactgacatgggcttccttgagaaggggatccggggaagaaagggttttggacagcctgcgtggcctttcacagtctttgtccccaaggccgtcttctctcacagctgcaagataaatgccagccgcaactggagcaaggcacttcctcattcctgctagatggggagagagaaagcattccctcaatggcagaaaaaaaattcttatcttcagccattttttttccgttggtagagacggggactctctatgttgcccaggctgctctcaaattctgggctcaggagatcctcctgccttggcctcccaaagtgctgggattacaggcaagagccaccacaccyggccttcagccaattttgatacctgcccaaccactctggacgaatagagtcaacaaggaaatgccagggctgattgctttaagcctgagcccctgactgcaacagcagataagatgacatcgcagaccggctggtgtgcttatgctgacttcccgaagggaggggactgtgtgaaggcagcgggttctgggtgggtgctctgtgtgtagag

SEQ ID NO: 1026 - DNA, 1252 bp, Homo sapiens
ggggtggggagctggagactgaatcagtctccactggtcaaggcttgggtaatgaagcctccgagcttctgggttggtgaacacactgatatgctgggaggggatgcacccagagagggtatgcgggctccaggcccctttcctcatccctcgccctgtgcatctcctccatttggcggttcctgagttgtatcctttatgatggcaagagtaaggtaagtaccttcctgagtcctgtgagtcattctagcaaattacagaacctgaagtagggcaggttgtgggaacccctgactttgtagccaagtcagaccaaagtgtgggtaacttggcacctgaagacaggccagtattatgggactaaaccctatggagtgtcaagtcaactccgagtagttaagtgtcagaatcagcttgaaccataggacacccagttgatgccagaattggttggtgtctggagggtttcccaaggaaaattgggatgcacttataggtataaggcacatagatctgggtagcggcagtaacaggcacacttgttcccctgtgacagatgtggcttgccctgcccctgggatgagtcaggagtctctccagcatcacctggggcatgccagcagcatcccaggctgggacaagagacacccattgggggccattgggatgccttgggctgcaagtaacagaaaccctcactgacatgggcttccttgagaaggggatccggggaagaaagggttttggacagcctgcgtggcctttcacagtctttgtccccaaggccgtcttctctcacagctgcaagataaatgccagccgcaactggagcaaggcacttcctcattcctgctagatggggagagagaaagcattccctcaatggcagaaaaaaaattcttatcttcagccattttttttccgttggtagagacggggactctctatgttgcccaggctgctctcaaattctgggctcaggagatcctcctgccttggcctcccaaagtgctgggattacaggcaagagccaccacacctggccttcagccaattttgatacctgcccaaccactctggacgaatagagtcaacaaggaaatgccagggctgattgctttaagcctgagcccytgactgcaacagcagataagatgacatcgcagaccggctggtgtgcttatgctgacttcccgaagggaggggactgtgtgaaggcagcgggttctgggtgggtgctctgtgtgtagag

SEQ ID NO: 1027 - DNA, 1019 bp, Homo sapiens
attttttaaatatatctatctttctctttagacagtgaatcccttgaaagcttctctgacattaaatgccatcactttttaaaggctttgctaatctgatggctgaaagatgatacaatttaaattttcccggatatctgggaaattaaataacatttcttatgtttgttggactttttgagttcctgttctgtcaattttctcttcatataytttgcccatcttcctatcagattttttatttgtcttactattttgtagaagccctttatttctcaaatgtaatataaatattttttccagtctataatttttatttttattttgtttcattttcatgtagtcaagtgtgtctgtctttctttttatgacctttgagctcctcttgaatttttttattcttaatttttcttagagtttacactttccatccatctagatttttaaatgttgtctgaggataatatataaccttgatttattctaaaggcatatcccattacgccaacatcatgtattaaatatcccaccctttcccactaaattggaatgtcaccttttctatgaatctatttctgaactctgttctattcctgtgttctatttacctattcctgtgtcaatatcatactttttattgctgtggcttttatggcttaacaggatggcagcagggttaagcatgtgggctctcaaaactgaaagtctgggtttagttcagatgccatcgactttgtaataatcttgtgcccattacctcaatgtcttcatctataaaaaggggataataacagtacctaacccacagggttgttatgaatattaaataactaattccaataaagtgttcagaatagtgcctggctcaggggaagttgtctgccaatcagtgttagttgcaattattataactggtagggcatgtcacctttcacaattcttcttatgcacactctccttctttcttctctggttttgttttttctgtccagttttcccacaaaattcttgggatttct

SEQ ID NO: 1028 - DNA, 1019 bp, Homo sapiens
attttttaaatatatctatctttctctttagacagtgaatcccttgaaagcttctctgacattaaatgccatcactttttaaaggctttgctaatctgatggctgaaagatgatacaatttaaattttcccggatatctgggaaattaaataacatttcttatgtttgttggactttttgagttcctgttctgtcaattttctcttcatatactttgcccatcttcctatcagattttttatttgtcttactattttgtagaagccctttatttctcaaatgtaatataaatattttttccagtctataatttttatttttattttgtttcattttcatgtagtcaagtgtgtctgtctttctttttatgacctttgagctcctcttgaatttttttattcttaatttttcttagagtttacactttccatccatctagatttttaaatgttgtctgaggataatatataaccttgatttattctaaaggcatatcccattacgccaacatcatgtattaaatatcccaccctttcccactaaattggaatgtcaccttttctatgaatctatttctgaactctgttctattcctgtgttctatttacctattcctgtgtcaatatcayactttttattgctgtggcttttatggcttaacaggatggcagcagggttaagcatgtgggctctcaaaactgaaagtctgggtttagttcagatgccatcgactttgtaataatcttgtgcccattacctcaatgtcttcatctataaaaaggggataataacagtacctaacccacagggttgttatgaatattaaataactaattccaataaagtgttcagaatagtgcctggctcaggggaagttgtctgccaatcagtgttagttgcaattattataactggtagggcatgtcacctttcacaattcttcttatgcacactctccttctttcttctctggttttgttttttctgtccagttttcccacaaaattcttgggatttct

SEQ ID NO: 1029 - DNA, 1019 bp, Homo sapiens
attttttaaatatatctatctttctctttagacagtgaatcccttgaaagcttctctgacattaaatgccatcactttttaaaggctttgctaatctgatggctgaaagatgatacaatttaaattttcccggatatctgggaaattaaataacatttcttatgtttgttggactttttgagttcctgttctgtcaattttctcttcatatactttgcccatcttcctatcagattttttatttgtcttactattttgtagaagccctttatttctcaaatgtaatataaatattttttccagtctataatttttatttttattttgtttcattttcatgtagtcaagtgtgtctgtctttctttttatgacctttgagctcctcttgaatttttttattcttaatttttcttagagtttacactttccatccatctagatttttaaatgttgtctgaggataatatataaccttgatttattctaaaggcatatcccattacgccaacatcatgtattaaatatcccaccctttcccactaaattggaatgtcaccttttctatgaatctatttctgaactctgttctattcctgtgttctatttacctattcctgtgtcaatatcatactttttattgctgtggcttttatggcttaacaggatggcagcagggttaagcatgtgggctctcaaaactgaaagtctgggtttagttcagatgccatcgactttgtaataatcttgtgcccattacytcaatgtcttcatctataaaaaggggataataacagtacctaacccacagggttgttatgaatattaaataactaattccaataaagtgttcagaatagtgcctggctcaggggaagttgtctgccaatcagtgttagttgcaattattataactggtagggcatgtcacctttcacaattcttcttatgcacactctccttctttcttctctggttttgttttttctgtccagttttcccacaaaattcttgggatttct

SEQ ID NO: 1030 - DNA, 626 bp, Homo sapiens
ggctaatgagatttcctgagttgtctaggatgtatacatacactactcaggttttcaatagttttggggtaagaggtggcctttagttacatgaaaagttttaatggtaatttctgagacttggagcacctgtcacccaagcagtgtacactgtacccaatgtgtagtcttttatacctaaccccactcccacacttccccgagtccccaaagtccattatatcattcttatgccttttcatcctcatagcttagctcccatttataaatgagaacataggatatttggttttccatttctgagttactttgcttagaataatggtctccaactccatccasgttgctgcaaatgctattattttgttcctttttatggctgagtagtatttcatggttatatatatatatcgcattttctttatccactcattggtagatggggatttaggctggttccatattttggcaattgagatttgtgcttctataaacttgcatgtgcaagtgtcttttttcatataaggacttattttcctctgggtagatacctagtcatgggattgctggatttaatggtagttctactttagttctttaaggaatctccatagtgttttccattg

SEQ ID NO: 1031 - DNA, 667 bp, Homo sapiens
cacgtatttgcacaagaatatttatagcaacgtggtttttaataggaaactatctaaatgttcattacaagtgaattacataaagctcaatacatccatactacgaatcactgaagagctgctaaaatagatgaaatatatttataatggcatgaacaaccgacacaagacagttgcagagtaatgtgtatttgtgattacatttatgtttttaagttatacaaacgcgtatgtgcctaygtgtatgtaaattcataggaagacaaatcagaggacggtggttacctggggaaaagcatgtgttggtgagtaacaggattttcaagttttgatgtgtctacttatgtgttttgaatccttaacaatgagaatttattagggttttactcttgtaatcttaaaaagtaccgaaaagaactaatcaatgtaggcaaaaggtctattgaagagcattcttctgaggtcattggatctgccctgagttaaatgtttattgagtgcccactgggtaccaggcaccaggctagatgcagaaactataaaacatgtaagaaaattgctttctgaccctatggcagacttagtgggcatttcagaaagaaaaaaaaaatcttgaaaagaacaggcatccttagggtctaatggctgacaaacttttttcctgtac

SEQ ID NO: 1032 - DNA, 668 bp, Homo sapiens
tgcatatcatttttcaagtatggtttacaaaagcatatgtgcagaattctgacaatgtcaggcattggagtgtttgttacctttgtttcattttgatagtatttcttttgtgacttttctatactatgttgggttaagtgatgtagggaatgcgaactgtgtaagatggaactcttccttctgtagtagatgtcattcctttcatattgttttgggattcttcagttttggtgtgactgattactactttacattgtagagtccaawcacaatgtgactgttgttttttatactggcatcgagctgtcttcccaatttatttagatgatgtatatgaaaatgctgttgatgcagccagattacatgtaagtaaagaacaatataaagaataattctatcattttaaaagtcactgtgtaaaccgttttagtttaaaatagatcatttgatttaataaacttttaaaattgactgttttgtaaactgcatattcataaagtgtttatagtctgtagttaaattttatgttactgttaacgaagttaatttatttaatttcttccttcatgttcctaatcattttcatttcacttaattttagtttatgtcatagtaatctgacatttactcatcagcaaattacaatgcaaaagaaaaaatatttttaa

SEQ ID NO: 1033 - DNA, 582 bp, Homo sapiens
ctacttatatataaaactgtgtacttaaatatatatataaatacttaagatataaggcacacagtaaaaatgacatttcattatgaaaaaaataggcgtgtgctgtttgcactttggtgggccattccattttcatatggcattaggatggagccatttgtttgggaggggacagcgctcttctcaggaaggagaccctggtctgcttagtgaggccaarccccttagcaggagctgagcatgtattctccttggcctctcacctttgttaatttatttgtttggtgaatttgggagaaggaagtagaaaagctcagctcagcacttacgctcttcatcttttgggatctgcctgtttggcagggagaatgtgttctggtctacgatgtgttcagtatagggagggaagagtttcatggctttctagctgtgccagaggtgagtatgttaaattggtgggtgaagtattggcacatgcctccaaatctaaagctatgttcttaaaatgttgtatcagtaataaaggtaccatttttgatctaaaaaagaaaaagctttcattaaaatcttaaaatatcatct

SEQ ID NO: 1034 - DNA, 627 bp, Homo sapiens
gctttaatgtcagtatcataatcccctagagggagtctgaatacacaatgttcccaaacttatttgaccacagaactttttttttgcatagagcatctcaagtacatttcaggaaatgctgaattacttgaaataatcatcaagtaattacttgaaatgatgaaatgatcatcttcactgtccatcttccccattcaactctaagcttcttaaggaaagggactttgcacaacattygtattgctattttccagtgtcagaaacagtggctggtacattgtaggtacctaataccatagggacacaatactgtgggttgaggtgggccttcctaccctttctgccttctctcctttacctgcacattttcctaatattcctcagtgtcaagtcattggaataagctggaagcctacacttggtttaaatgtgatgaaaaatattaattgtatttaaactttgatgacatggattgatttctttttggctcttataaataacacactattatttagtagacatatttgcacttagacttgtactttttctcaatttacactgtttccacatgcagaatcattggatcaaagcacatgaatattttcaaggatcttgatagcaatgcca

SEQ ID NO: 1035 - DNA, 742 bp, Homo sapiens
tgcattcccaggctgtccaccctctggggggaatcttcaggaaagcaagtatacagaccctgactatggctccagaaattaaaaaaaaaaaaaaaaaaagggtacacatagcctttccaaagaaaacttcaaggcacagtgygaagagtctgccctgatctgaagccctttggccagatgctaatagaaccatctgggcagggtgtaaagtaaggccaaagctatccaagtaagaattggcagtttcacacagaggaccttcacacaaaagaataaaacaaagtacattttcctgagaccctgaggtgcctaacacttcatggagcatccggcacagagtgccccaaactgtgcctgactctgtgcaagactcatccaacaagcatgttttcaggctttgccacactctgggcgtagtgcatggtagaggtggcacattactggcctggcaggggtgttttatttggcccacaaagcatttttaagaggactctgttaagatttttaggaggttgcacctcagaaggcacaacttctaacttgtctttaaaactcaggaggtttggctgggtgccgatcacctgaggtcaggagttcaagaccagcctggccaacatggtgaaatcccatctttatgaaaagtacaaaaaaattagctgggcatggtggcgcgtgcctgtattcccagctactcaggaggctgaggcaggaggatcgcttgaacccgggaggcagaagttgc

SEQ ID NO: 1036 - DNA, 742 bp, Homo sapiens
tgcattcccaggctgtccaccctctggggggaatcttcaggaaagcaagtatacagaccctgactatggctccagaaattaaaaaaaaaaaaaaaaaaagggtacacatagcctttccaaagaaaacttcaaggcacagtgcgaagagtctgccctgatctgaagccctttggccagatgctaatagaaccatctgggcagggtgtaaagtaaggccaaagctatccaagtaagaattggcagtttcacacagaggaccttcacacaaaagaataaaacaaagtacattttcctgagaccctgaggtgcctaacacttcatggagcatccggcacasagtgccccaaactgtgcctgactctgtgcaagactcatccaacaagcatgttttcaggctttgccacactctgggcgtagtgcatggtagaggtggcacattactggcctggcaggggtgttttatttggcccacaaagcatttttaagaggactctgttaagatttttaggaggttgcacctcagaaggcacaacttctaacttgtctttaaaactcaggaggtttggctgggtgccgatcacctgaggtcaggagttcaagaccagcctggccaacatggtgaaatcccatctttatgaaaagtacaaaaaaattagctgggcatggtggcgcgtgcctgtattcccagctactcaggaggctgaggcaggaggatcgcttgaacccgggaggcagaagttgc

SEQ ID NO: 1037 - DNA, 1811 bp, Homo sapiens
cccatgaacagccttaagtccccagacaaaatagcaaaacaggtcctggacgattcagcgcgaggtgggacacaacagggagggagaagtcagtatccaggggcactgcccggacccagaaggcggaggctgggatgtccccagcagaaacggacttccctggactccagcaggctctctgcggataagggattggagtgagtgagaggaaagaggaggacagaggcaaacttttctttctgcccagttctaggccatcaagggagtgaaggatccccaaagacataaggcagagctgggagaagaaaggagaggaggaaacaaaaaaaggaacaagargtaaggatgaggagacaaaacaaatggcatggaacatgctagaagccttccaatgacttccccatgtggaaactgcacacccgggcatccctcccggctttctgtggatgggcccatccaacgcagctcttgttagaggagtgcacactcccctctactatttggtaagtgtttgtagcaagaccagtgcataggtgggacgtgatctgaaagtttacaagaaggaagtgaaaaaccacttgtgagattgtggggagaaaacgctgggagcccagagacaccacaggcgtcaagagtccagggaccatgcatggtggtttatcagtggcaaggagaccaaggtttgacccagcctgacctcgtagcacttcctcgtccagatggatgtgggcttgtcctcccatcacgcacctgtccaagctggctgcacctgcatggactgctctccactctgcaagggccaacacagctcacacccaccccgatgccagaggaaaccgaggcacacggctggaagctgccagtgggcaaagcgctccagccccagctggtgcagaagcatcacggagagactgctatggctctcacccagcgcacgctccccgttccaccctacatggcgcaaacacgctcccctaaaatggagtgaacgtttatagcggcaaagatggcagccagggtttgggtttggcactctaagaaactgacgccttggagttaaatcaaccaaaatgacttttagtttagtttttttgttgctaacagtttccttagtttctgacttttctctggtgaagagcacagtatcaatcacacttcaaaataacaagtcaggaaacaggaacctctcactcagatcctcaccctgttaaaaagacttttgtagtttggatatcatgacctgtactaagtacaaagctctatttgtttctactttgtaacacagagtgttatgttctatggttgctacacaatcactttgaggaaacattactataaaaataaataagtttcttttttcattcaaagcgagggaaaataacaaggacgccctaaatacacccacaaaccttttccaagaacacttgcatttgttcctgagctggtaagaatgctttgctgatgatatcaaagccctttaatttatctacaatcgacctgacttaaacacaaaggaaaaaatactcattttgttctactttaaattaaaacaagctatttttgttgttgttgttactgggctgtctctgtttttctctgaacgcaggggaatacagtattctgaagcactgcatgattattctctcttggctgtggaagggtggccaagcacactattgatctctgagtgggattgttagaaggacaaagtgtgatttcactttgaaagtgattacaaacctctacttctcactaagatagaataaaagtgcagtgcaggatttactcttctgcatcaaataagtaagaaa

SEQ ID NO: 1038 - DNA, 1811 bp, Homo sapiens
cccatgaacagccttaagtccccagacaaaatagcaaaacaggtcctggacgattcagcgcgaggtgggacacaacagggagggagaagtcagtatccaggggcactgcccggacccagaaggcggaggctgggatgtccccagcagaaacggacttccctggactccagcaggctctctgcggataagggattggagtgagtgagaggaaagaggaggacagaggcaaacttttctttctgcccagttctaggccatcaagggagtgaaggatccccaaagacataaggcagagctgggagaagaaaggagaggaggaaacaaaaaaaggaacaagaagtaaggatgaggagacaaaacaaatggcatggaacatgctagaagccttccaatgacttccccatgtggaaactgcacacccgggcatccctcccggctttctgtggatgggcccatccaacgcagctcttgttagaggagtgcacactcccctctactatttggtaagtgtttgtagcaagaccagtgcataggtgggacgtgatctgaaagtttacaagaaggaagtgaaaaaccacttgtgagattgtggggagaaaacgctgggagcccagagacaccacaggcgtcaagagtccagggaccatgcatggtggtttatcagtggcaaggagaccaaggtttgacccagcctgacctcgtagcacttcctcgtccagatggatgtgggcttgtcctcccatcacgcacctgtccaagctggctgcacctgcatggactgctctccactctgcaagggccaacacagctcacacccaccccgatgccagaggaaaccgaggcacacggctggaagctgccagtgggcaaagcgctccagccccagctggtgcagaagcatcacggagagactgctatggctctcacccagcgcacgctccccgttccaccctacatggcgcaaacacgctcccctaaaatggagtgaacgtttatagcggcaaagatggcagccagggtttgggtttggcactctaagaaactgacgccttggagttaaatcaaccaaaatgacttttagtttagtttttttgttgctaacagtttccttagtttctgacttttctctggtgaagagcacagtatcaatcacacttcaaaataacaagtcaggaaacaggaacctctcactcagatcctcaccctgttaaaaagacttttgtagtttggatatcatgacctgtactaagtacaaagctctatttgtttctactttgtaacacagagtgttatgttctatggttgctacacaatcactttgaggaaacattactataaaaataaataagtttcttttttcattcaaagcgagggaaaataacaaggackccctaaatacacccacaaaccttttccaagaacacttgcatttgttcctgagctggtaagaatgctttgctgatgatatcaaagccctttaatttatctacaatcgacctgacttaaacacaaaggaaaaaatactcattttgttctactttaaattaaaacaagctatttttgttgttgttgttactgggctgtctctgtttttctctgaacgcaggggaatacagtattctgaagcactgcatgattattctctcttggctgtggaagggtggccaagcacactattgatctctgagtgggattgttagaaggacaaagtgtgatttcactttgaaagtgattacaaacctctacttctcactaagatagaataaaagtgcagtgcaggatttactcttctgcatcaaataagtaagaaa

SEQ ID NO: 1039 - DNA, 1811 bp, Homo sapiens
cccatgaacagccttaagtccccagacaaaatagcaaaacaggtcctggacgattcagcgcgaggtgggacacaacagggagggagaagtcagtatccaggggcactgcccggacccagaaggcggaggctgggatgtccccagcagaaacggacttccctggactccagcaggctctctgcggataagggattggagtgagtgagaggaaagaggaggacagaggcaaacttttctttctgcccagttctaggccatcaagggagtgaaggatccccaaagacataaggcagagctgggagaagaaaggagaggaggaaacaaaaaaaggaacaagaagtaaggatgaggagacaaaacaaatggcatggaacatgctagaagccttccaatgacttccccatgtggaaactgcacacccgggcatccctcccggctttctgtggatgggcccatccaacgcagctcttgttagaggagtgcacactcccctctactatttggtaagtgtttgtagcaagaccagtgcataggtgggacgtgatctgaaagtttacaagaaggaagtgaaaaaccacttgtgagattgtggggagaaaacgctgggagcccagagacaccacaggcgtcaagagtccagggaccatgcatggtggtttatcagtggcaaggagaccaaggtttgacccagcctgacctcgtagcacttcctcgtccagatggatgtgggcttgtcctcccatcacgcacctgtccaagctggctgcacctgcatggactgctctccactctgcaagggccaacacagctcacacccaccccgatgccagaggaaaccgaggcacacggctggaagctgccagtgggcaaagcgctccagccccagctggtgcagaagcatcacggagagactgctatggctctcacccagcgcacgctccccgttccaccctacatggcgcaaacacgctcccctaaaatggagtgaacgtttatagcggcaaagatggcagccagggtttgggtttggcactctaagaaactgacgccttggagttaaatcaaccaaaatgacttttagtttagtttttttgttgctaacagtttccttagtttctgacttttctctggtgaagagcacagtatcaatcacacttcaaaataacaagtcaggaaacaggaacctctcactcagatcctcaccctgttaaaaagacttttgtagtttggatatcatgacctgtactaagtacaaagctctatttgtttctactttgtaacacagagtgttatgttctatggttgctacacaatcactttgaggaaacattactataaaaataaataagtttcttttttcattcaaagcgagggaaaataacaaggacgccctaaatacacccacaaaccttttccaagaacacttgcatttgttcctgagctggtaagaatgctttgctgatgatatcaaagccctttaatttatctacaatcgacctgacttaaacacaaaggaaaaaatactcattttgttctactttaaattaaaacaagctatttttgttgttgttgttactgggctgtctctgtttttctctgaacgcaggggaatacagtattctgaagcactgcatgattattctctcttggctgtggaagggtggccaagcacactattgatctctgagtgggattgttagaaggacaaagtgtgatttcactttgaaagtgattacaaacctctacttctcactaagatagaataaaagtgcagtgcargatttactcttctgcatcaaataagtaagaaa

SEQ ID NO: 1040 - DNA, 590 bp, Homo sapiens
cagagcatcttggaggaaacttgggcttgcagaggtctgggggcctccagtggaaaagaggtcaactgtgcatgcaaaggcgactggatgccctggttccccaggctgattttcccttgcttctgagggaggattggggggaagttatgtgcccacaactcttgggaggccacttcaccttttctaagaaagggatctgccatcactttagaaagctgacccaagcatgctatgctaaccaaaaatagtaaccactcatccgcagggtcctggctgccagggagcggaagagggtttggacaaacagaactcacacccagcgaagtggagctgctggggaagacctgtggccacttacagagaactacttataatcactcagggagcacaatgagcacttagaaggggaagtggggaaggtggtctacaaaaataggaacaaaaactgcacagtactcagaaacttaacaagaggcttaggagcttyatgaagaaagtggcgatatctttttaaagggtgtaagtgtgcatgaggcactgcagcatctcccagggccctgggtgggatgggaagagcaggtatgattgca

SEQ ID NO: 1041 - DNA, 590 bp, Homo sapiens
cagagcatcttggaggaaacttgggcttgcagaggtctgggggcctccagtggaaaagaggtcaactgtgcatgcaaaggcgactggatgccctggttccccaggctgattttcccttgcttctgagggaggattggggggaagttatgtgcccacaactcttgggaggccacttcaccttttctaagaaagggatctgccatcactttagaaagctgacccaagcatgctatgctaaccaaaaatagtaaccactcatccgcagggtcctggctgccagggagcggaagagggtttggacaaacagaactcacacccagcgaagtggagctgctggggaagacctgtggccacttacagagaactacttataatcactcagggagcacaatgagcacttagaaggggaagtggggaaggtggtctacaaaaataggaacaaaaactgcacagtactcagaaacttaacaagaggcttaggagctttatgaagaaagtggcgatatctttttaaagggtgtaagygtgcatgaggcactgcagcatctcccagggccctgggtgggatgggaagagcaggtatgattgca

SEQ ID NO: 1042 - DNA, 590 bp, Homo sapiens
cagagcatcttggaggaaacttgggcttgcagaggtctgggggcctccagtggaaaagaggtcaactgtgcatgcaaaggcgactggatgccctggttccccaggctgattttcccttgcttctgagggaggattggggggaagttatgtgcccacaactcttgggaggccacttcaccttttctaagaaagggatctgccatcactttagaaagctgacccaagcatgctatgctaaccaaaaatagtaaccactcatccgcagggtcctggctgccagggagcggaagagggtttggacaaacagaactcacacccagcgaagtggagctgctggggaagacctgtggccacttacagagaactacttataatcactcagggagcacaatgagcacttagaaggggaagtggggaaggtggtctacaaaaataggaacaaaaactgcacagtactcagaaacttaacaagaggcttaggagctttatgaagaaagtggcgatatctttttaaagggtgtaagtgtgcatgaggcactgcagcatctcccagggccctgggtgggaygggaagagcaggtatgattgca

SEQ ID NO: 1043 - DNA, 614 bp, Homo sapiens
gtataaccttatcttaatttaactgactacatctacaaagactctatttccaaataaggtcatattctgaagttccaggagtagaatctcaacatatcttcttggaagacacaatttaacctcataaagcctactaaataattatattatgataagtgataggtcaacaagatcaacaacttattaaataccacagtttctagttacaaaatagtaaatgttacaaatataaattgcacactaggtttagatgatttacattgtttcccatgtgtacttcagctaaaaaggagaagtagcattttctttttttttttctttcttttttttttttttgaggcagagtctcactcagtcgcccaggctggagtgcagtggctcaatctccgctcactgcaagctccacctcccgggttcataccattctcctgcctcagcctcccgagtagctgsgactacaggtgcccgccaccacgcccagctaatttttttgtacttttttagtagaaatagggtttcaccgtgttagccaggatggtcacaatctcctgacctcgtgatccgcccgcctcggcagaagtagcattttcaacaattctttttttcccaacttt

SEQ ID NO: 1044 - DNA, 479 bp, Homo sapiens
tggtttttgcccagggggcatttgccaaatctggtttcctttcctcagcatcagagagcattgaggaacctgaggaaataataaggtctttctttctgggatgatgaatctgatacgttcttcctcttcaccttaaagctgagactcagctaaactggaaaccaccaccaatcccaccatccttcaagattgcagggaaagttgattttctgcatgcttcttagtttttaatgtgcatcagaatcacatggaggwcttgttaaaacaaagattgctgggcaacatccccagagtgtaagattcagtaggtctggggtgagacttttaaaatttgtacctctaataagtttccagatgatagtgattttgctggtcgggaaccacactgcaaaaattatttgtatagctaaaaccttgtcggagtgaatatgggggcaagatcactgctgagaattttaagcaaccagctgacccttgta

SEQ ID NO: 1045 - DNA, 640 bp, Homo sapiens
tacaggaacattgttcaacctgtctgtgccccagtttccttgtctgtgaaacaggaataataaagtactttgtagggatatttggagcatcaaatgaattagtacttggaagttcttagtacttagtactggtacacagtgagaactgtgtaagtgtttgctaaataaatgcctgctattattgtatataagggctccacacctagtggggcaccgcatccctgtgtctgcatttacccaggtgaggggcaaagtcacctgctgtatccaggtcgcctcctgcctctacccccatgtgtactcacagagtacacacccccaatattttccaggcaaatcctggctttcacagggtgatgggagcctcccatgtgctgctggaatcctgcgctccaaggacacatggaagtgactcttctcatttaagcaacgttaatgtggaaaggcagaacatcgtccttacccgcagatgcttgctttagaggaattacagcaataaaccagagaaccagctggtaatctttgtaactgaattgatggttactttcttgctagagaacttggagctactggaaatacattaggatagcagccccaggatggakaaatgtgctcattagagggtgtgggtgagatccat

SEQ ID NO: 1046 - DNA, 2053 bp, Homo sapiens
tgaatacagcccaattactctctatatgtgacttaggattactcacagcctcgccaacatgtgatatcgccaaactttaaaaaaaaagtacctatctaaatggtacacagtgcggtatcttatggctgtagtctgcatttcccctctcactgctgaagttcagcatacccatacatgctggtagttattagtatttcctctctctcccattgcatattcacttctttaatttattcaattctgagaaatgarggatccctcctggatgagaaaatggcgtgaaatggttcctcctctgctggccctgtgcctcggggtgacttcgcgttgcacagtccttctgctctcctctaacgatgaatgaacctttgggtacttgaattccatttgcctacacccagggttttgacctcttgtgtttgtgttaacgtgttttcatctcaggcttcatttctttttgagtctgcgggctcgcagtcaccctccctcttagcctggcgctcctcctctctggaggctctgagctgaagcacttaagggctactcaggctccatttgcagtctcagaactgtagtgtccatagtgagcaagaccagccagggcttgaatcccggctctgccacataagagcaatgttgtgtgaccttgaggaagctcttctctcctctgagcctcaattcgaacatctgagaaatcagggttgcgctgagaaataagtgaaattattcactgccgggccctagctctggcagtcacaggctcttgtgaacgtccatcccttccactgcccacccaccccagccctaccctgcccatgcgctgaatttcttctttctctcatctcaccccaagaggaagcaatacccccatgaccacctccagagtccccaggacggccaggccagagtcatagagcaagcgccaagtttaccatcctcagtgactgggaaggcgtgcagcccacgtcctccctcacaggccagatggcccggcacagcgcgacctgtagtcctgaccaggccactcaagggtttatgggcaccctggcacaaatgcagctcagggctgcagcaatatagaggcatgggatggggacgttgtcagaatgagcacaaggagggctatggggaacaggtagactctccaatcccagcaggtagggcctcagctggtggggcacttccgagcagaggaaggcctcattcttgctacagggcacctccttgcccccaccacaaccgaggacagtgtcttgccatctcatgctaacctctgaccccctgagctcaggctccacatcctgtcacctcccaggaagctccctcttgactcatcaccctacctgaccctcacccacagcctccacatctgccagtccaaatgcacttaaaccggctcgggtccctcccgttctagcaaggggcaccctgcccctccataccactctcccctcttctctcctgcttgcagggaacattcctgaaagagttctctaggcttctttgctgtactccccctcctgtcacccctaccctctctctgtaaagtggcccttgtgtaccctcacccctccacccatgacactgcgaccttaactctcttcccttggcgtggtttacctgcttttgaaaattttgtttataattgacacataataattgtacatgcccgtggggtgcagtgtggagggagctacacacaggaaaatcctgtgctgtggaagggtagcgattgccaggctggggctggattttcctctgtgtgtagtaaataccataactacttctgtgaaaagagtaagattttttagaactgtgtgtaggaagatctgtgtgtagctcccttagtagctgcatatctattttggagaatcttgtggaaggcaggagctaagagtcaggaagtagcccaggcaagggatggctatatacaaatcagttcagtaaaggggagatgaaaagaaggcagaatgcactgagagaatcttcagatttggaaactaagggactgtaggacttgacggggagggatttgtctgaacaagtccaagct

SEQ ID NO: 1047 - DNA, 541 bp, Homo sapiens
tgtatgccactgagtttgactcagtgctcctcctgctgtgggcaatcagctaaatgggcaaatggagcgagcagacgtctcatacaattggtagaagcccgtgcaaagatgttccagttgattaatcacccaaaatcagaacagctaagacaataactacgtgccattttatacctactaaattatggagtaggaacrctcaaattatactattttatgttggtagtgatggggaaagtggcacattggcataattgtttggtgtaatacagccaaatgccatctctagaaggcagtgtatagtgacatttaaagggccaggggccagagagtggtccattctctgccctgtgacctcactgctgggagcccagctttaggaaacaaattctgcatggagacatccactgcgccatctccattatcctaatccttatcaccatagtaacccattactaggcacctgtacgtctaagcactctgcagttatgctgtctcccctctgccagcttgccctgctgggtgaggtgttgttatctca

SEQ ID NO: 1048 - DNA, 541 bp, Homo sapiens
tgtatgccactgagtttgactcagtgctcctcctgctgtgggcaatcagctaaatgggcaaatggagcgagcagacgtctcatacaattggtagaagcccgtgcaaagatgttccagttgattaatcacccaaaatcagaacagctaagacaataactacgtgccattttatacctactaaattatggagtaggaacgctcaaattatactattttatgttggtagtgatggggaaagtggcacattggcataattgtttggtgtaatacagccaaatgccatctctagaaggcagtgtatagtgrcatttaaagggccaggggccagagagtggtccattctctgccctgtgacctcactgctgggagcccagctttaggaaacaaattctgcatggagacatccactgcgccatctccattatcctaatccttatcaccatagtaacccattactaggcacctgtacgtctaagcactctgcagttatgctgtctcccctctgccagcttgccctgctgggtgaggtgttgttatctca

SEQ ID NO: 1049 - DNA, 541 bp, Homo sapiens
tgtatgccactgagtttgactcagtgctcctcctgctgtgggcaatcagctaaatgggcaaatggagcgagcagacgtctcatacaattggtagaagcccgtgcaaagatgttccagttgattaatcacccaaaatcagaacagctaagacaataactacgtgccattttatacctactaaattatggagtaggaacgctcaaattatactattttatgttggtagtgatggggaaagtggcacattggcataattgtttggtgtaatacagccaaatgccatctctagaaggcagtgtatagtgacatttaaagggccaggggccagagagtggtccattctctgccctgtgacctcactgctgggagcccagctttaggaaacaaattctgcatggagacatccactgcgccatctccattatcctaatcctyatcaccatagtaacccattactaggcacctgtacgtctaagcactctgcagttatgctgtctcccctctgccagcttgccctgctgggtgaggtgttgttatctca

SEQ ID NO: 1050 - DNA, 965 bp, Homo sapiens
ccctatacagcaataggtgaagcagggacatgaaggccctctgtgtgcagcctcttgttaacyggtcagagccagcctattgttggtggtcttttatcaggagaaagttactgacatccatctcttgtccaatcaaagctgtagttgtgacttgtggaccaggggttgggggtcagttagtcaaggtctaacggtgaactacaattgttttagcacttgtttcttagggctagtgcctgtttaactgctagagaaaaagaaaaacctgtggcagttagaacattgtttattctttaagtgtacaggtgtatgacttaagtgttggttggttggaatggccttgggtcttatttataatttggtatcttattgccataaagtcagttgtgtgatcactactgtaacattattgctggtcggatgtggtgtctaaactgaagaaggatgtagcaaggcatgtttgacctcctatcacagccaggaactcagtttttaaggtttccctaggttccccttggccaagagtgtatttatttggtcaggtgggggccttagagtttaattttagatctcatccctaagaaaccaagcatgtttctgctttgctctgaaaagccgccaccattctgtaagaatgtctgaatggaccacagaatgatgaggaagcgtgaatgagagaaaaaccacacagcctagatgaatgagtgaggccttccttcctggaccttatagcccagctcagctgccaaatgcaactgtgtcagtgactctggaccaagctatatagagcagaagaaacatccactgatccctgccacggtatcatggcaaataacagatcactattttgtaggcaataagttttggagttttcttacacagcagtagatgattgaaacaatttaggaatgagtactatcaccactgtcccaataaggaaactgaggcacaaagagattaggtga

SEQ ID NO: 1051 - DNA, 965 bp, Homo sapiens
ccctatacagcaataggtgaagcagggacatgaaggccctctgtgtgcagcctcttgttaactggtcagagccagcctatkgttggtggtcttttatcaggagaaagttactgacatccatctcttgtccaatcaaagctgtagttgtgacttgtggaccaggggttgggggtcagttagtcaaggtctaacggtgaactacaattgttttagcacttgtttcttagggctagtgcctgtttaactgctagagaaaaagaaaaacctgtggcagttagaacattgtttattctttaagtgtacaggtgtatgacttaagtgttggttggttggaatggccttgggtcttatttataatttggtatcttattgccataaagtcagttgtgtgatcactactgtaacattattgctggtcggatgtggtgtctaaactgaagaaggatgtagcaaggcatgtttgacctcctatcacagccaggaactcagtttttaaggtttccctaggttccccttggccaagagtgtatttatttggtcaggtgggggccttagagtttaattttagatctcatccctaagaaaccaagcatgtttctgctttgctctgaaaagccgccaccattctgtaagaatgtctgaatggaccacagaatgatgaggaagcgtgaatgagagaaaaaccacacagcctagatgaatgagtgaggccttccttcctggaccttatagcccagctcagctgccaaatgcaactgtgtcagtgactctggaccaagctatatagagcagaagaaacatccactgatccctgccacggtatcatggcaaataacagatcactattttgtaggcaataagttttggagttttcttacacagcagtagatgattgaaacaatttaggaatgagtactatcaccactgtcccaataaggaaactgaggcacaaagagattaggtga

SEQ ID NO: 1052 - DNA, 965 bp, Homo sapiens
ccctatacagcaataggtgaagcagggacatgaaggccctctgtgtgcagcctcttgttaactggtcagagccagcctattgttggtggtcttttatcaggagaaagttactgacatccatctcttgtccaatcaaagctgtagttgtgacttgtggaccaggggttgggggtcagttagtcaaggtctaacrgtgaactacaattgttttagcacttgtttcttagggctagtgcctgtttaactgctagagaaaaagaaaaacctgtggcagttagaacattgtttattctttaagtgtacaggtgtatgacttaagtgttggttggttggaatggccttgggtcttatttataatttggtatcttattgccataaagtcagttgtgtgatcactactgtaacattattgctggtcggatgtggtgtctaaactgaagaaggatgtagcaaggcatgtttgacctcctatcacagccaggaactcagtttttaaggtttccctaggttccccttggccaagagtgtatttatttggtcaggtgggggccttagagtttaattttagatctcatccctaagaaaccaagcatgtttctgctttgctctgaaaagccgccaccattctgtaagaatgtctgaatggaccacagaatgatgaggaagcgtgaatgagagaaaaaccacacagcctagatgaatgagtgaggccttccttcctggaccttatagcccagctcagctgccaaatgcaactgtgtcagtgactctggaccaagctatatagagcagaagaaacatccactgatccctgccacggtatcatggcaaataacagatcactattttgtaggcaataagttttggagttttcttacacagcagtagatgattgaaacaatttaggaatgagtactatcaccactgtcccaataaggaaactgaggcacaaagagattaggtga

SEQ ID NO: 1053 - DNA, 965 bp, Homo sapiens
ccctatacagcaataggtgaagcagggacatgaaggccctctgtgtgcagcctcttgttaactggtcagagccagcctattgttggtggtcttttatcaggagaaagttactgacatccatctcttgtccaatcaaagctgtagttgtgacttgtggaccaggggttgggggtcagttagtcaaggtctaacggtgaactacaattgttttagcacttgtttcttagggctagtgcctgtttaactgctagagaaaaagaaaaacctgtggcagttagaacattgtttattctttaagtgtacaggtgtatgacttaagtgttggttggttggaatggccttgggtcttatttataatttggtatcttattgccataaagtcagttgtgtgatcactactgtaacattattgctggtcggatgtggtgtctaaactgaagaaggatgtagcaaggcatgtttgacctcctatcacagccaggaactcagtttttaaggtttccctaggttccccttggccaagagtgtatttatttggtcaggtgggggccttagagtttaattttagatctcatccctaagaaaccaagcatgtttctgctttgctctgaaaagccgccaccattctgtaagaatgtctgaatggaccacagaatgatgaggaagcgtgaatgagagaaaaaccacacagcctagatgaatgagtgaggccttccttcctggaccttatagcccagctcagctgccraatgcaactgtgtcagtgactctggaccaagctatatagagcagaagaaacatccactgatccctgccacggtatcatggcaaataacagatcactattttgtaggcaataagttttggagttttcttacacagcagtagatgattgaaacaatttaggaatgagtactatcaccactgtcccaataaggaaactgaggcacaaagagattaggtga

SEQ ID NO: 1054 - DNA, 764 bp, Homo sapiens
attccccacattaaacatatcaaaatgaaaactctattcaagcaagttattttaagtcaaatataaatttatttactaacttgaaattggcagtagcagctgtgtttttaaacaaatttcaaacaatatttagttaaaaccattttttctgcatgtcaaagaaaaacacaagatttaagtaatcatacaaaatacattttaaggtttgttttataccatcctgcagggttctgagagcaggcccctgaaatgacagcatcagcaatgtctggggactaatgtatggacagcaaaattctgcyactgtcctaggaaaaggaaatcaagttagaagaggcctgatgacacctcaagaccaaataaatcacaagtgacaatgtcttggttgcccccgaattgttttgcacccagagctatactgcctacaagacggatctccaccttctaaaaatgacttttgtgtttcttccagtgttaccggtagtaatgagcttctctcaggatctgctaatttaagtcagcatggatattagtttacagcacttaaaggtctcacacttataatagagcaatcctttggctttcattgcaacccagttaatttacagtaatacgtagaaaactgatagttaaattatgagttttatcaatcacaaggcagaaaaatgaatcaagtaacattgaagcagcatgggaaacatattttattcattgttcagaagagcataacttatgtttcattgtgtttggagcattctagctcc

SEQ ID NO: 1055 - DNA, 764 bp, Homo sapiens
attccccacattaaacatatcaaaatgaaaactctattcaagcaagttattttaagtcaaatataaatttatttactaacttgaaattggcagtagcagctgtgtttttaaacaaatttcaaacaatatttagttaaaaccattttttctgcatgtcaaagaaaaacacaagatttaagtaatcatacaaaatacattttaaggtttgttttataccatcctgcagggttctgagagcaggcccctgaaatgacagcatcagcaatgtctggggactaatgtatggacagcaaaattctgctactgtcctaggaaaaggaaatcaagttagaagaggcctgatgacacctcaagaccaaataaatcacaagtgacaatgtcttggttgcccccgaattgttttgcacccagagctatactgcctacaagacggatctccaccttctaaaaatgacttttgtgtttcytccagtgttaccggtagtaatgagcttctctcaggatctgctaatttaagtcagcatggatattagtttacagcacttaaaggtctcacacttataatagagcaatcctttggctttcattgcaacccagttaatttacagtaatacgtagaaaactgatagttaaattatgagttttatcaatcacaaggcagaaaaatgaatcaagtaacattgaagcagcatgggaaacatattttattcattgttcagaagagcataacttatgtttcattgtgtttggagcattctagctcc

SEQ ID NO: 1056 - DNA, 764 bp, Homo sapiens
attccccacattaaacatatcaaaatgaaaactctattcaagcaagttattttaagtcaaatataaatttatttactaacttgaaattggcagtagcagctgtgtttttaaacaaatttcaaacaatatttagttaaaaccattttttctgcatgtcaaagaaaaacacaagatttaagtaatcatacaaaatacattttaaggtttgttttataccatcctgcagggttctgagagcaggcccctgaaatgacagcatcagcaatgtctggggactaatgtatggacagcaaaattctgctactgtcctaggaaaaggaaatcaagttagaagaggcctgatgacacctcaagaccaaataaatcacaagtgacaatgtcttggttgcccccgaattgttttgcacccagagctatactgcctacaagacggatctccaccttctaaaaatgacttttgtgtttcttccagtgttaccggtagtaatgagcttctctcaggatctgctaatttaagtcagcatggatattagtttacagcacttaaaggtctcacacttataatagagcaatcctttggctttcattgcaacccagttaatttacagtaatasgtagaaaactgatagttaaattatgagttttatcaatcacaaggcagaaaaatgaatcaagtaacattgaagcagcatgggaaacatattttattcattgttcagaagagcataacttatgtttcattgtgtttggagcattctagctcc

SEQ ID NO: 1057 - DNA, 1115 bp, Homo sapiens
gatggatctcacccacaccctctaatgagcacatttctccatcctggggctgctatcctaatktatttccagtagctccaagttctctagcaagaaagtaaccatcaattcagttacaaagattaccagctggttctctggtttattgctgtaattcctctaaagcaagcatctgcgggtaaggacgatgttctgcctttccacattaacgttgcttaaatgagaagagtcacttccatgtgtccttggagcgcaggattccagcagcacatgggaggctcccatcaccctgtgaaagccaggatttgcctggaaaatattgggggtgtgtactctgtgagtacacatgggggtagaggcaggaggcgacctggatacagcaggtgactttgcccctcacctgggtaaatgcagacacagggatgcggtgccccactaggtgtggagcccttatatacaataatagcaggcatttatttagcaaacacttacacagttctcactgtgtaccagtactaagtactaagaacttccaagtactaattcatttgatgctccaaatatccctacaaagtactttattattcctgtttcacagacaaggaaactggggcacagacaggttgaacaatgttcctgtagctgagccaggatttgaacccaggtagttggttgcagggatggagttcaaaatgcgtttcccattgagaggaccaaaaatatgtagtgaagccataccaagtctgagttgagcaaaaccaagcatgaatgaaataaaggcctcagcacagctcatagtcactgacatacagaaggaggataaaggaggccctgcctagcctgggggttggggaagggtcaatcacagcggttataacacctcattctcttgagtaggacttaccacatgggaatctggcatctcgaccctcctgagacatgtcccattgtgcagatgtggaaactgaggttcagagacattgagcgggttacctgaggtcacacagcctggaagtgcaaggctgggactcaaagccagcctccccgtccctatacctcatgctttttttctgcacctttcagcccagctgccagacctcagcactagagagcag

SEQ ID NO: 1058 - DNA, 1115 bp, Homo sapiens
gatggatctcacccacaccctctaatgagcacatttctccatcctggggctgctatcctaatgtatttccagtagctccaagttctctagcaagaaagtaaccatyaattcagttacaaagattaccagctggttctctggtttattgctgtaattcctctaaagcaagcatctgcgggtaaggacgatgttctgcctttccacattaacgttgcttaaatgagaagagtcacttccatgtgtccttggagcgcaggattccagcagcacatgggaggctcccatcaccctgtgaaagccaggatttgcctggaaaatattgggggtgtgtactctgtgagtacacatgggggtagaggcaggaggcgacctggatacagcaggtgactttgcccctcacctgggtaaatgcagacacagggatgcggtgccccactaggtgtggagcccttatatacaataatagcaggcatttatttagcaaacacttacacagttctcactgtgtaccagtactaagtactaagaacttccaagtactaattcatttgatgctccaaatatccctacaaagtactttattattcctgtttcacagacaaggaaactggggcacagacaggttgaacaatgttcctgtagctgagccaggatttgaacccaggtagttggttgcagggatggagttcaaaatgcgtttcccattgagaggaccaaaaatatgtagtgaagccataccaagtctgagttgagcaaaaccaagcatgaatgaaataaaggcctcagcacagctcatagtcactgacatacagaaggaggataaaggaggccctgcctagcctgggggttggggaagggtcaatcacagcggttataacacctcattctcttgagtaggacttaccacatgggaatctggcatctcgaccctcctgagacatgtcccattgtgcagatgtggaaactgaggttcagagacattgagcgggttacctgaggtcacacagcctggaagtgcaaggctgggactcaaagccagcctccccgtccctatacctcatgctttttttctgcacctttcagcccagctgccagacctcagcactagagagcag

SEQ ID NO: 1059 - DNA, 1115 bp, Homo sapiens
gatggatctcacccacaccctctaatgagcacatttctccatcctggggctgctatcctaatgtatttccagtagctccaagttctctagcaagaaagtaaccatcaattcagttacaaagattaccagctggttctctggtttattgctgtaattcctctaaagcaagcatctgcgggtaaggacgatgttctgcctttccacattaacrttgcttaaatgagaagagtcacttccatgtgtccttggagcgcaggattccagcagcacatgggaggctcccatcaccctgtgaaagccaggatttgcctggaaaatattgggggtgtgtactctgtgagtacacatgggggtagaggcaggaggcgacctggatacagcaggtgactttgcccctcacctgggtaaatgcagacacagggatgcggtgccccactaggtgtggagcccttatatacaataatagcaggcatttatttagcaaacacttacacagttctcactgtgtaccagtactaagtactaagaacttccaagtactaattcatttgatgctccaaatatccctacaaagtactttattattcctgtttcacagacaaggaaactggggcacagacaggttgaacaatgttcctgtagctgagccaggatttgaacccaggtagttggttgcagggatggagttcaaaatgcgtttcccattgagaggaccaaaaatatgtagtgaagccataccaagtctgagttgagcaaaaccaagcatgaatgaaataaaggcctcagcacagctcatagtcactgacatacagaaggaggataaaggaggccctgcctagcctgggggttggggaagggtcaatcacagcggttataacacctcattctcttgagtaggacttaccacatgggaatctggcatctcgaccctcctgagacatgtcccattgtgcagatgtggaaactgaggttcagagacattgagcgggttacctgaggtcacacagcctggaagtgcaaggctgggactcaaagccagcctccccgtccctatacctcatgctttttttctgcacctttcagcccagctgccagacctcagcactagagagcag

SEQ ID NO: 1060 - DNA, 1115 bp, Homo sapiens
gatggatctcacccacaccctctaatgagcacatttctccatcctggggctgctatcctaatgtatttccagtagctccaagttctctagcaagaaagtaaccatcaattcagttacaaagattaccagctggttctctggtttattgctgtaattcctctaaagcaagcatctgcgggtaaggacgatgttctgcctttccacattaacgttgcttaaatgagaagagtcacttccatgtgtccttggagcgcaggattccagcagcacatgggaggctcccatcaccctgtgaaagccaggatttgcctggaaaatattgggggtgtgtactctgtgagtacacatgggggtagaggcaggaggcgacctggatacagcaggtgactttgcccctcacctgggtaaatgcagacacagggatgcggtgccccactaggtgtggagcccttatatacaataatagcaggcatttatttagcaaacacttacacagttctcactgtgtaccagtactaagtactaagaacttccaagtactaattcatttgatgctccaaatatccctacaaagtactttattattcctgtttcacagacaaggaaactggggcacagacaggttgaacaatgttcctgtagctgagccaggatttgaacccaggtagttggttgcagggatggagttcaaaatgcgtttcccattgagaggaccaaaaatatgtagtgaagccataccaagtctgagttgagcaaaaccaagcatgaatgaaataaaggcctcagcacagctcatagtcactgacatacagaaggaggataaaggaggccctgcctagcctgggggttggggaagkgtcaatcacagcggttataacacctcattctcttgagtaggacttaccacatgggaatctggcatctcgaccctcctgagacatgtcccattgtgcagatgtggaaactgaggttcagagacattgagcgggttacctgaggtcacacagcctggaagtgcaaggctgggactcaaagccagcctccccgtccctatacctcatgctttttttctgcacctttcagcccagctgccagacctcagcactagagagcag

SEQ ID NO: 1061 - DNA, 503 bp, Homo sapiens
agaattgatttcatgacccctctaatgaactggtgtccatagtctgaaaaatgttttttgaggtttggtttacaggaggtctgttgggtggattgaggcctggctgtaggaagtggggaaacagaggcactggaggttgagtgagccaacttggtactgagtaactagcaggtggggggacagtggtcttctgagctatgcaacagtagagctgggtctgacctggccatctgaggccaactcagcccggaaaatagtggcgagggcacaagagcttgcaaactttgtcctctagcatgaaggtcccctgcctgatcctgcagagacttggcagccctttccttcccctgctggcagctccacaggctcaaccccctatttctatacagctgtcctctcattggcaacaccaaggccagcttggaagataccaccctgtgcccatcatcctggggcaacccagtgccctcgtctggcaragacctccccctcaagactgagca

SEQ ID NO: 1062 - DNA, 1073 bp, Homo sapiens
tggcggtcaccaacatagcttactgtgctgatgaagaaatcccttttgaaagccacagtgtgcaatcctaaactcgttttttaagccaaataaaaatcagtgatgtgctggtaattattttaaaacatgattggggtgaaagaatgctttcattgatagggtttgctgatttccattataattttataaaattaatacataaaataaataatactccttcaggagttaatttcattaattaactgcaagacagtaacattaatactgtcagtaacattaataacagcaamattaatactgctgcaggagttaatctcagattactagcagggcatcatgcagagctgggaattgatgtgaacaatcaactcctgcacactggtctagcacatcactcgataaaatgtgtcttgttggcaagagattattccactctcatttgtgaaaaatcatatgtgaaattccagcaaagaaacttttgactcgaattttttattttttttttaagtttccctgcactgtttaataagtgatctgtacatgtttctttcaggatatgtcatttttaaattctaattatttttatattcttaaccattttaatataatctatagacacacatcttctctaagagtgttttaacattgaaagaggtaggccatgcagaatgaaacagaaaaaggagagtccgggcggggtggctcaggcctgtaatcccagcactttgggaggccaaggctggtggatcatgaggtcagaagatcaaggccatcctggctaacatggtgaaaccctgtctctactaaaaatacaaaaaaattagccaggcgtggtggcgggcgcctgtagtcccagctactcgggaggctgaggcaggagaatggcgtggacccaggaggcggagcttgcagtgagccgagatggggcctgggcgacagagcaagactctgtctcaaaaaaaaagaaaagaaaaaggaaaaagaaatatttctgcaataaagaaaaatatcttaattctatgtaaagatatttttaaatagaattagcttagacagctgaataaaaatcactg

SEQ ID NO: 1063 - DNA, 529 bp, Homo sapiens
tgagatgtttgaaaacactttgggtaatacattagcataaataaaaaataatcacataaattatgctttctaatggcattcataatttccaaagycatataataaacagatgcttttttcttgtgctctacttagacatttattttctcttaaaatatacttgttcgaatgccaatgccaatttgaagatatgatacttgattactgtgggagttcagtcaggatggtgggagaaattgtaaaattataggaaataaacacaaaccctcttggaaggcctggaggtttgcataaaaatgtttggctgaaggcagctgaatccacttaataacttagggctcaaatacaaaggaatgtagagtagtttatctatatagcttgtttactcacgtggtcctaagaccaactttgatcaaccatagatgcataattgctctctacttgggtggggggttagcaaccaggttaattacccacagatgtgttgactgaaagcttttgtcaattaaatatatactaaataaatgca

SEQ ID NO: 1064 - DNA, 529 bp, Homo sapiens
tgagatgtttgaaaacactttgggtaatacattagcataaataaaaaataatcacataaattatgctttctaatggcattcataatttccaaagccatataataaacagatgcttttttcttgtgctctacttagacatttattttctcttaaaatatacttgttcraatgccaatgccaatttgaagatatgatacttgattactgtgggagttcagtcaggatggtgggagaaattgtaaaattataggaaataaacacaaaccctcttggaaggcctggaggtttgcataaaaatgtttggctgaaggcagctgaatccacttaataacttagggctcaaatacaaaggaatgtagagtagtttatctatatagcttgtttactcacgtggtcctaagaccaactttgatcaaccatagatgcataattgctctctacttgggtggggggttagcaaccaggttaattacccacagatgtgttgactgaaagcttttgtcaattaaatatatactaaataaatgca

SEQ ID NO: 1065 - DNA, 667 bp, Homo sapiens
tcggtgctagaaggcactttccccaggagcggaggaaccggttggccctcaagaatcagagaggaagtgcaggtgggatgcaacaccgcctttcctagaaggccaatgtcaggagcggtgggcttgcctccgcctcttcctggaccgagcgtgcagccatcacttgggccatggagaccgagagagcttccctgtcccacacaggtatggaagcccagagctccaggatcaccacagctgcccaatcatccagaaagaggtgtggagagggaaacaatcatgacgcggaccgccacgaggtttctccctgatggacggggaagtcttctttgtggaagacactgagccacrctaagaagccgccaggcttctcagagacggggcagacacagcaagagggaggtcagagcagaggccagagcccaggcaggatacgggggggccatgccaccaccaccggcatccggggaggagtgtcaaacgggtgactcggccaggaaggccagcctttgagagacagacatgcttgccccatccccttgccggcttccttctccgtccctgcgtcgagctgtggctacatttctcgatgagggcagagggcgacaggcgtgacaaccaccttcttgaagctctgcgggcaccctcctgcgggtggacaatgagc

SEQ ID NO: 1066 - DNA, 638 bp, Homo sapiens
agagtttcctgttccattatgatatttttaattttttgttttactttaaacatactaaatatagttattttattttattttctgtatctgatactttcaataactgcagtctttgctagtcttttttctgtgctcttgctcatagtttttttcatttgttttcatgattagaaaaacagagagagaagaaggagagtaaagggaggaggmggaggaggagaaaagaagaaagcagagaagaagggacagagaaaaaaaggaagttggttctaacgtttctctaacaactggcttcagtgaaacactcccaccttgtggatttttaggttattgaaattaaccagtcttctgggtgcagcacaccaacatggcacatgtatacatatgtaacaaacctgcactttgtgcacatgtaccctaaaacttaaagtataataaaaaataaaataaaaagctacacaaatttaaaaaaaaagaaatcaacctaattcctagattaccacctcttgattcaaatgctttaaatctaggcttttcatctgagtctttctttttagttattctgtttatcttcaaaacactcctgctttgaatcattcaaaatctacctccctccctctgtttgactaccatcaatt

SEQ ID NO: 1067 - DNA, 672 bp, Homo sapiens
ctgacctgggaaagagacttgagttttaatcccagctctgctaccaattagctgtttacctcgagtctttggcctccctttctttttttttcttttttttttttgagaaggaatctcgctctgttgcccaggctgaagggcagtggcatgatctcggctcactgtagcccccgcctcatgggttcaagtgattctcctgcctcagcctcccgagtagctgggaccacaagtgcctgccaccatgcccagctaatttttgtagttttagtagagacggggtttctccatgttgtccaggctggtctccaactcctgacctcaagtgatccacctgcctcagcctcccaaagtgctgggattacaggcatgagccacggcgtccagcctggyctcatctgtatacctgaaaaagaaagctgaaggactagatcagtggtctcttaccttctttttcagaaggttgggagggagcgtagatcactagagaatctgaaaaagggcaacagatgttcccctccaaatatgcacaaaattatgtagagtatttcaaagtttaggatctctgttatctactcatttatttaggttaagggcattcttgcagatctcctcatagattctcaaactgtaaaatttttagattctaagtaagtcaaaagcagccaaaatata

SEQ ID NO: 1068 - DNA, 1109 bp, Homo sapiens
gatttggattttggacacactttaattaaaatgctgatctttaagcatgaaaattatttggaccccagtgaaatgtcacactaagcaaagcctggagatggaaggagcagaggctaactaggtggaggtggaggagcaccagttcatatttctaatttcttagtttcagcttgtttggagcrtaagattgttaggcttctggactaaatgtatgatttctctgtcatatgccccttccttttcaatgttgaaatcatgtaagttgagcatacctttgatatgaagactgcatatctccttttgatgcaaagagcaagacacatgtaactgatccaggactctctgtatctcagttctatgatcccaattaaatacactcatctgtacgagttccccatggttgtattagaagaagttctcctcatgataggaaattggaatgaatattttaccgacaggatatgtgaaactatatttactttttccttataatttgattctacccaatgaatataatgtgtagaaaaaatgttcattgagggaagtacatttagttgagtttaggttaatcaatgtctggtgaaaataaatagttggctgtctgttttaagctgaataaatagcatggtttggctgtactgcatattggtgagttcaggagtttatcagctgtcccagataatgattttatgctaataaaatcaagaggtggatttgtaaatcacactaaactggcagcagtgctactgggcataaaatgcaattcttttttttttttttaattaatttcctgggtatctctaaccagtaaccaggattgttttctacctaagatatctcttcttgttttgagtaactctacttaggagaaaaattatagatcagggttttcttagcatgaaatttaagcaaaaaattcaacactttgatccagccgtgctattctgttgtcctttatcatctgagaggtgtttatgactgaaaagcattatttagagcaataatctctgaatcactttcttcacaacctttttgaggaatacagtacaactcattgatgtatggaagaaaagatttgaacttcagcttacatgtattttctaataata

SEQ ID NO: 1069 - DNA, 1587 bp, Homo sapiens
atattaatataagttgttttacgaagaagaatcctataatagcagacttacttgtagtccgtttaaagaaaatgatccatactttccataacagtttgtacaaatcctgcctgattttaaaaggctgcttagcagttaattttatgtaatacttttttttaaataagaaaaggatgaaaaaaagtttgagttcagcttttcccttttgtttctgccctcttatttgtgcatataactgtatatttgtttcttttcttttttcttttttttgagacagcgccatgctctgtcgcccaggttggagtgcagtggtaagacctcagctcactgcagcctctgccttccgggcttgagtgatcctcccacctcagccacccgtgtaggtgagacttcaggcacgtgccaccaccctggctaatttttgtatttttgtatttttttttttttttttgtagaggtgaggtttcatgttgcccagggtggttttgaacccctgggctcaagtgatccacctgccttggcctcacaaagtgctgggattacaggtgtgatccatttatttattttattaaattaagttttaattattttaaagttccactgaacaaaataatgagaaaatgcaaacaatattactttgaatggatccttaggtgtatatattcaggccatttgaaaaaatacagtgtttttaaaggcctgatatgtctgatggtaatgtttatgttttatagttttaaaaaaaattggctttcttctaatttgtgacggagccaatttggagtccttgttcatccagaaatgaggtctctcgctctttactaggattgtctgttacatcctgttgtacagttttgtagtgtttttcatatgggtttatacaccattcttgtcaggcttaataccttggaataactatatagctatttttgttgctttggggaaagtgatcttttttccattgtacttttaaacatgttattattggatatttaaaagtatttaagccaggcgtggtggcttatgcctgtaatcccagcactttgggaagctgaggtgggtggatcacctgaggtcaggaattcgagaccrgcctggccaacgtggtaaaaccctgtctttactgaaaatacaaaaattagccaggtgtggtggtgtgtgcctatagtcctagctgctcgggaggctgaggcagcaaaattgcttgaacctgggagatggaggttgcagtgagtcgagatcgtgccactgcacttcagcctgggtgacagactgagactccatctcaaaaaaacaaaaaacacaaaagtatttattgataggaaaatatagctactgcaccgaaatggggttaatggatttttgagtttagttctcttagattttattttatatatcatataattttatattttgtgttatataagatataaatatatatttcatatataaaatacatattttatatatgttagatatataaaatttgttagatatgtaatatgcaaatatactatatattttgtaagatacttaattctatatacaataaagataatatgtatatactgtacataaatataacaa

SEQ ID NO: 1070 - DNA, 1212 bp, Homo sapiens
aagtgaaaaaacctctttggatgctgctagaacaactaagtcattctgagaagtggtaaatgaaagaagaaaatcaagcattcatcttgcctttcctgtatgaacagaatttcagaataaccaatgagctgatgaacaaagtgttcttcctttatagaagaacctcagataataaacctaagcaaaatgatagaattagaatatcaaggccgggagtggtggctcacacctgtaatcccagcactttgggaggccaaggcgggcagatgacctgaggttaggagttcgagaccagcatgaccaacatggaaaaacctcatctctactaaaaataaaaaattagccaggtatggtggcacgtgcctgtaatcccagctactcgggaggcagaggcaggagaatcacttgaacacgggaggcagaggttgcggtgagctgagatcgtgtcattgcactccagcctgggcaacaaaagtgaaactccatctcaaaaaataaatcaatattttgcacccctaatataatgaatctgggcaagaccattaataactgctaaaaaacattacagaaaacagtgaaggggaactttataatggaaggatcagaatgacaacatctgaaccctctgatcaagctcaatttgtgacgcaacagaaagcacacagtatcatcaacaaagtactgccggaactaaacttgaacctaatcaagcttttagacccaactacctaccagtttacagaaatgatgccatatrtaaaaaagaattaaaccatgtgtgttgaagtgtctatgagtaaaatgatgtctacaatttttgtgaaattctccaggaaaaaaaagaggggttagaaatgaattaagaatggcagaatgtcaacaactgaagcgagatgatgattatatgggagttcattgcatatttctgtttttgtgtaagtctaaaagttcccaaataaaatcataaaaccaaaaactataactcaatcaatgctacttttacaaaaagagggacagaagtattcacagcattagatataattcctgatcctgggactctacaattccaagggttatctttttaagcaaacttttaaaaaagcttaaaaagtcaatacagtatggactacacatggaaaatatatatatatacagctattagataattttttaaagcctaatataaggtaaaatgatatttgtagtttgaga

SEQ ID NO: 1071 - DNA, 634 bp, Homo sapiens
cagcggcaaggaaggaccctgcgaggccattggagacactgctgtcagatgggatgagcaggccccttctggcagcatctgttgagttagcatcaggctggaccacagagacgatgcctgcaagagctgcaaacgcaggccatcccgccagctctcgtgcaggagatgctagctcctcatcaggctctgagccaagcacatcatctgccttctgcccctcagtttcctagtgtgtaaaatgaggatgttgtgactcttactccatcagtccttaggaggattcagggaggtgaggcataggaagtgctctgcttggtcgctagcgaacatcggtgttggtagagttatttctttttttacacgtaggagaactggagcaggcatggcagaattcctcactagcagaagaccccctggcagaygtggagagatctgagccactatagacacggcagcaggacagggctctggaggagggacctgagcggtagccttggtccactgcagacatcagcaagttcttagatcaggcggggaaccggtccacccactcatgctctggtttagctccctactctgctttctgagagtcagtttggaagggaacctagcggagctcctcagagtctcaggg

SEQ ID NO: 1072 - DNA, 634 bp, Homo sapiens
cagcggcaaggaaggaccctgcgaggccattggagacactgctgtcagatgggatgagcaggccccttctggcagcatctgttgagttagcatcaggctggaccacagagacgatgcctgcaagagctgcaaacgcaggccatcccgccagctctcgtgcaggagatgctagctcctcatcaggctctgagccaagcacatcatctgccttctgcccctcagtttcctagtgtgtaaaatgaggatgttgtgactcttactccatcagtccttaggaggattcagggaggtgaggcataggaagtgctctgcttggtcgctagcgaacatcggtgttggtagagttatttctttttttacacgtaggagaactggagcaggcatggcagaattcctcactagcagaagaccccctggcagacgtggagagatctgagccactatagacayggcagcaggacagggctctggaggagggacctgagcggtagccttggtccactgcagacatcagcaagttcttagatcaggcggggaaccggtccacccactcatgctctggtttagctccctactctgctttctgagagtcagtttggaagggaacctagcggagctcctcagagtctcaggg

SEQ ID NO: 1073 - DNA, 634 bp, Homo sapiens
cagcggcaaggaaggaccctgcgaggccattggagacactgctgtcagatgggatgagcaggccccttctggcagcatctgttgagttagcatcaggctggaccacagagacgatgcctgcaagagctgcaaacgcaggccatcccgccagctctcgtgcaggagatgctagctcctcatcaggctctgagccaagcacatcatctgccttctgcccctcagtttcctagtgtgtaaaatgaggatgttgtgactcttactccatcagtccttaggaggattcagggaggtgaggcataggaagtgctctgcttggtcgctagcgaacatcggtgttggtagagttatttctttttttacacgtaggagaactggagcaggcatggcagaattcctcactagcagaagaccccctggcagacgtggagagatctgagccactatagacacggcagcaggacagggctytggaggagggacctgagcggtagccttggtccactgcagacatcagcaagttcttagatcaggcggggaaccggtccacccactcatgctctggtttagctccctactctgctttctgagagtcagtttggaagggaacctagcggagctcctcagagtctcaggg

SEQ ID NO: 1074 - DNA, 634 bp, Homo sapiens
cagcggcaaggaaggaccctgcgaggccattggagacactgctgtcagatgggatgagcaggccccttctggcagcatctgttgagttagcatcaggctggaccacagagacgatgcctgcaagagctgcaaacgcaggccatcccgccagctctcgtgcaggagatgctagctcctcatcaggctctgagccaagcacatcatctgccttctgcccctcagtttcctagtgtgtaaaatgaggatgttgtgactcttactccatcagtccttaggaggattcagggaggtgaggcataggaagtgctctgcttggtcgctagcgaacatcggtgttggtagagttatttctttttttacacgtaggagaactggagcaggcatggcagaattcctcactagcagaagaccccctggcagacgtggagagatctgagccactatagacacggcagcaggacagggctctggaggagggacctgagcggtagccttggtccactgcagacatcagcaagytcttagatcaggcggggaaccggtccacccactcatgctctggtttagctccctactctgctttctgagagtcagtttggaagggaacctagcggagctcctcagagtctcaggg

SEQ ID NO: 1075 - DNA, 754 bp, Homo sapiens
gccaccacgcctggttaatttctttttgtatttcgttgtagagacgaggtctagctatgttgcccagcctggtctcaaactcatgaccccaaggaatcctccctcctcggcctcccacagtgctagaattacagttgtgagamgccctgcccagcctattttcttaaatccaattatctgaatccagttttcacagacaacaactgtactcagaaaagtctaagagcaatatttttcacttcttcaggtatgttaaggtttactttacagacatggtttttaaaggcaaaatctgctactctcatttatagctataatctcaaagaatatttaagttttaataagttacttactttgctagttccataaaaactagcgcatctctaagagacacaggcatatcactgcttattttattcggtggtggtttttgcagatctacaataagcacaccatcttcttctctaaaaactttcattgaaacagccttgttatttaccattttcaaaaattccactttagcttcctcttcccagccttcattctgtgcaagaaagtaaaattccatagtaattaattgtaagtatcgctaatgttacaatgttctggatttaggtttgtaccaaccacagacgcaactgcgaacaaactgaaccaaccgcagacattaggaaacagccagggcagccgggcgtggtgactcacaaggtcaggagttcaagaccagcctggccaagatggtgaaaccctgtct

SEQ ID NO: 1076 - DNA, 1292 bp, Homo sapiens
aaaataaacaaaaatactgtgacagtggaaatgatatgtgtggctgacaaaattttcttttcactttataccatatgctttgaatattgaaaactttgaacaataaaatatgaatggaatagttctctctctctctctctctctmtatatatatatatatatatttttttttttgtgtgttttttgagacggagtcttgctctgtcactcaggctgtagtgcagtggcatgatctcagctcactgcaacctccgcctcctgggttcaagcaattcatgtgcctcagcctccttagtagctgggattacaggcccatgccaccacgcctggctaatttttgtatttttagtagagatggggtttcatcatgttggccagggtggtctcaaactcctgaccttacgtgatccactggcttcggcctcccaaagtgctgggattacagacatgagccaccttgcccagcccccctctatattcttgaagattaaatctaagtagagcctggaccatagattcctgaaagctccccaggaatttctgaggctagctaggtttggtttaatttgtctgtaaactggaaattccaagaaacgttagatctttaccccacccctctttcaatgaacagatgctggtagtgtttaaatcggcaccaatcttaaagcgggccctcaaggtcaaacaggccatgctgcaactttatgtcctaaagctactaaagttacagaccaagtacctggggcgccaatggaggaaaagcaacatgaaaaccatgtcagccatttaccagaaagtgcgtcaccgcatgaacgatgactgggcttacgggaatggtgagtcttcccaaagctcttgacttcctggagtttcctggggtttagacaaaactaaataaatatttatcactcctcttttggcatgaattgttacatattttagatgaaaaaatatgtgattataggtcaggcgctgatacaccaaactttaaggttatgcctcaaattctagtatgtacccttgtcctatgtaaactatgaaaatccgttttataaaacaagtaaattgagagataattaattgcctttccaaaacattcttttaaatgacagctttctccaaaagatttaaattaaaacaactttttattattacaaagcagttagaaaaaaagatagaaaatacaagtaaacaaacattttactatattatatttatgccatatttgtactatgcagaaattgccaccattaacatcttattgtatattcctccagatctttttctatgca

SEQ ID NO: 1077 - DNA, 1292 bp, Homo sapiens
aaaataaacaaaaatactgtgacagtggaaatgatatgtgtggctgacaaaattttcttttcactttataccatatgctttgaatattgaaaactttgaacaataaaatatgaatggaatagttctctctctctctctctctctatmtatatatatatatatatttttttttttgtgtgttttttgagacggagtcttgctctgtcactcaggctgtagtgcagtggcatgatctcagctcactgcaacctccgcctcctgggttcaagcaattcatgtgcctcagcctccttagtagctgggattacaggcccatgccaccacgcctggctaatttttgtatttttagtagagatggggtttcatcatgttggccagggtggtctcaaactcctgaccttacgtgatccactggcttcggcctcccaaagtgctgggattacagacatgagccaccttgcccagcccccctctatattcttgaagattaaatctaagtagagcctggaccatagattcctgaaagctccccaggaatttctgaggctagctaggtttggtttaatttgtctgtaaactggaaattccaagaaacgttagatctttaccccacccctctttcaatgaacagatgctggtagtgtttaaatcggcaccaatcttaaagcgggccctcaaggtcaaacaggccatgctgcaactttatgtcctaaagctactaaagttacagaccaagtacctggggcgccaatggaggaaaagcaacatgaaaaccatgtcagccatttaccagaaagtgcgtcaccgcatgaacgatgactgggcttacgggaatggtgagtcttcccaaagctcttgacttcctggagtttcctggggtttagacaaaactaaataaatatttatcactcctcttttggcatgaattgttacatattttagatgaaaaaatatgtgattataggtcaggcgctgatacaccaaactttaaggttatgcctcaaattctagtatgtacccttgtcctatgtaaactatgaaaatccgttttataaaacaagtaaattgagagataattaattgcctttccaaaacattcttttaaatgacagctttctccaaaagatttaaattaaaacaactttttattattacaaagcagttagaaaaaaagatagaaaatacaagtaaacaaacattttactatattatatttatgccatatttgtactatgcagaaattgccaccattaacatcttattgtatattcctccagatctttttctatgca

SEQ ID NO: 1078 - DNA, 571 bp, Homo sapiens
gaaacttaaattctcctttctgtgattttttttttggatgatagggatagtatgtacacatatagatgttactgatttagagtattaaagtgaagtttaaagttttatgttcattttcttatatataagatgagttaaacaggcacaccccgtgcctcagaaaaacttgaactcatctttgccttcgacattttgaaaaaaaatattctggcaataaatatttattgaacagctatatgtcagtcgatgcatattacrttccaagccattaagtatatttaagaataaaacattttaaaacgtaatggacctaaatgcgaaaacttcaactctggtcccttatgtaaatcactgggaaaaagacctttatcttacatcaattgcaagataaatgtctttcagtctgagaaaaaaaaccttttaaaagtgagcttccttgaaataatagacttgtctgatttattagtaaaattgatatcaaagtgcctttaaatcacaatagaaaggaattctggagcaattagtttagcaaacattatgccaataaaatttgcattgttgcaaactcttt

SEQ ID NO: 1079 - DNA, 649 bp, Homo sapiens
ctggctaattttttgtatctttagtagagatgggatttcatcatgttagccaggatggtcctgatctcctgacctcaagatctgcctgcctcaacctcccaaagtgctgggattacaggtgtgagctaccgcccagccaaaaacaaaacaaacaaacaaaaaaaacaaaaaaaccctttctaawgactacatctgacttcatagaaaaccagcatgaatattaaaaagacacatttttttagaaaggtagatgaaataaatctggatagatttaactactgtttaaattatcttcagattaaatttgctaacttagcaaattaaatacggacggcaaaaaaaccatttcccattcatggtttcagcaaactgcgtttcctgtttctgacttgaattcctaatttaaaaaaaaaaaaaaaacggctaataaaatattgataaaatgccattctcttctgcaaaagactagaagtaccactcaagaggaatcaaacaatgtttagtacataaggtgaatattaactcatccgatcctaagataaatcctagataccttgccaaaaaatacctgattatatccagagcaaacactgatttggttcttttaacaagtgagtcatgtgtagcaaggtagactttgttgaaacac

SEQ ID NO: 1080 - DNA, 649 bp, Homo sapiens
ctggctaattttttgtatctttagtagagatgggatttcatcatgttagccaggatggtcctgatctcctgacctcaagatctgcctgcctcaacctcccaaagtgctgggattacaggtgtgagctaccgcccagccaaaaacaaaacaaacaaacaaaaaaaacaaaaaaaccctttctaaagactacatctgacttcatagaaaaccagcatgaatattaaaaagacacatttttttagaaaggtagatgaaataaatctggatagatttaactactgtttaaattatcttcagattaaatttgctaacttagcaaattaaatacggacggcaaaaaaaycatttcccattcatggtttcagcaaactgcgtttcctgtttctgacttgaattcctaatttaaaaaaaaaaaaaaaacggctaataaaatattgataaaatgccattctcttctgcaaaagactagaagtaccactcaagaggaatcaaacaatgtttagtacataaggtgaatattaactcatccgatcctaagataaatcctagataccttgccaaaaaatacctgattatatccagagcaaacactgatttggttcttttaacaagtgagtcatgtgtagcaaggtagactttgttgaaacac

SEQ ID NO: 1081 - DNA, 649 bp, Homo sapiens
ctggctaattttttgtatctttagtagagatgggatttcatcatgttagccaggatggtcctgatctcctgacctcaagatctgcctgcctcaacctcccaaagtgctgggattacaggtgtgagctaccgcccagccaaaaacaaaacaaacaaacaaaaaaaacaaaaaaaccctttctaaagactacatctgacttcatagaaaaccagcatgaatattaaaaagacacatttttttagaaaggtagatgaaataaatctggatagatttaactactgtttaaattatcttcagattaaatttgctaacttagcaaattaaatacggacggcaaaaaaaccatttcccattcatggtttcagcaaactgcrtttcctgtttctgacttgaattcctaatttaaaaaaaaaaaaaaaacggctaataaaatattgataaaatgccattctcttctgcaaaagactagaagtaccactcaagaggaatcaaacaatgtttagtacataaggtgaatattaactcatccgatcctaagataaatcctagataccttgccaaaaaatacctgattatatccagagcaaacactgatttggttcttttaacaagtgagtcatgtgtagcaaggtagactttgttgaaacac

SEQ ID NO: 1082 - DNA, 660 bp, Homo sapiens
ttgcaaagggacacttgtggaaatggagctctccagtatctttacaatgatggtagacacctgaacctacacacatgataaaattgtatggagctaaatgtacatacacacacctaygcacatacaatattagtaaaactgggagagttgaataagattggtggatggtatcaatgtcaatatcctggttatgatattgtaaaataattttgcaaaatgttaccattaggggaaatgaattaaaggatagatgggatctctgttttacttcttacaattgcatgtgaatccataatcttaatacaatttcaataaaaataaaattcttaaaaagtaattgctattattgcaagagtaaaatgaaataaaaaatgacttaaaagctattaattttatgtacaaaacaattcatactctaaaatagctatggaggaatagctactcactctaaaatagctatggagaaatagattggcataacaactgctaagagactatgtatgctaaataatttaaagataatggtgctgtggtctgaatgtgtcccccaaatttcatatgttggaaacttaattcccagtgtgacagtattgaaaggtagggcctttgagaagtgattaattcatttgcggattaatttattcatcgttaaatgagtta

SEQ ID NO: 1083 - DNA, 660 bp, Homo sapiens
ttgcaaagggacacttgtggaaatggagctctccagtatctttacaatgatggtagacacctgaacctacacacatgataaaattgtatggagctaaatgtacatacacacacctacgcacatacaatattagtaaaactgggagagttgaataagattggtggatggtatcaatgtcaatatcctggttatgatattgtaaaataattttgcaaaatgttaccattaggggaaatgaattaaaggatagatgggatctctgttttacttcttacaattgcatgtgaatccataatcttaatacaatttcaataaaaataaaattcttaaaaagtaattgctattattgcaagagtaaaatgaaataaaaaatgacttaaaagctattaattttatgtacaaaacaattcatactctaaaatagctatggaggaatagctactcactctaaaatagctatggagaaatagattggcataacaactgctaagagactatgtatgctaaataatttaaagataatggtgctgtggtctgaatgtgtcccccaaatttcatatgttggmaacttaattcccagtgtgacagtattgaaaggtagggcctttgagaagtgattaattcatttgcggattaatttattcatcgttaaatgagtta

SEQ ID NO: 1084 - DNA, 571 bp, Homo sapiens
attttggagtgtttctaaattttcttctcccatgatatagctgttagatggataaatttcttgctttacaaaatggctttttaattatcctaggttagattgatacattttaaaaaattgtgacatctcgcatttttcagcgttaaagtaacttatctctccctcaactttctaagccatccatatgtcccagaatttggtgagctgctaaacaattatccttcaaaaatagwtgatacattgtgggaaataacatcctgttttagtttactataagaaaatcatgagtcaaatgtaatgaatttccctcccaacctaagagccctcataacattctgtccctcagcttccaactttccaaaagagctttcatcagctgattccaaccgactttaattcaatttcaagtaaataaaggattaaagaaaagaatcatgcctccctctaacatgtgtgaactgattatataatctacaaaggatctactaaaattatacagattgtactatccttcatatagaacatttcattagtttataggaaagtgagacttattgaactattggctatg

SEQ ID NO: 1085 - DNA, 571 bp, Homo sapiens
attttggagtgtttctaaattttcttctcccatgatatagctgttagatggataaatttcttgctttacaaaatggctttttaattatcctaggttagattgatacattttaaaaaattgtgacatctcgcatttttcagcgttaaagtaacttatctctccctcaactttctaagccatccatatgtcccagaatttggtgagctgctaaacaattatccttcaaaaatagttgatacattgtgggaaataacatcctgttttagtttactataagaaaatcatgagtcaaatgtaatgaatttccctcccaacctaagagccctcataacattctgtycctcagcttccaactttccaaaagagctttcatcagctgattccaaccgactttaattcaatttcaagtaaataaaggattaaagaaaagaatcatgcctccctctaacatgtgtgaactgattatataatctacaaaggatctactaaaattatacagattgtactatccttcatatagaacatttcattagtttataggaaagtgagacttattgaactattggctatg

SEQ ID NO: 1086 - DNA, 592 bp, Homo sapiens
atagaattgatatatacactaggaatatgccttggaattaaagtatctaacactgaaactgtgaaaacactcataactttctgattcatgtaattggtgacaaatgatactgtacatagctcattatttttgagacctgcagaaggactccacaaaggtgcataatgccttataaaaaatatgttccaatctcatttatctagcccataaataattaaaattactattccccaaaacggattactttgatacagatgcttattatttatacaactgctcacattacctaaatattacattcaatcaaaatgtgttagacatcttaaatatttttataagcaaatgttgtgtaccatgtactggcgtacacttttcagaagaaacctttaaatatttctggcctcttgggaagcttctcttactatagaatcacaaataatatagatttctcagaacaatgttaataaattctccatacctccccacccaggattgtctaaaccataccttcatgttctcctacttaattctgggccaaattccttacctrcaggtatatagagatataaagggagcacaagggaagagttga

SEQ ID NO: 1087 - DNA, 537 bp, Homo sapiens
ttgggttataaaatgtgtaatctttccactgtgttattgatggcagcggtgggccatctggagtggggggtgcctgggaggtggctgcaggggcggctgcaggagcagcaatggcactgatgggtccccgatgccccgtgtccccgaggcagccaactgtgccaccccaacacttccgtggctgggtgggacctgcccccaggcccagagcctcygcagctggagaccctggccccacttcgctactccagtaggaggcgtagctgggtctgtgcttcagggaccggggtgggaagtgagagcagcacccacttcggaccccacccgctgcatagtcactgcacccatcccgccaagggtgctgggttcctgcaccctgggaggaggctctgcacagggccgcccctgaataccggagccatggggggacgttgttcctgccctgctggcctaggcccagagaggaccttaagcccttgccccaggctgcgaggggacactgccgggcctgcacatgccacggagcctgtgggagcc

SEQ ID NO: 1088 - DNA, 1273 bp, Homo sapiens
taatatctttttgctttgaaattagttatgtttcagtgactaaatatgccccccaaacaaatctcatattttattctctagtctattttcttctgggagcgagaagaaataaaactcaggaatatatgagacattttcaaaatacattcaatcaataacattgatttgcacccaaatttaaaattagagttaatgcaatgaaagagagggaaagcaaagttatcaaaccagtaaccaatgttttattgatagttgcttttttggtatgtcgttttatgatttatcagtatatctttattcataatggggattatggtagtattcataattaaatggtttttcctttatatatttgagaaaataatatccaacttagtccaaaatgtttatatattcatagggatagatgattgaaataaagagtttatccaaattatagcaggaagaggactgtgcagtgattcttctctatttgcagcaatatggtaattatattaatgaaataatacaataaatcacaaagttatagcatgatgatctgccagggaatggtgtagaactaaaatgaataccaaacagactcattatgtaaaaaatggagatagctttatgattgtataatgatcttcattataacttttagttgcaaagtattaacasgtaatattttctattactttatgatatttgatacataaatttacttttcttctttcctgataggcagatttactcattttctaggatccataaagtaaacaaaatctccccttaaaaaataaaagaataaacagaaaaaactaaaccctctggtcatgttactcagatgcttcctttcaggaatttatctaggcatacataatggtatttattcaaatattttagctcgataagcaaatactatgtaaatgcaaatactgctatacttgtcatttttctcagaactctaggcacagtctccttagaaacataattaaaatttgcatactcttattaaatgaaactatttgaaggaagtcatttggtggctctcaaaatagaactttgttttcagaaatagtttatgaatgtcatttaacgcatccccaaggcttcaaaaagaaaatgtcaaggaacctcctgcaggatatcttcctaaaattcccatgtgtcatcttggttttgcaaagcatgttttaaaatgaagaacatgactatattcacaattggaaatcaacaacaggacctaggaggatctgcattggataaattgtgtgtgtgcttgtgtttgcaa

SEQ ID NO: 1089 - DNA, 1168 bp, Homo sapiens
tggttactatcactacttctattaatattgtacgagaaatcctacccatttcaataaagaaagaaaaggaccagtcatggtggctcacacctgtaatcccagcactttgggaggccaaggtgggtggatcacctgaggtcaggagttcaagaccagcctggccaacatgatgagaccctatcactactaaaaatacaaaaattagccagctgtggtggcacgcacctgtaatcccaactactaagtgggctgaggcagaagaatcacttgaatccaggagacggaggtttcagtgagcaaagaccatgycactgcactccagcctgagcaacagagtgagactccgtctcaaaaaaaggaagaaagaaagaaaaagaagaaagaaagaaagaaagaaagaaagaaagaaagaaagaaagaaagaaagaagagagggagggagggagggaaggaaggaaggaaggaaaagaaagagagaaagaaagagaaggctgggtacagtggctcatgcttataatcccagcactttgggaggttaaggcaggaggatcacttgagcctaggagtttgagatcagcctgggcaacgcatagaggctctgtctgaaaaaaaaaaaagtaggcaggtgtggtgtcacacacctgttgtatcagctactcgggaggctgaggtgggaggatcatttgagcctgggcgatcaaggctgcactgagccacaattgtgccactgcactccagcctgagcaatagaatgactgcctcaaaagaagaagaaagaggaggaggaggaaagaaagaaaaaaattaagtcttaagtttgggaaaaaaagagaaaaaactttaaatatgtatagacaatattattgggagaagaaggaggaggagaaaagaagaagggaggagggaaggaaggaaggaaagaaggaaggggggagggagggagggagaaagaaagagagagtgagaaagcaagcaagcaagcaagttaaggcttaagtttggggaaaaagagacaaaatgttaaatatgtagagacaacattattgtgtaaatagaaaatccaagttattagaccaagtaaaagagtttagcacaattgctgggtataaagttaacatgcaaataaacttgagtttatttcaactatgtgaagcagtaaacacttgag

SEQ ID NO: 1090 - DNA, 612 bp, Homo sapiens
cttgttgccattcaacttctttcccattctactcgctccctccttccttcacaggtgttgagccctaataaaattttgcacccgaaattctgcttcattatctgtttctggagaacccaacctgtaacattttcccagccagggctgaatacacacacacacacacacacacacacacacacacgtgctctctctgtatatatgtttctgtgtatgtatatatgtatgtatatttttaattacttttctccattcaatagtatactgcctatcaattattagcaaattgtattttcaacctgttggcttatttattctaaatatagccattttcctctaaagagaaatctttgttgccaaaagaattttataatggcaaaatcagtcattttccccactaatcgcaatgtaattttgcccattttgagatgggcaaaaatcatatgttcagaacagtaaggtgagacagaatcagctaatttactgataactgtgggcactasctgaactgacgtatcatgctgctacgcactttagtaccaggctctctggtggccagttctttgcaggataacgtggaataatgcttatgtaaaatatgacttccaagac

SEQ ID NO: 1091 - DNA, 672 bp, Homo sapiens
tagcattattgaaaacataccagacccaagcaaaaaaagtctcccctggcattttgagaagacacacttttttctgccttttaaaaggaaattatcattgcctccctccgtaccctctgagaccctcggaccttgcactgacccttcttcatccagaactacccytctggatggatctagtgaatgggctcccagttgttggcagctgggagagggagagaagcagatcctcagatagtggaatcaccccatcaaacagacaaggctggaacaccttccttctccacagctggctgctgttagtaactattccatgctggcctttgtggtccttgcctgcccttccttataaaaaattctcctgatgggagagtttcctgggacatcagggacacagcatgatgggcccttccctgcatatgccctctatctcccacacatgaggccttggcttcttgcagcctgcctcaagaattcttcagaatgtataaggaacatcgctgcaccccagtttccttttctctaaaatggaggtaagtatatccagcagaagcagccttatatgaagaaagagcacaagctttggactcaggcatgcctgagttgaaatcctaggcctgtttcttagcattgaagtttctatacttcagtttctcatctaaaatataacta

SEQ ID NO: 1092 - DNA, 672 bp, Homo sapiens
tagcattattgaaaacataccagacccaagcaaaaaaagtctcccctggcattttgagaagacacacttttttctgccttttaaaaggaaattatcattgcctccctccgtaccctctgagaccctcggaccttgcactgacccttcttcatccagaactacccctytggatggatctagtgaatgggctcccagttgttggcagctgggagagggagagaagcagatcctcagatagtggaatcaccccatcaaacagacaaggctggaacaccttccttctccacagctggctgctgttagtaactattccatgctggcctttgtggtccttgcctgcccttccttataaaaaattctcctgatgggagagtttcctgggacatcagggacacagcatgatgggcccttccctgcatatgccctctatctcccacacatgaggccttggcttcttgcagcctgcctcaagaattcttcagaatgtataaggaacatcgctgcaccccagtttccttttctctaaaatggaggtaagtatatccagcagaagcagccttatatgaagaaagagcacaagctttggactcaggcatgcctgagttgaaatcctaggcctgtttcttagcattgaagtttctatacttcagtttctcatctaaaatataacta

SEQ ID NO: 1093 - DNA, 1200 bp, Homo sapiens
taagattttaaaatctaagatgcttaagatgttggtggcattgctctttctgaaaagaaagacaaaatactagaccttgctgaaaattggatatcttatttactttgcccatttatgcccgaatggtgtaatgcaagactcaagacttttcaatgtagtatatcaaatgagttgtgcattgattcatttgggggacatgaacaaaaattatcaaccagccagaactgtaatatttaattagttcatctttttctttcattcactctatcacatttgcattagccaaagagataagaacattagtaattcatatgtgtaaacaacccagaagtgaatattaaatcagtgagccaaaaagcaataaacaactcgagcatgggaaatcctgctaacagtggggagtctgatatagaaaaaatatataaaaagcattatcttcaaatatgaaagattaatttgtatctactgtaaatatgtattaccagccttatctgcatttatacacactgtgtgtgtacctcagtgaccttttataaaccggaaaaatggttgatttaataatttgttatgtaaatacaaagttgtctataaattggaaaatttgatgccagatggcttcataatatacaaatgtgttttgtaacatcatgcctttatggattaagtataaatacactggattgtctatgtagaagtgtagcagtttacatttcacctgcatttcaaatggatatttttgtccaaatggttatactaataggaaaagaaaacaacttgaacattttcaatatgaaaaacaaatatggttttgattttaccaaaattcctttccacacccaagaatctgttcagttccatgccraatgttttgcattatgagatttcctaggagattaattgatccacgacagggatctacctaggaaaactctccaactgaattattctttttgagagacaagctacacatgtttcattctaacattaggcaggggaaaagcccagcctcttactgcttcttaacttattcttgtctttgtttccatgtgtcttagaaagcaccacacagatgaatagggtctagcttttgtgagcaaaggtggctacagagtgttgcctcatccttgggctattgacttgggcaacctaggcttcccagcttaggtactgttgatgttttgggccaggtcattttttgtt

SEQ ID NO: 1094 - DNA, 1325 bp, Homo sapiens
cactgactgaccttccgtcatgccacacgcaggtttccaagaaattatgcttatgaccagaattttaacaaactcctagagagaatcattttgaaaaaccaaaatattttataaagcatatatactccctaaatttaagtactgtaaaattacacttgtcatatatcaactttgctttaaagtttgtcttatccaaatgaaaaaggtacaactttcaaaaagggaaggttctaaccactgttcaattaaatttggcctaaagctgcctccacaggtaatgaactgcaccctatcttactatgtaaacaagctgcaacctaacctgcaagtgtattcttggaataagtaactgagtctcagccaatcacagcagccaaactttcagccaatacaggctgcaaactgccaaaacatgtcaaaataaggcaaaagccaagctgtagccagtcagactatttcagtctctcacttctgttttctgtctataaataccacctgctgggtatttatagacagaaaatactgttgctggttagagctctctgaacctttactggttcagatgctgcctaattcatgcattgtttctttactcaaataaatgctgctaaattgaatttgtcaaaagttttccttttaacaccagattctctctctcattatagacaggttatatatatagagagagtgtattagagtgattacatatacatacctacgtatgtatgtatatgtaatcatgctaaatgcttaattctcctcaagatttaggaaccagtatcacagggcagagagtccatcaccttycttttaaaacaaataaatcaataaaaagaatatatgaaatacagttgttactgttcttttctgtgaggaaactaaattggcaaaggtgagcagatataaaaggagaaagagcaggaaattgttaagaagaaaatcactgaatatgcaaatgattctgaaactgcccttaatgattttggagtaaataatccttaagtacaattaaatagcattcaaatatgtcattttatcaaaaaaaaaatgttgtttaaggccaggggtgatgtgggggagcctaaattatttttattatccttcttaaaaagatggaacacctagcatactgttagtagatgaatgataaatgctcaccatttacagaaaatttaaccttggcaaattaataactttatattaatttcagtttaagtttagaagaatgacaaattaaaattaattcacacttaggactatgactaaaagtaaaatgttaattgcattttaatctactctggcctacttcaaaagcataattttaa

SEQ ID NO: 1095 - DNA, 1971 bp, Homo sapiens
atttatggattaggtaggtatcttccatctataaacatgtaatctatctctattcaggtcttttatactcatctaataacactattttatagcttttgtgaacaatacattttaggttcagcactcaagtctcttagttcaaaaaaaacttaatcttcttgcaatcatattgtctacaaatgaatgttttgcctactcctttccaatatctgagaatcttactatttttcctactggctacaataagacttgcagaaacatactgaatagtactggcaatagtgttcattcttgtctaattcatattttttgtgctggagtgcagtggtgcaatcacagctcactgcagccttgacctcctggacccaagggatcctcccacctccgcctcccaagtaactggaactacaggggcaaattaccacacccagctaatttttttttttttcttgtagagacggggtttcatcctgttgcccaggctggtctcgaactcctgagctcaagcaatcttcccgcctcagcctcccaaagggctgagattacaggcctragccaatgcacccagccgcagcctcttattcatatctaatagatttgctgaaacacttctccattaagtaggttttctatgagcaaacttcatcaagttaagggtatctctttccctgctcacttttatatatgcatgagcaagaatatcatcaaatgccttttggcatctattgagataaacataatattttctctcctatatagattttgaaaagtatattgagagattttctaattttgaatcaatcttccattcctggtaaaagtcctttttagtcacaatacatttttatttattgtaaacacaacagaaatgtcttttctcatagctgtggaggctacaagtctgaaatccaggtgtcagcagggctctgctccctctgcaggctctagggaacaatccttctttgcctcttctagtttctggtggttgctgttgatacatttatttttgattttttttctgtatttataagtgaaaatactctatatgtaccttttataagaaaaatacataccaaaaaaggtactatacatacatatttttgcattatctacttaaaaatgcacaggtaaagatatgcttaattttatattttaaaaaagcctggtatgcaaattgaatgcgtgcaaagcaaacaaatggaatatgttttaacctctacttattgagttccctatttggattactgctgccatcattaatccagccactcaactccagcaagaatcactgaagtctccattccttcctccccacactatccccgtccaggcattcaccaggtcccaaacattctaaggtcattctacctcaggtctccactgggaggctgcaggatggaatgggggaagtcaggattttaagacagatttggttccaatcccattgcacatgactgcattctcttgagcaaataactttacctctctgggccccaatttcttcatctataaatatacatgctaccattgaagaactgtggtaaaagtcaaatgagataacatatgtaaattaactaccacaccatatttgccacggaacgcacgatcacatggtaacaccaagaacctccccaatcctcctcttcccctcggcccctgccctaggccaggccttccaaacttcacctgctcaatgatgtcttctagtctttctgccacctggacattgctgacaaagctcactttctaaaatataaatggaatcaaatacctgtttaaatcatgctactggctcccatctacctactagataccgttctaactccttagcatgacttgtaaggcctacctcaacctacctttctggccttatcttcctctactctgttccatgtactttacactcctgtatagatgctcctcaacttacaatggggttagtcccaataaactcattgttggttgaaaata

SEQ ID NO: 1096 - DNA, 619 bp, Homo sapiens
atgattgtacatcattaggaatgtgctaaatgccactgaattatatactttaaaatgattagaatggtgaattttatagtatatggattttaccataataaaaaatgcaccttgttttgttggggaaaaaaaaaaacaactaatgcttgctttctgtctcttcttcctggatgaggtcatccatacctacagctgctgcttcttttttttttttttagacagtctcattctgtcacccaggctggagtgcagtggcgtgatctcggctcactgcaactgcctcccaggttcaagcgattctacagcctcggcctcctgagtagctgagactgcaggcgtaaatcaccatgcccggccatctttgtatttgtagtagagtcagggtttcaccrtgttggccagactggtctcaaacttccgacctcaagtgatctgcctgccttggcctcccaaagtgctgggattacaggtgcccacagcttctttttatcacatggacactaggactcagatctgtttctcaagcccatccatctgtcctgaactctaggtcatggtcttcaaagactagacatctccaaaagggtatcccacagatccctccaactcttcatgtgaa

SEQ ID NO: 1097 - DNA, 1938 bp, Homo sapiens
aagggggcctctctgtcctcccctagtatcttccctcccagccctgagaagtctggaactccacaaatctgctggctctggaaagtgagggatggggagagaaggcagtaggttgccatggtgatggcagccaatcagagatcctctgctgctaggggaggagcaagttcggtctgagtccccctcactgactgtgaaggagggtggagctggaacagggggagaaagagacaggacatcactgcctgacagcagagaccaaggtcggggagaagggtcatggggarggtggctctatttctaggattacctagtttccatttggtactaggttgtgatggttacacacacacacacacacacacactcagtacatctcacaactgccctgtgagaaagggattacccaccccatttataaaagaaacagactccaataggaaaggtaacctcaaacagcctacctgttatgcagcgaggcctggatttgaactctggggaacgggatgcgggagacactggcgagagagtgagtaaggtaagcagggtagagccacggccccaaagacctactgggtgggagagtccctgggacttccctgagatggcataaagcaatatgttgataaaacaagaaacacagaaatggtaagaaaatgtaccaaacaccaagtccatagaacaaagggcgaggagagaccaaaatcagaaaagaaatcagcaaggtcaaaactaggaggctcagaaggacaggatggcgatcagggagcaggtggaggggaaggcgaggtgggcgctctgttcctcacaccgcaatatggaaagcccctgtgagccttgttgagaaatgtgggctggccctggacctgccaagtcaactttgggttagacctgttgcttgtgatcaatctacccaaatgctggactttagccaaaggggcatgggcccacaacgcccctctgcagacaccacctctcacagcccaagttgcactacagcaacaatactaggatggagtgtgtgtggccattccctgaatccccacgcattgcctggctgcaccatgcggacccgattcctatatctctgcccaggaatcccagggcagccactgcttggtgacttgactcaccatataataactcacactcacagcctctcaggcacaaaggaaggggcccctgcccttctcagaggtagttctatcataggaccagctgggaagtcaccctggggaccctcatggagcctgggatctcttcccaaccctcagaaaaagtggacctagtctcacatgggaattcagaatatctaatccatacatgcatgtctcttccactcacaccaatgtggtttgtaaaaactatagaacatcaatgggaatttatcaatgggaaattgcagtttgtgggattttcttctgtagaatttgttgaattgaacattatcagttattgacttgaaacaagtaaaaacatgtttgcactatgtcattttaaaaatgtgaactcttatttcacctgaagagtggctgtcctgactcacatgctctggagtcactagtggcttagattttccttcaacaaattaaaacacaaatcaattcaatcgatttgaatccaagcaaagctggattgctagagctgtttgtttatgtccctgattagatttgttaactaaattgtaatggtggttaatatttataaccacaacatatgatgtttataaaagcaatatttatcaagtgagctaaaacctgtaaatcacttagaacattgcctggcacaaagtatgggctcagtaaatgttagctattattatgatgtcattaaatacaagagcagactgtgaatgagtcttaggtttgcaagtaacagaagcacattccaagattgtttatttaaaaaaaaaaaagacaatttatattaaaatctaag

SEQ ID NO: 1098 - DNA, 588 bp, Homo sapiens
aggatgttttaaaggaaggttcattttatttttcctgattgtagactgtcctgtaatttagagaaaaaacagtggagaagacttttgttttcgtcgttgcatgagtacctgatggcaagagccttgggcatccccattgtgctcgttcgtcacctcattcagcattattattattattatttttatttcgtttttkttttttttgttttttgttgttgttgtttgttttttgagatggaggcttgctctgtcacccaggctggagtgcagtggcacaatttcggttcactacaacctctgcctcccaggttcaagcgattctcctgccgcagcctcccaagtagctgggactacaggtacctgccaccacgcctggctaatttttgtatttttagtagagatggggtttcaccatctatagaacttctgacctcaggtgatccacccacttcagcctcccaaagtgctgggattacaggtgtgagccaccgcacccagcctcagcattattcttttccagtaattctcaataggggggaagtgtgttccctcaatcagggggaatttggaaatttctgtgctgtttga

SEQ ID NO: 1099 - DNA, 588 bp, Homo sapiens
aggatgttttaaaggaaggttcattttatttttcctgattgtagactgtcctgtaatttagagaaaaaacagtggagaagacttttgttttcgtcgttgcatgagtacctgatggcaagagccttgggcatccccattgtgctcgttcgtcacctcattcagcattattattattattatttttatttcgttttttttttttttgtttkttgttgttgttgtttgttttttgagatggaggcttgctctgtcacccaggctggagtgcagtggcacaatttcggttcactacaacctctgcctcccaggttcaagcgattctcctgccgcagcctcccaagtagctgggactacaggtacctgccaccacgcctggctaatttttgtatttttagtagagatggggtttcaccatctatagaacttctgacctcaggtgatccacccacttcagcctcccaaagtgctgggattacaggtgtgagccaccgcacccagcctcagcattattcttttccagtaattctcaataggggggaagtgtgttccctcaatcagggggaatttggaaatttctgtgctgtttga

SEQ ID NO: 1100 - DNA, 555 bp, Homo sapiens
gtaaacttttgatgaaaatcctgtgattggctttacattccgggccttgaaatcacggtactgaacatggaataaatgaacccttagtagaggacttgctcaagaagaaagtggtttctggtgattggtatctaggaataggagttcatggtaactgtttccagctttatcagtcactggacagaaacccttggaaataaaggtggttcttcctctatatgatggtggtttgtaactttttatgaatccagttttgtaaaagtcctaatggggacaaatattctttgaaatacagaattatatattaccctkaattcactgtattaagtctcttaaaactaaccttacatacacttttttctaacactaaaatctgggatgtaaatgtgttctgaaatatgggctgcagtttccatgaagagataaaaaaattcacatcttcaaagatatgccatctgcaataaaaatcacaaggtcaccacatttaggaatgcaatgctactgtaatttcagttaaaggaggaaaataatatagccattctttctcatggtgct

SEQ ID NO: 1101 - DNA, 3146 bp, Homo sapiens
ttagagctgatagtacactggtaggattggtgtagtcatgccatttgttaagatattaaaatgcttctatactgattggtaaatagtttccaccataagacccttgagtggctactcactcattctattgctgccacctggctattgagattaggagaattttaatgcttctaaaaccttttaatcactgaagcatgcacatactgaaaattaattttggcatgctgtgactattcattctactacataggctattttaaaaagcatttatgagttctttttttatttaattcatctcctctacctttataacctttaaaaaataatcctcagattaaagcatctatttccccattaaaaattgaatcttgctcttacatagcatttcctctggtatgaagaggcatgtaaataaaaagtaatctaacattgtatcagaaaaggagatttatgtctagtggtggaaatagtccataaatcgtgtaaaagagaaggcaaggaaagaggggcattggggaggtgtgggttgtgggcactatagggattattgtaatctcagtgggttattttaatatagcaggtgtcaaaagaccaatgtagtggaagcaggaactcaaattctgttccagatttctaatgggaaagggtgattttctttgcttggctttaattaagttgtgccatatattttccttcaaaataacatttcctggaacatcttactaaatattcatagacacatttaatacttatttgcattatgtttatcaatattgcagtcttcttttgaatacatgtgtatttctacagtctaacattgtggcttccccaaatatgcagctttattttagacaatttttaaaacaatttgtatgtgaatatatgtttgtatatgtgtataataggcaaacagaagtgcaaataatactcattcagaattttactttttctatgacaataaacagcttttcaggttttatagaaggatttacatatataataattaaatatggtataaaattaaaatggaatctgataccaaaattttagaaataggctattcacttactattacttttgttgtaaatatgcaatacaatttaaaatgttaataaaactcacttattgtgataatttagatttttttgttagtgcatatatgagacaaccactcccatgatcattctrtgggttaaaaaccaagcatttaggatctggcagcatgtacttgattctgagctctaccttccaagttgcacaaggattttaacttttctgagcctcatttcttttatctgttgagttaggaaatataatatctaccttctggggttttcatgaggattgattgacatgatgcatgtaaagtgcttcaaatggcccctgcaacataaatgctagctattattttcctcactgtaataaatcaaaatatttttttcttgtaatgctaattactacaaagcattccaaagaatgtggtctggtttcatttagtccctagtaaaattacttacccaaggcaaagaaaataacattttgttttagtcaacgtttataatgcgtgactttattttagagctatgaattcattgttcccccattgcacatgctttattttgattcaagtaggaaacatgtgcaatcgtgtcccatgacttgtttatttagcaagataatttatcaatatttttgaggagcggtcattgacttcaatctctttgaaatactgactgaactaggatctcctgctgagtatatgtggaaataactgttgataaaatggcatttaaaatgaggaataaaaggataaaaaaattatacaacttgtgtagtcagtagggtggagtggatgtggctaaagattcataatagtgcttctctctaagccaacagtcttcttgaggctccagaaatattctacatttttgtttttgtcatcactgcttctaccagccttgtcctttttctttagtcacttactaagctattgtacaactgagagggaaaacagaatattgatcttatttatttggatgatgattattgaaagggaaggaacacagatcaagactattaataagagagagaagactgaagaggaataagaatctttgccatttctaagaaatgtgttgcaggaaaccagaagaggttaatgcccacccacccaccagggagcagggacaagaattctcttacatctcagcatacccaagacctcctccaagatttttcctgtgctcattaggaatagaaggacctagtactattcaagtaggaaagatcagatattgtgataaacagcaaaagagggtatctagattttgtagtcgtaaatcaacctttttcaaagagattatttgaaaggattatcaacagcctgtatttgaaagagctcaccatatttttccagctaaatatatgtgatctcttgacatgtcatggattttacctggaaactaaagtattacggatcctattatgttatgattcttaacttttagaatgagtgatataaattcccactaattatgaacgtactgatttttatcacaatttgaagtatgaaaatataaatgctttgacttgttgaaagttttaaaattacaaaaatatagatcaagattctttttcaccgtatttgaaacaaaaaactaataatttctcaaattgttgactattggaaatattttgaaaatattatccacattatcaattaagaagtgtcctacatttccaacaagatataatccttattggctttccagacatccttagagaaacagtgtactagattcagtgtttaaaatgtgtttccaataatagaattcctactatatacttttacaagcatattaaatttgaaagtgttttatattttcagagtggttcatacatgtaattttgttccattctgaaactggaaaagtgttaagtgagtaaaataagttttattatccctaaggaaaaaatactataaaaacaaaaagagaagagattataaggcttacttgtggttttccaattcattagtaacaaaaaaaaatgtgatttttcccttttcctctctgttgtttttttctttagaacttgaattttccttttttttttttttaattctagaccctttgcaaccaatgaca

SEQ ID NO: 1102 - DNA, 3146 bp, Homo sapiens
ttagagctgatagtacactggtaggattggtgtagtcatgccatttgttaagatattaaaatgcttctatactgattggtaaatagtttccaccataagacccttgagtggctactcactcattctattgctgccacctggctattgagattaggagaattttaatgcttctaaaaccttttaatcactgaagcatgcacatactgaaaattaattttggcatgctgtgactattcattctactacataggctattttaaaaagcatttatgagttctttttttatttaattcatctcctctacctttataacctttaaaaaataatcctcagattaaagcatctatttccccattaaaaattgaatcttgctcttacatagcatttcctctggtatgaagaggcatgtaaataaaaagtaatctaacattgtatcagaaaaggagatttatgtctagtggtggaaatagtccataaatcgtgtaaaagagaaggcaaggaaagaggggcattggggaggtgtgggttgtgggcactatagggattattgtaatctcagtgggttattttaatatagcaggtgtcaaaagaccaatgtagtggaagcaggaactcaaattctgttccagatttctaatgggaaagggtgattttctttgcttggctttaattaagttgtgccatatattttccttcaaaataacatttcctggaacatcttactaaatattcatagacacatttaatacttatttgcattatgtttatcaatattgcagtcttcttttgaatacatgtgtatttctacagtctaacattgtggcttccccaaatatgcagctttattttagacaatttttaaaacaatttgtatgtgaatatatgtttgtatatgtgtataataggcaaacagaagtgcaaataatactcattcagaattttactttttctatgacaataaacagcttttcaggttttatagaaggatttacatatataataattaaatatggtataaaattaaaatggaatctgataccaaaattttagaaataggctattcacttactattacttttgttgtaaatatgcaatacaatttaaaatgttaataaaactcacttattgtgataatttagatttttttgttagtgcatatatgagacaaccactcccatgatcattctgtgggtyaaaaaccaagcatttaggatctggcagcatgtacttgattctgagctctaccttccaagttgcacaaggattttaacttttctgagcctcatttcttttatctgttgagttaggaaatataatatctaccttctggggttttcatgaggattgattgacatgatgcatgtaaagtgcttcaaatggcccctgcaacataaatgctagctattattttcctcactgtaataaatcaaaatatttttttcttgtaatgctaattactacaaagcattccaaagaatgtggtctggtttcatttagtccctagtaaaattacttacccaaggcaaagaaaataacattttgttttagtcaacgtttataatgcgtgactttattttagagctatgaattcattgttcccccattgcacatgctttattttgattcaagtaggaaacatgtgcaatcgtgtcccatgacttgtttatttagcaagataatttatcaatatttttgaggagcggtcattgacttcaatctctttgaaatactgactgaactaggatctcctgctgagtatatgtggaaataactgttgataaaatggcatttaaaatgaggaataaaaggataaaaaaattatacaacttgtgtagtcagtagggtggagtggatgtggctaaagattcataatagtgcttctctctaagccaacagtcttcttgaggctccagaaatattctacatttttgtttttgtcatcactgcttctaccagccttgtcctttttctttagtcacttactaagctattgtacaactgagagggaaaacagaatattgatcttatttatttggatgatgattattgaaagggaaggaacacagatcaagactattaataagagagagaagactgaagaggaataagaatctttgccatttctaagaaatgtgttgcaggaaaccagaagaggttaatgcccacccacccaccagggagcagggacaagaattctcttacatctcagcatacccaagacctcctccaagatttttcctgtgctcattaggaatagaaggacctagtactattcaagtaggaaagatcagatattgtgataaacagcaaaagagggtatctagattttgtagtcgtaaatcaacctttttcaaagagattatttgaaaggattatcaacagcctgtatttgaaagagctcaccatatttttccagctaaatatatgtgatctcttgacatgtcatggattttacctggaaactaaagtattacggatcctattatgttatgattcttaacttttagaatgagtgatataaattcccactaattatgaacgtactgatttttatcacaatttgaagtatgaaaatataaatgctttgacttgttgaaagttttaaaattacaaaaatatagatcaagattctttttcaccgtatttgaaacaaaaaactaataatttctcaaattgttgactattggaaatattttgaaaatattatccacattatcaattaagaagtgtcctacatttccaacaagatataatccttattggctttccagacatccttagagaaacagtgtactagattcagtgtttaaaatgtgtttccaataatagaattcctactatatacttttacaagcatattaaatttgaaagtgttttatattttcagagtggttcatacatgtaattttgttccattctgaaactggaaaagtgttaagtgagtaaaataagttttattatccctaaggaaaaaatactataaaaacaaaaagagaagagattataaggcttacttgtggttttccaattcattagtaacaaaaaaaaatgtgatttttcccttttcctctctgttgtttttttctttagaacttgaattttccttttttttttttttaattctagaccctttgcaaccaatgaca

SEQ ID NO: 1103 - DNA, 1179 bp, Homo sapiens
cagaacctgctcaaaacatgcatgttggtgagtagtccctccttcatagcggacttcatggccaccaccatttcttgctgtccccagccattcctactaccatctgccaaaagggaagaaagagaagttgttcacagatatcatcacttgcccagcaactcagactccccaccaaataaggcagccaagacagctcctgccctgtgactgaattaaagagaagaatttaaagaaaaaaaaatttctcctagatggcaagacccacaatgctctggggccacatctaattaacttacagcctctgatgtcaacagcttccaaggctggtgtagtacattcgcaaacacattccagaagagtcaacgtgatctggtgttgacacaggcccataactctcagaggcagtagttttcaatttatggatgccgtaaagctttggcaatatgattgctacaatgtgtagtgtgtttttgacaataagcaggaggtagggggttggggagtatcagctccacatttgactatggttgtgggctcataacagaaaacctgtagtgatttctgcagttgcaaagcagctacaataatggctgcaaacaatgaacctaggaatgttatgtggttctttactagcaaactctggacttctacatcagctcaaaggtacattagtcattcaacaagcatgtattaccacctaccctttgccaggtacatagtgcagaataggtacagagtacagtgggaacaggaaaatggatggtaggtttacctccaaaggattcagtaaatgccaggtctccttacttcaagaaccctcctaagaagaaccatgatggaaggaaaaaagaaggagaagggcagtgaacacagctgccatcagccttttcttctatcctgacaagatgtgtgtgtccttagatgcaggtgtgtgagatttgttcatgtgggcagcaataggaggagtgactttttcatggtctaagacccagatataatactagacttgattattgaccaaaataaaacatcaacaaaactttcttcatttgttatcacttactggcctcaaggccaatatttggatgtactcagagtytggagctcaagagtctaaataatacagtcccaagctagagcataagagtgtgtgtgtgtgtgtgtgtgtgtgtgtgtgtg

SEQ ID NO: 1104 - DNA, 561 bp, Homo sapiens
ctgtatatatttaatgtgtacagttttgacatatgtatacacctgtgaaaccatcaccccagtcagaataatatcattcccaaaagtctgagtactttttgtcactttagcctctcactgcttcagtgttgccctctggctacccaaatgtcccttctgtacagtaccacagagtgaaattattccttctttctcagtccaaactgctggtctctaagtgctactgatctcaagtagctattgcttwatttaaagtaatttgttagaggatataaattcttagagcaggggagggcatatgtatgattcattcggaaaaccctaagtaatgagggttttttggagatgaagtctcactctgttgcccaggctggagtgcagtggcgtgatctcggctcactgcaacctctgcctcccgggttcaagcgattctcctgtctcagcctcctgagtagctgggattacttacaggcgtgcaccaccatgcctggctaattttttgtatttttagtagagacagggtttcaccagttggccaggctggtctcaaactcctgacct

SEQ ID NO: 1105 - DNA, 1262 bp, Homo sapiens
tatctcattgagcttcttggagcctgtgaattttcttttcagatctcccactcagaaatcaagggccttctttttcttttacaaccattaataggagagttgagattgcattacccattgagtactgaggcatagatgggtgatctctaagacgaatgagtcagcattaaatcgtcttgttgatacataataatagactcctttgcctggcagccaaagacctcctccagtgctgtccaaaactacttatgaatcttacttctagcccctctgcttcatctactctgtgctccaacctcatttcactgtattctttgtccccaccctttcccacctctgtgcttttactctctagttcagtcagttgccttgattgcctttcttttttttttttctttttctttttttttttttttttgagacagggtctcactctgttgcccaggctggagtgcagtggtgcgacctcggctcactgcaacctccacctcccaggtttaagcaattctttttctcagcctcctgagtagctgggactacagtcacataccaacacgcctggctaatttttgtatttttagtagagatggggtttcaccatattggtcaggctggtctcaaactcctgacctcaggtgatccacctgcctcagcctcccaaagtgctgggattacaggcatgagccactgcgcccggccaccttgattgcctttctccccaatcctcatctcacattctcsacccagccttcaatccagctcagatttcatatgtgctgtgaagcctgcctcaattctccttccccaactggaagtcatctttcctcttctgaccatttgatgctctttattaaattcagaaaatctgtctttgcaaggatgtacacagcaacatcgttataatagcaaaaagtaggaaacaacataaatgcccatcaatggggtatcagttaagtaaattattgtgctctggtatactgtggagaacaatgcagctattaaccatggcgatatatatctatatgtttactgatttggaaagatgactactaccgattgataagtgcaaaaatagggatgattctatctttaaaaacaaaggtaatttaaatatcaccttctatattcaatggctgaagtctacctccctcctttttacttgcccaagctctgaccccagaagtggcctaatgtttctgaaagttctcaaagggtgaggagggaggatcccatatgctcacagctgcagtccctattatgca

SEQ ID NO: 1106 - DNA, 605 bp, Homo sapiens
ctctctggggacagtcctgtggacagtcttccaccatcccctcattgatgactccctcctccgtacagtgtgacagctgggcaagacagctgaagtaatttccatagggttgtcaactgagcctgggatagatgggaagatggtttcgacatgaaggggacaaacctgactccctgccacagatgggcagagggactacacagagcatgtgatggccataatgaggcagcagaactctgggctccacccgcagtccaaggagggcccaacagagacagttgtggggtactgggactttcttgccactctctggacatcagctagggttccttagttacaaataatggaaactaaatatgttaaatttaaaaaaaaamaaacagaatttactgaaaggatacaggccagctcacaacatcataagaaatgctgaatccctttgtcttagaaagggcaggaagaagggaaggtcttgggatcaaggtaacagggcatacagtacagtttaccccttcaggacattttctgtccagtatcaagccgttcaagattcctagtgaaagctgggcccggtggttcatgcctgtaatcccagcactttggga

SEQ ID NO: 1107 - DNA, 1250 bp, Homo sapiens
atttaattccaatcatgagaaaacatcagacatgcccaaatagagggacaccgttcaaaagtgtcaaggtcatgtaagacaaggagagactaagggactgacagattagaggaaacaaaggagaaatcacaaatgcaatttgggatcttggatgagatcctgaaagaacaaaaagacataggaggaaaactagtgaattcaagtaggatctgctgtttagttaaaagcattgtactggtattaattttttggtcttgatcattgtattatggttatttgagttgtcacaagtaggggtgaagagaataatctgtgctatttttgcaacttttctgtaagtctaaaattggttcaatggaaaaagttaaacacaaaggttattttagttagcgggagtgaaggggttgagggttgctggagaggaaaccagcggtacaggtggggctggatccacaggcaaggagtgtgggtctgctttgagggtgaagacgcaccacaggagggcgccacatctggcaatgatgccacctgatcagtgtcttaggaggtcgctctgtggagaatgggatgtagagaggaaaagaaaaggcaaggagactagtgagaaggctgctggggttgtcttgacctagagacaaagagaggcaaycagattttgtatatatttttgggatataggtgacagaactcagtggtggattggttgtagaacgggactgaaagagaatagtaaaggatggtgtattaatctgttttctccagaaaaacaggacagtagtgtacagtagtctccctttatccatggtttcactttctgcagtttcagtcattcatggtcaatcacgatctgaatacattaaatgaaatatcccagaagcaaacaatttgtacattttaaattgcatatttctctacatagtgtgatgaaatcttgcacggtctgctccatcatccccaggacatgaatgatccctttgtctagcacctccatgctgtgtgtgctgctctcctgctgggtcccttagtagccatctcagttctcccattgacggttggggcattgcagtgcttgtgttcaggtcacccttattttgcttaataatggccccaaagcacaagagtactgtgcctaatttataaattgaactttatcattggtatgtatatgtgtatggtatgtatggaaaaaacatagcatatgtagggttcgatagatctgcagtttcaggtacccactcggggtcttggaa

SEQ ID NO: 1108 - DNA, 1062 bp, Homo sapiens
agaatgcactgctttgcctgggatgaggaataatttataatggtaactgttgctggttaaaatttggctcctacccacattcatgcaaactcagcattctagattaaaagagatttaagagacttgccaagcaaatgcatggcatccttagatgtatcctgatttgaataaaacagctataaataataatattttggggattattgaaaaatttgactatagattagttttcaggtgatattggagaattaatgttattattgttaggtatgttagcatggtcatgcagcaatgtgtctttctttttaagagatgcatacaaaaatatttgggtgtgaaatgttcttgtsctataatttgctttaaaattcttcagaaaaaaaaagataagcaaaatagaaaaacaagataatgggtacatgttatctatttcttattctccctatttttttgtgtgttcaatttttaaaagaaatttactccatacatatatcccaccccctccactaaggaccctcaaactataaattgctgtgaatataagaaaaagtgaaacaattctatgattttgagagaaagtcaacactgtaggaaaaagagagcccaggatttgggctaaaaatcattaatctgaccctgatcaaccctgtggccttcagcagtaactcagcctctcaggcctttgatttgttgatgtgtaaaatgagggtcattgtcatttagacaacgaccttcagggtatgttttaatgttaaaattcagagtccttccatatcagataagcatcaactattcaatagtttatgctgaagagtacaggggaccaagagaccacccaaatgggttcatgagcccatcatgccacttctttgttggatcactttgggcacctcactaaatttttctgagctaggtcctctgcaccttgcttgtctatcatcaaagggtcactgtgagactataataatataagaggaaagaaatcgtgattattaaggcatatactgaaccacatacctccattggcaacattaaacttcactccaaactctccccctggtc

SEQ ID NO: 1109 - DNA, 1062 bp, Homo sapiens
agaatgcactgctttgcctgggatgaggaataatttataatggtaactgttgctggttaaaatttggctcctacccacattcatgcaaactcagcattctagattaaaagagatttaagagacttgccaagcaaatgcatggcatccttagatgtatcctgatttgaataaaacagctataaataataatattttggggattattgaaaaatttgactatagattagttttcaggtgatattggagaattaatgttattattgttaggtatgttagcatggtcatgcagcaatgtgtctttctttttaagagatgcatacaaaaatatttgggtgtgaaatgttcttgtcctataatttgctttaaaattcttcagaaaaaaaaagataagcaaaatagaaaaacaagataatgggtacatgttatctatttcttattctccctatttttttgtgtgttcaatttttaaaagaaatttactccatacatatatsccaccccctccactaaggaccctcaaactataaattgctgtgaatataagaaaaagtgaaacaattctatgattttgagagaaagtcaacactgtaggaaaaagagagcccaggatttgggctaaaaatcattaatctgaccctgatcaaccctgtggccttcagcagtaactcagcctctcaggcctttgatttgttgatgtgtaaaatgagggtcattgtcatttagacaacgaccttcagggtatgttttaatgttaaaattcagagtccttccatatcagataagcatcaactattcaatagtttatgctgaagagtacaggggaccaagagaccacccaaatgggttcatgagcccatcatgccacttctttgttggatcactttgggcacctcactaaatttttctgagctaggtcctctgcaccttgcttgtctatcatcaaagggtcactgtgagactataataatataagaggaaagaaatcgtgattattaaggcatatactgaaccacatacctccattggcaacattaaacttcactccaaactctccccctggtc

SEQ ID NO: 1110 - DNA, 576 bp, Homo sapiens
ttttactttatgaattggaaaaattaaatttgcatgtagtttgtaaaaaaaaaataaagaaagaaagaaaaaagaaattgattgagattatttcagcagccagaagtgtgggacaggcagggcagttattcctccttctcagtttggaaactgaagctcagagagtaaacttgtcagtgacacagttattcaagaagttgtcttcagttgagagatacgtttttcacctgtagcttctggtattggaacagtacctttttagactaaacaaattacggttaaaattataarggtattttcggagtacctggaaaaaatcagcattttgcttttctagttccatttagtaggaagacaggaaagtttggtatacctgaattacatgtgagttatttctatttttctaaaaattcttataaattgtgtaaggtaaaaatgactacttcttgttttatggtaaatatagttatatcctttcaagccactgctgtacaaagttgtgaaatctccctgaggctttttccctcatgtcagcttcaggtatccagtatcacttatgcttgataatgattgtat

SEQ ID NO: 1111 - DNA, 520 bp, Homo sapiens
aaatccagagctgtttcaccagtagacttgcctgaatatcctgtctgactgagtatggatcagaaagaaaagaaggggtgatgggaaacgagcctarattgactagagaaacctagaaatagaaaaatcgggaaggcaaagtgatttgaatgataatgccatatattcagttgtccctggtggccagatattatagtatagatattatacaggcaaagaagaacagagggatagagtgtgaaggtacagattttgagtttaagcacattagggggcttagtgttctggatgaagaaaacctataaaagttattgtatgttaggtattgtttgcaaaaaagtagaaaatggagaaataacccagtgggttaaagaagaaacagactaaataaacaaacctgagtaagttgttcctaaattttattttagagacaattcctcattttgctttagttttctcaattattgcctcacttttctgtttctttctgtgtcagcatacatggaaaaaggagttaatt

SEQ ID NO: 1112 - DNA, 520 bp, Homo sapiens
aaatccagagctgtttcaccagtagacttgcctgaatatcctgtctgactgagtatggatcagaaagaaaagaaggggtgatgggaaacgagcctaaattgactagagaaacctagaaatagaaaaatcgggaaggcaaagtgatttgaatgataatgccatatattcagttgtccctggtggccagatattatagtatagatattatacaggcaaagaagaacagagggatagagtgtgaaggtacagattttgagtttaagcacattagggggcttagtgttctggatgaagaaaacctataaaagttattgtatgttaggtattgtttgcaaaaaagtagaaaatggagaaataacccagtgggttaaagaagaaacagactaaataaacaaacctgagtaagttgttcctaaattttattttagagacaattcctcattttgctttagttttctcaattattgcctcacttttctgtttctttctgtgtcagcatacatggaaraaggagttaatt

SEQ ID NO: 1113 - DNA, 1193 bp, Homo sapiens
tgcatcttttctatatatgtatcacgataggctatagcatgtttatgactctggtttctttctcttcaggtggttttataccattactgttaatgttattttaacttggcatgtataacattgccatatagagtagagtagaaagttgcaaattttgatagtttacagagttaaacactaaacatatccaaagtccatttagagttttgggtgttgtattttgccatttttgtgatgtgtggccttttattctgtaatctcttctaaataaaacattgaacatccagcaaacataaaacctgcctcatttgaaaaggaatttcaaaattccaattaataggattctctagagagttttgtactttaatatttgtcagtgtagtgtcaactctgttaccaaggtagcttcttggtaaatccagtagctactcaatgctatttgtactgaataaagcaattattaacatgatacttcccactattgattaatgcaatattgatatatttggcgttgtggtagctgttgcagaatgaatagtgtaatgaccataagattgcttggaaaattgtaatacagatatccacaatgaattctttccaaaatttttttttccgatgataaaagtagtagatgtttattataaaatccaaggtgattgattccttagagactgaccacaaacccacattagggataattgagtctgagtgcccaagctatataacgttatgtagtttaagcaagttattgtttgtcttaatttcagttaactgcattttaaaattgttgttataaactatttgagctttaagaaaggtgctatttaagaaaggatttctaataacagttaaatattttttttaagtccatgctaagtaaaaattcttacatgttgtctgatcccagagctttatctactaaaaattatacataaggatttycaaatcttagagtttcaaaaagtaaccatagggaaaaaaattgtagtaatttctataggcaatattctgtttgggttatcaaaagagcaactccatgctccgcattatttatagtccttattttaaagttttattagctctctttacagaacagatgtgaaggagttgagaggacaatcaactagattttatttttagaatataaagaacatttttaaaatgattaaacagcattaactgtacctcaggat

SEQ ID NO: 1114 - DNA, 593 bp, Homo sapiens
aaaattgaaaggggggaaatcgtaggatacaataaattcgtcttcaaaggttttagcctgttaagtacaatgagttttgagatcctctccaaagaaccaatgtatcagtatattcagctcccctattctttgttcttcattttaaagtttaacttccttgttctttacatctccttgcccctagtttcagtaaacaactacctcctagcccctaccacctgctctgaccttagtcatccttggtcacctgctctgttcttagtcatcctgagtcacctgttctgtaaccrtccttcccaccaaactactcaccctgacactctggctcgtacccctgctctctttaaaacagccaatcagaattagcttagactgtgcagtccaaccctagccaataggggaatgacacagcagtagggactacctgtgtcagggctaagaaccccttcccctcccttgttcaggtgtgctctcaccattgttccaccggtgagatgcacccttctatagaagtaatattgccttgctgagaaaatgtttttaaaaaaggatactagaaaggcttcctgttcccaaaacatctcctccattct

SEQ ID NO: 1115 - DNA, 790 bp, Homo sapiens
aaaaggaaattggctgacgtgattttggagattgacaagttccaagatctgcagtaagcaagctggagactcagaaaagccactgatagttttagtccaagtctgaaggttcaagatccaggagagccagtggtgtagttccagccaaaaggtcagcaggcttgagacccagaaacagccaatacttcatttggagtctgaaggcaagaaaaaaacaatgtaccagctcaaaagcagtccaacaagagaaatcccctcttgttcgtggagggtcagcctttttgttttattaaggcttcaatggattgcgtggagtccacccacaatagggaggccaatctgctttattcagtcaaatgctattctcattcraaaacatcctcccagacacacacaaaataatgtttaaccaaatatctgagcaccctatggcccagtcaggttgacgcataaaattaaccatcacaccatcctcaaacagaattagtcattccatgtgggctcacgtaaaagggcttatatttaaggatagatatgaggcactggtctaagcactttaaagttattagcagcaatttcagtttggctatcattattcttctactttaaggctcttccagtctttttgacccttctgcatgctcctatgatggctacaagtctatgccacaccttactgtaagcacctccaacacagaaatgtagtgcctggcatgaaataaagcctcaactaagaattattttagggaatttttttgtttatcctcttttctgagcattgcttttgtag

SEQ ID NO: 1116 - DNA, 1233 bp, Homo sapiens
tgcatataacaaaagatcatattggacactgtaaatatatayagttttcatcaattatgcctcagtaaaattagaaatggaaagaaagaaaagacaagcttagacagactcagagacttacccaaaatttcacagatcaaaaccaaatctaatttcaactttaggacatatactattatccactctgcctcatagcttcttgagatcctaagcagctaagctgacaggttgtgagagccactcacagttctgaccattggtcagtggtgtgatttagtcattacaacattgtacatttctgtctatccattttcatatagctaatgaaagattcagaagatcagcctgaaatcaggtaactgagcttcactgatggcggttaattccaacataaatgccacaaccaacatattaagcattgtcttctgaaaatactactctttgaaggacaataaaaaagtgacttggccgggcacaatggcttacgcctataatctcagcactttgggaggccgaggtgggtggatcacgaagtcaggagattgagaccatcctggctaacacggtgaaaccctgtctctaccaaaaacacaaaaaattagccatagtggcatgcgcctgtagtcccagctactcaggaggctgaggcaggagaatcgcttgaacctgggaggcagaggttgcagtgagctgaaatcatgccactgcactccagcctgagggacagagcgagactccgtctcacaaaaaaaaaaaaaaaaaaagtgacttatggtgagtgctggaaaggacacttttattttcccacatgtaagttattccctttggtatttaacatgactggtaaaaggctttaaagcttataataaatctcaagtgtactcccgaaggctcaaaagaaaaagggtgctttacgaaatttgcttctttccattctaagcattatgtattggttagacattaacttgcaaggaaattatttcacttgtgttgtcttcaaataaaactattatcatgccgagtacaaaagtctgggttttctcttgatgctaaggactcatgatcctcacatgtaaatttaacttgataagtcctctctatttcaggattttaacatcaaggtctagtttgggatttaatttgacaggctgtacctgtcagtttttgtatagtttactttcatcacagttcaaaaggagtgtgtgaaagacttacttgtggtaagtaggtcac

SEQ ID NO: 1117 - DNA, 341 bp, Homo sapiens
caggggatgagggtgctgggggtcaggggtgggggtgctgggggtcaggggtgagggttctgggggtcaggagatgagggtgctgggggtcagggagatggatatggtggcaggctctgcccatgggagtctgcttggggctgcgaccgggtatgtgtcctgtttgcgttgtccctggcctttgagacaccaacttyctggagcaattggactgggctgggaagggtggggatggctgcagagatggggcctctgttcccccaagaggcagctctgtgttctattaaactttgttggctgtaacattttgcactgagagagctctctccgccaaacatcac

SEQ ID NO: 1118 - DNA, 1174 bp, Homo sapiens
tgatccaagctgcagcaacgtgaaattttcctcttaggttttacagtagatattgggaaaacaacctctttttccttgggggttgcaaagttgtaaggacatcctcacggagccgtgcctccttagtcgcctttgcccatcagccatgagtgagaacagagcctgcagagagaggtaaaaaccaagagatggaaagctctggtggcttcatctgagcccctcgctcactgttcactgttgtctgggcccacctattatgaaacttttaaagattcgtattagtttccactactggcaattgtcacagccttagctaagactctcctgaaagtaattcagtattgtcagttagctttacgaataatgaacctagcaggttaaaagttccaatgcggccgggggcggtggctcacacctgtaatcccagcactttgggaggccaaggcaggcagatcatgaggtcaggagatcgagaccatcctggctaacacggtgaaaccccgtctactaaaaatacaaaaaattagctgggcgtggtggcaggcgcctccagtcccagctactcgggaggctgaggcaggagaattgcttggacccaggaggcgcagcttgcagtgagccgagattgtgccactgcactccagtctgggcaacacagcgagactcagtctcaaaaaaaaaaaacaaaaaaaaaaagttccaatgcaaggtctcgtggcatttaaatgaactgaccacccgagcttatgtggtctatttttacttgatcatcctccctgtatggtacctatcggctcatgtgtcttttaaagactccttcaaagaaaaactgccagctcatgtagccagagtgtttagagtcaaggagacaccagatgggcagcattttgcttggggagctagaacatctctagacaaggagaccaaagactccgaattaaaatcacgctggaccagatcaagctaccctttgggcttgagtctttacaattctagacccagtgaaaaggtctgcttgaatcatgagtgcctgaagggtttagtgcatttctagactctcatggattcaagccttcctggacagagtaaatcactgggtggcattcgtttcattcacatgtatgtgcatatatatatatgtrtgtgtgtgtgtgtgtgcatacatatggtgtat

SEQ ID NO: 1119 - DNA, 2245 bp, Homo sapiens
catggcctcaaacaggccttcaggcttggggactggagccgactccccagggcagaataggtacaggctgcccagctgtaaaagcagggctctgcccctctgggctccagctccaaggctgtggcacctacctgggaaagaaaagtccctggagaagccgagcagatctggcctcgtcctgtccttgtcctggctggtaggtggggtggatagagcgtccctgactccctccttgaactgtgagcatctccagggcgggaactgtcccccataggacttgctatctcctggcacatgttagcatttactggggccaagcactgttctgagtgttttaagtaaactaatccacttaatcctcacctcaaccctaggaggtgttactcccatttttcagatagagaaactgacacacagaaagattagcttcaaaaagctcataaatggggaattgaatccaggcagcctggctccagaacccaaattattagccattatactgtactgaataagtaaataatacatgaatatatgaagaaaggaatgaacggcttgtagagagaatgacatgaaagttctctgttcaaaagtatttcctctattaacagtttcagggcctgtgaatgcactattgaaatgcacattcagttttaactaatgtgctattctcttcaaaaatgctcctaagaaattggggtgatagcaattattggccatgctctgtggcccccggaatgtctaggggaggcccaagctctgggaagaacttaagctaatacccgaggagggagaaacaaggagttgggtgtttctgcagagaaccctgctagttatgttaatgatgtggcacagggacaggaacacagactgtgaagcctctgagctgggtgtgtctctcactggctttcgggcctggggtgagtcatgcggcctccccgagctccagtggccccatctgccagggaaatgctggtccctacctgatggcttatggttaaataagctattgtagttaatgcatctggcacaggatagatggtcaataaatggtagctgctattgttattaaacaaattataggcaaaaaactcaagtcagtaatgatcaccagtctgagcccccttcttaaagtgatgcttgcactggtgaccctatttctggtctcctggacactccagtcatgatactccaagggcaatagcttcttctcccagtgtctttcctggttgtcttcatcccttctcttgccactgccttggcctgggttcccactgcctgtcaccgggactcagtcaagtctgagagattgagagcatctatgataaagccagctggaaggagccctgctaagcagccacctctgctaagcagccacctctgccaaacagtcacctctgccagtgtcctcctctttttctggcttcaactcttggcactctagcttctcttcactccccacccccttttctcactcttctctctctgatcattccatgggtctctttggctttggttgagctctaattaagttccacagcaggtggcaatgaagacagcttctctcctgcaagtgctcatcaaagggttgtgcacaagaaacttggacaagaggtaaaaagaagcctggcccctggggacaaggatggggcagtcggagaactcctcgtgcagccagtgctccgaaggtgcagagtgaagatttgcagacttgctgtgtatcccggcataatgccgtttgtccatctgccacactaggacagaaactcttcattctgagcatatggaagctgagaaggaggtcggaggcaacaggtgcttaatgaaaatgatcatgaaggtcctggtcattcactctcccaaggactaataataataactagcctttaaggagggggtcatagtttactcctctcaaaaactctcatttgaaccttgtgaccaccccattaggtagagagagaaatggtatcattaagcccttttcagatgaggaaagtgaagtcttgagagtttaaatgacttaccmagggcccaggccacagggctgagcacctgaaccattttcccatcacttctctcagctcctttccaggttgcacactcagccactgacctacccagcagtcccatgatgcaccatccccttactgggccccggatgctgagcagttctgagaaaatcatgcggccatgaggactgtgaccagcacagactccagcctccagcctcagccctctacttgct

SEQ ID NO: 1120 - DNA, 667 bp, Homo sapiens
acattatttccttgaatcaaaagggtatctctatagactttgagttcatcttgacgtctttgaaacatggattatcaatttgcaaatgttatttgttgaattattgagctatattccttgaaatgcttttaagatgatgttttcattaaaataaatgagggacttgaatcctaatatttaggaagatttctcaacatcatcacatacaattacgaattattatggacacaatagtggtagtttggatttttattgtggttaaacttttagaaagtacaaaatattcataatctacattttaatattttataattcaaatgaattttaagtaattctctattttgacattctataaataaaaatgtcacctatactatataaggattcactcacttttctctacattctcatcaatacctgatgygttgtgacttttaaaaaatagccattctgactagtataaggtggcatttcattgtggttttaatttttatttctctgatgatgagattgagcattatttcatatgtttgctgtccacttgtatgtcttggcttttgagaaatgcctgtttatgtactttgtccagtggggaatggggttatctattttggtgttgttgagttgtttgaatttcttgtctattctggatattagtacttagttg

SEQ ID NO: 1121 - DNA, 667 bp, Homo sapiens
acattatttccttgaatcaaaagggtatctctatagactttgagttcatcttgacgtctttgaaacatggattatcaatttgcaaatgttatttgttgaattattgagctatattccttgaaatgcttttaagatgatgttttcattaaaataaatgagggacttgaatcctaatatttaggaagatttctcaacatcatcacatacaattacgaattattatggacacaatagtggtagtttggatttttattgtggttaaacttttagaaagtacaaaatattcataatctacattttaatattttataattcaaatgaattttaagtaattctctattttgacattctataaataaaaatgtcacctatactatataaggattcactcacttttctctacattctcatcaatacctgatgcgttgtgacttttaaaaaatagccattctgactagtataaggtggcatttcattgtggttttaatttttatttctctgatgatgagattgagcattatttcatatgtttgctgtccacttgtatgtcttggcttttgagaaatgcctgtttatgtactttgtccagtggggaatggggttatctattttgktgttgttgagttgtttgaatttcttgtctattctggatattagtacttagttg

SEQ ID NO: 1122 - DNA, 2107 bp, Homo sapiens
tgctccttaataagttatttctgggtgcccaaccccatatacagagcaccatataaaatattacaagtaataaagaaattatttccaataaatttatacctctgcctatcatattgtagatagctgraactgatactaagagcagaggtggaagacttgagcccagattttattaatgtcaaatatgttttccacatcagattctcctctcatcctcatacccagctcatgggaccaatggtctttgtctttcttccttccactttctctgaaattatgttctcagactcaacattcctaaaaaaatatataatattaacctgctgacacctattctagtggtaagggtcttaaatgtataaaccagaggattatctgtctcaatggacaactcaggagaatattaaatttgattttcagtttttagggtggtaacatcccctttgtaactacactatccccagatattagccaagatgcactggaaattataaggagacaaagataagtcagggttagataaccctgaccttgcccagcatagtacttgtttatatccttatattctagggtatatgtgttattttacattttcacatatacaggggggtaactccaaacccacatttacagggcaaacattcaagctaccacctatttccatctatttgtgcttaatgcttaaggctgaaaatgtttcaaagagatcacaaaatcacatcacgtcagaaaaacaagtttcttagaatgtctggagggtaatgctttagatagattaaactaaaacatcatatcaaagaagttgctggactgcaaaacataatgttctttttaactgaaaagatagagcacagaactacagaacaagaatggcagagatatttaattttttaatgtctaaacaatttagttccttgaactcattatatcaagatgaaatttgagaaatcatttcccctataaaaacctccggaaaaatatattactaggaagcaaattgtgaagtcttaaggtaaaataagtgactttttttcattgtctttctttgtgactgtcttaatctaaggttattatcttgaaaagaaccaaattatactgaaaaatgaaggtttctctcttcaatttaattctgtttcttttacagagtacattagaactatgaaaaagtatttttaggcaggtgcagtgcttcgagatatatatatcaagatcagttgcatttatttaaattccatagtcttacgttttaagtgtattttttagttgtcatttaaaatgcttttgcaaaagaatcggaattcccaaaaactgggtccttatgcatggcagtgtttccttgaatatgagaaagcaaactcttggttttgcagaaaaaaaaaaagggccaaagaaattatatgagagcaactgtacgtccttttacagctagaagttggctttacacattccacgactcataaataaacagaagagttctgtgaactatatgcagatggctgggtctacactgggaggcttttgtaatgactttggtttgcttccctgttttgccatctcttaaaatatctgcaaaaaaaattttgttctgctcctcagaaataggacaagtagaatcctgtaacttgagaatttgccctctgcgtagttggggctttataaagcttggagaaatccattttttttctcattattgtttctataaaaatatctacccccacaactatcataaaaatgctttatgttttaaatatttattgttttatttttaaaggataatacaataacggaagtatgagatagatgaagctgcaaggtggtcaagggacgtaataaggcaaagaggggaaaaatcccacaaaccacataaaggaagcgatgagatcagccacttaagtaagcgagtttaaggttaccacactggcactgagctaaggcattcctgccaagtccaaatgagaaaagaagtggaaagaataaggacatccgacagagcaaggcagggagacaaggcaccaaagtcaagtggaaatgctaagacagcagttttgtgtcttttttttctcctacctgattatggcacagaaatcctagcaggcagataaggaca

SEQ ID NO: 1123 - DNA, 2107 bp, Homo sapiens
tgctccttaataagttatttctgggtgcccaaccccatatacagagcaccatataaaatattacaagtaataaagaaattatttccaataaatttatacctctgcctatcatattgtagatagctggaactgatactaagagcagaggtggaagacttgagcccagattttattaatgtcaaatatgttttccacatcagattctcctctcatcctcatacccagctcatgggaccaatggtctttgtctttcttccttccactttctctgaaattatgttctcagactcaacattcctaaaaaaatatataatattaacctgctgacacctattctagtggtaagggtcttaaatgtataraccagaggattatctgtctcaatggacaactcaggagaatattaaatttgattttcagtttttagggtggtaacatcccctttgtaactacactatccccagatattagccaagatgcactggaaattataaggagacaaagataagtcagggttagataaccctgaccttgcccagcatagtacttgtttatatccttatattctagggtatatgtgttattttacattttcacatatacaggggggtaactccaaacccacatttacagggcaaacattcaagctaccacctatttccatctatttgtgcttaatgcttaaggctgaaaatgtttcaaagagatcacaaaatcacatcacgtcagaaaaacaagtttcttagaatgtctggagggtaatgctttagatagattaaactaaaacatcatatcaaagaagttgctggactgcaaaacataatgttctttttaactgaaaagatagagcacagaactacagaacaagaatggcagagatatttaattttttaatgtctaaacaatttagttccttgaactcattatatcaagatgaaatttgagaaatcatttcccctataaaaacctccggaaaaatatattactaggaagcaaattgtgaagtcttaaggtaaaataagtgactttttttcattgtctttctttgtgactgtcttaatctaaggttattatcttgaaaagaaccaaattatactgaaaaatgaaggtttctctcttcaatttaattctgtttcttttacagagtacattagaactatgaaaaagtatttttaggcaggtgcagtgcttcgagatatatatatcaagatcagttgcatttatttaaattccatagtcttacgttttaagtgtattttttagttgtcatttaaaatgcttttgcaaaagaatcggaattcccaaaaactgggtccttatgcatggcagtgtttccttgaatatgagaaagcaaactcttggttttgcagaaaaaaaaaaagggccaaagaaattatatgagagcaactgtacgtccttttacagctagaagttggctttacacattccacgactcataaataaacagaagagttctgtgaactatatgcagatggctgggtctacactgggaggcttttgtaatgactttggtttgcttccctgttttgccatctcttaaaatatctgcaaaaaaaattttgttctgctcctcagaaataggacaagtagaatcctgtaacttgagaatttgccctctgcgtagttggggctttataaagcttggagaaatccattttttttctcattattgtttctataaaaatatctacccccacaactatcataaaaatgctttatgttttaaatatttattgttttatttttaaaggataatacaataacggaagtatgagatagatgaagctgcaaggtggtcaagggacgtaataaggcaaagaggggaaaaatcccacaaaccacataaaggaagcgatgagatcagccacttaagtaagcgagtttaaggttaccacactggcactgagctaaggcattcctgccaagtccaaatgagaaaagaagtggaaagaataaggacatccgacagagcaaggcagggagacaaggcaccaaagtcaagtggaaatgctaagacagcagttttgtgtcttttttttctcctacctgattatggcacagaaatcctagcaggcagataaggaca

SEQ ID NO: 1124 - DNA, 603 bp, Homo sapiens
ggaacaaggaatttttgtgactctaccactgaaaattgcccagtttgtttaattgccacatttgggaatatttcaaatatcaacagttagaatcaaaaccaagaaattggttaaaaattaatcttatggccaggtgcggtggctcacgcctgtaatcccagcactttgggaggccgaggcrggtggatcacgaggtcaggagatcgagaccatcctggctaacacggtgaaaccctgtctctactaaaaatacaaaaacaaaattagccaggtgtgatggtgggcgcctgtagtcacagctactcgggaggctgaggcaagagaatggcgtgaaccctggaggcggagcttgcagtgagctgagatcaggccactgcactctagcctgggcgacaaagggagactctgtctcaaaaaaaaaaaaaaaaaagaaaacctatcctccaaccggccctatatagttccatttatgtaaccaagaaaaacaggtgaaactgacctgtgctgttagaatcaatgcagtgattaagtacgcttgtgatgggggtggcgtgacagtgaccggaaaacggaacacgaggagcttcagggctgtgcatgttt

SEQ ID NO: 1125 - DNA, 603 bp, Homo sapiens
ggaacaaggaatttttgtgactctaccactgaaaattgcccagtttgtttaattgccacatttgggaatatttcaaatatcaacagttagaatcaaaaccaagaaattggttaaaaattaatcttatggccaggtgcggtggctcacgcctgtaatcccagcactttgggaggccgaggcgggtggatcacgaggtcaggagatcgagaccatcctggctaacacggtgaaaccctgtctctactaaaaatacaaaaacaaaattagccaggtgtgrtggtgggcgcctgtagtcacagctactcgggaggctgaggcaagagaatggcgtgaaccctggaggcggagcttgcagtgagctgagatcaggccactgcactctagcctgggcgacaaagggagactctgtctcaaaaaaaaaaaaaaaaaagaaaacctatcctccaaccggccctatatagttccatttatgtaaccaagaaaaacaggtgaaactgacctgtgctgttagaatcaatgcagtgattaagtacgcttgtgatgggggtggcgtgacagtgaccggaaaacggaacacgaggagcttcagggctgtgcatgttt

SEQ ID NO: 1126 - DNA, 591 bp, Homo sapiens
ctcttaaagccctcagccatagggagtcctgcggaggaaaaaataacactgcagaattatatgacttctcctgtgacaaaagcttttctctcccaaatactagtatatggtgcaatacaaaagtgatgggaaaaatagatttgtctactgttaacaagtctataacaatttaaacaccaaggaccaggcactttttgcatttaatttataccctcctcaggatactatacctatggagataaattggctggaaaagaaattaaatttattaaattctaattaaatgttggtcccacaattttcaagtaagatatatcatagaattcaaataacccttaakaaggagggtaaacacattgtaagtctaatcaaagaatataatgatgcacgcaggggtttttttttctggctgattgggttgtttactgccctcagattctacctatagccctggacgcccacatcttcactatctttatgatatttgttactatattaacattagacattccttgtaaatgttatgccagatacagcagaaggaaaggcacaattaaagacccagatcatgatagctcagaaaatagatct

SEQ ID NO: 1127 - DNA, 591 bp, Homo sapiens
ctcttaaagccctcagccatagggagtcctgcggaggaaaaaataacactgcagaattatatgacttctcctgtgacaaaagcttttctctcccaaatactagtatatggtgcaatacaaaagtgatgggaaaaatagatttgtctactgttaacaagtctataacaatttaaacaccaaggaccaggcactttttgcatttaatttataccctcctcaggatactatacctatggagataaattggctggaaaagaaattaaatttattaaattctaattaaatgttggtcccacaattttcaagtaagatatatcatagaattcaaataacccttaataaggagggtaaacacaytgtaagtctaatcaaagaatataatgatgcacgcaggggtttttttttctggctgattgggttgtttactgccctcagattctacctatagccctggacgcccacatcttcactatctttatgatatttgttactatattaacattagacattccttgtaaatgttatgccagatacagcagaaggaaaggcacaattaaagacccagatcatgatagctcagaaaatagatct

SEQ ID NO: 1128 - DNA, 2284 bp, Homo sapiens
cattagacttagtgacagaacaggtgactgactcccgctgtctgtgccaactaatgatgtgcctgtgacaaactgagtcatgctgaccgtgggactgcagaccgcagaggagagtgctctcatgaccccttggataaagcagtgaagctttgcatcacctgaggagagagttctttgggaaggatgagaacattttccagtgaaaggttttattttacttatatatttaacaggcagttatgcagtgcttattatgtgccagccagtattcaaaacaccttataaatattaactctttaactcctcttgacaacctcaaagctgaagtgttgttcatgtccctcttttacaggtaaggaaacaggaatgccagaggtaggactcaaacctaggaactctggctccaaagtcaggcccttaaccactgtgttatggatgaaagactctgaacttcacccttggtttcttttttctacccaggttcttgacttctgattggtcccattgagatgtcagggaattaagcagtcctgaggcaagccctcattttatcagctcattatttaatatctgtgaacctcagttttcttatctgtaaaacggagtcacatctacctcatggggaggatgtgaagataaaacagttgtccattttgcattgctgtaaaaaatacctgagcctgggtaatttataaagaaaagaggtttatttggctcaagattctgcagctgtacaagaagcacagcaccagcatctgcttctggttcatgaggcataatggaacaggctggtgcacctttgttgagattcgctggctgtgatctgtgctgtttatgtgagcaygtgtgtttatttcatggccagattaccgcatctgctcagggacaagtttgctctgtttttaggagaatggaagatggcaccttcccgtttgtcttaactcagggcttttctcagtcctgctacccacactgtgcacttttcccctggcccactcccaattcagaaatgggtctggattctatttctgtggatggttatgcagtcacccatctgcttttctgacacatacaagtcagtatatctttctgtgattatgaatttttagaggagagagtctaagcttatcttttcttttttctttgaatatcttgtctacaaatagtaaatgcatccataggggtgaagaaggagttcctgtaatttttccagagggaagtgcagtactctttaatgtgtagtcagatgtgtgagaaagggaaccaactcttaaatgtaagaacgatgagagtatatccccagcatctagaataatatctggcacatagtagtagcttaataaatatttgtgagcaaatgaatgagactaatctttattttaaatatttcctaaatctgattatagtcaactctgggttacctagcagacctgaaaatctggagctgtagcttttatgaagtgttagtgtatgtaactaacagaattaaacactttttaaaaaactgggacatgctagagtatgcaacacgaaaaataacaaacttgatccagagctactttgggatcttgctgcacccttggggtgtcaagctttgtgtgagaactatgggtgctgtaaggaggaggaattcagtgtagtgctatagcaggatgctaaataacaaggagttttctctcttgaccaagtagctggaaatagttataccatgttacttattgccagacttgcattccacgacagactgatgtatttagtaggatctgggccagttgaagacggcccttgtcatctttcagatgtggtttgacagatcttttgtatcacttcagaaacatttgagaagttttgttctccacgataaagagagagcaagccagacagatatgtagaggccatagaattttaaaattgtctgcactttcttttacagatctgaagaaaacccttgctgtgttattagataacattttgcagcgcattggcaagttggagtcgaaggtggacaatcttgttgtcaatggcaccggaacaaactcaaccaactccactacagctgttcccagcttggttgcacttgagaaaattaatgtggcaggtaaaaatagcaattctctgccctgatatggagtcacaccctgctttggaccaagaagagaataaaggagagcagtggttcttactggaacctgcataatataaattctataaacttggcatggccattgtaaagataagtctaaatttattttttaatagcagatgttaaaatgctttttatagt

SEQ ID NO: 1129 - DNA, 486 bp, Homo sapiens
gatttactctctccctcagggtttaccatcagcccttcctgcttccatgctgttcctcctgtattccctatcttggttgatgccaactgcaatcacaaactctcctaaactagaaaccctagtaagtcatttaaaaaactgcaaaattaacaagacttcctaaatcacttttggaagttttcctccctccccttcatcactgtattagattcaaactctcctcacatccggataaaactttcagggtcagcgagtgtgactgttaaacccaacatacattcatacrtaccacttcatttctgctacatagagctacaaaaatatggtcaaaggcatgtgccgcccatttctaaaagctcatagagactgctcctttataaaatttgaaacttttttctgacagaatagaaaattgcaggttattttttaaaaagaaaaaaacaaccgctttattaaggaatactctacatgacaaagtttactcac

SEQ ID NO: 1130 - DNA, 544 bp, Homo sapiens
gaagaaattcttccatatgtcaaagttggtctcatcattttgtttgaaggagggaggtagggaagaagactatagttaagaagccagttcaaaccagaccatgtataaatattgtaacagcacgctcttggcatggtgttcaagagctttctgttcctgcaggcttcacctcacttctaaagtgtaggtgattttgcactaaacatcaggttctgacatgaaaaatatgagaacacagctgaaatatagcttaatatccagaatytagacaatgctaacaccttaactgttattgtacataatatttatgttagctaactgattgtcataacaacactgtgaggatgcagggggaattgcctcactgtgtaaacagcattgccctacagatggctgtgcgtgttctctatcctcttcacttgattatgcctccttgaggggagagacggggattgttaagggacagccattgatctctagtgatggaagacaagatcatgtcatgaaatgtcaatggggcctgccttaccctctctgagcctct

SEQ ID NO: 1131 - DNA, 586 bp, Homo sapiens
gatcaagaaaagggtacaagggaacaggtttatgtgtgttttcctttgtggaattgtattcccctggggaagagtgaaggaggcatctcgctttttcttcatgatcttttgtcttgtttgatgtgtgtatgtgtgtgtgtgtgtgtgtgtgtgtgtrtatatatatatttttttttccaagggcatacatgtgacaaaaagtgaactggtatctaaaaactttgaaagatctttgtgttctagctcagatgttctttgtaagatcagaagcaggtttttgttgttgtttgtttgtctctttttttcccttctgaccttgaggatatgtatactatcaaatattctttagggaaacagaaaaatttagtcgaaaatctgggtgccaaatatttaatattttagctacatgtaatctgtagtactctaactgctttgaaagcagtttttcaacttgtatgtggcttaagatatacaaatagaatactgtacaactcagttgaaaatgcatcatttaaagcaattaggcctgtgaaatgctaagagaaacttcgtttttgtttagtttttccactcttttgtgctcact

SEQ ID NO: 1132 - DNA, 1335 bp, Homo sapiens
tgcatctcatcagagggggctttggaggaaaaacagaggtctgggcttagggaagggcaatagtataggatggggagtttctgcttcctttgaatcttataacacattagaaggtattcctcccatccctaagtaggaaaacaattcacccaaaacctcactcctgaatcttaaaagcatcaagttccaaatatgccacaagcagaagaaataattcagggtactcagatggggatcaggagtctcatctcatttctggtggcctagaggcagccttaaccattacataacacaactacccaaggagcaaagtgacacagagacacctcttcaacctcaccctcaggcattcccattttattttcatcaccttttccatccaggcctgtccaccttcatccatgctcttttcccctctctcaaccaggctactgcagcagacttggagagagtaaggactcacaactccttcctgcctccttctactcctcattttctcccctcccctcctttccctgtatacgcccatgtggaagggaaagggggcagctggcaatgtttacctctcaggagtgccctcacattatctaggaattagcgcaaaccccttgtctctgaatcacttaaactcttcataagctgagggatctattttttagcaagtagagacaccaaatgcaagttgggaaagtttagctcagaaagtatgatggttgggctctaaatccttgatggagggcataaagatcccctgaaaatgagcataatcatttatgaagaaaagcaacagaagagatgtagaggcggcatcactgttcagtgactctgtctttctgtctctgcatatatcaccttggttcagtttctccccatccctgtctctcttcttctttcctaccctcctgctccccactccycactttactgcaagacatatgacaggtgacaggcctaggaggctgggaaggacgggaagtttaatctcacagaaagtccagctacagaacactacccgggagtagcagagggaggtagaggactcatgcgcccacctgctctcctgccaccggctgggtttctctgcctgcctgccttctcccccacctcctcaaagcctcctggtgaccatcagaccctgtcaccacttcccactggcagagggaagaacttggagaaaaagtccatgaaatcaggggataactagctcccagtgtgccggttactgcctcctcttggacatttcccatatttggagtcaccaagacaaggccaccacacaggagaatcatctacccttccaagctgaaaacccatgttctgttgcatacaagcttc

SEQ ID NO: 1133 - DNA, 1200 bp, Homo sapiens
accctttggtaatctgtacctggtacagtccactgggtgaactcagtgctctccatcaatgctttgctgatcttcataaagtccgaaaggtaacatccctcgagtcttgttaaagacgcctgaactgggagggtcccaggtacttataaaaagtccagattcaaaggctgggcacggtggctcacgcctgtaatcccagcactttgggaggccgaggygggcggatcacgaggtcaggagatcgagaccatcctggctaacatggtgaaaccccatctctactaaaaaaattacaaaaaattagccaggcctggtggcaggcacctgtagtcccagctactcgggaggctgaggcaggagaatggcgtgaacccgggaggcggagcttgcagtgagccgagatagcgccactgcactccagcctgggtgacagaccgagattctgactcaaaaaaaaaaaaatccagattctggcccagcatgggtgcatctgctcgtacacataagatgagtctcaaatagggactgcctaaccacctgctataatgaaattctacgtgttgtgttagtcattatttctaactgttgagcttctggaaattctacatctttccagataaaagatttagagctaaaaatgataaatcagtcacaaaaaaatagccttcaaatgctataaaatctctcttggggtctctatctatctttattttccttcataatacttatcacagtctgatgatatatacctgtatgtttgttgattgtctctttctcaaaactgtataagaagaaaaagattctgtctatttattgcaataccctcagagcctagaacagtatctggtcaaagtaaagtctcaataaatacatgtggaataaataaatgagtgacagtaagacacctataggtccttatactgtgcactagcagccttgatttttttttttttaactgttcactacctcaccaaatgaggaattggtaccgattggggggagaagcacgaatgactgacaggttttattgtattcattcattagctcagaaaaacagtttttgagaacccacaatatgccaggcatgtaaagcagcttcaaaactggtatacgggtaaaaaaatagatactcagtttcaaacaagggaagggagtattgggaaatctgtagccttcaaaataggaggtccaggtctcatg

SEQ ID NO: 1134 - DNA, 1200 bp, Homo sapiens
accctttggtaatctgtacctggtacagtccactgggtgaactcagtgctctccatcaatgctttgctgatcttcataaagtccgaaaggtaacatccctcgagtcttgttaaagacgcctgaactgggagggtcccaggtacttataaaaagtccagattcaaaggctgggcacggtggctcacgcctgtaatcccagcactttgggaggccgaggcgggcggatcacgaggtcaggagatcgagaccatcctggctaacatggtgaaaccccatctctactaaaaaaattacaaaaaattagccaggcctggtggcaggcacctgtagtcccagctactcgggaggctgaggcaggagaatggcgtgaacccgggaggcggagcttgcagtgagccgagatagcgccactgcactccagcctgggtgacagaccgagattctgactcaaaaaaaaaaaaatccagattctggcccagcatgggtgcatctgctcgtacacataagatgagtctcaaatagggactgcctaaccacctgctataatgaaattctacgtgttgtgttagtcattatttctaactgttgagcttctggaaattctacatctttccagataaaagatttagagctaaaaatgataaatcagtcacaaaaaaatagccttcaaatgctataaaatctctcttggggtctctatctatctttattttccttcataatacttatcacagtctgatgatatatacctgtatgtttgttgattgtctctttctcaaaactgtataagaagaaaaagattctgtctatttattgcaataccctcagagcctagaacagtatctggtcaaagtaaagtctcaataaatacatgtggaataaataaatgagtgacagtaagacacctataggtccttatactgtgcactagcagccttgatttttttttttttaactgttcactacctcaccaaatgaggaattggtaccgattgggkggagaagcacgaatgactgacaggttttattgtattcattcattagctcagaaaaacagtttttgagaacccacaatatgccaggcatgtaaagcagcttcaaaactggtatacgggtaaaaaaatagatactcagtttcaaacaagggaagggagtattgggaaatctgtagccttcaaaataggaggtccaggtctcatg

SEQ ID NO: 1135 - DNA, 485 bp, Homo sapiens
gaaaattagctgctgttagtatttcactcactcccaaaattacttttagtattttgtcaaagaaaataagttctatcccaaaacatgtaacaagagcaagcctggcctgatcaggggattgagcttctgatttgataaaagcttcctcaccccttcagttraaagtggtttccttcagatagcttcctggaaacttctgggctgtgcacattagtccctttcaattcaggcactgaaatgctagcaaaatgaaggtatgttttctggaaaccagctatcaatctagcacaagcgactattaggaaaatcaaggaggtgctgcggggatgtggaataggacacctgggttttgatttaaagtaacttaaaggaattgcttatagcagagagttaacattcatatgggaaattttgagcaacctgtttgactcaggtcccggtgagagggcagtcttacataggagatgtacagaaagttttagtct

SEQ ID NO: 1136 - DNA, 1214 bp, Homo sapiens
ttctttaaagcagatttagtacaacggcttaatgacattttccagcagtgaagcagctagtaattaaatatcaacgagttaatgacctagctgactcaatgaactttgatttggtacaattaggactccatcactgaagcttctcctttcaggtagcacagcttcgcctcaggacaagtctgctgggaaaaacaaacaggggagccgcagcctccaccatttatgcaacactagtgcagtattgcttaagcatatgctatctcactttttccaaggtctctgctgcactgcagtatttctggcccagcaaactctatctgatggatcactacttttttaactatgctaaaccaaacaagaagggggcatttatatacacatacagatgtacgcacccagtcactctcctagcctccttacctccagaaaggttaccctgactgttgtaaattataccattctttaaagaagattaagttagggtggagataagagcaacagatcagaatygaaactacatcttcagggtgacagaattaaacaattgccaatataaagttaacaggagttattatttataatcaaaagaagttgagcagtccctgacgactacatatttggttctacaagctctctggatggtcccaagcagctcagccactgctgagtaacacacaggtcttcactcatgccagggttatatgatttgtgacttaccttcagggtttggggcttaaaggcttttgttttcatgtaactatgttttgtccatatctagatacatttatattgtagagaaaacatcatacagccattaaaacatgatttaatgatgtgatcttttttttttgagacagagtgtcactctgttgttgcccaggctggagtgtgatggcacaatctcagctcactgcaacccccctggactcaagtggtcctcctgcctcagcctcccaagcagctgggactacaggcatgcaccaccatatccagcaaatttttgtactttttgtggagacagggtttcaccacattgcccaggcgtgtctcaaactcctaggctcaagtgatccacccacttcggcctcccaaagtgctgggattacaggtgtgagccactgcacccggccaatgatgtaaaatatttatagtatattggtaactggaaaaaaaaagttcaccaagctgtcctacagcctgaatccatatatgca

SEQ ID NO: 1137 - DNA, 1214 bp, Homo sapiens
ttctttaaagcagatttagtacaacggcttaatgacattttccagcagtgaagcagctagtaattaaatatcaacgagttaatgacctagctgactcaatgaactttgatttggtacaattaggactccatcactgaagcttctcctttcaggtagcacagcttcgcctcaggacaagtctgctgggaaaaacaaacaggggagccgcagcctccaccatttatgcaacactagtgcagtattgcttaagcatatgctatctcactttttccaaggtctctgctgcactgcagtatttctggcccagcaaactctatctgatggatcactacttttttaactatgctaaaccaaacaagaagggggcatttatatacacatacagatgtacgcacccagtcactctcctagcctccttacctccagaaaggttaccctgactgttgtaaattataccattctttaaagaagattaagttagggtggagataagagcaacagatcagaatcgaaactacatcttcagggtgacagaattaaacaattgccaatataaagttaacaggagttattatttataatcaaaagaagttgagcagtccctgacgactacatatttggttctacaagctctctggatggtcccaagcagctcagccactgctgagtaacacacaggtcttcactcatgccagggttatatgatttgtgacttaccttcagggtttggggcttaaaggcttttgttttcatgtaactatgttttgtccatatctagatacatttatattgtagagaaaacatsatacagccattaaaacatgatttaatgatgtgatcttttttttttgagacagagtgtcactctgttgttgcccaggctggagtgtgatggcacaatctcagctcactgcaacccccctggactcaagtggtcctcctgcctcagcctcccaagcagctgggactacaggcatgcaccaccatatccagcaaatttttgtactttttgtggagacagggtttcaccacattgcccaggcgtgtctcaaactcctaggctcaagtgatccacccacttcggcctcccaaagtgctgggattacaggtgtgagccactgcacccggccaatgatgtaaaatatttatagtatattggtaactggaaaaaaaaagttcaccaagctgtcctacagcctgaatccatatatgca

SEQ ID NO: 1138 - DNA, 1214 bp, Homo sapiens
ttctttaaagcagatttagtacaacggcttaatgacattttccagcagtgaagcagctagtaattaaatatcaacgagttaatgacctagctgactcaatgaactttgatttggtacaattaggactccatcactgaagcttctcctttcaggtagcacagcttcgcctcaggacaagtctgctgggaaaaacaaacaggggagccgcagcctccaccatttatgcaacactagtgcagtattgcttaagcatatgctatctcactttttccaaggtctctgctgcactgcagtatttctggcccagcaaactctatctgatggatcactacttttttaactatgctaaaccaaacaagaagggggcatttatatacacatacagatgtacgcacccagtcactctcctagcctccttacctccagaaaggttaccctgactgttgtaaattataccattctttaaagaagattaagttagggtggagataagagcaacagatcagaatcgaaactacatcttcagggtgacagaattaaacaattgccaatataaagttaacaggagttattatttataatcaaaagaagttgagcagtccctgacgactacatatttggttctacaagctctctggatggtcccaagcagctcagccactgctgagtaacacacaggtcttcactcatgccagggttatatgatttgtgacttaccttcagggtttggggcttaaaggcttttgttttcatgtaactatgttttgtccatatctagatacatttatattgtagagaaaacatcatacagccattaaaacatgatttaatgatgtgatcttttttttttgagacagagtgtcactctgttgttgcccaggctggagtgtgatggcacaatctcagctcactgcaamccccctggactcaagtggtcctcctgcctcagcctcccaagcagctgggactacaggcatgcaccaccatatccagcaaatttttgtactttttgtggagacagggtttcaccacattgcccaggcgtgtctcaaactcctaggctcaagtgatccacccacttcggcctcccaaagtgctgggattacaggtgtgagccactgcacccggccaatgatgtaaaatatttatagtatattggtaactggaaaaaaaaagttcaccaagctgtcctacagcctgaatccatatatgca

SEQ ID NO: 1139 - DNA, 1314 bp, Homo sapiens
ctatgtcatgcagcatttgggaaataatttgtatcaaaataaaacttctgatagcttgaagaggtgccaagcattccctgtagcccatactttaagcagatattatatcacagtggaaatacaggcttttctcaatccatcctatttcagtcaagtcaaattgctctgtgttcataacatgctcaaaaccatattcactttattgctttcttgaagaaaaccttaggtaaatttttttttgagaaaacatacatagctaaaaaggttttcctcactcctccttcccttggatccctgctttgaaataaaataaattagtggaagaactgaccataaagaatgagaaagagcaaaaaaacaaaagaatgactcctctgcaagagctcttcaagtttggcattaaaaaagtctctgagaaggcagaattgactacttagagaaagtattatacacaaatttatattccaataaacagtgatgtttctcaaagtagcctttttaaaacaaattcttagctctacttaagaaaagtataaagcaccatctgaagaagaaaacattttggaagaataggtttgcatcaaaaccctggaaaatactacatcctaacctaaggatatttagatactgactaatggtatttaattttaattaggaacatatgtgaactgaaaacaaggacaaatagtgagacccaccctttatgtatcctctgccaagaatgccttccccacacataccaaactaagttaggagatccctgctcttctcccatctttttctttttcttcttgccacttagcacaatttataattgggcatgacaatgtgtgatgtcttgtttcccccattagatagcaaactctmtttcaccactatagccctactggctagcatagtgccttggaaaaatagtaggtgttcagtaaataattgctgaatgaactaaatggataaatgaggacgtgtggattccaggtgatgggtgcagcttcccatttgatctctcctgttctctagcaatttctccaacctttgagtggagaaagtacttttctggtgtggtacaggatggtcaatcagcttgtgcacacaggcaaaataccataaccacaaaaacctacactgagtatgtggacatggtatgtgtctgtacaaacttcaggctgcctaaaccaaaaagcagagaaatactggctgcctgagcaactcatattttttatttcaaatgtttgtcccctactgtcttaattagtgtcatttatacatttagttagaagagcatgtaactgaacctctcagcttagaaatgca

SEQ ID NO: 1140 - DNA, 1608 bp, Homo sapiens
taaaaatacaaaaaattagccaggcatggtggcgggtgcctgtaatcccagctatttgggaggctgagagagaagaatggtatgaacctgggaggtggagcttgcagtgagctgagattgtgccactgcactccagcctgggcgacagtgcgagactctgtctcaaaaaaaaaaaaaaaaaaaaaaaagaatgtcaacttaaattgactaggcaaaagtagccttctcacaaaagctaataggcataataattctatccagactctactatgtaagccaatcagcatacacatagaagaatcctggtaacttttttttaaatcagtatcgcttaaggagggtggatgaataatttaatagcataactaagaattggggatgagggatgggaatggaaattaaacctaaaatatttgaaaattaaaccacttcaactttacattgtatacaatatcccagtaacagtttaaaacattactgttttaagtaactaataatttcattaattttggctttaaatttaaggtattactttgttactgatttgatatgatgtgaaccgcccataggatacattattcaaaacaaaagacctaatcctgaactatttcctccaggtacagggtattttccatgggcatctcaccccagtccagaatgagtacattcactgaatataaattttacattagactagaaaattaaaaaggaaataagacaaaatgctgaaaaaatgtatccaaaatctaactatttgggttatctgctctttaactaccataatcaatgttttatggttttttttgtttttttgtttttgagatggagtctcattctgtcgcccaggctggagtgcagtagtacgattctggctcactgcaagctccgcctcctgggttcatgccattctcctgcctcagcctctcgagtagctgggactacaggcgcccgccaccacgcctggctaattttttgtatttttagtagagatggggtttcaccgtgttagccaggatggtctcgatctcctgacctcatgatccgcccgcctcggtctcccaaagtgctgggattacaggcatgagccaccgcgcccggccctaaaatcaatgtttaattgtattttcataatgttgaatttaccctactggaactatgtatccaaaaaattaccaattatcatacaaatccaagacactctcaattgtagatacaaacaggtcattaatatagctatgagaaatattttaagatatactcactctcattcaaacttttgcctagtacttaatgttctcgatctgtactaaaatattttacgtatgttctgatttacagcagtagctacctaactggtcctgggtgtccctgtttgtctgccttttgtaatctactcttccaaaacstgtaatggttatctaactttcagtgatcatggacccctctgaggatccatacctgcacattcttgccaaaaccttcgcaggccctattttaaggaggcccagctcaaacgtcccatcacttaccaatgaagtccaaacttctcagcctgggattcaaagtacttaatgtagtcactgttaactaatttatcttctcttttcc

SEQ ID NO: 1141 - DNA, 2010 bp, Homo sapiens
ttcggtggtgtatgacacatttgagacagagattatctgggtattcatttgtctggagagagaggacaggtgtgaatgaccatattatgtctcatccttggaaaacatggcagctaatgtcaacctctcttaaacatttgctcccttgagtcatgagtctgtaccaattagaaggccattgggtgcaggtaccttaggacaccagctcctcttgctggtcatttctcttggccctgctatctacttgcatattggctcaatttcaggctggcagctcatcatgacagctgtaccagktattacatcccaatggtgttagggactgtcttttttccagagtctcttcaggagtaaggagaagcctgctatggttttgatatttgtccactccaaacctcatgttgaaaattgacccccagtgttggaggtggggcctaatgggaggtgcttgagtcatgggagcagatctctcatgaatagaatcatgctgtcctttaagggtgagtgagttctcactctcttagttcccatgagagctggttgttagctgggtgttgtggtgtacctgtagtctgaactactcagaaggctgaggcaagaagatcatttgagcccaggagttggaggctatagtgcactatgattgcacctgtgaatagccactgcactccatcctggtcaacacagtgagaacccatctctaaaacaaagagcttggcacgcccctcaacacacatcagttttgcttagtgtcttgccttgtgatctctatacacactggttcccctttgccttccaccatgagtggaaggagcttgaggtcctcaacagatgcagatgcccaatcttgaacttttcagctgtcagaatcatgagccaaataaacctttttttcttactcgggctggagtattcctttatatcaatgcaaaatggaccaagacaaagccctccagccaatttccactccacgtggccactgtagcagtcagagttcaggatgaaaaactaaaatgactctatgcattctggatgtaaaagggcccctaattctttatatagaattaatggcatacactactgctcagagagtagaatatgaggataaggttcaaaagctctattcttgaatgtcagagttgctgaccctcaaagatcttagcctggaacacctaggtgcatattaatatttcctgaagtttgtgccaggaaactactaggaatttctcatttgccctgctatacagctataaccatatccagaggaataatgtccttctctttccaaatcttgcctctgttctcatgagtaataacctggaacgagacagagatggtgattctaggacgcctggtggtagtactttgctggcagcagaaaaattcagcatactcacctctaaaccagccccagcaaggggaacaggccactgggattaccttaggcccatcacaatttacctttgatcctgaaggtagagtgtggcactctcacctgtgtcacatggggaagggttgaaacccacccaattcagggcttgactagtaaggaaaacaaagaaaaagctgttggttaaacaagcagcagagcctactgcatactatataacaatataatcatcattttatttgtaaataaatatatatgttaccaaagtagctagctatatagtttaaagaaatatgctgtatatggctgggcatggtggctcacccctgtaatcctagcactttgggaggccaaggcgagtggatcatgaggtcaatagattgagaccatcctggccaacatggtgaaaccccatctctactaaaattacaaaaattagctgggtgtggtggcatgcgcctgtaatcccagctactcgggaggctgaggcaggagaattgcttgaacccgggaggtagaggttgcagtgagccaagattgtgccattgtactccacctggcgacggagcaagactccatctcaaaaaaaaaaaaaaaagaaagaaagaaatatgctgtat

SEQ ID NO: 1142 - DNA, 2010 bp, Homo sapiens
ttcggtggtgtatgacacatttgagacagagattatctgggtattcatttgtctggagagagaggacaggtgtgaatgaccatattatgtctcatccttggaaaacatggcagctaatgtcaacctctcttaaacatttgctcccttgagtcatgagtctgtaccaattagaaggccattgggtgcaggtaccttaggacaccagctcctcttgctggtcatttctcttggccctgctatctacttgcatattggctcaatttcaggctggcagctcatcatgacagctgtaccaggtattacatcccaatggtgttagggactgtcttttttccagagtctcttcaggagtaaggagaagcctgctatggttttgatatttgtccactccaaacctcatgttgaaaattgacccccagtgttggaggtggggcctaatgggaggtgcttgagtcatgggagcagatctctcatgaatagaatcatgctgtcctttaagggtgagtgagttctcactctcttagttcccatgagagctggttgttagctgggtgttgtggtgtacctgtagtctgaactactcagaaggctgaggcaagaagatcatttgagcccaggagttggaggctatagtgcactatgattgcacctgtgaatagccactgcactccatcctggtcaacacagtgagaacccatctctaaaacaaagagcttggcacgcccctcaacacacatcagttttgcttagtgtcttgccttgtgatctctatacacactggttcccctttgccttccaccatgagtggaaggagcttgaggtcctcaacagatgcagatgcccaatcttgaacttttcagctgtcagaatcatgagccaaataaacctttttttcttactcgggctggagtattcctttatatcaatgcaaaatggaccaagacaaagccctccagccaatttccactccacgtggccactgtagcagtcagagttcaggatgaaaaactaaaatgactctatgcattctggatgtaaaagggcccctaattctttatatagaattaatggcatacactactgctcagagagtagaatatgaggataaggttcaaaagctctattcttgaatgtcagagttgctgaccctcaaagatcttagcctggaacacctaggtgcatattaatatttcctgaagtttgtgccaggaaactactaggaatttctcatttgccctgctatacagctataaccatatccagaggaataatgtccttctctttccaaatcttgcctctgttctcatgagtaataacctggaacgagacagagatggtgattctaggacgcctggtggtagtactttgctggcagcagaaaaattcagcatactcacctctaaaccagccccagcaaggggaacaggccactgggattaccttaggcccatcacaatttacctttgatcctgaaggtagagtgtggcactctcacctgtgtcayatggggaagggttgaaacccacccaattcagggcttgactagtaaggaaaacaaagaaaaagctgttggttaaacaagcagcagagcctactgcatactatataacaatataatcatcattttatttgtaaataaatatatatgttaccaaagtagctagctatatagtttaaagaaatatgctgtatatggctgggcatggtggctcacccctgtaatcctagcactttgggaggccaaggcgagtggatcatgaggtcaatagattgagaccatcctggccaacatggtgaaaccccatctctactaaaattacaaaaattagctgggtgtggtggcatgcgcctgtaatcccagctactcgggaggctgaggcaggagaattgcttgaacccgggaggtagaggttgcagtgagccaagattgtgccattgtactccacctggcgacggagcaagactccatctcaaaaaaaaaaaaaaaagaaagaaagaaatatgctgtat

SEQ ID NO: 1143 - DNA, 1716 bp, Homo sapiens
tacctgacagtctttcttaaaaacaaacaacagtggaatctaataaaatctttaaagctactgatttaccaaaaaaaagaggaatatgttaaacaacactgtgaagatacaatcagctaaagtagaatgtgggaaatcctacagaacaaatgacacaagttcttcaataaatacattcattttttaaaagggaaggggaaygtagtagagaaagagacttaggaaactaatcatatgcaatgtttaaatcctgtttagatctattctaacaaactaaccttcaagacatctgacacacacacaaaatgaaatgcaaattaattttgcttcaaaatactccaaagacattgaggaatggtaaaattggtaactggtcttaattcacaggggttcattaatgtcttttccgcatgacaaagtttaataattaaattattaacattaaagaaattcaattatatgatgatatcacaaaaaaagaaaataatgcaattttagattgacatctccctattaccctattcacagataatactgttttccttttttgacacttccttctgaaaaagttaaagtggttaggtccaaatttagtcactaaactttacagcaatacatatatgaaccaatttaaggaaatctagatctggtaaatccacatcagggtttctcaatgttggcactaccaacattttaggacatataattctttgtcatggggtccactcctatccattgccggatgtttagtagcatctctggtctctacccactagatgccagtagcataactcattcccctaaattgtgatgaccagaaatatttccagatattgccaaatgtcccctggagaacaataacacccctcatttgagaaagactgatttaaattaatgatttcttagaatggtgagcttactacaaaaagcaaaaggaactcagtagttacgttccttaaaatctggcaaaaacaacttcaataaaatgactagccagcaacagacaaatggtatttttctctatgttaacaggaatattcaagtatctgaagaaaggcttaaccttttagaaaatgtaaagatgtacaatccttacttttaaacacaatatattaaacaaattaggctttttcatggctcaagataatgaacattatatctacttatattcagctcactcaaaaaagtgggaataacatcacaatatatagcagaataagaactccaaatctccatcccttcacaaagcaatgaataggtggcaaaacagccagaatcaacattttcataattctagaattcaattaaaaccttataacaaccagaggaacatgtaatgaagaaagatgctgctaggttttcataggaaaacgctgtggaattttaatttactgcacaccactcccaactccccctacatggcagcatccatgatagcagcccacatctggtgcctgttgtgggtaccagataaactaatatggaccttattctcaaaaaactgtggttgtatgttttgaactatgtagtggctccctgaaggattgggtcaagggcttgtctttgttccaccatgcttggagattcctagtactgaagcatctttcccagtggtgtctgtcaaaagcatatctctctcatctgtgtgtaacaggtaacaactggggcaaacaataaacatctaaagacccaggaaggaagaagctggagaaggag

SEQ ID NO: 1144 - DNA, 1716 bp, Homo sapiens
tacctgacagtctttcttaaaaacaaacaacagtggaatctaataaaatctttaaagctactgatttaccaaaaaaaagaggaatatgttaaacaacactgtgaagatacaatcagctaaagtagaatgtgggaaatcctacagaacaaatgacacaagttcttcaataaatacattcattttttaaaagggaaggggaacgtagtagagaaagagacttaggaaactaatcatatgcaatgtttaaatcctgtttagatctattctaacaaactaaccttcaagacatctgacacacacacaaaatgaaatgcaaattaattttgcttcaaaatactccaaagacattgaggaatggtaaaattggtaactggtcttaattcacaggggttcattaatgtcttttccgcatgacaaagtttaataattaaattattaacattaaagaaattcaattatatgatgatatcacaaaaaaagaaaataatgcaattttagattgacatctccctattaccctattcacagataatactgttttccttttttgacacttccttctgaaaaagttaaagtggttaggtccaaatttagtcactaaactttacagcaatacatatatgaaccaatttaaggaaatctagatctggtaaatccacatcagggtttctcaatgttggcactaccaacattttaggacatataattctttgtcatggggtccactcctatccattgccggatgtttagtagcatctctggtctctacccactagatgccagtagcataactcattcccctaaattgtgatgaccagaaatatttccagatattgccaaatgtcccctggagaacaataacacccctcatttgagaaagactgatttaaattaatgatttcttagaatggtgagcttactacaaaaagcaaaaggaactcagtagttacgttccttaaaatctggcaaaaacaacttcaataaaatgactagccagcaacagacaaatggtatttttctctatgttaacaggaatattcaagtatctgaagaaaggcttaaccttttagaaaatgtaaagatgtacaatccttacttttaaacacaatatattaaacaaattaggctttttcatggctcaagataatgaacattatatctacttatattcagctcactcaaaaaagtgggaataacatcacaatatatagcagaataagaactccaaatctccatcccttcacaaagcaatgaataggtggcaaaacagccagaatcaacattttcataattctagaattcaattaaaaccttataacaaccagaggaacatgtaatgaagaaagatgctgctaggttttcataggaaaacgctgtggaattttaatttactgcacaccactcccaactccccctacatggcagcatccatgatagcagcccacatctggtgcctgttgtgggtaccagataaactaatatggaccttattctcaaaaaactgtggttgtatgttttgaactatgtagtggctccctgaaggattgggtcaagggcttgtctttgttccaccatgcttggagattcctagtactgaagcrtctttcccagtggtgtctgtcaaaagcatatctctctcatctgtgtgtaacaggtaacaactggggcaaacaataaacatctaaagacccaggaaggaagaagctggagaaggag

SEQ ID NO: 1145 - DNA, 631 bp, Homo sapiens
atttttcaccttctgtgaaatgtttgttcacgacttttacccagttttctattcaattgtttgttttattgatttgtaggagttctttatgtattctagatattaatgttttgacaggcatatttgttgcaaatatcctctcatagtttgacttgtctttttaatttgtctttactttgctttttgctttttttwaaaaaaaaattcttaatccaatgacagattatgggttgtctttttctgtgaacaaaagttaatgattttaataaattcaaagttattattttattgtcattctttatgtgtcttaagaaatgctttcttagtgtgagtttgtaaagatatagtcccatggtatgttttaaattttaaaatttgttttgtcacattaaaattttaacccccaaaatgggagaagggcagagcaagatggccaaataaaatgctccaccaactgtcccacccgcaaagacaccaatttaacatccatactaaaaacaaaaaagcacattcataagaatcccaaatcaggtaaccagcttgggcacagtggggcagagtaccaagcagactcttgggattcctttttccaggacttgactctttgatggcattcctggacctgccctgg

SEQ ID NO: 1146 - DNA, 1131 bp, Homo sapiens
tgttaacttattattctcaatgtattcaggacagtgagatattagaataagatcttagcagaatgttggagcattgcaaagggcctcttacctgaggagggtcaaagaaggattagaaagatggagatatactcacagtgttgtttaggaagcttgtctttgtctcagtgtgtagaatgaattggaattacagaaggatatagaacagtgagaccaatgaaaagattttgctgtcacacggaagtccagtaatatggtcctgaggcaagtgatggtgaaaaagagagattccacgaaggaaaaatcaataggattggacagtgggatgtaatagggaaggaaagtaaagattcaaaaataacttctctagtctttagagtaagaatgattggaagaaaaacctgagtggcggagcaatggcaaggaagttgattttaggtaaacccagttccaactgtcaacatctggttggcagctggatgtgtcaatcaacaatagaggacatgctccaagaactagtaattacataattagtaactacataaagtgtgaatagtttcttgtgattattacacaaaggaaaatccaaaaatctggtagtgcaaaccgaaaaattttcaatataattacatgtgtatttcatagtttttctctttggtcctataattaaaccgtatctacctctgtctctaaacaaataattagcaaaaaagcatctgaacctatagaaatctataaaatccccaagtttggtgatattttagttacagggagttagacttctataaccataatggatagagtttaaattaaatgattgtcacatgttggtaaatggcaagtaccttttctgaagacctcatatattctctctttcaaagaatgtttatgatttcttgaacttactttcaagagatttagaaagagaggattaattattttctatgtataagcacaaacgttgttgaggacattcttatatatttaccaaaaaggggacccaatcataatatattgaaaacttaaatccaccacacaacaaattctggatgaaaacctcacccaatactggattaatgtmatttctgtttctctggtattaaaataatataaagtaagaataagtttcaa

SEQ ID NO: 1147 - DNA, 2397 bp, Homo sapiens
catcccccttgaaatacacacaatgatatcttttaggttaactgcttttgcttatctctgcatgtaggttgagctaactatgggaggaatttagtttatagtttaactttaaagcaaagattgataatagtccctttccgacaactaaccctgcaggaaataagaagaatgtacacacaagtaacagtgttatgttgaagattataggagtattgtgccctgaccaaggccaaagaagcttcaccttccccaccacccactctgacccttgctgctacccagatgtctgtgctcatcactcacctctggatctcaaccctctccctcttctcccttcccctaatatcaaaggagcctaaaattctatttatttaagatggttctttaggacactagtacgccatcttctcggtttgctcgctttccaaaataaagtcactttccttgcaccagcaccttgtctcttgatgtactggctgccatgggcagagcagtaccagctttggactcatttacagtccctactcctacctgacgccccattgtgacaatcaaatttgtcttcataaatcaaattgcacaccctccacccccttgattacaactgatgtcaagtcaggcagggttgtaaagggctgaaagggtcatcctttatttctctaaatttgattcatgaataatcaggaatgcaccattttgagaaaaagcagagcaaataamatactggcatcagtgagaaatccattctattttaacatcgatttcatacaaagcaccaagtcataacgaataccatgcaggcatgcagtgtggttctggatgactctcttctacttgttcttttggtatggtaggtgcatctatatagattcccctcccaggctggataatttgattcgaagcacaaattttttaagtcaattccacggtggagagcaacacttttgagaacaataacgaattgattttgtctgcatttttttttgctctgccataaagtctaatagagctctcttaagaaaggccacagttgtgaaatctgtgtcagataatagagttgatttatttgtatgaacccatcagctcctctattacatttgccaattagtctaaattcttcctcattatagaagattcaagagtgtaaacattctcccccagttaaaaccccaaagatcatcaaactgagcatttatggtgccttttgcaaacaatgcagccatggtggcagcttaaatagctttcctgcagctcacctcttcagaatacagaatgcatttgtttaaaaattgtgcttaacttaactccacctctgggcccaagaacatgccgtagatttaaagattattaagaaaatgaatcaggtttgtcccatttctgttggtagatggctttctgtcctgagagaaccttgatttaatggcatttttatcttcttaattagattcaatttgttaagaaaaataaagatggtaaattacagttttaagattatctgagcctgagacaggattacatttcacgattaacaatcacaactttctttctcaaaagccttctctaatttagcagatgctcctgtcagccagcaatcaggagacagtgttaagatccagggacttaacctttataggattctaagcttttctgaagccagcgtcaaagcatctccaagtcccttggctggggaaaaaggaaagcagtgacaattctttctagttacccatacctcaaaggcaggaaatggtatctcaatgttttctccactgaagccttaagttttaaaaccatggtctcctgattctcagctgacaggagcatcggctaaattagggagggtttttaagaaggaatgttgtgattgttagtggtgaaatgtaatcctgtctcaggctgttctaacctgctcaatcagcggtcttttcttacctaattacacgattctaagaaaatctaatgaggtgctgtcagatttacattggaattattttaaatgttatcacagtagccatggtgatgatatataaatggacaaaatgccaaagatctggagaaatgtcgcaattacacccacagtcgctcagcataggcattaagtcagcatattttaagccttttggatcctcaagcaaatgggctattttagtcagtaaaaagaagtaatataagatggaaacagtttaagtcacattatcaagctgatctttatttccttttattaatactccagcaggaagaacaggattcaaatctattccttcattgcttttcagttcttcaggtattgctatttggcttttcataggacttgtaatatgagatttcttaggaaaattttagttattggaatgctttcattatgttttcatagctccttgggactatgcaatgatgaaa

SEQ ID NO: 1148 - DNA, 2397 bp, Homo sapiens
catcccccttgaaatacacacaatgatatcttttaggttaactgcttttgcttatctctgcatgtaggttgagctaactatgggaggaatttagtttatagtttaactttaaagcaaagattgataatagtccctttccgacaactaaccctgcaggaaataagaagaatgtacacacaagtaacagtgttatgttgaagattataggagtattgtgccctgaccaaggccaaagaagcttcaccttccccaccacccactctgacccttgctgctacccagatgtctgtgctcatcactcacctctggatctcaaccctctccctcttctcccttcccctaatatcaaaggagcctaaaattctatttatttaagatggttctttaggacactagtacgccatcttctcggtttgctcgctttccaaaataaagtcactttccttgcaccagcaccttgtctcttgatgtactggctgccatgggcagagcagtaccagctttggactcatttacagtccctactcctacctgacgccccattgtgacaatcaaatttgtcttcataaatcaaattgcacaccctccacccccttgattacaactgatgtcaagtcaggcagggttgtaaagggctgaaagggtcatcctttatttctctaaatttgattcatgaataatcaggaatgcaccattttgagaaaaagcagagcaaataacatactggcatcagtgagaaatccattctattttaacatcgatttcatacaaagcaccaagtcataacgaataccatgcaggcatgcagtgtggttctggatgactctcttctacttgttcttttggtatggtaggtgcatctatatagattcccctcccaggctggataatttgattcgaagcacaaattttttaagtcaattccacggtggagagcaacacttttgagaacaawaacgaattgattttgtctgcatttttttttgctctgccataaagtctaatagagctctcttaagaaaggccacagttgtgaaatctgtgtcagataatagagttgatttatttgtatgaacccatcagctcctctattacatttgccaattagtctaaattcttcctcattatagaagattcaagagtgtaaacattctcccccagttaaaaccccaaagatcatcaaactgagcatttatggtgccttttgcaaacaatgcagccatggtggcagcttaaatagctttcctgcagctcacctcttcagaatacagaatgcatttgtttaaaaattgtgcttaacttaactccacctctgggcccaagaacatgccgtagatttaaagattattaagaaaatgaatcaggtttgtcccatttctgttggtagatggctttctgtcctgagagaaccttgatttaatggcatttttatcttcttaattagattcaatttgttaagaaaaataaagatggtaaattacagttttaagattatctgagcctgagacaggattacatttcacgattaacaatcacaactttctttctcaaaagccttctctaatttagcagatgctcctgtcagccagcaatcaggagacagtgttaagatccagggacttaacctttataggattctaagcttttctgaagccagcgtcaaagcatctccaagtcccttggctggggaaaaaggaaagcagtgacaattctttctagttacccatacctcaaaggcaggaaatggtatctcaatgttttctccactgaagccttaagttttaaaaccatggtctcctgattctcagctgacaggagcatcggctaaattagggagggtttttaagaaggaatgttgtgattgttagtggtgaaatgtaatcctgtctcaggctgttctaacctgctcaatcagcggtcttttcttacctaattacacgattctaagaaaatctaatgaggtgctgtcagatttacattggaattattttaaatgttatcacagtagccatggtgatgatatataaatggacaaaatgccaaagatctggagaaatgtcgcaattacacccacagtcgctcagcataggcattaagtcagcatattttaagccttttggatcctcaagcaaatgggctattttagtcagtaaaaagaagtaatataagatggaaacagtttaagtcacattatcaagctgatctttatttccttttattaatactccagcaggaagaacaggattcaaatctattccttcattgcttttcagttcttcaggtattgctatttggcttttcataggacttgtaatatgagatttcttaggaaaattttagttattggaatgctttcattatgttttcatagctccttgggactatgcaatgatgaaa

SEQ ID NO: 1149 - DNA, 620 bp, Homo sapiens
cacaagctaatcactgtgtccaatggaatgaattttgctgattagtttagacatggacctggacataggattaacctcaggaaaacctgggatcagagtaagagatggtgggcccccaaataaaccttggggctctgttttaccggaagagtgattgatagaccacaggtagcaaaaatacgggtgctcaccacagaatgtggccaatgagcccagrtttggggttgtcctgcagaagggagagaatggtgtgcctgtgcataagtctgtaggtggtctgcaggagtagtaggagatgaggtcatctgctggtggaggggatggggaagggattaaattgaggactcagaaggaaagggatgaaggtttcaggtgttccagagaagaatggagatgagacaatccagggtacacaaaaggacaaagggcagcaccaagggcccagctgctactggaggtcctgaccctcagggcgggccatgttctgttctccaggctggctgccacactgagccagggttgatgttttgtcaggcgtgtgtggcagaaggagggatatgagagaatcctgggaggtagtgagagagccattttgatggaccactgaaggcaccacgcat

SEQ ID NO: 1150 - DNA, 620 bp, Homo sapiens
cacaagctaatcactgtgtccaatggaatgaattttgctgattagtttagacatggacctggacataggattaacctcaggaaaacctgggatcagagtaagagatggtgggcccccaaataaaccttggggctctgttttaccggaagagtgattgatagaccacaggtagcaaaaatacgggtgctcaccacagaatgtggccaatgagcccagatttggkgttgtcctgcagaagggagagaatggtgtgcctgtgcataagtctgtaggtggtctgcaggagtagtaggagatgaggtcatctgctggtggaggggatggggaagggattaaattgaggactcagaaggaaagggatgaaggtttcaggtgttccagagaagaatggagatgagacaatccagggtacacaaaaggacaaagggcagcaccaagggcccagctgctactggaggtcctgaccctcagggcgggccatgttctgttctccaggctggctgccacactgagccagggttgatgttttgtcaggcgtgtgtggcagaaggagggatatgagagaatcctgggaggtagtgagagagccattttgatggaccactgaaggcaccacgcat

SEQ ID NO: 1151 - DNA, 579 bp, Homo sapiens
cacccttggcatagtctccttatgagtggagtrtatgtttcacccttgactttgaaattggccatatgatttgctttgactagtggcatgtggatgacagccatagcgtgctagttccaagccctaagccttaagagatttcacctgtttctgtttactgtcttgtacccctgccatcaccctgagaagacatacttctagtcctctggtacaaagaaggataagaaatacgtgtaaccaaactaggtccacgattctgcagcacaatactagcctatgtagttcacccatggatccctgaaagtaaattgtaattgtttcaagccaaagagctttggactaatgggttacacaactttattagagcaatagctgaccaatatactaggaaagacccatttgaaagctgtgcatgtgggatttcagtgggtatgagaaggagcgatggaaccaccttaaaggtgagactctgctctgaactagtgggaagagctttggggtaaggatggcttaggaggtgtctaatcctggcccagcaatcttggagcagctctcacctctctctatctgtaatataaa

SEQ ID NO: 1152 - DNA, 918 bp, Homo sapiens
  misc_feature (1)...(918): n = A,T,C or G
ggtctgagctaccatttggtgattttttttgtkgttttactttttaacggtaattagaatctgtaggtattcttcttaagaggaaccagtggattaaaaacccccaatccggaaacccccttctttcctttccagtcactaacctggccagtttaaaatgaaaaaaaaattttcaatttataaccgacccctacccattttaattccaatttccaaggacccattatagaacctgcatttaaacaaccatggaatgcttaattcttgtaggaggaaagacaaagctaaaaaacaccaatgaggagttaaaaaaaattgtgctaatcacagttgcttttcctgatggggaggaggaaagaaaaaataccattttcattaaaccacccagagccagtaaaatcaactatgaccagagaatttcctgtggatggccctctcatttcctgtctgaattatactacagagatggttaccagataaaatacctagaattgatttagagtgggcagtgcttcttcagcagtctttattataaatgttaattctgggatctttgccatccgtggggctttagcagataaataacaccatttttcttcagtgttcacgctcaggtgtaaggctcactgaaagggagctgagatttataggtgatgtaatttagaattctaagcccataagttaatgctttagaaatgtcttctttatcttttctgggattacaaatggacagatccctggcacagctcctcatcttactttgggtncttccttttcctttttttgtgaaaccttatttgcagatcatcactgtttgcagtaaaaaaagcaatgattttggtgtagaacaagaaatgaaaaagattaaatggtcaatggccagaacaagtgttttttgaaaatgtccaccttccagtg

SEQ ID NO: 1153 - DNA, 918 bp, Homo sapiens
  misc_feature (1)...(918): n = A,T,C or G
ggtctgagctaccatttggtgattttttttgtgkttttactttttaacggtaattagaatctgtaggtattcttcttaagaggaaccagtggattaaaaacccccaatccggaaacccccttctttcctttccagtcactaacctggccagtttaaaatgaaaaaaaaattttcaatttataaccgacccctacccattttaattccaatttccaaggacccattatagaacctgcatttaaacaaccatggaatgcttaattcttgtaggaggaaagacaaagctaaaaaacaccaatgaggagttaaaaaaaattgtgctaatcacagttgcttttcctgatggggaggaggaaagaaaaaataccattttcattaaaccacccagagccagtaaaatcaactatgaccagagaatttcctgtggatggccctctcatttcctgtctgaattatactacagagatggttaccagataaaatacctagaattgatttagagtgggcagtgcttcttcagcagtctttattataaatgttaattctgggatctttgccatccgtggggctttagcagataaataacaccatttttcttcagtgttcacgctcaggtgtaaggctcactgaaagggagctgagatttataggtgatgtaatttagaattctaagcccataagttaatgctttagaaatgtcttctttatcttttctgggattacaaatggacagatccctggcacagctcctcatcttactttgggtncttccttttcctttttttgtgaaaccttatttgcagatcatcactgtttgcagtaaaaaaagcaatgattttggtgtagaacaagaaatgaaaaagattaaatggtcaatggccagaacaagtgttttttgaaaatgtccaccttccagtg

SEQ ID NO: 1154 - DNA, 1627 bp, Homo sapiens
  misc_feature (1)...(1627): n = A,T,C or G
tgcacactgaaaatctagaaatagattcccttaaagctacccctgcttgcccatcccttgaaaaatctcacacatagctcggagcctgttattctagttggtgagctctgtaagggtgtgttattttatttctctttaccccttgccaagcagtatgyctggcacagccatctttttgtttaaaaatgaggatctcgagccaagatggccgaataggaacagctccggtctacagctcccagcgtgagcgacgcagaagacgggtgatttctgcatttccatctgaggtaccgggttcatctcactagggagtgccagacagtgggcgcaggccagtgtgtgtgcgcaccgtgcgcgagccgaagcagggcgaggcattgcctcacctgggaagcgcaagggatcagggagttccctttccgagtcaaagaaaggggtgacggacgcacctggaaaatcgggtcactcccacccgaatattgcgcttttcagaccggcttaagaaacggcgcaccacgagactatatcccacacctggctcagagggtcctacgcccacggaatctcgctgattgctagcacagcagtctgagatcaaactgcaaggccggcaaccaaggctggggggagggggcgcccgccattgcccaggcttgcttagggaaaccaaagcagcncgggaaggtcgaactggggtggacccacccccaccttaaggaggccccggctggcctttgaggctccacctttggggggcagggcacagacaaccaaaagacagcagtaccctctggcgacttaactggtccctgtctggacagcttttgaaagaaagcagtgggttcctcccagcacggcagctgggagaatctgaaaaaaggggggccaagaaaacccttgggggggggcccttcttcaagtggggttcctggaccccttgaccccgggaggcaagccttaacctgggggaggggcaccccccccccaagcaagggggggcccaacttggaaacaccctttacaacacaggagaggggtatttttctccaacagaaccctggccaggcttggagggttcccctggtcctgtgttatgaaaagggaaaaaactttaccccaccccaggaaagggggacatttcttaaccaccgggaanaactctcaatcaggttccctcaccccaatcagtgggaagngcccccaaaggttgatataaaaccccccccaggttggggtggaaaaaaccagaaaccagaaaaaccttggaaactcttaaaacgcagaaggggctttttcttcttcaagaggacgccagttcttacccacaaacaaaaaaagattggatggagaatggattttccaaccttaaaaaaaaaggtttaaaaaaacaaatactttggctccgggggacannnnnnnnnnnnnnnnnnnnnnnnnnnnnnnnnnnnnnnnnnnnnnnnnnnnnnnnnnnnnnnnnnnnnnnnnnnnnnnnnnnnnnnnnnnnnnnnnnnnagagcaacagtccgtaaaaaaaaaacaaaaaacctaagttgtggttgaggtgatgggaatgaaaaagaaggaatgatatggtaaacaagtaagtagtggagatttttaaaatgca

SEQ ID NO: 1155 - DNA, 1308 bp, Homo sapiens
aaagttcagattgtgtcatctctcttattaaaacccttcatgactctctattatgaaagaacaagctccaaacttcttaatcctacttataaaaccttcacattcaacttgtctgtcttgcttttatttcctcgtagcaytgttttgtacaacacagttactaacctcaccacccatgaaataggaaaggaaaaacagaattaaaaatacccattctgccttagacatttgccatcaatatcgttttcaacctccctctttcccccttggcaattaattcaatggatcattttcctaatgattgctgttcacactctgcttaactgttttaaatatcaagatattgaatagttttgatgaacacagataatcagtgtgtgattattgactgccctaatgtactcacagaggctcaatacaagaacatggcatatagtagcaggccatgcagcaggcaaccagaaacaaatcctcatgtcctgttcttaagatcattgagtccatcttcacgggtgagtgtgatctcaggacagaatgagacccaggtggaaccgtgtctcccttcacaggagtaggccattgcaacaacatttattcatttattcattcactcattcatttagtcattcatgcatcaagcagttactgagtatggtctaacaccatgtgtccaaagatgaaccccatttccagggagctcccagtcctttctgtggtaagttcagtgatttgatccaaatgctgggatccagaaaggagtgagccaggcctctgctgaggcagttgaagggttgggagggggacagttgaaaggttcttaaagaatgaaaaaaatgagtccttggtagcaagaagtatgtgtgtgtgtgtgtgtgtgtgtgtgtgtgtgtgtatttaaggaatacgaggatggtagcaagtggacgaggaaggaattgctgccatagtagaaggaatcaaaatgcaaaggtagttaagaaactacacagtgtgtttgggaaattatggcaagttcagtgtgacttgagaaaggcagcaaagggggcagagggagatgaggctagagggtaagcaaggtgcagattgtagggtacttgtactttggagctcaaattttatctttaagcagtagggagccaagagaagcctcttaagcatcagatattttttgaataaaggtctggtgttagtatagtcattggatttgagaagatgagcatttcattaatgtttttgagtggtgaccatagccaaggaaaactccataccacgtccaagctaacctgcatgtttgtgtgtgtcttccta

SEQ ID NO: 1156 - DNA, 1308 bp, Homo sapiens
aaagttcagattgtgtcatctctcttattaaaacccttcatgactctctattatgaaagaacaagctccaaacttcttaatcctacttataaaaccttcacattcaacttgtctgtcttgcttttatttcctcgtagcattgttttgtacaacacagttactaacctyaccacccatgaaataggaaaggaaaaacagaattaaaaatacccattctgccttagacatttgccatcaatatcgttttcaacctccctctttcccccttggcaattaattcaatggatcattttcctaatgattgctgttcacactctgcttaactgttttaaatatcaagatattgaatagttttgatgaacacagataatcagtgtgtgattattgactgccctaatgtactcacagaggctcaatacaagaacatggcatatagtagcaggccatgcagcaggcaaccagaaacaaatcctcatgtcctgttcttaagatcattgagtccatcttcacgggtgagtgtgatctcaggacagaatgagacccaggtggaaccgtgtctcccttcacaggagtaggccattgcaacaacatttattcatttattcattcactcattcatttagtcattcatgcatcaagcagttactgagtatggtctaacaccatgtgtccaaagatgaaccccatttccagggagctcccagtcctttctgtggtaagttcagtgatttgatccaaatgctgggatccagaaaggagtgagccaggcctctgctgaggcagttgaagggttgggagggggacagttgaaaggttcttaaagaatgaaaaaaatgagtccttggtagcaagaagtatgtgtgtgtgtgtgtgtgtgtgtgtgtgtgtgtgtatttaaggaatacgaggatggtagcaagtggacgaggaaggaattgctgccatagtagaaggaatcaaaatgcaaaggtagttaagaaactacacagtgtgtttgggaaattatggcaagttcagtgtgacttgagaaaggcagcaaagggggcagagggagatgaggctagagggtaagcaaggtgcagattgtagggtacttgtactttggagctcaaattttatctttaagcagtagggagccaagagaagcctcttaagcatcagatattttttgaataaaggtctggtgttagtatagtcattggatttgagaagatgagcatttcattaatgtttttgagtggtgaccatagccaaggaaaactccataccacgtccaagctaacctgcatgtttgtgtgtgtcttccta

SEQ ID NO: 1157 - DNA, 1308 bp, Homo sapiens
aaagttcagattgtgtcatctctcttattaaaacccttcatgactctctattatgaaagaacaagctccaaacttcttaatcctacttataaaaccttcacattcaacttgtctgtcttgcttttatttcctcgtagcattgttttgtacaacacagttactaacctcaccacccatgaaataggaaaggaaaaacagaattaaaaatacccattctgccttagacatttgccatcaatatcrttttcaacctccctctttcccccttggcaattaattcaatggatcattttcctaatgattgctgttcacactctgcttaactgttttaaatatcaagatattgaatagttttgatgaacacagataatcagtgtgtgattattgactgccctaatgtactcacagaggctcaatacaagaacatggcatatagtagcaggccatgcagcaggcaaccagaaacaaatcctcatgtcctgttcttaagatcattgagtccatcttcacgggtgagtgtgatctcaggacagaatgagacccaggtggaaccgtgtctcccttcacaggagtaggccattgcaacaacatttattcatttattcattcactcattcatttagtcattcatgcatcaagcagttactgagtatggtctaacaccatgtgtccaaagatgaaccccatttccagggagctcccagtcctttctgtggtaagttcagtgatttgatccaaatgctgggatccagaaaggagtgagccaggcctctgctgaggcagttgaagggttgggagggggacagttgaaaggttcttaaagaatgaaaaaaatgagtccttggtagcaagaagtatgtgtgtgtgtgtgtgtgtgtgtgtgtgtgtgtgtatttaaggaatacgaggatggtagcaagtggacgaggaaggaattgctgccatagtagaaggaatcaaaatgcaaaggtagttaagaaactacacagtgtgtttgggaaattatggcaagttcagtgtgacttgagaaaggcagcaaagggggcagagggagatgaggctagagggtaagcaaggtgcagattgtagggtacttgtactttggagctcaaattttatctttaagcagtagggagccaagagaagcctcttaagcatcagatattttttgaataaaggtctggtgttagtatagtcattggatttgagaagatgagcatttcattaatgtttttgagtggtgaccatagccaaggaaaactccataccacgtccaagctaacctgcatgtttgtgtgtgtcttccta

SEQ ID NO: 1158 - DNA, 1308 bp, Homo sapiens
aaagttcagattgtgtcatctctcttattaaaacccttcatgactctctattatgaaagaacaagctccaaacttcttaatcctacttataaaaccttcacattcaacttgtctgtcttgcttttatttcctcgtagcattgttttgtacaacacagttactaacctcaccacccatgaaataggaaaggaaaaacagaattaaaaatacccattctgccttagacatttgccatcaatatcgttttcaacctccctctttcccccttggcaattaattcaatggatcattttcctaatgattgctgttcacactctgcttaactgttttaaatatcaagatattgaatagttttgatgaacacagataatcagtgtgtgattattgactgccctaatgtactcacagaggctcaatacaagaacatggcatatagtagcaggccatgcagcaggcaaccagaaacaaatcctcatgtcctgttcttaagatcattgagtccatcttcacgggtgagtgtgatctcaggacagaatgagacccaggtggaaccgtgtctcccttcacaggagtaggccattgcaacaacatttattcatttattcattcactcattcatttagtcattcatgcatcaagcagttactgagtatggtctaacaccatgtgtccaaagatgaaccccatttccagggagctcccagtcctttctgtggtaagttcagtgatttgatccaaatgctgggatccagaaaggagtgagccaggcctctgctgaggcagttgaagggttgggagggggacagttgaaaggttcttaaagaatgaaaaaaatgagtccttggtagcaagaagtrtgtgtgtgtgtgtgtgtgtgtgtgtgtgtgtgtgtatttaaggaatacgaggatggtagcaagtggacgaggaaggaattgctgccatagtagaaggaatcaaaatgcaaaggtagttaagaaactacacagtgtgtttgggaaattatggcaagttcagtgtgacttgagaaaggcagcaaagggggcagagggagatgaggctagagggtaagcaaggtgcagattgtagggtacttgtactttggagctcaaattttatctttaagcagtagggagccaagagaagcctcttaagcatcagatattttttgaataaaggtctggtgttagtatagtcattggatttgagaagatgagcatttcattaatgtttttgagtggtgaccatagccaaggaaaactccataccacgtccaagctaacctgcatgtttgtgtgtgtcttccta

SEQ ID NO: 1159 - DNA, 1308 bp, Homo sapiens
aaagttcagattgtgtcatctctcttattaaaacccttcatgactctctattatgaaagaacaagctccaaacttcttaatcctacttataaaaccttcacattcaacttgtctgtcttgcttttatttcctcgtagcattgttttgtacaacacagttactaacctcaccacccatgaaataggaaaggaaaaacagaattaaaaatacccattctgccttagacatttgccatcaatatcgttttcaacctccctctttcccccttggcaattaattcaatggatcattttcctaatgattgctgttcacactctgcttaactgttttaaatatcaagatattgaatagttttgatgaacacagataatcagtgtgtgattattgactgccctaatgtactcacagaggctcaatacaagaacatggcatatagtagcaggccatgcagcaggcaaccagaaacaaatcctcatgtcctgttcttaagatcattgagtccatcttcacgggtgagtgtgatctcaggacagaatgagacccaggtggaaccgtgtctcccttcacaggagtaggccattgcaacaacatttattcatttattcattcactcattcatttagtcattcatgcatcaagcagttactgagtatggtctaacaccatgtgtccaaagatgaaccccatttccagggagctcccagtcctttctgtggtaagttcagtgatttgatccaaatgctgggatccagaaaggagtgagccaggcctctgctgaggcagttgaagggttgggagggggacagttgaaaggttcttaaagaatgaaaaaaatgagtccttggtagcaagaagtatgtgtgtgtgtgtgtgtgtgtgtgtgtgtgtgtgtatttaaggaatacgaggatggtagcaagtggacgaggaaggaattgctgccatagtagaaggaatcaaaatgcaaaggtagttaagaaactacacagtgtgtttgggaaattatggcaagttcagtgtgacttgagaaaggcagcaaagggggcagagggagatgaggctagarggtaagcaaggtgcagattgtagggtacttgtactttggagctcaaattttatctttaagcagtagggagccaagagaagcctcttaagcatcagatattttttgaataaaggtctggtgttagtatagtcattggatttgagaagatgagcatttcattaatgtttttgagtggtgaccatagccaaggaaaactccataccacgtccaagctaacctgcatgtttgtgtgtgtcttccta

SEQ ID NO: 1160 - DNA, 632 bp, Homo sapiens
gggcgcggtggctcacgcctgtaatcccagcacttcgggaggccgaggcgggyggatcacgaggtcaggagatcgagaccatcctggctaaagcggtgaaaccccatctctactaaaaatacaaaaaattagccgggcgtagtggcgggcacctgtagtcccagttacccgagaggctgaggcagaagaatggcgtgaaccagggaggcggagcttgcagtgagccgagatcaggccactgcactccagcctgggcgacagagcgagactccatctcaaaaaaaaaaaaaaaaaaaaaaagtcatcattatcaatagaaattgatggcgcaccctaaggagaagtcactgtaccaaagcctggcttctcagaggctcacaaaagctgcggaattcacgtttgacttccctcctttctacctagtcaaaaatcctctggccttaattttcttttcctgttgttttcccttccttgtgtctggtgacattttcttttcacttaccaattcctcccaaattttcttttcattcttagccaattttgtcttttggagccactaattggtctctgtgctacattttccaagatgattttctatttatttacctgttctttctacataaagctcaatt

SEQ ID NO: 1161 - DNA, 625 bp, Homo sapiens
aaaacttgaactagaaacaaaaagagtcaagcaaaaaagagagaatacttctcagaaccagaattttgtgatgctggaattccccaaatgagaagcaagaccatgctttaatattccaatgttaagctatgatcgtttctgggatctgggtggtgaccttggaatccaccagaagtcacctggccaccacggggggtcagagtcctgctctccttttcaccatttttttttttttggtggtttccttgtttggtatgaggagaaagagcccaaaattggaaaggggctggggctttctggatggatttctgttctcaggacttaagacctgttattaatcactttaacaatttatatcggtatttttcaaattatttgactgtgaaatatatatatatatatatataaaatctatatgtcctaaacaaaagttttataaacaatacttgcctttaatgcacatgatacattttgatattttctactctattgtagttttttaaagcactggccatgacagtaaattgattcattatgtaacctgcagtttggaaacccaatgagggtcagayaccaagaagcagggtctggaggagattgtaagggaaggcaggccaggtcctca

SEQ ID NO: 1162 - DNA, 605 bp, Homo sapiens
ctctgaaggcccaatttaagcaaatccttttaaagcatcttttggccagacaggacaacaggaagaaaacatattttcacggcatgccattttatgcaagtgggaatgcaatccaaagaaaattgtgtgcgtgctctctctctctgaaacagagaaatgaagaaaagaaagacaaagaaagccacaagacamctttccatagattgcataaaagcctgatggtatttaaattattatattataaatgattctctgctgattgtaccattaacagaccacagatagaagcattaggaaatcacagggcgatgctgaattttgtctacagtatgtgtagtttaatggactgtcttgccttgtagaattctttatcgtattttatcataattttaatgactctcattgtcatatttcagaacaatgagtctgaaaaatcttccttatgattttttagtgagtcactttgggaaggtgatgatcaagaaaaaagttggaaaaattgagacagattatcaaaacctttagaaagtcaagattttgtgttccaggaatctttagtcaatgttggtgggaaggtgtaatttcagggtaaccaatcaggaatt

SEQ ID NO: 1163 - DNA, 605 bp, Homo sapiens
ctctgaaggcccaatttaagcaaatccttttaaagcatcttttggccagacaggacaacaggaagaaaacatattttcacggcatgccattttatgcaagtgggaatgcaatccaaagaaaattgtgtgcgtgctctctctctctgaaacagagaaatgaagaaaagaaagacaaagaaagccacaagacaactttccatagattgcataaaagcctgatggtatttaaattattatattataaatgattctctgctgattgtaccattaacagaccacagatagaagcattaggaaatcacagggcgatgctgaattttgtctacagtatgtgtagtttaatggactgtcttgccttgtagaattctttatcgtattttatcataattttaatgactctcattgtcatatttcagaacaatgagtctgaaaaatcttccttatgattttttagtgagtcactttgggaaggtgatgatcaagaaaaaagttggaaaaattgagacagattatcaaaacctttagaaagtcaagattttgtgttccaggaatctttagtcaatgttggtgggaaggtgtaatttcagggtaaccaatcagraatt

SEQ ID NO: 1164 - DNA, 1216 bp, Homo sapiens
tgcataataaaatgccaaacaaaaattttaattatgatgaactgcttgtcaaatgattaactatacaaatatctcagtgacaccattgtaagccgtgtggttcatatatgctttcttgtttgggtttgacctctcccattccttctttattataccacttattcaaaccatcccttagtctccttaagaccctatactgaccttgtatccttctttgtgaataagatctattcttgtggctcatgtgtgtaatcccagtaccttgggaggctgaggcaggaggactgattgggctctagagtttgcgactagcctggacaacatagcaagacctcatatctactaaaaaaaagaaaggaaggaaggaaggaaggaaggaaggaaggaaggaaggaagraagaaagaaagaaagaaagaaagaaagaaagaaagaaagaaagaaagaaagaaagaaagaaagaaagaaagaaagaaaacatagccaggtgtagtggtgcatacctgtagtcccagctacttgggaggctaaggtgggaggattgcttgagcccaggagttcaaggatagcatgagccatgatcatgccactgccctccagctggagcaaaagagcaagaccctgtctcaaaaatgaaaaatttattctatcttatgttctatttaacagtcccatcccctatcacccatcactttatctacaacaggagtcattcaaaaaactaaagagccaggtagttcaaaatgcaagattcttcattgcctggtccaaatctgtctttccagtttcaatccccatcatttccttaatgcctgctctgccccagtcattgaccaccaggatctccccaaatgtgctgttctctttccaaacctctgagaacttgcacatattgtttctttgcctacaatctctctcctatccacttgtcaagcttctatgtatactttattacttggcttacaatgtggtttctattcccaaaagagtgccaagaaactacatatgttgcaggcacctgtcaataaagaaaatcctaccattgaatccaagtcaggcgctgaggtcctgatatccagtgacaggcttccccgatgtgagagccttcctccgctgtgtatttcagccatgctccacagatcttgcaatcttaccctttctctctcactcctctggtactatctactctcttcactcaagaaccagtgaagcatcaa

SEQ ID NO: 1165 - DNA, 1216 bp, Homo sapiens
tgcataataaaatgccaaacaaaaattttaattatgatgaactgcttgtcaaatgattaactatacaaatatctcagtgacaccattgtaagccgtgtggttcatatatgctttcttgtttgggtttgacctctcccattccttctttattataccacttattcaaaccatcccttagtctccttaagaccctatactgaccttgtatccttctttgtgaataagatctattcttgtggctcatgtgtgtaatcccagtaccttgggaggctgaggcaggaggactgattgggctctagagtttgcgactagcctggacaacatagcaagacctcatatctactaaaaaaaagaaaggaaggaaggaaggaaggaaggaaggaaggaaggaaggaaggaagaaagaaagaaagaaagaaagaaagaaagaaagaaagaaagaaagaaagaaagaaagaaagaaagaaagaaagaaaacatagccaggtgtagtggtgcatacctgtagtcccagctacttgggaggctaaggtgggaggattgcttgagcccaggagttcaaggatagcatgagccatgatcatgccactgccctccagctggagcaaaagagcaagaccctgtctcaaaaatgaaaaatttattctatcttatgttctatttaacagtcccatcccctatcacccatcactttatctacaacaggagtcattcaaaaaactaaagagccaggtagttcaaaatgcaagattcttcattgcctggtccaaatctgtctttccagtttcaatccccatcatttccttaatgcctgctctgccccagtcattgaccaccaggatctccccaaatgtgctgttctctttccaaacctctgagaacttgcacatattgtttctttgcctacaatctctctcctatccacttgtcaagcttctatgtatactttattacttggcttacaatgtggtttctattcccaaaagagtgccaagaaactacatatgttgcaggcacctgtcaataaagaaaatcctaccattgaatccaagtcaggcgctgaggtcctgatatccagtgacaggcttccccgatgtgagagccttcctccgctgtgtatttcwgccatgctccacagatcttgcaatcttaccctttctctctcactcctctggtactatctactctcttcactcaagaaccagtgaagcatcaa

SEQ ID NO: 1166 - DNA, 614 bp, Homo sapiens
caggatttttctacaggttatttatgctttatataaaactatctcttcatctggcacaaatacatgtaccttaaataaaatccctttcttcttccatacattgaggagaacacaaattgtaagccctctcttgcgggcattttggcaatatgtggcaaaattgaaagcacatgcaccatttaactcaagtactcctattccagaaaggtatccaacatgygtgttcatgtgttcaaaggtgttcattgcagcactgtttatattgaaaaaaaacgtctgtaaagagtttaaatatcctttaatatggtgctggttaaataaagtatggtacatatatgcagtgagagatcatgtagttatttaaaagaatgagacagctctgcagctcagatcaatcagctggagtccaggagagagatcatgtagcataagcttagcttccagggacccaagccaggggtggtatgtgtgtgtgtgtgtgtgtgtgtgtgtgtgtgtgtgtgtgtgtgtgtttataattttagtctacttcatcctttagctagataggaatagaaattgggcaactcacttgtcaaaacttgccaatctttagaaggtcagattaatatcaa

SEQ ID NO: 1167 - DNA, 978 bp, Homo sapiens
  misc_feature (1)...(978): n = A,T,C or G
gccagctattggctactagctatctctgtgtgacctgtgtttctcaaggaggcttgcctggacttctccacagggcagactcagtgtgcaagaatagaagctcccaggcttaggagcagaattcacaataacgtcagttgagccacattttatttttcaaattcaataggctaactcagattcaagggaaagggaaatggactccattgcttgaaggtaagagtgagtcaccatgcaaactgccaaggaaggtattgtggccaccatcttgcaaacagtctattataggcctgatgtgtgttttatctttttctgaagttatttttctctaaatagcaaacttaatacattttacatcccctattcccatcctgccctctcccctcaaaaaaaagtgtgagtaaacatatgcaatttttccactagagaccattgaaagcattcagccactatgggtcaatacagaagagtctattcaaaaacacaaccaaaagcaaacaggaacactaaaaaaaggaaaagaagagggagacrgatacagagaggcagataaaaagatggaggaagaagcagcagaggaagaagagattgagtaactttaaaaacaggggcatattaatcttatatacaatctaaaatgcctccccatcatttgattttaatctcttctgcttgaacgcttacaagatgtctgtaattcatccctcacaagtttatgatttgggattaactctatcccctatcctaatctatgtcttatgcattttgtgtgtgtgtccgtgtgggtgtgtgtctgtgtgtgtatacatgcacacatgtgagagtatgtatgtgtgaatgggttggttgggttantgaaggtcaagtagggtaggnaagaagaatgacagaaataatcatattataaaaatagaatatanaaagtcaaacctcagaaaaatgccctaactctgaaaaatgacaaaaaatgatattttc

SEQ ID NO: 1168 - DNA, 1337 bp, Homo sapiens
tgcatacaaatgtcacagcaaaatataaattaagaattaaagcaactgaaaagtggataattaatccatttcctgctttctcccaagttaaaatatccagccttccagctttggacatgataatcccaattagtatgtgaaagaatgttgaagtaaccttcagtgaaatttctctccatctttccaggctcttcactgatctcaatgtctataattatctgacaagtcaccaaacactttctcccatttctgatgacttataattgcatattaggattttcttttcttttgtgacagtgtcgctccgttgcccacgctggaatgcggtggcgcaatcttggctcactctagcctcaacctcccaggttcaaccgattctcrtgcctcagccttccgagggactaggactacaggtgtgcactatggtgcctggataatttttgtatttttcttttttttagtatagatggtgtttcaccacattgctcagactggtcttgaactcttgagctcaggtgacccacccacctcagcctcccaaagtgctgggattataggcgtgagccaacaggcctgtccacattaagattttctattttcatgttgtaaaagattataataaaccaagttgatatgaaacatggctggcagttatagtcattatagagtctggtagtcaggtatcaatactttggggaaagaaagctatattgtctattaaacctatataaaacaataattactaacatttaaaggttgtacattatgtttaccttatctaaaagatgttgatacagtgctatgtatgcactaacaactataaaaagcttgctgctgctaagaaaaaaaaagccacagattcattctttttcaagtctgaataaacaaaattactagaggttacattgaggtttcgaataaaacactgcttgtaataaaacaagtgaccttgtcttctgcctgcagatccctgggaatctcatcacagagggtggagaagatgggggagaggtcttgtaggagatcaggatttgagcatctagggtttctggctattttcctttccttcatgtttgaaaatttattgagattatttaaaattttgtatataaatatcaatatcattttgaaaatattgttatataatggaagatttttgtagcatctatgctagctaaattgaaatatttttgctctcatcttttattatctaatgtaattgcttattgcaatttaaataatgacaatgtttatgtttcctattctcattttctattgaaatgtggaattccataatcatgcagctatagtctcacagtgataataattgctatgca

SEQ ID NO: 1169 - DNA, 694 bp, Homo sapiens
ctcttctcttttgattttaggctagttcttttagagtaaagatccttagaaaaaaattagaacattcaactatgggatgtcaagctgtgcaaggatagactgggggaaaataaacaaacacattgtgttaagaatttgtacggagcactgctttatttgtcttctcatgttagagctgtagcctcagaatgtcacgcctggatgacaccttatttattcatttacacaagaggaagaggagattcggagaaaaggagaggatttttctctgatcatgaaactaatggccaaagctgaaccagaacagaaatctcctgactttcagcttttgtctgaatttatttatttacaatgtatatccgatatattcctatctatccccctttaaaaaatttaaggcaggctgggcgcggtgcctcacgcctgtaattccagcactttgggaggccaaggcagayggatcacttgaggtcaggagttcgagaccaacctggccaacatggtgaaaccccgtctctactaaaaatacaaaaattagctgagcatggtggtatgtgcctgtagtcccagctactcgggaggctgaggcacaagaattgcttgaacctgggaggcagaggttgcagtgaacagagttcacagcactgcactctggcctgggtgacagagtgagattgtctcaaaaaaaaaaaaa

SEQ ID NO: 1170 - DNA, 740 bp, Homo sapiens
atgaaagcaagtcgcagaccaaatcttgtcacacacctgaaagctcatttaagcaaacatttgtcagcaaaagtgtttgttcagcctatcctgtagctcactataatccatgctctctgtcccaaatgctctgtccacaactttgcatgaaaagttcacttgaggcagagagggaaacgtgccaggggccaggattctgttacccttaaagatggcatcatgtaaccagacatcctcttaactagtggctggtcacaggattatgtaacgatggagccctgagggccattcctaaggggtcgcgttgctgacctcactagattcttacaccttgtttatgcaaaggcagcaggagtctctcaaataactttagccaatggaaggatcccgaacacctttcatttcactgatgagagcccactgatgacctcattaccaattaacaagcaactcagttcatcaggaaacagccatttctttttccatttatttatttatttatcgagacagtgtctagctctgctgcctaggctggagggcagtggtgtgatcatggctcactatagctttgacctcctgggctcaagcaatccttccagttcagcttcctgagtaactgggagcagagatgctcgccactacagctrgctactttttttattttttgtacggatggggtctcactatgttgcccaggcttgtgactgcacaatgggttccccttgcccgttgcctaggca

SEQ ID NO: 1171 - DNA, 1120 bp, Homo sapiens
aatgatctgtgagggaaagtggggtgagaattctttgacaaagtcctttctcatgacacaaacatagacaagatccacactgttttcattacacttcagaagacagattcatagttcacccttgcagcacactagcacccacatacgcagggctacattttcattctgcaactccacctgccgagtgacatctgggcagtgtgacattcagggcagagatatcccttatagcagttttgcctgtctgaaatttccctcctttcattaaggagaacagcaggttggaccttcgctgtaaccaccgaaaatctggcatgcctgcctctccaaatgtcacctatctatctacttgtgcttctctgctcctgacaagatgaaaagcctggagagatggctcagccctatcggactgcatttaggtggtaaatcagagctacattaattttagggtaaacattcaaaaaagtagttgagatcagcaaatgtaccatatactgcaactgcctctgcttttcctgactggctttactatttctgttcttggacattccaacaccgacatgtttggttccaaagtaccttgaggtaaaatgaacctacacacacacacacacacacacacacacacacacacatacccacagacacatgcacacatcaagctgtttgaaatcaacattaggcagcttgtggtagcctgttatgtaaatcatgtgccgcgactggggattaggtcaaaccaactgccttccgtgtcctataatgagacccacttcagcactctgcttctttgttgtgccaagtctgtaggttaattgtcattccccaaataaataaaaaaccctgtccttaaaagagctccagagagtcaactcagtgacttcagggtttttcttttctcgtattttgcaacacaccctttaacatggttttccatcttaatgaagtcatggccctttatgagattagagcaccttgtctcttattgaaggagcagtaagaaataattcagcacaaattgytcactctcagtttataagctgattaatttactgatttcactgctaaagaaatgtgttccattttagctctgtgaactgcatatttttggcccccttgt

SEQ ID NO: 1172 - DNA, 600 bp, Homo sapiens
gagaacctattatgctaagctccctatagagctccctatagagatcaataaggcataatccctactccctatatatgctaagctccctatagagctccctatagagatcaataagacataatccctactccctatagggaccactgcactccagcctgggtgacaagagtaagactccacgaaaaaaagcgcttggctgggtgcggtggctcacgcctgtaatcccagcactttgggaggccaaggcgggtggatcatgaggtcaggagwtcgagaccatcctggccaacatggtgaaaccccgtctctactaaaacacaaaaaattagccgggcgtggtggtgcatgcctgtagtcccagctactcgggaggctgaggcagtggaatcgcttgaacccaggaggcagaggttgcagtgagccaagatcacgccactgcactccagcctgggtgacagagcaggagtccgtctcaaaaaaacaaaacaaaacaaaacaaaaaaagcactagcgcttacgatttgactcgggtaaccatagcacttctcagactatgggtgcgtacgaatcacctggaggatcttgttcaaatgcagattc

SEQ ID NO: 1173 - DNA, 1151 bp, Homo sapiens
tgtttaggacctcactctatccattatttattcattgaaaggtatagttctaaggcaaaattaattttagaagaaatttgaaatggagaaagtcttatttcctggctgccacagagcttgccatggggcaaggagagaatctatctgaatgtagccttttaaaaaatttactaattacatggcctcagctgtcaaaaatgtcattttcatttgtgagaaactatttttcttttgtggatgattacctgttcattctctattagggcgcttttcttcatatgtgatcaagtgtcttctttacatttctttataaaacagtgtacctccccaagtaggcttttgtaagtacatacaacatagctacacggaaatagaaaaatgtctgttatgttatataatgaaaacattgctattataattatttggattttatattagaaatagctgcctgtttttttaagctaatgaagaaaataaagacatgcaagaccaaatccccaggtaataatgaagcttcattttatctatagcagtgatttttttttttttttttttttttttaccaagcctataatggaacttccagtcagcagtcatattaagtttatcatcaatttttattgaatgtttgatgatggggtagagcaggtaaaaataacgcagcatgtaatgctctaaaaaataaaaacaaattatcttgaattataaaattaagatttatttcccaaataatttttcacatttaaaaaaattgaatttaattgtcaatcaccttgaccccatgatccatggttccagcttgcaaactacagaaataactttggctgtatttactaaaaaatgaatttatcaaaaggatattaggtagctcaaataattgctaagatttaagaaactgtaacagcctgattatgtccaaaactatactgcagatctcgttcaataagggcatcccttgactctcaggaccaggcacccaaacttccaagtacttccaccaccacattggaccctgggtgctctgacagcagagtaaccagtgcttcctttgtaaacttctttctgctttcacctycctgaactctaggaagtattcatcatttttcctaattcatatatagggtgggcatttggatctgattggtaagatc

SEQ ID NO: 1174 - DNA, 1235 bp, Homo sapiens
agtctttggctggagggcacaaaggcaacatttacaaggtagatattttattcatttatagaatatgaacatttttaatattgattcaataaatcttggctatttgaaggcttttaaaagtgttgtctagattcactacaatctgtctcaaagacagtaaaatacatgaacaaaaatgtctgtagttgaatctaattctctaagctaacagcatgtttatatgcaattttgcatgtgatmttactgttattcattacagttctgttataaataagagagattattcattctttgacttggtgggggctggttttcctgaggtatttgttccccttttgtttcttcagatttatgagcctggcaagccttttctgtctgctgctgaaaagactattgtgcccatgtacacacagtcccagcaaataatttatttcagacctctgagaacattcttttcctcactctcaaaacagggatttttcatttcagtcatcggtcccaatcttagcagtgattccaccaagtcagtattcattttcaataaagaaagaaagaaaaagttatacctgagaaggctgtgacatagaaaaatggaacaatggtgaaaatggtcctggattttatgccaccatcagaaaaattttggtcaggcataaagtcttaatttttaaatactttattttcctcctttattttctggttctttcatccctacctcaaatattagaaaaaataaatctatttcagtttagcagcaaaacatttgattgggaggtaatgattcaattaattcaaagaacaattttattttagctacaaggattattctttctcttgacttatttggatgattatctgattagtttttctagagacataacttcattgatagaattatattattatttctccatttgcttttgtaattgttataattatgtcttagactttataagatttataagatcctattatctattaattttactcattacaaaattttccaatccgtgtgtaattacatatattgtaacatcactatgttataaggctatgtgtgactttgggaatttgtgtagctcattttcttaggtacagaaaaaactggctacaactgtccctaaaattagtctttcttaaaattccctaaaaaggaagatatttcttcagcctctcactctgaaaaaagacctgacttttaaagaaatgaccaaagagaccttgactataatgca

SEQ ID NO: 1175 - DNA, 1235 bp, Homo sapiens
agtctttggctggagggcacaaaggcaacatttacaaggtagatattttattcatttatagaatatgaacatttttaatattgattcaataaatcttggctatttgaaggcttttaaaagtgttgtctagattcactacaatctgtctcaaagacagtaaaatacatgaacaaaaatgtctgtagttgaatctaattctctaagctaacagcatgtttatatgcaattttgcatgtgatattactgttattcattacagttctgttataaataagagagattattcattctttgacttggtgggggctggttttcctgaggtatttgttccccttttgtttcttcagatttatgagcctggcaagccttttctgtctgctgctgaaaagactattgtgcccatgtacacacagtcccagcaaataatttatttcagacctctgagaacattcttttcctcactctcaaaacagggatttttcatttcagtcatcggtcccaatcttagcagtgattccaccaagtcagtattcattttcaataaagaaagaaagaaaaagttatacctgagaaggctgtgacatagaaaaatggaacaatggtgaaaatggtcctggattttatgccaccatcagaaaaattttggtcaggcataaagtcttaatttttaaatactttattttcctcctttattttctggttctttcatccctacctcaaatattagaaaaaataaatctatttcagtttagcagcaaaacatttgattgggaggtaatgattcaattaattcaaagaacaattttattttagctacaaggattattctttctcttgacttatttggatgattatctgattagtttttctagagacataacttcattgatagaattatattattatttctccatttgcttttgtaattgttataattatgtcttagactttataagatttataagatcctattatctattaattttactcattacaaaattttccaayccgtgtgtaattacatatattgtaacatcactatgttataaggctatgtgtgactttgggaatttgtgtagctcattttcttaggtacagaaaaaactggctacaactgtccctaaaattagtctttcttaaaattccctaaaaaggaagatatttcttcagcctctcactctgaaaaaagacctgacttttaaagaaatgaccaaagagaccttgactataatgca

SEQ ID NO: 1176 - DNA, 1348 bp, Homo sapiens
tgcatactattaagcatttatcaaaacccgtaagacccattggatacagagtaaactctaatgttagtgatggactttaataataacatatcagtatgactaatccaagttgctaatagtggaaccttagagttttggagatgggaggttcctataaagctcttayatgggaatgctctgtactataagctcagttttctttttctttttttttcagatggagtctcgctctgtcgcccaggctggagtgcagtggcacgatctgcaacctccacctcccgggttcaagcaattctcctgcctcagcctcccgagtagctgggactacaggcgcgcgccaccatgcctgactcattttttatatttttgctagagatggggtttcaccatgttggccaagatggtctcaaactcctgacctcatgatctgcctgccttggcctcccaaagtgctgggattacaggcgtgaaccaccatgcctgacctcaattttctttaaacctaaaactcttctagaaaataaagtctatccgttaaaaaaaaaaaaaaaaggcagccaccacatgctgacactcattttacaactctcaggcgttaggactctgttcctctcactactttgactagtccacaaggttggaagcagaatgggtcacagtgttcactgacagaagaaaagcagcacttctaaggagaattaatgatgcttcataactgcccgtccccctcactgtcccctggcttttacgtcaacttggaggagagagtctcatgaactgaattgtaccctccccaaaattcataagtgaaagccctgaccctcagtgtatttggagatagggcctttaaggagataattggttaagtgaggtcattagagtggggctctaatccgactagtatcccccataggaagagggacaccagcgatgtcggcccacagaggaaggaccacgttaggacacagcaagaagacagtcacctgcaagccactgagagagaagcttcaagagaacagaaatcaaacatattgaccctggacttctagccgccggaactgggagaaataaatttctccacccagtctgtggcattactgtcatagtagcccacgataagaaatacatacttggtctctgcccatgattccagacacggggcacctaaaactcttgtagattggggtatacaatcttttgcactaatacgtggtctttgaacccggttcctgacacagagctcctgagacctttgtaatctcctgagtaacaggagtgtctggtaacatagaggtgaccgtagggtggggcagcacctggagagggcatggaagcgctcacatatgca

SEQ ID NO: 1177 - DNA, 1348 bp, Homo sapiens
tgcatactattaagcatttatcaaaacccgtaagacccattggatacagagtaaactctaatgttagtgatggactttaataataacatatcagtatgactaatccaagttgctaatagtggaaccttagagttttggagatgggaggttcctataaagctcttatatgggaatgctctgtactataagctcarttttctttttctttttttttcagatggagtctcgctctgtcgcccaggctggagtgcagtggcacgatctgcaacctccacctcccgggttcaagcaattctcctgcctcagcctcccgagtagctgggactacaggcgcgcgccaccatgcctgactcattttttatatttttgctagagatggggtttcaccatgttggccaagatggtctcaaactcctgacctcatgatctgcctgccttggcctcccaaagtgctgggattacaggcgtgaaccaccatgcctgacctcaattttctttaaacctaaaactcttctagaaaataaagtctatccgttaaaaaaaaaaaaaaaaggcagccaccacatgctgacactcattttacaactctcaggcgttaggactctgttcctctcactactttgactagtccacaaggttggaagcagaatgggtcacagtgttcactgacagaagaaaagcagcacttctaaggagaattaatgatgcttcataactgcccgtccccctcactgtcccctggcttttacgtcaacttggaggagagagtctcatgaactgaattgtaccctccccaaaattcataagtgaaagccctgaccctcagtgtatttggagatagggcctttaaggagataattggttaagtgaggtcattagagtggggctctaatccgactagtatcccccataggaagagggacaccagcgatgtcggcccacagaggaaggaccacgttaggacacagcaagaagacagtcacctgcaagccactgagagagaagcttcaagagaacagaaatcaaacatattgaccctggacttctagccgccggaactgggagaaataaatttctccacccagtctgtggcattactgtcatagtagcccacgataagaaatacatacttggtctctgcccatgattccagacacggggcacctaaaactcttgtagattggggtatacaatcttttgcactaatacgtggtctttgaacccggttcctgacacagagctcctgagacctttgtaatctcctgagtaacaggagtgtctggtaacatagaggtgaccgtagggtggggcagcacctggagagggcatggaagcgctcacatatgca

SEQ ID NO: 1178 - DNA, 1348 bp, Homo sapiens
tgcatactattaagcatttatcaaaacccgtaagacccattggatacagagtaaactctaatgttagtgatggactttaataataacatatcagtatgactaatccaagttgctaatagtggaaccttagagttttggagatgggaggttcctataaagctcttatatgggaatgctctgtactataagctcagttttctttttctttttttttcagatggagtctcgctctgtcrcccaggctggagtgcagtggcacgatctgcaacctccacctcccgggttcaagcaattctcctgcctcagcctcccgagtagctgggactacaggcgcgcgccaccatgcctgactcattttttatatttttgctagagatggggtttcaccatgttggccaagatggtctcaaactcctgacctcatgatctgcctgccttggcctcccaaagtgctgggattacaggcgtgaaccaccatgcctgacctcaattttctttaaacctaaaactcttctagaaaataaagtctatccgttaaaaaaaaaaaaaaaaggcagccaccacatgctgacactcattttacaactctcaggcgttaggactctgttcctctcactactttgactagtccacaaggttggaagcagaatgggtcacagtgttcactgacagaagaaaagcagcacttctaaggagaattaatgatgcttcataactgcccgtccccctcactgtcccctggcttttacgtcaacttggaggagagagtctcatgaactgaattgtaccctccccaaaattcataagtgaaagccctgaccctcagtgtatttggagatagggcctttaaggagataattggttaagtgaggtcattagagtggggctctaatccgactagtatcccccataggaagagggacaccagcgatgtcggcccacagaggaaggaccacgttaggacacagcaagaagacagtcacctgcaagccactgagagagaagcttcaagagaacagaaatcaaacatattgaccctggacttctagccgccggaactgggagaaataaatttctccacccagtctgtggcattactgtcatagtagcccacgataagaaatacatacttggtctctgcccatgattccagacacggggcacctaaaactcttgtagattggggtatacaatcttttgcactaatacgtggtctttgaacccggttcctgacacagagctcctgagacctttgtaatctcctgagtaacaggagtgtctggtaacatagaggtgaccgtagggtggggcagcacctggagagggcatggaagcgctcacatatgca

SEQ ID NO: 1179 - DNA, 1348 bp, Homo sapiens
tgcatactattaagcatttatcaaaacccgtaagacccattggatacagagtaaactctaatgttagtgatggactttaataataacatatcagtatgactaatccaagttgctaatagtggaaccttagagttttggagatgggaggttcctataaagctcttatatgggaatgctctgtactataagctcagttttctttttctttttttttcagatggagtctcgctctgtcgcccaggctggagtgcagtggcacgatctgcaacctccacctcccgggttcaagcrattctcctgcctcagcctcccgagtagctgggactacaggcgcgcgccaccatgcctgactcattttttatatttttgctagagatggggtttcaccatgttggccaagatggtctcaaactcctgacctcatgatctgcctgccttggcctcccaaagtgctgggattacaggcgtgaaccaccatgcctgacctcaattttctttaaacctaaaactcttctagaaaataaagtctatccgttaaaaaaaaaaaaaaaaggcagccaccacatgctgacactcattttacaactctcaggcgttaggactctgttcctctcactactttgactagtccacaaggttggaagcagaatgggtcacagtgttcactgacagaagaaaagcagcacttctaaggagaattaatgatgcttcataactgcccgtccccctcactgtcccctggcttttacgtcaacttggaggagagagtctcatgaactgaattgtaccctccccaaaattcataagtgaaagccctgaccctcagtgtatttggagatagggcctttaaggagataattggttaagtgaggtcattagagtggggctctaatccgactagtatcccccataggaagagggacaccagcgatgtcggcccacagaggaaggaccacgttaggacacagcaagaagacagtcacctgcaagccactgagagagaagcttcaagagaacagaaatcaaacatattgaccctggacttctagccgccggaactgggagaaataaatttctccacccagtctgtggcattactgtcatagtagcccacgataagaaatacatacttggtctctgcccatgattccagacacggggcacctaaaactcttgtagattggggtatacaatcttttgcactaatacgtggtctttgaacccggttcctgacacagagctcctgagacctttgtaatctcctgagtaacaggagtgtctggtaacatagaggtgaccgtagggtggggcagcacctggagagggcatggaagcgctcacatatgca

SEQ ID NO: 1180 - DNA, 556 bp, Homo sapiens
  misc_feature (1)...(556): n = A,T,C or G
cagaggttggaggactgcttgagcccaggaggttgaggctgcagtgagccacgactgtgccactgcactccagcctgggcaacagaggaagaccctttgtccaaagggaaaataaaaagaatataattttgtctatgaggtttttccctcgtgccagctgtttctgagagagcaagagctgttaagaacactcaattagggtttctagagacaatgactntatgtggctgatatgagttagattagaagaatgggccggggcccggtggctcacgcctgtaatcccagcactttgggaggtcaaggcaggcagatcacttgaggtcaggaattcgagaccagcctggccaacatggyaaaaccccatctctactaataatacaaaaattacccgggtgtggtggcgggcacctgtaatcccagctactcgggaggctgaggcagaagaatcattgaacttgagaggcagacgttgcagtgagcagcgatcacaccactgcactccatccccagtgacagcgagattccgtctcaagagaaaaacaaaacaaaacaa

SEQ ID NO: 1181 - DNA, 556 bp, Homo sapiens
  misc_feature (1)...(556): n = A,T,C or G
cagaggttggaggactgcttgagcccaggaggttgaggctgcagtgagccacgactgtgccactgcactccagcctgggcaacagaggaagaccctttgtccaaagggaaaataaaaagaatataattttgtctatgaggtttttccctcgtgccagctgtttctgagagagcaagagctgttaagaacactcaattagggtttctagagacaatgactntatgtggctgatatgagttagattagaagaatgggccggggcccggtggctcacgcctgtaatcccagcactttgggaggtcaaggcaggcagatcacttgaggtcaggaattcgagaccagcctggccaacatggcraaaccccatctctactaataatacaaaaattacccgggtgtggtggcgggcacctgtaatcccagctactcgggaggctgaggcagaagaatcattgaacttgagaggcagacgttgcagtgagcagcgatcacaccactgcactccatccccagtgacagcgagattccgtctcaagagaaaaacaaaacaaaacaa

SEQ ID NO: 1182 - DNA, 1114 bp, Homo sapiens
tgtctgtgtgtgtgtgttagtcttgtgtaaaaatagctgtagcaagagaggtttgagatttttttcaatttttttttttttagaaagtagcccacggcacatttttaaactagttgttctaatacttcacccacacttctttttccctcactttcttctagatatttttattcttcttgatctcctcctcattctcctctctccttctgtcccttcctcttctaatgattttcagagaaatagatacttctctcacctcacctctgcatttcaaaataaagctgcgtgtatgtgtggagagaagctggaaaagaagacagatggttctttcattaccaggttacttgggattaattgagctgggtatgttattatttttaaggagactgagctgggtcctttggaaagccagttctgaaaggcaggcaataatgtaatatgtactgttggattttttgttttgtttttgtgtttggtaatttcatcatcctgtaaagcattttttaggagatcagaagtgagtttactaaaatggcgttttccttaaagttttaaaaatgactttacatttttctggggcagctgaaccattcttagaaacatactatctttatgttttatttcagcatttgcaagtgaggaagcagcacaaccctgggttttagataatttctaacagagaggccccagcaattcagcaggcagcgtcctgagtctttggcagcctggtccctctttcgcaaattctccacctttgcgaacagagggtctttaggacacagattcttaaaagtgcaggtaagcaaaggcaacaccaccattgtctcaaattgcttaaatgtaaacttgagcacttgtaatgttcttatacaatgcttctcttgtgggtgatgttaaaatcccctcttctatgaatacaggtgcctgctatttttttctcttactagttttgcagcctgggggcctataagactgctaatgtaacccatgacccttcagcatatcccacagttgagctatgagagtcttaaawattatttttattctcagttgaatgggccttctttgggactcttcttaaccaatacataagtgaggagtaagaaaactctta

SEQ ID NO: 1183 - DNA, 1799 bp, Homo sapiens
tcagaagagctgcttacttagagagtgattgatggccaggtccagcaggcagctagaagtacccaaaaatgaagtgctagtaggtgacctcacaataaaaagccttgagaatccttcagctggcatgcgctgctggcaaaaaaggatatttttttaaatttttatttttagtctttaccacttaaaattttcagacttttctccccgcttcagatattatatgatagattttatcagatagacagtgagccatttatgataatatacagaaactgacataatgcatgatttggttcatttaaaaaaatcttacttatcttcttttcccaatccttctcaaactcgtctacacttcccacatataaaataaaatatattaaaaaggcttaaatcttacacaggaggctatttttagtatctccaactagaagactgaagctcttaactcatctactagagtcacttgttagaaggagactttcctacaggcatttttattttgctttttgaaggaattatgacaccccctccccaccaccaaagaattgctgtttctacctctagcttcagtagccattaagcagttcttcattttgaaggatacatatagatccagaaacattttctggttggagaaaaagtgtgtattttcaaggttccctatctttaaggttcctagttcttattaaagtagcaggataatcagcttaatgggtggttgcttacgctttctgtgggaaaaccatgggggtgggagttacaagtatttgttctaatttcagcctcattactaactagctgtgtagacttgggcaagtcatttaccttgaatttcagcttagaggcaggattgttaaaataggatcaatttgtaactggatttgaaacctgatcagactattagaaccctactcaagacttaattactgagtctaggtgtttccaaagtctcaaggtgatggattcttttacagccagtgtttgtgcatcactgataattcattcccttcactttgcagcactgataattcattcccttccatttgcagactatagaaatttaagtttcagagaagcttagtaatttacttaaggtcacatagctagataataatgaaacttgaactttaaatgtaacttactgacccccaagatattgctgtttccctattattaggtgcttatttaaccggagaattgccatgtgttttttgtaacaattacattttttttttctttttgagatggtgtcttactctgtcacccaggctggagtgcagtggcgtcatctcagctcactgcaacctccacctcccaagttcgagattctcctggcttagcctcccaagtagctgggagtacaggtgcatgccaccaagcctggctaattattttttttttttttgcatttttagtggagatggggtttcaccatgttggccaggctggttttgaactcctgacctcaagttgtctgcccgcctcagcctccsaaagtgctgggattacaggcgtgagtctctctgcctggccacaattacaatttaatattaaaatatatacatatgtgtatttctatacatgtgtgttgacttttacacagtatttaacattttcaggtgtgtaaaatgaaagcattaggactaaatgatcacatagtgactatttggctcttttagagagaatgtgaatcactacctaccatttcactgatgcacactgtttaaaagatactatgctaggtgttacagttagaccctgagaaatggggtgctactatgatgttgttatgatagcca

SEQ ID NO: 1184 - DNA, 1582 bp, Homo sapiens
tcatctccctgtggtatatgttttggatcactttactattaataatgtcctataatatatatttatgctaccacatcagaaatattttacatattattaaaaatcttcytcaagatttttttaatgactcttagtctactcacctcataagttaactttttctctcctgttggatataatttatattacctttaagaaggaacattctcaaagatgatgctagcccattttaatagctctattgcaggaatttgatttcaataactaagcagataaatttctccacaatagaaaattacaaaagtatgattacataaccaactcctcccttgatgctccattataaattccttgaaattacactttatataaaaatttgattaaattcaagcaaacatgagaagtttggtataaataagattcatttcaaaaaagtaactgacttaaaactaaattgccttccagaccagttaaaaggattaatggcataataaacacaggatagccaaacagtataaagccaccttgaacaccagagcaagctaagttttgatatgtatactatagattggcctaaaataaagcacattttcaaataatttaattggttttgcatccttgcagcacagttaaaaagtaaaagcttatttcctattcttaacttttgccccaatttctgatgttgtttccttcactgcttccagtctacaggcatcattctaatttcttcccaaccatttcttcactttctttaattcctctgcctgaacctcatatagccatctatgatctctgctctttttccttctttgggtacttactctatttgcctctttttcctttcctttttccctctgctaacatgcccttactgtttcagctggttttagcccacatttgcattggcaaatagcaagagatgaactagataagtaagaagcagatttcaggccaggcaaaggggcagagagcacacaagcatcagatgagcatatgaaaaattcataaagggaaatatgcttttttagcttttgtagattagaaataaaaacagggtttaatggcctcccttgaagagaaatgcagaagttggaggaaaactaaaccttacataccaaaccaaaaaaacaaggattgtaagccgtttgaattgtatttagggaatgggtgatggtgctcaatgcaaaattgactaaccctttctggatagaagaaagaagttaaaggttagatgaaagttcttactgctcatattgttccctcattatccacactatggagaactcctatgtatccttccaaaacaagtttaaagggaacctctcttatgaaatccctctttacttccagtttagctatacagcattgattaacctctcttctataccccagttcccattatatggcatgtactgctttgtgagcctgtttcagtgacatatttatgaaaatgttgcttaatctttccattccaactttcaaggactacttgcctatactttgggggagatggagtgcatttgtggaaactggaatacatactaagttaacattataaaggattgtaatatgtgtttcttat

SEQ ID NO: 1185 - DNA, 757 bp, Homo sapiens
gttgcatttgtttccttttgactatttcaaaggctgcaggtggtgagtctccatccaggatagcagcaagtagactgttcttttcacagaaatccttatccctacactaaagaaacatccgtccctatctctaccagtagtatattttgcaatgaatgataaacctcaaaagtgaaaggttcagtcagaaacccaagccactccactttgatctgatctgtcccactgtgtctctcatttagcttaagaacatgccttccccatcacagagtcttgtcctaagctagcctgttcatccttcagccacagctaaaaggagatgctcttactgttggctcccatgccatcaggaatggttgtaggagtgagggcgttgcgctgctgagggttgataagctggctcacagaaggcagcttgttcatgctgttcattttgttcagaggtggggagctgttaccatatgaagatggagactgtattgaggtcctaggaagacaaacatggaaatratggtgagcaagggacactgaagagtggggactattgattttcaacaggtctctgtttaaaacatggcctcaaaccaaacatttgaaaacattcttctaggattaatggtaagaagttaattttgtttccatctgagaatatttcctgaatagggagaaactgactgcgaggctatcatcaaatcatatttttcctgaatgtgcagagtgcaaggtttagtatttcctttgagaaagagaaaattct

SEQ ID NO: 1186 - DNA, 643 bp, Homo sapiens
aatcccagctacttgtgaggctgaggcaggagaatcgcttgaatctgggaggcagaaatgcagtgagcagagatcacgccattgccctctgaactccagcctggccaagagtgaaacttcatctcaaaaaaaaaaaaaaaaagaaaagaaaaagaaaaaggaaaaccaaacatcatatgttctcactcataagattgaggagcaaaggcataagaatgattcartgaaatttggggacttgggggaaacggtgggagggggtgaggaataaaagactacaaattgggtatagtgtatactgtcctggtgatggttgcaacaaaatttcacaaatcaccactaaagaacgtactcatgcaaccaaacgccacccattccccaaaatcctataaaaataaagtaaaacaaaattaaaaaaaacaaaaaggttattgtaatcatactagaatgtgtgacatatattcttttattgaccttttcttatttataatatgtccaaaatacattattttcaaactccaacacatgagaacttatactcatactttttatgtgttaaatatattaattctcaataacaagataaaatgtgtttgaaagtgcaaaatttattttttatttttaatagaaatatctattatat

SEQ ID NO: 1187 - DNA, 653 bp, Homo sapiens
attttatgtatgtagaaaatacatatgtaagtgctatcgcttgaatatttgtcccctccaaaactcatgttgaaatttaatccccaatgtggcagttgtagggaagtttaagttttccccgaagattcgataatttgagtctatagaacaaacttacaatagaaagagtaacagaaaaaatggcatacaaattttattatgtgcacatgtgtgcacaggagtcataaaaaatataaacactcaaagaaaggcaagatggttgaagtttttgtactgtcttggggttacagaaagaataggggcttggatggtggcaaagacaggtcgtgggagacagagaagakgaaagacctggggaaaaggcagtcttgttatgcaggagaaacctcacaggtagcagccctcagaaagaacaaatgagtggcaaatccagacaaggggacaaatattcaagtgatagcacttacatatgtattgtttaattcactttatttcctctgtagatgcacatctccccacaaaagacagctttgtagggctacttctgtctgcaggccctctgaactgaacaggcatctcaaaatatgtcaaagaagtatattttggggtaaaccattttggtttccttcacaattgagagatgaggcctttaa

SEQ ID NO: 1188 - DNA, 651 bp, Homo sapiens
tttgtgtctgacaaacagtgggttggccaatctcaaaggaagggaaaacacatttgcagcaagcaccccaggccatatggctggatgggaaagaccagaacctcaggtggctgctctgccaggtggaaggagttggctctgagggctccacacacatcgatgacagcagtcctgggtgcgacactggctctccaccatcgaacctccaacartcactactccatggaaaatggccttacacagagataagtaatcaaaaatacagtcaggtgccacataattccagctgctcaggaggctgagcccaggagatcgaggctgcagtgagccatgattgcaccactgccctccagtctggaaagaagagcaagactttgtctctaaaaagaaaataaaaattaagaaagaaaatatttttgtacagctgtacaatgtgtttgttttaagctgtgttatcacaaaaaagtcaaaaagttaaatttaaaagtttataatgtaaaagggttatagtgagctaaagttaatttattattgaagaaagaaaatatttgttgtaaatttagtgtagcctaagtgtccagtgtttacgaagtctacagtagtgcacagtaattcccaggccttcatgtttactcaccactcactcactga

SEQ ID NO: 1189 - DNA, 806 bp, Homo sapiens
tgcatataggtgatttgggatcaccagaattgttgatgtcttctaagaggagagcagagtgatctgggcaactaaaagtaatcaatggggcatcatttccatccaggcttagccaaaggagatccygcactggcatatgcttagcataaaaggtattcaagggacagctgaacaaatggaaggtgatccaaaaatactctttcttatttattgtataattctttttcatcggtagaaaaacatattctgaatcacaggaactttcaagttgtgctgaagaatgagagtgtaaacagaatatagaaaataacaaacttcaactctcaaagtaactattacacaagacgatgatgaaaaaggattaaaaggaaaagatcatttataattgcaaatatttcatcagatcactgagagagttagcaaagcacatttctgttaaagggaaaaagaaacaactcttcttacaccttgtcctttattctgcttgcgagctagctagctatagatccatatctggtagcaaaggagcagcttctaatctgctcacacaaagctgtctaattagttggtacaattgtagcaacaggtcagtcaggggcaggcaatggagggaaagcagtactatcccttgcagaatttgtgactttttataacaagcacttgacttgatcctctcaattttatcctttcaatttgatactttatacacttttttaaagggctggtgactctgtgacacattgaaaccaccatcaatcatatctaatttaggatgatttaaagttctgagagtaggtatcaatgaa

SEQ ID NO: 1190 - DNA, 806 bp, Homo sapiens
tgcatataggtgatttgggatcaccagaattgttgatgtcttctaagaggagagcagagtgatctgggcaactaaaagtaatcaatggggcatcatttccatccaggcttagccaaaggagatcctgcactggcatatgcttagcatraaaggtattcaagggacagctgaacaaatggaaggtgatccaaaaatactctttcttatttattgtataattctttttcatcggtagaaaaacatattctgaatcacaggaactttcaagttgtgctgaagaatgagagtgtaaacagaatatagaaaataacaaacttcaactctcaaagtaactattacacaagacgatgatgaaaaaggattaaaaggaaaagatcatttataattgcaaatatttcatcagatcactgagagagttagcaaagcacatttctgttaaagggaaaaagaaacaactcttcttacaccttgtcctttattctgcttgcgagctagctagctatagatccatatctggtagcaaaggagcagcttctaatctgctcacacaaagctgtctaattagttggtacaattgtagcaacaggtcagtcaggggcaggcaatggagggaaagcagtactatcccttgcagaatttgtgactttttataacaagcacttgacttgatcctctcaattttatcctttcaatttgatactttatacacttttttaaagggctggtgactctgtgacacattgaaaccaccatcaatcatatctaatttaggatgatttaaagttctgagagtaggtatcaatgaa

SEQ ID NO: 1191 - DNA, 806 bp, Homo sapiens
tgcatataggtgatttgggatcaccagaattgttgatgtcttctaagaggagagcagagtgatctgggcaactaaaagtaatcaatggggcatcatttccatccaggcttagccaaaggagatcctgcactggcatatgcttagcataaaaggtattcaagggacagctgaacaaatggaaggtgatccaaaaatactctttcttatttattgtataattctttttcatcggtagaaaaacatattctgaatcacaggaactttcaagttgtgctgaagaatgagagtgtaaacagaatatagaaaataacraacttcaactctcaaagtaactattacacaagacgatgatgaaaaaggattaaaaggaaaagatcatttataattgcaaatatttcatcagatcactgagagagttagcaaagcacatttctgttaaagggaaaaagaaacaactcttcttacaccttgtcctttattctgcttgcgagctagctagctatagatccatatctggtagcaaaggagcagcttctaatctgctcacacaaagctgtctaattagttggtacaattgtagcaacaggtcagtcaggggcaggcaatggagggaaagcagtactatcccttgcagaatttgtgactttttataacaagcacttgacttgatcctctcaattttatcctttcaatttgatactttatacacttttttaaagggctggtgactctgtgacacattgaaaccaccatcaatcatatctaatttaggatgatttaaagttctgagagtaggtatcaatgaa

SEQ ID NO: 1192 - DNA, 806 bp, Homo sapiens
tgcatataggtgatttgggatcaccagaattgttgatgtcttctaagaggagagcagagtgatctgggcaactaaaagtaatcaatggggcatcatttccatccaggcttagccaaaggagatcctgcactggcatatgcttagcataaaaggtattcaagggacagctgaacaaatggaaggtgatccaaaaatactctttcttatttattgtataattctttttcatcggtagaaaaacatattctgaatcacaggaactttcaagttgtgctgaagaatgagagtgtaaacagaatatagaaaataacaaacttcaactytcaaagtaactattacacaagacgatgatgaaaaaggattaaaaggaaaagatcatttataattgcaaatatttcatcagatcactgagagagttagcaaagcacatttctgttaaagggaaaaagaaacaactcttcttacaccttgtcctttattctgcttgcgagctagctagctatagatccatatctggtagcaaaggagcagcttctaatctgctcacacaaagctgtctaattagttggtacaattgtagcaacaggtcagtcaggggcaggcaatggagggaaagcagtactatcccttgcagaatttgtgactttttataacaagcacttgacttgatcctctcaattttatcctttcaatttgatactttatacacttttttaaagggctggtgactctgtgacacattgaaaccaccatcaatcatatctaatttaggatgatttaaagttctgagagtaggtatcaatgaa

SEQ ID NO: 1193 - DNA, 806 bp, Homo sapiens
tgcatataggtgatttgggatcaccagaattgttgatgtcttctaagaggagagcagagtgatctgggcaactaaaagtaatcaatggggcatcatttccatccaggcttagccaaaggagatcctgcactggcatatgcttagcataaaaggtattcaagggacagctgaacaaatggaaggtgatccaaaaatactctttcttatttattgtataattctttttcatcggtagaaaaacatattctgaatcacaggaactttcaagttgtgctgaagaatgagagtgtaaacagaatatagaaaataacaaacttcaactctcaaagtaactattacacaagacgatgatgaraaaggattaaaaggaaaagatcatttataattgcaaatatttcatcagatcactgagagagttagcaaagcacatttctgttaaagggaaaaagaaacaactcttcttacaccttgtcctttattctgcttgcgagctagctagctatagatccatatctggtagcaaaggagcagcttctaatctgctcacacaaagctgtctaattagttggtacaattgtagcaacaggtcagtcaggggcaggcaatggagggaaagcagtactatcccttgcagaatttgtgactttttataacaagcacttgacttgatcctctcaattttatcctttcaatttgatactttatacacttttttaaagggctggtgactctgtgacacattgaaaccaccatcaatcatatctaatttaggatgatttaaagttctgagagtaggtatcaatgaa

SEQ ID NO: 1194 - DNA, 806 bp, Homo sapiens
tgcatataggtgatttgggatcaccagaattgttgatgtcttctaagaggagagcagagtgatctgggcaactaaaagtaatcaatggggcatcatttccatccaggcttagccaaaggagatcctgcactggcatatgcttagcataaaaggtattcaagggacagctgaacaaatggaaggtgatccaaaaatactctttcttatttattgtataattctttttcatcggtagaaaaacatattctgaatcacaggaactttcaagttgtgctgaagaatgagagtgtaaacagaatatagaaaataacaaacttcaactctcaaagtaactattacacaagacgatgatgaaaaaggattaaaaggaaaagatcatttataattgcaaatatttcatcagatcactgagagagttagcaaagcacattkctgttaaagggaaaaagaaacaactcttcttacaccttgtcctttattctgcttgcgagctagctagctatagatccatatctggtagcaaaggagcagcttctaatctgctcacacaaagctgtctaattagttggtacaattgtagcaacaggtcagtcaggggcaggcaatggagggaaagcagtactatcccttgcagaatttgtgactttttataacaagcacttgacttgatcctctcaattttatcctttcaatttgatactttatacacttttttaaagggctggtgactctgtgacacattgaaaccaccatcaatcatatctaatttaggatgatttaaagttctgagagtaggtatcaatgaa

SEQ ID NO: 1195 - DNA, 1195 bp, Homo sapiens
ccaaaataatcttgaaaaagaagatcaaagtaagagaactcacacttgccatttcaaacttaccacaaagcaacagtaataaaacagtgtggtactagcacatcaatgsaatcagtggcattaatcaatgacagatgaatggaaaagaactaagcgtccagaaataaacccatacatataaggtcaattgattttcaagaagagtgccaagacaattcaatggggaaaaaataatcttttcaacaaatggctgtgtgacaactggaaagccacatgtaagaaaatgaagttggatcttcacacctgcctcccaccaagggaactgccacccacacaaccacaaaactggggacaggatgctgaacgcagactctagatccacatttgcctcaatgcagggaccaggacaccactgccaagtctgttgacctcagaaacacatgaccttagctctgtgtatggaaacacgaggaaccatgtggccacaaaaccaccctgtgactgccggatccacataagccaaggagcttgaagccctctctccactaccagtcacctcagtgcctcagtggggatgcagcctttccctgggacactgggaaatgtctatttttgcattccagctctataggggaaggcccacccgagaagcaacgggaacatgtgttgagtgtgccagtttaccacctctcagcctcctcccaccctggtcctccaaggaatggcaccaacaggcaggagagttttctttcacggggagggctactttaaaattaagattctcactttctcaaatgaaggaattggatcatgatggtatttatcctgcaaaagacaatcaggaaaagtcatacaattcagactttattccaattcagctaatatgtatgattaaatattccatcaatactggagacacaggtcaggcttcagggctccactcaccagttctgtaaccttgtgggaatccacacagagcctccttggcctgaagttcaccaaagagaagacggcactgatgtatgttctgtgcacagccagagatccaagtacaagcacactgataggttctcttcccctcattctcagtgtcttttctgctctatcttttctatgactttgtaactgctcacttagcaatcattcagacagaaaaaaatgtaaaattaggaaatctctgattaaaactatgagt

SEQ ID NO: 1196 - DNA, 1195 bp, Homo sapiens
ccaaaataatcttgaaaaagaagatcaaagtaagagaactcacacttgccatttcaaacttaccacaaagcaacagtaataaaacagtgtggtactagcacatcaatgcaatcagtggcattaatcaatgacagatgaatggaaaagaactaagcgtccagaaataaacccatacatataaggtcaattgattttcaagaagagtgccaagacaattcaatggggaaaaaataatcttttcaacaaatggctgtgtgacaactggaaagccacaygtaagaaaatgaagttggatcttcacacctgcctcccaccaagggaactgccacccacacaaccacaaaactggggacaggatgctgaacgcagactctagatccacatttgcctcaatgcagggaccaggacaccactgccaagtctgttgacctcagaaacacatgaccttagctctgtgtatggaaacacgaggaaccatgtggccacaaaaccaccctgtgactgccggatccacataagccaaggagcttgaagccctctctccactaccagtcacctcagtgcctcagtggggatgcagcctttccctgggacactgggaaatgtctatttttgcattccagctctataggggaaggcccacccgagaagcaacgggaacatgtgttgagtgtgccagtttaccacctctcagcctcctcccaccctggtcctccaaggaatggcaccaacaggcaggagagttttctttcacggggagggctactttaaaattaagattctcactttctcaaatgaaggaattggatcatgatggtatttatcctgcaaaagacaatcaggaaaagtcatacaattcagactttattccaattcagctaatatgtatgattaaatattccatcaatactggagacacaggtcaggcttcagggctccactcaccagttctgtaaccttgtgggaatccacacagagcctccttggcctgaagttcaccaaagagaagacggcactgatgtatgttctgtgcacagccagagatccaagtacaagcacactgataggttctcttcccctcattctcagtgtcttttctgctctatcttttctatgactttgtaactgctcacttagcaatcattcagacagaaaaaaatgtaaaattaggaaatctctgattaaaactatgagt

SEQ ID NO: 1197 - DNA, 1195 bp, Homo sapiens
ccaaaataatcttgaaaaagaagatcaaagtaagagaactcacacttgccatttcaaacttaccacaaagcaacagtaataaaacagtgtggtactagcacatcaatgcaatcagtggcattaatcaatgacagatgaatggaaaagaactaagcgtccagaaataaacccatacatataaggtcaattgattttcaagaagagtgccaagacaattcaatggggaaaaaataatcttttcaacaaatggctgtgtgacaactggaaagccacatgtaagaaaatgaagttggatcttcacacctgcctcccaccaagggaactgccacccacacaaccacaaaactggggacaggatgctgaacgcagactctagatccacatttgcctcaatgcagggaccaggacaccactgccaagtctgttgacctcagaaacacatgaccttagctctgtgtatggmaacacgaggaaccatgtggccacaaaaccaccctgtgactgccggatccacataagccaaggagcttgaagccctctctccactaccagtcacctcagtgcctcagtggggatgcagcctttccctgggacactgggaaatgtctatttttgcattccagctctataggggaaggcccacccgagaagcaacgggaacatgtgttgagtgtgccagtttaccacctctcagcctcctcccaccctggtcctccaaggaatggcaccaacaggcaggagagttttctttcacggggagggctactttaaaattaagattctcactttctcaaatgaaggaattggatcatgatggtatttatcctgcaaaagacaatcaggaaaagtcatacaattcagactttattccaattcagctaatatgtatgattaaatattccatcaatactggagacacaggtcaggcttcagggctccactcaccagttctgtaaccttgtgggaatccacacagagcctccttggcctgaagttcaccaaagagaagacggcactgatgtatgttctgtgcacagccagagatccaagtacaagcacactgataggttctcttcccctcattctcagtgtcttttctgctctatcttttctatgactttgtaactgctcacttagcaatcattcagacagaaaaaaatgtaaaattaggaaatctctgattaaaactatgagt

SEQ ID NO: 1198 - DNA, 1195 bp, Homo sapiens
ccaaaataatcttgaaaaagaagatcaaagtaagagaactcacacttgccatttcaaacttaccacaaagcaacagtaataaaacagtgtggtactagcacatcaatgcaatcagtggcattaatcaatgacagatgaatggaaaagaactaagcgtccagaaataaacccatacatataaggtcaattgattttcaagaagagtgccaagacaattcaatggggaaaaaataatcttttcaacaaatggctgtgtgacaactggaaagccacatgtaagaaaatgaagttggatcttcacacctgcctcccaccaagggaactgccacccacacaaccacaaaactggggacaggatgctgaacgcagactctagatccacatttgcctcaatgcagggaccaggacaccactgccaagtctgttgacctcagaaacacatgaccttagctctgtgtatggaaacacgaggaaccatgtggccacaaaaccaccctgtgactgccggatccacataagccaaggagcttgaagccctctctccactaccagtcacctcagtgcctcagtggggatgcagcctttccctgggacactgggaaatgtctatttttgcattccagctctataggggaaggcccacccgagaagcaaygggaacatgtgttgagtgtgccagtttaccacctctcagcctcctcccaccctggtcctccaaggaatggcaccaacaggcaggagagttttctttcacggggagggctactttaaaattaagattctcactttctcaaatgaaggaattggatcatgatggtatttatcctgcaaaagacaatcaggaaaagtcatacaattcagactttattccaattcagctaatatgtatgattaaatattccatcaatactggagacacaggtcaggcttcagggctccactcaccagttctgtaaccttgtgggaatccacacagagcctccttggcctgaagttcaccaaagagaagacggcactgatgtatgttctgtgcacagccagagatccaagtacaagcacactgataggttctcttcccctcattctcagtgtcttttctgctctatcttttctatgactttgtaactgctcacttagcaatcattcagacagaaaaaaatgtaaaattaggaaatctctgattaaaactatgagt

SEQ ID NO: 1199 - DNA, 1280 bp, Homo sapiens
atgtttctgtcacatgggcattatttacacacttgataaatgaaaggtatttctctgtccgttcaaggaaataaaatgtaagttcttgttttattaaatgaatgaagccttttggttaaaaaaaaagtaatgtaatatgtttctgttcaaacttgagctaatgacatttaaggaattaaagacattgatctagttcttagtatgaaaagtgtacatgtagatatagttatataattgtgtatatacatatctacacacatggttggttttatattgctttttcatcaatatttttgactgaaacctttacaataaattttattttaattatgtaaccactaatattttgagagaaggaagcaaatgttatatgtccttctgttaaaagaaaaaaaattcagtcctccgccaaccgcttcccacacactcatactctgcacatcttggctacattaaaatggactgacagaattatttaaaaggcactatgaaggtagaacactaccttaatattttatcctagtcagaagcctgatttaacactgaactttgaagggaagcttagctgtagctcatggctttcaaagattagaagaaacatttactggttctatggaaaatagtcttcttgctaggtagattggaaacaaagaaattgcattggtggtgttaaaatctaacatttataacaaatcctgttttattctagatgaaatacttagacaattcttccagtggaaaccagtgaacttttttaacagctttgggaattcttttgtatgataatttttaaaatgaaatgtgtactcttcaaactaattaaagcttgaagttttccaggagtcgcattttaaaagtgtttgtacacattttaacacttggatattttctattttggttttgtatatttttatgtatacacaatgtacagacttttttcttgtaaataaaacatgttttcatttgtctagaagtttcttgttttaattcgtrgaagttacacatacaaatgagcaagtggcaaaataacaatccatccctaggaaaacaaatggcaaagctgaaatctaattagaagactgagtggcgacagaaggaacagcagcaggccttcagccatgaatatggacgcagcctgggcctaaaaccacaggtgggcgggtttctttcttccagggattaatggccacatgccggagaatgaaagtggcgaaatcaagtggaaaaggcatatatttaggctaacaaatcttgatgttgacttaataacccaagatttt

SEQ ID NO: 1200 - DNA, 600 bp, Homo sapiens
tccaaatgcagagcaatttggtctccagagtaaaagagggaaaaaagcatctttgctggaaagaagtcactagaaacatgaaaaataaaaacaatctggttgaaaaagaaaaaaaaaaaggcaaccrttagtatgattaaaataagactgtaggccaggcactgtggctcacgcctgtaataccagcactttgggaggccgaggcgggcggatcacgaggtcagaagatcgagaccatcctggctgacatggtgaaaccccatctctaccaaaaatacaaaaattagctggccatggtggtgggcacctgtagtcccagctactcaggaggctaaggaaggagaactgcttgaacccaggaggcggaggttgcagtgagccaagatcgcgccactgcactccagcctgggcaacactgcaagactctgtctcaaaaaaaataaaataaaataagactgtaaacctagtataatggaagaggaaagaaaaaaacaacatataagaagaaaagatatcaaatggaaacagttacaaaacagaaagataacagaaacagaccccaacatcagctatagcaataatgttcactgtattaaaaag

SEQ ID NO: 1201 - DNA, 600 bp, Homo sapiens
tccaaatgcagagcaatttggtctccagagtaaaagagggaaaaaagcatctttgctggaaagaagtcactagaaacatgaaaaataaaaacaatctggttgaaaaagaaaaaaaaaaaggcaaccgttagtatgattaaaataagactgtaggccaggcactgtggctcacgcctgtaataccagcactttgggaggccgaggcgggcggatcacgaggtcagaagatygagaccatcctggctgacatggtgaaaccccatctctaccaaaaatacaaaaattagctggccatggtggtgggcacctgtagtcccagctactcaggaggctaaggaaggagaactgcttgaacccaggaggcggaggttgcagtgagccaagatcgcgccactgcactccagcctgggcaacactgcaagactctgtctcaaaaaaaataaaataaaataagactgtaaacctagtataatggaagaggaaagaaaaaaacaacatataagaagaaaagatatcaaatggaaacagttacaaaacagaaagataacagaaacagaccccaacatcagctatagcaataatgttcactgtattaaaaag

SEQ ID NO: 1202 - DNA, 600 bp, Homo sapiens
tccaaatgcagagcaatttggtctccagagtaaaagagggaaaaaagcatctttgctggaaagaagtcactagaaacatgaaaaataaaaacaatctggttgaaaaagaaaaaaaaaaaggcaaccgttagtatgattaaaataagactgtaggccaggcactgtggctcacgcctgtaataccagcactttgggaggccgaggcgggcggatcacgaggtcagaagatcgagaccatcctggctgacatggtgaaaccccatctctaccaaaaatacaaaaattagctggccatggtggygggcacctgtagtcccagctactcaggaggctaaggaaggagaactgcttgaacccaggaggcggaggttgcagtgagccaagatcgcgccactgcactccagcctgggcaacactgcaagactctgtctcaaaaaaaataaaataaaataagactgtaaacctagtataatggaagaggaaagaaaaaaacaacatataagaagaaaagatatcaaatggaaacagttacaaaacagaaagataacagaaacagaccccaacatcagctatagcaataatgttcactgtattaaaaag

SEQ ID NO: 1203 - DNA, 658 bp, Homo sapiens
tgcatatttcataggggttggtgggcagactcattcatgttcccatcccaggggtgcaggggacccttctcccttccccacatcagcccagggcyacagaagctcctcaggaggcaaggaagggaatggagaggacaagagtgcctacagagtgggaaggagacaaggattctcaggtatttatccagggtaagggcaagggcttttctgcagtccaggacattagaagagtcctgaaccaagaactccacccctgccccgatatcagctgtttttactgactgagctgttggagaacagttttggtgtgcggaaacagtgagatccctaaccctacacccctgaacccagcagatatatccacactgaccagaaaggactggctaaccacaagcctgcctgtgcatggcagggaaaggaaagccattcttgagtaaatggtgttcaaaggttgggcaatatatgtgtatggtgttctcctgtggacataattgtgcacaagggtcagaagaaattgctttcattgggcaagctacttaacctgtctaaagctttgtttttttatgatctgtaaatgaagacagatcctatctcatggctctgcacgtcacacagcgatagcagacaggtaattaggatgcaggtagttagcagacag

SEQ ID NO: 1204 - DNA, 658 bp, Homo sapiens
tgcatatttcataggggttggtgggcagactcattcatgttcccatcccaggggtgcaggggacccttctcccttccccacatcagcccagggctacagaagctcctcaggaggcaaggaagggaatggagaggacaagagtgcctacagagtgggaaggagacaagsattctcaggtatttatccagggtaagggcaagggcttttctgcagtccaggacattagaagagtcctgaaccaagaactccacccctgccccgatatcagctgtttttactgactgagctgttggagaacagttttggtgtgcggaaacagtgagatccctaaccctacacccctgaacccagcagatatatccacactgaccagaaaggactggctaaccacaagcctgcctgtgcatggcagggaaaggaaagccattcttgagtaaatggtgttcaaaggttgggcaatatatgtgtatggtgttctcctgtggacataattgtgcacaagggtcagaagaaattgctttcattgggcaagctacttaacctgtctaaagctttgtttttttatgatctgtaaatgaagacagatcctatctcatggctctgcacgtcacacagcgatagcagacaggtaattaggatgcaggtagttagcagacag

SEQ ID NO: 1205 - DNA, 658 bp, Homo sapiens
tgcatatttcataggggttggtgggcagactcattcatgttcccatcccaggggtgcaggggacccttctcccttccccacatcagcccagggctacagaagctcctcaggaggcaaggaagggaatggagaggacaagagtgcctacagagtgggaaggagacaaggattctcaggtatttatccagggtaagggcaagggcttttctgcagtccaggacattagaagagtcctgaaccaagaactccacccctgccccgatatcagctgtttttaytgactgagctgttggagaacagttttggtgtgcggaaacagtgagatccctaaccctacacccctgaacccagcagatatatccacactgaccagaaaggactggctaaccacaagcctgcctgtgcatggcagggaaaggaaagccattcttgagtaaatggtgttcaaaggttgggcaatatatgtgtatggtgttctcctgtggacataattgtgcacaagggtcagaagaaattgctttcattgggcaagctacttaacctgtctaaagctttgtttttttatgatctgtaaatgaagacagatcctatctcatggctctgcacgtcacacagcgatagcagacaggtaattaggatgcaggtagttagcagacag

SEQ ID NO: 1206 - DNA, 1127 bp, Homo sapiens
atttattcactcatctattgagcatctgctatgtgtcaggctctatgccaaactttctgttcaggagccaatatatcaataactacagtgtaagctaagtcatgcaatgaaaggcttagagaatagacaccaagttgaatattaacccaagtaaattattggaagatatattagttatctaaaataggcttaaaacaataaacatttattatcacaatttctgtaggtccagaatctggacatggcttagcttgatgtttatggctcaagacctcttgaggtttcaataaaggtgttagtcagggctgcagtctcatctgaaggctcatctggttgggggtggtgtctgtatctatgtggttattggcaggccttggtcctcactacactggaactcttcaaagggttatctcatgacacagaagctagctttccccagggtgaagaatgtaaaagaatgtgagaactcttaagacagatgctatagtcttttctataacttaattttggaagtgatattccatcacttctgccatattctttgttagaatcaagtcagtaaatccagcccagattcaagtgaaaggattccacaagagtgtgagtaccaagaggtagggatattgggagccgtctgagaggctgcttaccacagagggccagccagttaggaagtgggttcagctgctgctgttaacaggctcgacctaagtggcttaaacacagaagagttgttgttgttgttgttttttctaatgagaaatctggaggcagtcagttgctggccttggctcaaaggctgagggcactgtggttcttgtagcctttcgcttatggccctaagctgctggaactcttgccatcatgtctgcattccaagcagcagaacaagaaaagaacagggggagaagagaaagaggcaccagcccactgactatcctgttcatcctgggaagtaccactcaacaagctcaactctcatttccacagccatckccagctgctcaggagtctgggaaatgtaatcacatgcaccattatccccaagtgcaccactgcctccagcccctttccacctttcagttatagccataaacatccagttagccataaacattcagctaatg

SEQ ID NO: 1207 - DNA, 553 bp, Homo sapiens
acattgctggcggaaatgcaaaatggattgtatggtcactttggagaaagtttgacagtttcttataagggtaagcatacrgttaccatatcacccagcagtaaattaactatttactttagacaaaagaaaaacttacatccatacaaaaacatgtacacaaatgtttacagcagttgtgtttgtcacagccaatgtggaaaacaaaacaaatttccctcaacaggtgaatggatgaacaacctatggtatatccatacaatggaatagttctcagacatcaaaataaataaaatcccacaacatcaccaaaggagactttagtttcatctgtaatgttttaaggttttaagtagacagactattttcatgttctatttgttgttgagtttttaaaattgatgtttcttttattacaaagtatgaaaactacaagagcatacctccgtgcctggtcaatgtcctgtcatgtagatagattctccctcaccatagccaaaccctctctttgagcagtaggttctagccttctttctaccccaccaaattcctt

SEQ ID NO: 1208 - DNA, 1158 bp, Homo sapiens
tagtggggctgccacgcccctggggcctcaggcaagcaagccccttgtggatgacaggggctgggctcaaagcagtctctggggctgtgcctccttcctgttctccactcttctctaaaggaaatgcactgcaatgaattgcacaatacagacattcctaaattctggaaaaccagcaggctttgaactctcctgggggaaaaaaaccataraacacaaaactgcaaggaatgagactatttggccaaatggccaatatgctacaactttcatagggaactcaccgcacttggtattgcctgatggaaaaaaatgccctgaatttcccgataaaagatttgagatgtggcaaaggaataaatattttttccctaagataaatctagctgtaggtgaaaactgggtctcatgcctcggacaaaatattatttccttatttactctaagtctatatcagaatatagcctacatagcatcaggtactaagccaaaaaaggctccaagggcaccattgttcatccatgactttgactgtgtcaccccccagaaaccttgagttgggcaaatgaaatcacagtagcctttggtggcttcttgagcagctgctaaggatcacatggattctgctcacacccagtgcttctcataatttaaaaatgcttgaagctgtgggaggctgcccggccctctgcattattcaaaagaaaaccaggaggcagcgacaattcttgattcttgcagataaacattctccaacaactattaagagttggattgctctaccttcatttaattccttggtgctttactatttgaatctagaatattcttgaagtctgaaagatggatagaaaagaggtaagtcatgtaaacttataaacagggcacgaaccccgctaacagacagctttgaagagatgatgattttagatcttgtgaattgttatgtcagaggaatacatgcagaagaaaacaggcaccgaaatagttattaccagagcaaagtaaatctgaacacctaaaagaataagaaagtatcttatgcttctctctactctgaactgccttgaaaagagcaagaatttcatacatgagcctgtagcacattacaaaatctgagtatgtatttgaaattcaaatgcacacaaagttcatgca

SEQ ID NO: 1209 - DNA, 1158 bp, Homo sapiens
tagtggggctgccacgcccctggggcctcaggcaagcaagccccttgtggatgacaggggctgggctcaaagcagtctctggggctgtgcctccttcctgttctccactcttctctaaaggaaatgcactgcaatgaattgcacaatacagacattcctaaattctggaaaaccagcaggctttgaactctcctgggggaaaaaaaccataaaacacaaaactgcaaggaatgagactatttggccaaatggccaatatgctacaactttcatagggaactcaccgcacttggtattgcctgatggaaaaaaatgccctgaatttcccgataaaagatttgagatgtggcaaaggaataaatattttttccctaagataaatctagctgtaggtgaaaactgggtctcatgcctcggacaaaatattatttccttatttactctaagtctatatcagaatatagcctacatagcatcaggtactaagccaaaaaaggctccaagggcaccattgttcatccatgactttgactgtgtcaccccccagaaaccttgagttgggcaaatgmaatcacagtagcctttggtggcttcttgagcagctgctaaggatcacatggattctgctcacacccagtgcttctcataatttaaaaatgcttgaagctgtgggaggctgcccggccctctgcattattcaaaagaaaaccaggaggcagcgacaattcttgattcttgcagataaacattctccaacaactattaagagttggattgctctaccttcatttaattccttggtgctttactatttgaatctagaatattcttgaagtctgaaagatggatagaaaagaggtaagtcatgtaaacttataaacagggcacgaaccccgctaacagacagctttgaagagatgatgattttagatcttgtgaattgttatgtcagaggaatacatgcagaagaaaacaggcaccgaaatagttattaccagagcaaagtaaatctgaacacctaaaagaataagaaagtatcttatgcttctctctactctgaactgccttgaaaagagcaagaatttcatacatgagcctgtagcacattacaaaatctgagtatgtatttgaaattcaaatgcacacaaagttcatgca

SEQ ID NO: 1210 - DNA, 1158 bp, Homo sapiens
tagtggggctgccacgcccctggggcctcaggcaagcaagccccttgtggatgacaggggctgggctcaaagcagtctctggggctgtgcctccttcctgttctccactcttctctaaaggaaatgcactgcaatgaattgcacaatacagacattcctaaattctggaaaaccagcaggctttgaactctcctgggggaaaaaaaccataaaacacaaaactgcaaggaatgagactatttggccaaatggccaatatgctacaactttcatagggaactcaccgcacttggtattgcctgatggaaaaaaatgccctgaatttcccgataaaagatttgagatgtggcaaaggaataaatattttttccctaagataaatctagctgtaggtgaaaactgggtctcatgcctcggacaaaatattatttccttatttactctaagtctatatcagaatatagcctacatagcatcaggtactaagccaaaaaaggctccaagggcaccattgttcatccatgactttgactgtgtcaccccccagaaaccttgagttgggcaaatgaaatcacagtagcctttggtggcttcttgagcagctgctaaggatcacatggattctgctcacacccagtgcttctcataatttaaaaatgcttgaagctgtgggaggctgcccggccctctgcattattcaaaagaaaaccaggaggcagcgacaattcttgattcttgcagataaacattctccaacaaytattaagagttggattgctctaccttcatttaattccttggtgctttactatttgaatctagaatattcttgaagtctgaaagatggatagaaaagaggtaagtcatgtaaacttataaacagggcacgaaccccgctaacagacagctttgaagagatgatgattttagatcttgtgaattgttatgtcagaggaatacatgcagaagaaaacaggcaccgaaatagttattaccagagcaaagtaaatctgaacacctaaaagaataagaaagtatcttatgcttctctctactctgaactgccttgaaaagagcaagaatttcatacatgagcctgtagcacattacaaaatctgagtatgtatttgaaattcaaatgcacacaaagttcatgca

SEQ ID NO: 1211 - DNA, 1158 bp, Homo sapiens
tagtggggctgccacgcccctggggcctcaggcaagcaagccccttgtggatgacaggggctgggctcaaagcagtctctggggctgtgcctccttcctgttctccactcttctctaaaggaaatgcactgcaatgaattgcacaatacagacattcctaaattctggaaaaccagcaggctttgaactctcctgggggaaaaaaaccataaaacacaaaactgcaaggaatgagactatttggccaaatggccaatatgctacaactttcatagggaactcaccgcacttggtattgcctgatggaaaaaaatgccctgaatttcccgataaaagatttgagatgtggcaaaggaataaatattttttccctaagataaatctagctgtaggtgaaaactgggtctcatgcctcggacaaaatattatttccttatttactctaagtctatatcagaatatagcctacatagcatcaggtactaagccaaaaaaggctccaagggcaccattgttcatccatgactttgactgtgtcaccccccagaaaccttgagttgggcaaatgaaatcacagtagcctttggtggcttcttgagcagctgctaaggatcacatggattctgctcacacccagtgcttctcataatttaaaaatgcttgaagctgtgggaggctgcccggccctctgcattattcaaaagaaaaccaggaggcagcgacaattcttgattcttgcagataaacattctccaacaackattaagagttggattgctctaccttcatttaattccttggtgctttactatttgaatctagaatattcttgaagtctgaaagatggatagaaaagaggtaagtcatgtaaacttataaacagggcacgaaccccgctaacagacagctttgaagagatgatgattttagatcttgtgaattgttatgtcagaggaatacatgcagaagaaaacaggcaccgaaatagttattaccagagcaaagtaaatctgaacacctaaaagaataagaaagtatcttatgcttctctctactctgaactgccttgaaaagagcaagaatttcatacatgagcctgtagcacattacaaaatctgagtatgtatttgaaattcaaatgcacacaaagttcatgca

SEQ ID NO: 1212 - DNA, 1158 bp, Homo sapiens
tagtggggctgccacgcccctggggcctcaggcaagcaagccccttgtggatgacaggggctgggctcaaagcagtctctggggctgtgcctccttcctgttctccactcttctctaaaggaaatgcactgcaatgaattgcacaatacagacattcctaaattctggaaaaccagcaggctttgaactctcctgggggaaaaaaaccataaaacacaaaactgcaaggaatgagactatttggccaaatggccaatatgctacaactttcatagggaactcaccgcacttggtattgcctgatggaaaaaaatgccctgaatttcccgataaaagatttgagatgtggcaaaggaataaatattttttccctaagataaatctagctgtaggtgaaaactgggtctcatgcctcggacaaaatattatttccttatttactctaagtctatatcagaatatagcctacatagcatcaggtactaagccaaaaaaggctccaagggcaccattgttcatccatgactttgactgtgtcaccccccagaaaccttgagttgggcaaatgaaatcacagtagcctttggtggcttcttgagcagctgctaaggatcacatggattctgctcacacccagtgcttctcataatttaaaaatgcttgaagctgtgggaggctgcccggccctctgcattattcaaaagaaaaccaggaggcagcgacaattcttgattcttgcagataaacattctccaacaactattaagagttggattgctctaccttcatttaattccttggtgctttactatttgaatctagaataytcttgaagtctgaaagatggatagaaaagaggtaagtcatgtaaacttataaacagggcacgaaccccgctaacagacagctttgaagagatgatgattttagatcttgtgaattgttatgtcagaggaatacatgcagaagaaaacaggcaccgaaatagttattaccagagcaaagtaaatctgaacacctaaaagaataagaaagtatcttatgcttctctctactctgaactgccttgaaaagagcaagaatttcatacatgagcctgtagcacattacaaaatctgagtatgtatttgaaattcaaatgcacacaaagttcatgca

SEQ ID NO: 1213 - DNA, 1587 bp, Homo sapiens
atttgattcaattcagatatgcctttcaagctggccctgctgagctgggcctgaaaggcacatggctcatctcatctgcatgtgacagtctctttgaagtccccagaagtgcctgctcagagtcatgctcgggagggaagaggtaaggcacagaatgagtacagactgccacccagccgcaggaaaggtgactgcacaccagaggttcctggtaaggaggtgactcacccgygactgtctcacctgtccaaagtgtgtgtcacctgctctgtgttcacccactgggttcatcagaggggcacttgaacaaaacaggaatgtcactggagaggggaacaaatgctgtccccaagtccttccctgccgtttagagtaacacagcccctgtccgcacatcctcacccccatctgccctctgcttgccagaattatcagaatctctccattctaatttcagccattctctgtgaaaatgaaaagttagtggcaggcaatggacaccctattgaaatagaaattgttcttcatatgtcagaaaagtcccagagtaatctgggagtaatctgagcaaactgattcaaaggattattacaatttcttagtcttctactgctgcaaaagtggcactctttgattctcatgtttgaggttctaattgctacctcatgcaggacttacgagagatcagccatgctgcttacactgtgtgtagtgaatcaatgttattctgaagggcctcctggaagcagtagagattggagaatgtatgtcttttaacatgatcattcccatcctatgggggttgggcactcttaactcatgttgcagatgagtaaactgaggcttttgagagtttgagggtgcacagcttgaggcagaggtggaattcccagcttcatccaagaaaccacgaatctccaatggcttgcacacatccaggtttgctggatcctatttgccaagaccacatgcagattaggagccttcaaacaaattatttccaagggagggcatctttctctgtaacccctaccctggcaattctccatggcctcagggagtccagccggaagctctgcgatgagtcctggggaactctcatctggaaaaaggcgctcatgacaggtggtgccaaccttccacggatgcttttcagcatctcttgggatgaggatacagaatttctctttcaccctgtaaacgtggtaaatgagggaatagaatttccagctttaatttttctgaataggattcaaaaatgaaattgtataaaaaggtatccagtgaaaaacacacacccatccccatctcccatccagttccctccgtaacccttttcttagtttcttatatgtcctttgcaaatacagtataagcaaaaaagaatgggcctttttcttttcttccttattttccacaaaatctatcaaaatgggtttttttttgttttgttttgtttgagacagggtctcactctgttgcccaggctggagtgcagtgacaccatcacggttcactgcagcctcgacctccccaggctcagttgatcctcccatctcagccttctgagttgctgggactacaagc

SEQ ID NO: 1214 - DNA, 1587 bp, Homo sapiens
atttgattcaattcagatatgcctttcaagctggccctgctgagctgggcctgaaaggcacatggctcatctcatctgcatgtgacagtctctttgaagtccccagaagtgcctgctcagagtcatgctcgggagggaagaggtaaggcacagaatgagtacagactgccacccagccgcaggaaaggtgactgcacaccagaggttcctggtaaggaggtgactcacccgtgactgtctcacctgtccaaagtgtgtgtcacctgctctgtgttcacccactgggttcatcagaggggcacttgaacaaaacaggaatgtcactggagaggggaacaaatgctgtccccaagtccttccctgccgtttagagtaacacagcccctgtccgcacatcctcacccccatctgccctctgcttgccagaattatcagaatctctccattctaatttcagccattctctgtgaaaatgaaaagttagtggcaggcaatggacaccctattgaaatagaaattgttcttcatatgtcagaaaagtcccagagtaatctgggagtaatctgagcaaactgattcaaaggattattacaatttcttagtcttctactgctgcaaaagtggcactctttgattctcatgtttgaggttctaattgctacctcatgcaggacttacgagagatcagccatgctgcttacactgtgtgtagtgaatcaatgttattctgaagggcctcctggaagcagtagagattggagaatgtatgtcttttaacatgatcattcccatcctatgggggttgggcactcttaactcatgttgcagatgagtaaactgaggcttttgagagtttgagggtgcacagcttgaggcagaggtggaattcccagcttcatccaagaaaccacgaatctccaatggcttgcacacatccaggtttgctggatcctatttgccaagaccacatgcagattaggagccttcaaacaaattatttccaagggagggcatctttctctgtaacccctaccctggcaattctccatggcctcagggagtccagccggaagctctgcgatgagtcctggggaactctcatctggaaaaaggcgctcatgacaggtggtgccaaccttccacggatgcttttcagcatctcttgggatgaggatacagaatttctctttcaccctgtaaacgtggtaaatgagggaatagaatttccagctttaatttttctgaataggattcaaaaatgaaattgtataaaaaggtatccagtgaaaaacacacacccatccccatctcccatccagttccctccgtaacccttttcttagtttcttatatgtcctttgcaaatacagtataagcaaaaaagaatgggcctttttcttttcttccttattttccacaaaatctatcaaaatgggtttttttttgttttgttttgtttgagacagggtctcactctgttgcccaggctggagtgcagtgacaccatcayggttcactgcagcctcgacctccccaggctcagttgatcctcccatctcagccttctgagttgctgggactacaagc

SEQ ID NO: 1215 - DNA, 623 bp, Homo sapiens
tgggaacacaccccccagttgtctttttccttcggtttatataattcctggcatgtgcctttcaacactccgtttatgttagaagtttggtattagcctcggggctttactcttgacactgctactaattctctactttatattcgtgattgcccttctgaaaggagaatcttgtttcaaaattgcacctgggcattttaaagtaaataggatgcaaatccttagttggcctcttgtgtacattaacttcagagtgaagaatgaatatgtaagmcagtgatgggggatggggagttgagcaaggaaaataatttgcataatggtgtttgctccctggtgaaactgaaacccagcctgtgtgggtggggccttgtttccaaacgtcagcgctgctgcccacgaaggcctgcaccaacgcacggtgccctccgggccgcccacagaggccggcgtctggccaggagcaggggctggggacagcaagtgtgaaaccagctgaagcacctgcagctcaggcgggctgcaggctccctgctctccccctgtgaagaagcacacattgttctttcttcccgcacatttgaatctctcagtggggtctcattttctgtgacatggcaaac

SEQ ID NO: 1216 - DNA, 629 bp, Homo sapiens
agaatcattttctgagtcagctggagtgtttcagagcccaacacccaaggagcagtgcagggatggtgcccagttacaggggacarctcagctctgaatgttacaaagggcacttcatggaccaccaccttttctctgcttgctctgtacccctaaagtactacaaggcatttttggttaataataatttgaatactatgtgatcttgtagattctactgcgtttggctagctaatgtctctaagtagcaagatgatttattttttctggacaataccaggactatatgctgatacaggactggcttgctctaaggatcagattttccagtgtaaaatatatactccttatagggttgtaagagcagaagcccgtcatagcctgtttctttttgctctctcttcagccagcagttggcctggatctttgctggtagacacagggaatgttctccttgatgagtggttcccaccctggcagcctcagatcccaccatgttggcagggatgctgaaatccacctgcctatcagcctttgtaaataacaaaaatcacaagtggctctagcatttatgtattctatgatattgggactcttgtgatataaataatacaaatgcttttacatgc

SEQ ID NO: 1217 - DNA, 629 bp, Homo sapiens
agaatcattttctgagtcagctggagtgtttcagagcccaacacccaaggagcagtgcagggatggtgcccagttacaggggacagctcagctctgaatgttacaaagggcacttcatggaccaccaccttttctctgcttgctctgtacccctaaagtactacaaggcatttttggttaataataatttgaatactatgtgatcttgtagattctactgcgtttggctagctaatgtctctaagtagcaagatgatttattttttctggacaataccaggactatatgctgatacaggactggcttgctctaaggatcagattttccagtgtaaaatatatactccttatagggttgtaagagcagaagcccktcatagcctgtttctttttgctctctcttcagccagcagttggcctggatctttgctggtagacacagggaatgttctccttgatgagtggttcccaccctggcagcctcagatcccaccatgttggcagggatgctgaaatccacctgcctatcagcctttgtaaataacaaaaatcacaagtggctctagcatttatgtattctatgatattgggactcttgtgatataaataatacaaatgcttttacatgc

SEQ ID NO: 1218 - DNA, 629 bp, Homo sapiens
agaatcattttctgagtcagctggagtgtttcagagcccaacacccaaggagcagtgcagggatggtgcccagttacaggggacagctcagctctgaatgttacaaagggcacttcatggaccaccaccttttctctgcttgctctgtacccctaaagtactacaaggcatttttggttaataataatttgaatactatgtgatcttgtagattctactgcgtttggctagctaatgtctctaagtagcaagatgatttattttttctggacaataccaggactatatgctgatacaggactggcttgctctaaggatcagattttccagtgtaaaatatatactccttatagggttgtaagagcagaagcccgtcatagcctgtttctttttgctctctcttcagccagcagttggcctggatctttgctggtagacacagggaatgttctccttgaygagtggttcccaccctggcagcctcagatcccaccatgttggcagggatgctgaaatccacctgcctatcagcctttgtaaataacaaaaatcacaagtggctctagcatttatgtattctatgatattgggactcttgtgatataaataatacaaatgcttttacatgc

SEQ ID NO: 1219 - DNA, 629 bp, Homo sapiens
agaatcattttctgagtcagctggagtgtttcagagcccaacacccaaggagcagtgcagggatggtgcccagttacaggggacagctcagctctgaatgttacaaagggcacttcatggaccaccaccttttctctgcttgctctgtacccctaaagtactacaaggcatttttggttaataataatttgaatactatgtgatcttgtagattctactgcgtttggctagctaatgtctctaagtagcaagatgatttattttttctggacaataccaggactatatgctgatacaggactggcttgctctaaggatcagattttccagtgtaaaatatatactccttatagggttgtaagagcagaagcccgtcatagcctgtttctttttgctctctcttcagccagcagttggcctggatctttgctggtagacacagggaatgttctccttgatgagtggttcccaccctggcagcctcagatcccaccatgttggcagggatgctgaaatccacctgcctatcagcctttgtaaataacaaaaatcacaagtggctctagcatttatgtattctatgatattgggactctygtgatataaataatacaaatgcttttacatgc

SEQ ID NO: 1220 - DNA, 576 bp, Homo sapiens
agaaatattaccacttgaaaaactgcattagcattagtgaatttctcatgcaagttcctttctggctagcttggccaaaaaaaaaaaaaaaaaaaaaagctgttaattttcaatgcaattccatgaactgtggttccttgttcaaaatgtatagcaaagaaaatggaaactgccataatgacttatattgtggccaaaactcttccaactctggtagaaaatcacatttcatttctttggcgggtgagagaggcaacacaatacattggaaatgagagaatggaagagtcggatgccatgtttccttctaactaggattccagttttcacccacatcacttcagcaatgcaaagtggcataaaagcaggtcaccgcacagtgcctgagcagtgaatgcaaatacagtacttggttcctgaccacagcatgtgaaagcacataaaagagagagggtcrcatttcatgtcgattttgcttctccatgaccaggctacatggaggctgagcagccgctggctgccttgttcatctctttggcccttgtctaaatcacaacctatttcagcatggaaaac

SEQ ID NO: 1221 - DNA, 432 bp, Homo sapiens
  misc_feature (1)...(432): n = A,T,C or G
taatcagtatgactaccacacctggtattccaatgtctaccagggataaactgctcagtttgtagattaacacaggaatctaaaggagaaaatcctactaatcagggggatatagcttaactttcttgcttaaacaacccgagatgatcagccagacttcccaagcctgtaaaaagagggctctaccaatgagaaattaaccacctggtattgagatggtagattccgactgagtccactcaggctgatcttagaccgagttggcaacaaacaaaaagagggccacagctgcccccartgttcagctgcattccaagctagagannnnnnnnnnnnnnnnnnnnnnnnnnnnnnnnnnnnnnnnnnnnnnnnnnnnnnnnnnnnnnnnnnnnnnnnnnnnnnnnnnnnnnnnnnnnnnnnnnnntgctctag

SEQ ID NO: 1222 - DNA, 432 bp, Homo sapiens
  misc_feature (1)...(432): n = A,T,C or G
taatcagtatgactaccacacctggtattccaatgtctaccagggataaactgctcagtttgtagattaacacaggaatctaaaggagaaaatcctactaatcagggggatatagcttaactttcttgcttaaacaacccgagatgatcagccagacttcccaagcctgtaaaaagagggctctaccaatgagaaattaaccacctggtattgagatggtagattccgactgagtccactcaggctgatcttagaccgagttggcaacaaacaaaaagagggccacagctgcccccaatgttcagctgcattccaagctagagannnnnnnnnnnnnnnnnnnnnnnnnnnnnnnnnnnnnnnnnnnnnnnnnnnnnnnnnnnnnnnnnnnnnnnnnnnnnnnnnnnnnnnnnnnnnnnnnnnntgctytag

SEQ ID NO: 1223 - DNA, 590 bp, Homo sapiens
ccttccttaggcaaataagataaaagcttcaacagaaaccaatgtagcccaaatttaggatcacccacgctacatttacccatccaatctgaaacaataaaagcaattgtgcctgtctgaggcatatttttctgccatcaggtttaaaatgttaaataaataataattgaaatatgaaatagtggtgtctatacatgtacatttttgtcactccctaaacagcaggaattatacccaacatttaagttctttctcagggtttcactaagcatactccaggctagagacagctccaggctggatattgcaccaaatgaattcacacatacactccctcacccactagaagttcatatccctggacagctggtagcagtcattccagttaacagcatttctgaatgcagagaaaaccaggcaacaaatacttaatgagcatttcctaaatgcagtgtcatactaataacagagaagataaatacaygtaccagaatttctactctgaagaaattaataatataattgattcacccatacatatatccaagcaaccaaccattcatccctccacccatttaccctttcactca

SEQ ID NO: 1224 - DNA, 1307 bp, Homo sapiens
gccaaaggtcacactgctcaccaacagcaggacagggacaataaatctggtcttatgactccagctgagagtgctttccaccacagcactatgtctaacctggtggaaatgcagcaacttcaatcctcacctgcctcaacttaggagaagcctctgcctctcctatcacactcaacagggatatgtttcttgaggctgatgcagctcaaagcttcattgcaaaattcttccaggctacctgttctgagttataggaaatatcccaaagcgcccatgtcctaccattccagggtrcaaaagagcacgaacccacaagaagatattggaagatttactgagccacagggaaatgaggaaatgagagcaaagtaaggaagttatataagggtcacacacacacacactcaaaaaacccagggttaaggttagctgcagcacacagagacttgcagcttacatttagggagacgaataagtttaaagaacagataaattaaaaagactaaggctccatacacgtcagagccctgacttaacctcaaccatccaggctcaagttaaaccaacgaaagtgaccaggcatagtggctcatgcctgtaatcccaacactttgggaggtcaaggcaggaggatcaaggccacaagttcaagaccagcctgggcaacacagcaagaccctgtctctacaaaacatttaaaaattacccgggcatggtggtgtgcggtggtgagtatagtctctgctactcaggaggctgaagagggaagattgcttgagcccaggagttcaaggctgcagtgagctgagatcatgccactgtactctagtatgggcaatagagcaagactctgtctctaaaaacacaaacaaatttaaaccaaccaaagacaccctaaccctctcccatttccacctagcttctctcaagtccctgtctctgaatcagaccctcttgctatgatctctctcagtcacattcccatgtaaaattctcgggtctcatcccttttccaattaggtatttaatacaactctgatcctggtgccaccacataataatttacacagaacacttaattagcttcttagataaaaataacatgtaatttgtttggtaattatatgtttccacaactgctgaaagcaactcattataggaatttggtatacttaggatagattaccttaattctattttctgtttatccaattagatttgccggtcttaattgtactataaattgtgttgagctggtgaagatgactatgaagttgttgttccttcagatttcatggttggtatgc

SEQ ID NO: 1225 - DNA, 720 bp, Homo sapiens
cacatcaggattcgaacaccaatatgagcccattttctactcttactgctgatgtgagtactaagtcctcattaactggtgatgaaagaaatagatgtgaaggaattaaaacaccaaaaagagccttggtatttcctctcatcttggttcaataacctcttgtgagaaaaaagttttcastgcgtgtcgctataaatgagcatgattggcttgccagttgaacctacaaacagaaataatgtgagaggtcacaagtccactcatttgcactggacttccaaagagttttgtcatgcagtgtctcagttaatcccccaatagctcagggaggtggacatgggcaccattttacatacagagaaaacatcccaaaacattgcagtgatgacacatatttattaagcataaaccttaggccaggtacatcacacattatgccatttaatccaccccataaactgtcattgtgcctcttgttcagaagaacaggttggggcttagagaggttaaatgactcatccgaggtcatatagcttgtcctcagagccagaattcgaatccaaagacatgttcttaagaaccatggcattcacctctccctaggacacacaagggctcaaatcgagcccatgaggcttctatcagctatctaccagttcatttggatttttggctcattgcagactaatgatgcacaagtggtctcattaatggtatgca

SEQ ID NO: 1226 - DNA, 720 bp, Homo sapiens
cacatcaggattcgaacaccaatatgagcccattttctactcttactgctgatgtgagtactaagtcctcattaactggtgatgaaagaaatagatgtgaaggaattaaaacaccaaaaagagccttggtatttcctctcatcttggttcaataacctcttgtgagaaaaaagttttcagtgcgtgtcgctataaatragcatgattggcttgccagttgaacctacaaacagaaataatgtgagaggtcacaagtccactcatttgcactggacttccaaagagttttgtcatgcagtgtctcagttaatcccccaatagctcagggaggtggacatgggcaccattttacatacagagaaaacatcccaaaacattgcagtgatgacacatatttattaagcataaaccttaggccaggtacatcacacattatgccatttaatccaccccataaactgtcattgtgcctcttgttcagaagaacaggttggggcttagagaggttaaatgactcatccgaggtcatatagcttgtcctcagagccagaattcgaatccaaagacatgttcttaagaaccatggcattcacctctccctaggacacacaagggctcaaatcgagcccatgaggcttctatcagctatctaccagttcatttggatttttggctcattgcagactaatgatgcacaagtggtctcattaatggtatgca

SEQ ID NO: 1227 - DNA, 720 bp, Homo sapiens
cacatcaggattcgaacaccaatatgagcccattttctactcttactgctgatgtgagtactaagtcctcattaactggtgatgaaagaaatagatgtgaaggaattaaaacaccaaaaagagccttggtatttcctctcatcttggttcaataacctcttgtgagaaaaaagttttcagtgcgtgtcgctataaatgagcatgattggcttgccagttgaacctacaaacagaaataatgtgagaggtcacaagtccactcatttgcactggacttccaaagagttttgtcatgcagtgtctcagttaatcccccaatagcycagggaggtggacatgggcaccattttacatacagagaaaacatcccaaaacattgcagtgatgacacatatttattaagcataaaccttaggccaggtacatcacacattatgccatttaatccaccccataaactgtcattgtgcctcttgttcagaagaacaggttggggcttagagaggttaaatgactcatccgaggtcatatagcttgtcctcagagccagaattcgaatccaaagacatgttcttaagaaccatggcattcacctctccctaggacacacaagggctcaaatcgagcccatgaggcttctatcagctatctaccagttcatttggatttttggctcattgcagactaatgatgcacaagtggtctcattaatggtatgca

SEQ ID NO: 1228 - DNA, 620 bp, Homo sapiens
acatctgtgataccatcaccaaaatcaaggagtactgaatatatctttaacctccagggtatgtgattaatgtatatttctcctcggggatcatcrgcttcgtaggggcaggaactgtattagttttcactcaccgttttgtccctattgattactacagtagttgacaaagtacaactaacattttaccgagcacttactttgtgccaggcattatttaaatgctatggatatattaatatacttaataactacagtggcctcttgggttgttcttattgtcatcccattttttagataaaaaaactgaggcatgaggagagacattatgtaacttgctcaacgtcatacagacaatatgtaatggggcatagagaagggtgtcaataattatttgttaaacaaatgaatggatgaataagagaaagaaagggtgaatgaagctcttcccttgatcctagttggaagcatgtcctctacaagagtgctgacttatcttttcttgcgagatggatgggaatacaaggctatggggatgcccaggagactgttttggactccagtgctgctgactctggagagaggaaaaggtgggggttgggatagtctaggaaatgctg

SEQ ID NO: 1229 - DNA, 691 bp, Homo sapiens
taagccccaggcctacaggaggctggatggcccaggggaagaggctgccttgcctaccctgggaaagtggatggagggtagcttcttcctctgccaagaaaatcaggcgtcctacagggagagagagctgggggtaaaggctgggtgggaggatgcttaagggccagtctttccccaaactcagctccctagagtacagcgagttctctcccactcagagcagaaggaggtctgacacactcacacctgcaggaaaactgggggccaggaggtgggagacaaaatgaggacacagacaggaggagccccagactccttcctgactccctgccttcaccagaatgaagtagggaggcttagagctccttccaactgcactgttttgcttactgaattttcattttgcttttcttaattataagaataatgcaaagtcccatcaacaacatttttgtgtgagttgatggatttctttatatwtatatatatttttttttgagataggatctcgctctgtcgcccaggctggaatgcagtggcacaatcagagctcactgcagcctcaaattcctaggctcaagtgatcctcctgcctcaggcttccaagaaacagactacaggcgtgcaccaccacacctggctcatttaaaaaaattattttttgtagagaggggggtctcgctatgttacc

SEQ ID NO: 1230 - DNA, 691 bp, Homo sapiens
taagccccaggcctacaggaggctggatggcccaggggaagaggctgccttgcctaccctgggaaagtggatggagggtagcttcttcctctgccaagaaaatcaggcgtcctacagggagagagagctgggggtaaaggctgggtgggaggatgcttaagggccagtctttccccaaactcagctccctagagtacagcgagttctctcccactcagagcagaaggaggtctgacacactcacacctgcaggaaaactgggggccaggaggtgggagacaaaatgaggacacagacaggaggagccccagactccttcctgactccctgccttcaccagaatgaagtagggaggcttagagctccttccaactgcactgttttgcttactgaattttcattttgcttttcttaattataagaataatgcaaagtcccatcaacaacatttttgtgtgagttgatggatttctttatatatwtatatatttttttttgagataggatctcgctctgtcgcccaggctggaatgcagtggcacaatcagagctcactgcagcctcaaattcctaggctcaagtgatcctcctgcctcaggcttccaagaaacagactacaggcgtgcaccaccacacctggctcatttaaaaaaattattttttgtagagaggggggtctcgctatgttacc

SEQ ID NO: 1231 - DNA, 691 bp, Homo sapiens
taagccccaggcctacaggaggctggatggcccaggggaagaggctgccttgcctaccctgggaaagtggatggagggtagcttcttcctctgccaagaaaatcaggcgtcctacagggagagagagctgggggtaaaggctgggtgggaggatgcttaagggccagtctttccccaaactcagctccctagagtacagcgagttctctcccactcagagcagaaggaggtctgacacactcacacctgcaggaaaactgggggccaggaggtgggagacaaaatgaggacacagacaggaggagccccagactccttcctgactccctgccttcaccagaatgaagtagggaggcttagagctccttccaactgcactgttttgcttactgaattttcattttgcttttcttaattataagaataatgcaaagtcccatcaacaacatttttgtgtgagttgatggatttctttatatatatwtatatttttttttgagataggatctcgctctgtcgcccaggctggaatgcagtggcacaatcagagctcactgcagcctcaaattcctaggctcaagtgatcctcctgcctcaggcttccaagaaacagactacaggcgtgcaccaccacacctggctcatttaaaaaaattattttttgtagagaggggggtctcgctatgttacc

SEQ ID NO: 1232 - DNA, 1311 bp, Homo sapiens
acttttagagaactgccagacaagctaaggaaagaagccaggtgagaagacaatctctagcatcaaagcatggatcagacatcacacgatttttggtaaagaagtaaagtagaaaaatatatgaatgaatgacaaatggtttacatgtggaagactttaatacagaagttttccatgtttgtttaatatatcgagagtaaaaattttcagaacaaaaatcaagaattcaaattctcttctactaattacttttagtattaaatacattttgaaagtacttaacagaaactaagatacaatactgaatatttctgtggtctttttgatttgattcagactcgcaattatgtttcagcaatgttttgtaaagctctttacccctaatatgcctaatcactgtattgtgcatagattgtgtttaaaaaatgtactctcaattacctaaaaatgcttctggattagtattgttctggactgtcataggtatgagtggaacattgcaaaaccttatgggaaatttcagacgcaaatcattatttgggaattctgggccaagcatgaccagcctgcttaggattcaagagagactgtccactaaatacctccagaatgagctaggggcacacattttgggtgttgcttttcttgctttatttcttagctagtcatctttatcaaaaatatccttttcaaaatgaggtacctatggtgtttgtggacaatttgggggttctgtgtaaagtaattgttaaaactattaaataactgaaaacataaaatgtaaaatgccacttaagcttgattttttagatctttttttaaaaaatgaataaaactaggcttactgttggctgggcgcggtggctcacgcatgtaatcccagcactttgggaggccaaagcgggtggatcatgaggtcaggagatagatcgagaccatcctggctaatacggtgaaaccccatctctactaaaaatacaaaaaattagccgggcatggtgttgtgcacgtgtaatctcagatactcgggaggctgaggcaggagaattgcttgaacccgggaagcagaggttgcagtgagccgagatcacgccattgaactccagcctgggcgacagagcgagactccgtctcaaacaaacaaacaaacaaaaaaaaaaactaagcgtactatcaaaatacactttgtcttctggttctcattttctgtttttaaaaccctgtgttattaaaggtatgtttctggtacttattttaaaaagagtgatgatgayaaaacactttataataaggcataatcagatggttata

SEQ ID NO: 1233 - DNA, 969 bp, Homo sapiens
tggatctgcagcaccagtcaagctctctaatacttagggcctctgtgttcaactggggccctggggtggcactgcaggaaagtaagagttaatctatcctggagggcaagcaaacttaccccaaaacccaggcctgcagtcacttgacttcatcttggggacaatgagagaaggatccccaggccaaacttgagggcttctgtcctcagcacataaaagcagtctgttctgtagacaggctgatcagagagaaagggggcaggcgttttcatcctccatgacttctcctaaatttgccaatgggataagtcactctgcttcctttagggaggagggagtgagggtagagagaggccaaaaatttcttcttttagcaaaacttgaggtttgaggaagaggtatttcatgttgcatcactgtatgccatcttgtgcatatagcacgatgacaaaatcagtccctattgaaataccattgctcaaatactaccctaaccctggaccctggacatgtgtccactagttcttgaactccccatgggccttagaaaccatctgccaccctgacatcaatgcctgccctttctccagcctaatgtgcatctctgtggcccatttggttccttgtgcctgctgcagcttgtaagtaaaaatgactcccttccttagtgtgccatatgccagtgtggtttcatattagtagttaagtagaggtcaggcacctgattttgttcaaataaatcctgccaagggtgtttttgctttttttttttttttwaaagtatttgtgaattatgaccactaatcacaattaactataaaacacgttgtgtttctagaccagtacaatccaacagaaatataatacaagccatatatgtaatttttgtggtaaaatttatcattttaattgtttttaaatgtacttaaattggtattaagtacattcacattattgtgtaaccatcat

SEQ ID NO: 1234 - DNA, 688 bp, Homo sapiens
ccaagagcccttgggaaaaaataactccacctggctggagcaggtggagartgcactttaccatctcatggagaagcacagcttcggctctggccctggggctctcctgcagggtgctggactccatctcaccagcctctcgtccctcctccaccaccttctccggatttggcctcttctctaattcatttaaatgttgagagctcaaggagctttctggggttttcttctcctccaggtgggcgcctggctcctgggacaggcctttgctgcattccactgtccccggtgcttcaggtactgccttggatcctcaagacctgccttcttaggtacagaagctgcagtgaaaatgagagttatcagttaaaggagacttcatttcaagagagactcttcccaacacagtcactgtcctgtctcctggccctgtttcagaaggatggagggaattccctcagctcaccgccccttgcatttactcttttatcctagcaatgtcctggcctgagttcccagagttacagattgtcaaagaaggaagggacctcaaagatcacctagtccggtggttctcaaccagggaccatcttgctcctaccgttttcttcttccagtggacatttggcaatgtctggagacatttttttggttgccacaacattggggaggggtgaatgctactggc

SEQ ID NO: 1235 - DNA, 688 bp, Homo sapiens
ccaagagcccttgggaaaaaataactccacctggctggagcaggtggagaatgcacyttaccatctcatggagaagcacagcttcggctctggccctggggctctcctgcagggtgctggactccatctcaccagcctctcgtccctcctccaccaccttctccggatttggcctcttctctaattcatttaaatgttgagagctcaaggagctttctggggttttcttctcctccaggtgggcgcctggctcctgggacaggcctttgctgcattccactgtccccggtgcttcaggtactgccttggatcctcaagacctgccttcttaggtacagaagctgcagtgaaaatgagagttatcagttaaaggagacttcatttcaagagagactcttcccaacacagtcactgtcctgtctcctggccctgtttcagaaggatggagggaattccctcagctcaccgccccttgcatttactcttttatcctagcaatgtcctggcctgagttcccagagttacagattgtcaaagaaggaagggacctcaaagatcacctagtccggtggttctcaaccagggaccatcttgctcctaccgttttcttcttccagtggacatttggcaatgtctggagacatttttttggttgccacaacattggggaggggtgaatgctactggc

SEQ ID NO: 1236 - DNA, 541 bp, Homo sapiens
ataaaagtaaccacagtattactcctgcatatgtacaagaaaatatcattgtgaatgagcaacaccagaaaactaaaccataatctcctgtatggaatgagagtaaaattctggaagaagaggtagccaagaacactcacatggatcagggtagaccgcattcgcatatcatattgtatctcatgccctttgattgaacctatttacttggtaagtgaatcattgttcagagtcactaacagattgacctggaactgaatttcattgataacgtaatgaaaggtaagcctatgctgtacaaagtactggaagctaaatccatgctcacaggggaggccacccagtgaactcagagggctgccctctcaagttgtctcytctgcttctttttggcatatattgagaaagtttctatcttgtgacttggctgtaaaaagcaggcaagtttgtagcagcatatgaaattccttttctaaatgtgttctaagacatttccctggtaaccatgccagatttccactcagctctctcctcctttcat

SEQ ID NO: 1237 - DNA, 1213 bp, Homo sapiens
ttttcaagttaggaaaaggatgaaagaaagaaattcgcaggggcagcacaattgagaactctcaaatagttcaagcaacaacaacaataacaacaacaaaatacttttcagtatttggggttctgcaagtagtcatcactctactcagacttaatcctcagctattcttagtcacttgatagatgagcaaagcatttctcttttagttagaggaagaatttttccaaggtaataatcaaatggatgaacacaataactacacagagctgggtctgaatatactttcattggtggactaacttcagacatggggaattggaagtctgaattattatttttgaaacagaatagtgttattgatagtggtgcaaaccatggtattatggacatacttcatayactatgaaaaaatggtgttatataagaacataaaaaatattgtactatagacatctcattccaccacctatgaactgctagcagaaggttataccaacatgagggtcgctcacagcctctaaactgtaattgccagagtgggtgccctgaaaattcacgtcaacataagctgtaaataaagacctccctaaagacatggaagcactcacgagactaagctcagagaatcaaaggatttcttcgcacatcaccctaaaaatatatttcacattatgtgaacaacttatctaaacagaatgaaattacttactgaaagatgtggttgttagagcaaataaaaaatagtacaagtggaaaaagaaaagctgggtgttttggttgctctgtcaactggctcatgaacccggagttaagtgacttaccccaggttgcttttccattgaacaggtgaactcttttttttttttttgagatggagtttcactctgtcacccaggctgagtgaaatggcgcgatcgcagctcactgcaatctccgcctcccaggttcaagtgattctcctgcctcagcctcctgagtagctgggactacaggtgcccaccaccatgcccagctaatttttgtatttttagtagaggcagggtcttgaactcttgacctcagcctcccaaagcctgcctcagcctcccaaagtgctgggattgcaggcatgagccaccatgcccagctgaacaggtgaattcttttcaacacaaagataggccagccccaaccaatctgcctgttactcctaacaactcaagacctaacaaag

SEQ ID NO: 1238 - DNA, 1213 bp, Homo sapiens
ttttcaagttaggaaaaggatgaaagaaagaaattcgcaggggcagcacaattgagaactctcaaatagttcaagcaacaacaacaataacaacaacaaaatacttttcagtatttggggttctgcaagtagtcatcactctactcagacttaatcctcagctattcttagtcacttgatagatgagcaaagcatttctcttttagttagaggaagaatttttccaaggtaataatcaaatggatgaacacaataactacacagagctgggtctgaatatactttcattggtggactaacttcagacatggggaattggaagtctgaattattatttttgaaacagaatagtgttattgatagtggtgcaaaccatggtattatggacatacttcatatactatgaaaaaatggtgttatataagaacataaaaaatattgtactatagacatctcattccaccacctatgaactgctagcagaaggttataccaacatgagggtcgctcacagcctctaaactgtaattgccagagtgggtgccctgaaaattcacgtcaacataagctgtaaataaagacctccctaaagacatggaagcactcacgagactaagctcagagaatcaaaggatttcttcgcacatcaccctaaaaatatatttcacattatgtgaacaacttatctaaacagaatgaaattacttactgaaagatgtggttgttagagcaaataaaaaatagtacaagtggaaaaagaaaagctgggtgttttggttgctctgtcaactggctcatgaacccggagttaagtgacttaccccaggttgcttttccattgaacaggtgaactcttttttttttttttgagatggagtttcactctgtcacccaggctgagtgaaatggcgcgatcgcagctcactgcaatctccgcctcccaggttcaagtgattctcctgcctcagcctcctgagtagctgggactacaggtgcccaccaccaygcccagctaatttttgtatttttagtagaggcagggtcttgaactcttgacctcagcctcccaaagcctgcctcagcctcccaaagtgctgggattgcaggcatgagccaccatgcccagctgaacaggtgaattcttttcaacacaaagataggccagccccaaccaatctgcctgttactcctaacaactcaagacctaacaaag

SEQ ID NO: 1239 - DNA, 1283 bp, Homo sapiens
tgcatacacagctagtctccactgcaaaggggaaggggcacatattcagaatagtcagtgcatggtaaagtggcagcacagcctcaggtggcagaaagctatagaaacatagtcccttaaaaatggtacgacaaagggctgtttctcagagcgcagtatactttaaaagatggaataaaaatgcagatgtgtttaaaaaccaggggtattttttattggtataatggaaagaatattgaaatcagatgtgtctgagggcagagaatcccaaatctaacatcatggtgtccgttgttccaattaccatgcagtgattagaaagatgggctcgtcctaggtgcagaagcaggcacagggtactttagctgccgcctcatatgtgaaatggagaaaggttgttatcgtatactttcttcctcttgtggtgtggattaaatgagatagtccacgtaaggcaattgtcatagatgcttgtgaatagcaggttatagattctccacttccttggcctcctgctttatcacaacagcaggggatgggaccccgtccttccctgtggtcttctttccttttggcatcttgggcaactggagaagagctaactgcgcgatgaatgcttaattctcttgaatgtactattgtaatttctttattctcatgtgagttttcataaaaacaatgcaatttttatactgtaactgacatgatttgcaaagtaatgctttttatccacattcagttaacattttggcctttttaaattaaaaaactcaaattttctgaggtttataaaacaggattactaagtgtaggatttgggttaaacccataagttctcctctaacttgccatagaagctgtggcrtgaatggtgagaggtgcaggcaggccgagggttgggggctgtggctgtgcacgaggtgcatctccatgtgccatctggggctgcttctggaaagtagggagcgctgcagtgaggaagaggaggagtcaaactccaccccacattctctcgcattgttctctaatgattgtgtgaaaaagataaaatgaaaaatgtgaaactattccaaaaaacacaggccaagtaagccaaaaagaaatgactataatacacatattcctgaagaggccagagaaagaggaaaataggaataaatctccctgggcaatctatcaaaatgttgagaaaaatacattactaatgagaaaatatcaaacacctatcgggagacaaatgcacataactctgaatcgtggatcacaagagtttcctcaggcac

SEQ ID NO: 1240 - DNA, 1283 bp, Homo sapiens
tgcatacacagctagtctccactgcaaaggggaaggggcacatattcagaatagtcagtgcatggtaaagtggcagcacagcctcaggtggcagaaagctatagaaacatagtcccttaaaaatggtacgacaaagggctgtttctcagagcgcagtatactttaaaagatggaataaaaatgcagatgtgtttaaaaaccaggggtattttttattggtataatggaaagaatattgaaatcagatgtgtctgagggcagagaatcccaaatctaacatcatggtgtccgttgttccaattaccatgcagtgattagaaagatgggctcgtcctaggtgcagaagcaggcacagggtactttagctgccgcctcatatgtgaaatggagaaaggttgttatcgtatactttcttcctcttgtggtgtggattaaatgagatagtccacgtaaggcaattgtcatagatgcttgtgaatagcaggttatagattctccacttccttggcctcctgctttatcacaacagcaggggatgggaccccgtccttccctgtggtcttctttccttttggcatcttgggcaactggagaagagctaactgcgcgatgaatgcttaattctcttgaatgtactattgtaatttctttattctcatgtgagttttcataaaaacaatgcaatttttatactgtaactgacatgatttgcaaagtaatgctttttatccacattcagttaacattttggcctttttaaattaaaaaactcaaattttctgaggtttataaaacaggattactaagtgtaggatttgggttaaacccataagttctcctctaacttgccatagaagctgtggcgtgaatggtgagaggtgcaggcaggccgagggttgggggctgtggctgtgcacgaggtgcatctccatgtgccatctggggctgcttctggaaagtagggagcgctgcagtgaggaagaggaggagtcaaactccaccccacattctctcrcattgttctctaatgattgtgtgaaaaagataaaatgaaaaatgtgaaactattccaaaaaacacaggccaagtaagccaaaaagaaatgactataatacacatattcctgaagaggccagagaaagaggaaaataggaataaatctccctgggcaatctatcaaaatgttgagaaaaatacattactaatgagaaaatatcaaacacctatcgggagacaaatgcacataactctgaatcgtggatcacaagagtttcctcaggcac

SEQ ID NO: 1241 - DNA, 638 bp, Homo sapiens
tttccctttaaatacattgttctatctaaactggcatttttagcaagaaagagagagaaccaagagaacacattgatcatagaaatctttgcygaggttcatagttaaattggaatgagatgtgggcaatgtttaatgaaacacatatttaaagttttagtcacagataattgttgcaatgtctatcagcagtatgtctaccaagacaatatttactgatgattctacaacattccagtaatttgaagttaatagtgtaattgattatggcctggttttctcagtgtctttttatatttttaggatattgtcttatacaatcatgcattgcttatcaacagcgatatgttttgagaactgtgttgttaggctatttcatcattgtgtgaacatcatagaatgtaacaaacctagatggtatagcctactacatgcttgggctatgtggtataaactattgctcctaggctacatacctgtacagcatgttactctactgaatgttgtaggcatttgtaacacactggcaagtatttgtgtatctaaatatatctaaacatagaaaatgtgcagtataaattataaaagatttaaaaatactacccctgtgtagggcacttaccacgcatggagcttgt

SEQ ID NO: 1242 - DNA, 1262 bp, Homo sapiens
agtgagttctttttcttccatttagttcctcaggaggcggtgattaaagctcagcagacaggtatttttcatgatattctgattcccgcacagggatcgcatggcatgaatgcttcttgccctggtcggtgctgccctagaatccttgtctgaagtgtggtgctctgtggttgtttttctgcctsccccagagttgaggctccaggcaactgtaatgcagagatgagaccagcacgttggctgccaatctgcccacgacatatctgcatggatcctctctgtccaccccaaggctgccgccgtggttctgagactcagcatgtcaccccgtaaatcctgtaaaagtcctgatggcagcctcctccaagccatcctgattgcgctatggggatgaatcttatcacaggctcggtcatttatcactcctgcccaaactttcagtggacagcggtggtgctgcccccactgggctggcctcattcctctctcaagggcactgtgctctctgctccctctaaccacacacagatggacctcatgtacaccttgtctatgtctcctcagccttggctcagtgtggccccacttcctccagcaccccctgagctctgccccaaatgatggcttcaaaatcagccgtccttcaagaccacatcccggaggctctcctccataaggagccattgaaccctgctctgcactctgcacacccaacactatggccagccccgcagaggcacctccttcttagggcctgagcgtctcgagagggaggaacctcctcaccatcccgcctttccctcctcctgcccctgtcttgaagtctttggagcactgtgtctctcccaaacagaagtgctcaaggaacgtgtgttgaattgtgtagaaacagacagaggggtacaagtcacacttcatgtctgcggtcagctgtagtagactgtttctgccggtgcctgctctacccccgccctgctgtgattgcctgtgctgggctttggaaggagctccacctggagccccgtgagccttttcatgaagtgcaggaggacgccacaggctgtggtttcctcatgatgttctgctacccaggggccgccatacctgtcattcttcgctgtatctgaggggctgtaattagagtcatagccaaagagcacttgccctgcacagctcctgggagaggaggacggcgtttctgtctgcagaattttgaccggttttgggcatggggcaaacaatctttgcaatgggtttatgca

SEQ ID NO: 1243 - DNA, 1262 bp, Homo sapiens
agtgagttctttttcttccatttagttcctcaggaggcggtgattaaagctcagcagacaggtatttttcatgatattctgattcccgcacagggatcgcatggcatgaatgcttcttgccctggtcggtgctgccctagaatccttgtctgaagtgtggtgctctgtggttgtttttctgcctcccccagagttgaggctccaggcaactgtaatgcagagatgagaccagcacgttggctgccaatctgcccacgacatatctgcatggatcctctctgtccaccccaaggctgccgccrtggttctgagactcagcatgtcaccccgtaaatcctgtaaaagtcctgatggcagcctcctccaagccatcctgattgcgctatggggatgaatcttatcacaggctcggtcatttatcactcctgcccaaactttcagtggacagcggtggtgctgcccccactgggctggcctcattcctctctcaagggcactgtgctctctgctccctctaaccacacacagatggacctcatgtacaccttgtctatgtctcctcagccttggctcagtgtggccccacttcctccagcaccccctgagctctgccccaaatgatggcttcaaaatcagccgtccttcaagaccacatcccggaggctctcctccataaggagccattgaaccctgctctgcactctgcacacccaacactatggccagccccgcagaggcacctccttcttagggcctgagcgtctcgagagggaggaacctcctcaccatcccgcctttccctcctcctgcccctgtcttgaagtctttggagcactgtgtctctcccaaacagaagtgctcaaggaacgtgtgttgaattgtgtagaaacagacagaggggtacaagtcacacttcatgtctgcggtcagctgtagtagactgtttctgccggtgcctgctctacccccgccctgctgtgattgcctgtgctgggctttggaaggagctccacctggagccccgtgagccttttcatgaagtgcaggaggacgccacaggctgtggtttcctcatgatgttctgctacccaggggccgccatacctgtcattcttcgctgtatctgaggggctgtaattagagtcatagccaaagagcacttgccctgcacagctcctgggagaggaggacggcgtttctgtctgcagaattttgaccggttttgggcatggggcaaacaatctttgcaatgggtttatgca

SEQ ID NO: 1244 - DNA, 1262 bp, Homo sapiens
agtgagttctttttcttccatttagttcctcaggaggcggtgattaaagctcagcagacaggtatttttcatgatattctgattcccgcacagggatcgcatggcatgaatgcttcttgccctggtcggtgctgccctagaatccttgtctgaagtgtggtgctctgtggttgtttttctgcctcccccagagttgaggctccaggcaactgtaatgcagagatgagaccagcacgttggctgccaatctgcccacgacatatctgcatggatcctctctgtccaccccaaggctgccgccgtggttctgagactcagcatgtcaccccgtaaatcctgtaaaagtcctgatggcagcctcctccaagccatcctgattgcgctatggggatgaatcttatcacaggctcggtcatttatcactcctgcccaaactttcagtggacagcggtggtgctgcccccactgggctggcctcattcctctctcaagggcactgtgctctctgctccctctaaccacacacagatggacctcatgtacaccttgtctatgtctcctcagccttggctcagtgtggccccacttcctccagcaccccctgagctctgccccaaatgatggcttcaaaatcagccgtccttcaagaccacatcccggaggctctcctccataaggagccattgaaccctgctctgcactctgcacacccaacactatggccagccccgcagaggcacctccttcttagggcctgagcgtctcgagagggaggaacctcctcaccatcccgcctttccctcctcctgcccctgtcttgaagtctttggagcactgtgtctctcccaaacagaagtgctcaaggaacgtgtgttgaattgtgtagaaacagacagaggggtacaagtcacacttcatgtctgcggtcagctgtagtagactgtttctgccggtgcctgctctacccccgccctgctgtgattgcctgtgctgggctttggaagragctccacctggagccccgtgagccttttcatgaagtgcaggaggacgccacaggctgtggtttcctcatgatgttctgctacccaggggccgccatacctgtcattcttcgctgtatctgaggggctgtaattagagtcatagccaaagagcacttgccctgcacagctcctgggagaggaggacggcgtttctgtctgcagaattttgaccggttttgggcatggggcaaacaatctttgcaatgggtttatgca

SEQ ID NO: 1245 - DNA, 542 bp, Homo sapiens
tcggtgacaggtggcctaacctcrgcggtggtgtcccctggatcagcaggccctgttggccacaccttctgcggagtcctgtgtgcagaggccttggatggggccaggcctccactgcctctttgtggtacccttgaggccacctcatgtctcagggcctcggttttcttactcctaaaccgacctgcttgggtaagaatttctcagttacctttggctcctttggctcacagttctcagtttaacagggcagggaacctatcagtgaatgggtgtgagttaaatgctagaagtccaattgactcttaggcaacacagatttgaattgggcaggtccatttgtatgtggatttttttcctctcctgctaccccagagacagcaagaccaacccctcctctgcctcctcctcagcctactgaatggggatgaagagctttatgatgatccacttccacttaatgaatagtaaatatattttctctttcttatgattgtcttaaaaatattttctttttagctttatcgtaagaatagtattta

SEQ ID NO: 1246 - DNA, 602 bp, Homo sapiens
tggatccaagtgccaggaagcctaggtcatttgtcatgggctagtgacctttggcaagcccttcaccccctggccctggtatcttaggaatctgtaaaatgtactatgttcatggctctgatactgcagtgggtcttgtcagaagtaaaagtgaccatgtgagataacacacaagcatctgctttgtaaagaatagagcatgtctgatgctatcatgagatgataatttagtagccacttagtaggtaacttgtctggacctttgaataccaggctggttcacagaaatataggaatgaaagtccattggaatagttctgcacacaactaaatggtaggcaagctaacagtgtaatcgaaagggaaagtgtgttccctcctgggcctgcacttcatggctttaccctgagttcaggtggggagcattagaagcaaatctacatcccctatactgagaaaaacaacaaccccatggcgagagagggaaggtgctcagcaaacttcagtttgctgacagtctggtgtttgtaytggaccagctactctggctcacatcagaaacccatgacttccctcagcacaatgagaagacccaaggagat

SEQ ID NO: 1247 - DNA, 1119 bp, Homo sapiens
gtgcctgtgaagggggagtatgtgttgacattacagatgtggagttgttcttaaaaatacaataaccaaaacagtaatattcccttacgtttctacaatgctttcagtttccaaaaccatttcacatccattatctcatttgattctcacaacaaccctgtgagtcattatccccatttcacagctgagaaaccaagactccaaaaggttaattcacttgtccagggtcacctaactagtaattggcaaattctcaaccaggacctaaatcttctgcttctaactgtagtggcctttctgccctttgtagatagaatgcctgcggatctcttctctttgctttctcatcactgcagagtaggtgttgcattccttcatattttgctctttgtgacattctcatgataccaactatcatgatttgtattgttttcctttccaaatatagtccaatccctttccaacaatgctttgcttaatctacctggattacacaaggaactaaaaccagtatttcctttctgatttaacataatctattttatccatttttaaaaagagattattctgtagaaatggcatgtaaatccacaaaataaacaaagtcactttcctctggactctagacaaataacctgaaaataatcctggcaagattgtgtttgcagagctaaaaagtgctgagaaaaataaataaataaataactcacagtctctatagcagttccccttcttctcctcctgttcatggatgtgaatttatgacttttcttcccaggtcaaagttaaatgaattcatcagtagaacctataattaatatgagtggttaattctaaggctttcactgcacaatctcagtgacattttgcagcactgagggtggccattaggagaaaatgtgctcaccaatgagtgcatactgaaattagcaataaaacatttgtctctccatttcacatacaatttggcctaagaagaataagacaaacagaccctctatggcagggcagtccctgaaaattcctccacaacccaagagtatccaggmtttgaggaaaatacatgtttcacctgtcttttgaaaaactcagtacattaattatcccaaaatagagaaa

SEQ ID NO: 1248 - DNA, 669 bp, Homo sapiens
ttgttttatattttactatgtagacaaaagccctgggtttctgactttgaaatgctaataaccgatgctcatttatttcaaaacaggatgcagtatgttcttatgtagcatcaggctcactaaatattactttgctgtgattattagggatccattgcattatggaattattttctaggctttacttaaaatattcaatagatttagatgttcggtaaaattttatttaagtttatacttacgtatcagaaaagaatgaagtttccttttacagaaactacattgataccaaactttaccattttcctggaaaaaccagttttccataactttggcttttcctttttgattgaaaaaatctttcatgtaggtgggytcataaggtcaaaatttagatcactctaattaattaaatttcagagaatataaccattgttaagaaaagaaatagagccaggaatattttcagacattgagaataaatgctggtaaattttgttttatttttcttagtctggcaatccatactgtctaaaatgttgactatacgagaaaatacaagtcgtagttcatttggaggaaagtcgtatcatcatttcttaggaagtctgagaacttcctcggctttcacttgataatatgtcatttttttctcttggtgggaggtag

SEQ ID NO: 1249 - DNA, 647 bp, Homo sapiens
tattcccagatttctgagttgtttgttattgttgttgttgttttaagtaaattggaattgaatttttaaaaaatagacaaaataatatctaaatttcaggatcacaggtatgattatattaatgactatatctaatatatctagcccaatgtatctggattattttgtatcttattatttttaaaaggaatgaagggagctgatagmacttatattgtatatttttgaaaccataacttgatactgatgtttcccagagatttcagactcttgatttttcttgtaagatacaactttatcttatttaacccttacagcaaaacacaaatctacttatattcactcaagtcatagacttacaatagcaaaatatgagtaacataaacttgtgggcaggctagatactacattagaactcttcatgtatcaaattaccaggagatttcctggttatcttataacaagaatgatttgaatgtccaaatatctgtatttaggctttgcttttatccctttctatagtctagtggtattctcaagcatggtgtgcctgagaattcctctgtaggttgtgtgtaggagatttggggaggctctcaactgtgtttatttatttatgtttacagtagttgattttcatcatctat

SEQ ID NO: 1250 - DNA, 939 bp, Homo sapiens
aaaaaataaaataacagttatgcttattctcctaagttctttcgaaacatagttcctcctaaggaatcacaaaaggtacttcagaagctggattgtctttgatgtgtgtgtgtgtgtgtgtgttttctttttaattttaattttaatttttgagacagactctcactttgtcacaggctggagtgcagtggcacaatcacggctcaccacagcctcgacctttcaggcccaggtgttcttcccatctcagcctcctgagtagctaggtctacaggcacccaccaccatgcccagctaatttttgtattttttgtagagatggagtttggtcatgttgccccagctgatcttgaactyctgggctcaagccatctgcccacctaggcctcccaaagtgctaggcatgagctactgtgcctggccccttggatgtgttttatctgggctatgacttcataccaaatccaatgccctggcaaagtgggctatagacagcttccactggctggtactgcagaggggcagggctttatgaactttgaagaagactacattcatagttattttgatcaccctgcaccttccttggaaggtctttggtgtctactgccaccctgtaatataaagaagtacagatatccaggaagtactgtacctaataatactaacacactgtcacaaatgatcataaatattctattcttgctccaactgcttaaagtatttagggaatctgtgccttggtcaatgaacaaccctgaaaattaaaagcaagcccattgtttttctaaaaatctacatgtttatgagtcatcttcataataaatcataatagtaatacattagaatttcctcctctaagggtaaccagaaataaatattaatcagagccaaagctgaacgctctgtatgatttctttcagtcttgaacaattgatg

SEQ ID NO: 1251 - DNA, 939 bp, Homo sapiens
aaaaaataaaataacagttatgcttattctcctaagttctttcgaaacatagttcctcctaaggaatcacaaaaggtacttcagaagctggattgtctttgatgtgtgtgtgtgtgtgtgtgttttctttttaattttaattttaatttttgagacagactctcactttgtcacaggctggagtgcagtggcacaatcacggctcaccacagcctcgacctttcaggcccaggtgttcttcccatctcagcctcctgagtagctaggtctacaggcacccaccaccatgcccagctaatttttgtattttttgtagagatggagtttggtcatgttgccccagctgatcttgaactcctgggctcaagccatctgcccacctaggcctcccaaagtgctaggcatgagctactgtgcctggccccttggatgtgttttatctgggctatgacttyataccaaatccaatgccctggcaaagtgggctatagacagcttccactggctggtactgcagaggggcagggctttatgaactttgaagaagactacattcatagttattttgatcaccctgcaccttccttggaaggtctttggtgtctactgccaccctgtaatataaagaagtacagatatccaggaagtactgtacctaataatactaacacactgtcacaaatgatcataaatattctattcttgctccaactgcttaaagtatttagggaatctgtgccttggtcaatgaacaaccctgaaaattaaaagcaagcccattgtttttctaaaaatctacatgtttatgagtcatcttcataataaatcataatagtaatacattagaatttcctcctctaagggtaaccagaaataaatattaatcagagccaaagctgaacgctctgtatgatttctttcagtcttgaacaattgatg

SEQ ID NO: 1252 - DNA, 939 bp, Homo sapiens
aaaaaataaaataacagttatgcttattctcctaagttctttcgaaacatagttcctcctaaggaatcacaaaaggtacttcagaagctggattgtctttgatgtgtgtgtgtgtgtgtgtgttttctttttaattttaattttaatttttgagacagactctcactttgtcacaggctggagtgcagtggcacaatcacggctcaccacagcctcgacctttcaggcccaggtgttcttcccatctcagcctcctgagtagctaggtctacaggcacccaccaccatgcccagctaatttttgtattttttgtagagatggagtttggtcatgttgccccagctgatcttgaactcctgggctcaagccatctgcccacctaggcctcccaaagtgctaggcatgagctactgtgcctggccccttggatgtgttttatctgggctatgacttcataccaaatccaatgccctggcaaagtgggctatagacagcttccactggctggtactgcagaggggcagggctttatgaactttgaagaagactacattcatagttattttgatcaccctgcaccttccttggaaggtctttggtgtctactgccaccctgtaatataaagaagtacagatatccaggaagtactgtacctaataatactaacacactgtcacaaatgatcataaatattctattcttgctccarctgcttaaagtatttagggaatctgtgccttggtcaatgaacaaccctgaaaattaaaagcaagcccattgtttttctaaaaatctacatgtttatgagtcatcttcataataaatcataatagtaatacattagaatttcctcctctaagggtaaccagaaataaatattaatcagagccaaagctgaacgctctgtatgatttctttcagtcttgaacaattgatg

SEQ ID NO: 1253 - DNA, 1347 bp, Homo sapiens
gcatccgtggatgtcacattgaacccgttatcacacacaacagagtcatctgttatgtagtcctgggctggaggctctcctgagatagggcatccagcctactttgaaggaaggccatatcactcttctcattatcttggacaaaccaggcacagccagcttgtcttctgattgataaaccttggctttcctaaggagaggcttatgtttctgctccaaacaccactgatattattcctacccccactgccttccaaaggaagagggaaacctacccttctcaaaactgaaaaacaaatcactttcccctttcctctgtctttttttttctagatctataaccattgccactcttcctagcaaaggacaaataattccatttgaagacatattttaaagaaatgagctccaacaaccttgaattccatatttaaattggatttgttttttggagaaatacttactgtcacttttgatgtttgcttttctttctttcttttctttttttttctgagataggttttcctgtcacccaggctagagggcaatggcacaatcttggctcactgcagcctcagccacctgggctcaggtgatccttctgcctcagcctcccaggtagctggtactacagatgtgcactaccacacccagctagatttttatgtattttttgtagagattggattttgccatgttgcccatgctggcctctaacacttgggcctccccagatgctgggattccaggtgtgggcccccatgtccagctggtattttgttattttcaagttaaccaatcattgtttatacccatttcatttcttaacaatataagctttcttaatagagcataagggaaaaggtgataaggaaaacatttagtttctgggtccaaggtagagaggaaaattcaaacaatttatttttggagtggaaattattatgattgtctagtgattttgaccagcatccctcaacaaactcactggtctccacatatttggaaaacacatcgttgaaccaaaatttgcttttaccaattgaataacattttgcttcaataagtattacttgagctcctatgaaacactcagtgtaggtcgtaaggagtgtgaagaaatcgtttctgcctacagagtagaataggacagactaaaacaaatgaaaatggatggaataagattaaaacaaagagccttcgcaggtcatggaagactcttcttgatctggcacctgccatggaagactcctcttgatctggcacctgcctgcctcagcagcacctttcttttcatcctctctccgtttctcaaaacaagcytttattaatatttacatatatgca

SEQ ID NO: 1254 - DNA, 1201 bp, Homo sapiens
tgcatagctagatcttgatgaaacctaaactgactttggcagcaaagcccgagccaagctcaggcagagggctttgtccttctttcttccaaactgcctgggactcagcttctgggtttctgggttttatttgttgttgttatttgcttgtttcaatctgtgaagcctgctctcctcttgatgattagaaactgtgagtgcatgtcttctttagaggaagtggcttgtggtcttgccctgtgatcctctgataagaataggttctcagaaatacaacccaatagaccaaactttcacacgaagatatgaaaygagagaagaaggaaggagaagacagactgatagagttcttcatacacatgcaagatggggaaaggaaaaagaggaatttgcattctttcattggactattacattctttcatgtctaatgccaaacatacaaatatgataatataataagagagtaacaaaagtggtgtgagcacagctcagcagaaagattggctaacccaggggagtgacagaaatgttactagaggtgtcagtggtgcactggagtttaaaatagtaggagaagttttccaggccgtcaaggtgtggggatttgatgagagtgtttgcgtttgttattgttgttgatggtggtggcgatgtgtgtgtgtgtgtgtgtgtgtgtgtgtgtgtagaaagagagagagagaggagtttttaagtactgtatgtattttaaggagattgaataatctaaggtgaggagcatttaaaataatagcagaataaaagttaaatacttagaaacatacagcaatgaaacaaaatgacctctaaagggccttttaagtatgtttccatccagaaagggtctctatagcccctatttttattttttattcccattatcccccagaactttccattcttaggtggcatccaagattctgtccattcctgctcaagcccacctgccacctttatccataacagataaacctcctggtcctaccaagccagacaatctattgtcaggaaaatgttttatgattctcttcttctgcaatcttgctggagctcactttccccatcttactgtctcaggtcaggttccctgggaaacagactctgagatggaggttggtggttaagagatgcttaggaagggttcctgtagaagaatgaggacacaggggagctgggatgca

SEQ ID NO: 1255 - DNA, 1033 bp, Homo sapiens
ccacgtataaaaattactaggtcaaagcatgtcactgaataggacaagaaacacagcactaacaacattaataagaaagaaatgtttactccattgtaattcgatctaacatgtatggtatctgttttacatgagggttttctgattccctctctctgaaacctttgttaactccctcaggcaaagtaaatcagaatcagaccaggtttgtctgacccacctgtgccagggtgggcaggaccacagtgatgatcaccaggtgtgtatgtctgcctctctattgagggagactcttcttctaattatttttctctccttacagttgtagagcaacagagagacatggcgaattggagaaattgtgactccaaaggtattcccattccattgtctaataatctgaacagttgtttgtttgttgtaagtaaaatcaaatagcaccatgctggctgaattcagtctgcaagccacaccaaggacagccttgcttagccctggaaggcagagattttccatggaagagttgtaacaagatgtgtgctttaaagcatgaaaagagtgaaaatgcaaaaccacacctaaaaggttcttaaaaatatcaaacattcgactgggcacagtggctcacacccgtaatcccagcactttgggaggccgaggtgggtggatcacaaggtcgggagtttgagaccagcctgaccaacatggtgaaaccccatctctactgaaaatacacaaaaaaktagccaggcatggtggcgtatgcctgtaatctcagctactcgggaggctgaggcaggagaatggcttgaacccgggaggcagaggtggttgcagtgagccgagatcatgctactgcactccagcctggatgacagagtgagactctgtctcaaaaaaaaaaaaaaaaaaagagtgattaggttacatacacagattaaggaggttagaggtgtctgctgcaataatccagaggaagtcttcactggatgagacagaatgctgtacacaaagtgtttagtcttcccatgca

SEQ ID NO: 1256 - DNA, 1653 bp, Homo sapiens
tataatagctgctttaaatttcttatctgctaactccaacaacagggtcaccttggggttattctcaattgatcaatttccttctcttgataatgytttatattttcttggttccttgtatgtttcataatattggattgtatattggatattgtgtatattacatggtggagactctggattctgttatagtcctctaaaaagaattgagttctagagggcaattagcttcatttgacaagaactgcacaccttcttttggatgtcagctcaaatctcatacaaatattttaacttttggtgaagtctatcctgcacatctatgatttgtgaattagccagagatttgggcagagtatatactcaaaatttagggtttcccccttttggctatcttttttgcaagattgtccttcatttcccagtggtctcatttcataacagaaagacccttatgtcttttctatcagggtttagtcaccaaggtggagctgacatgggcctatcattagaataaaaacctaagacattcctttcttccaagtttcaagtccactctaaaatcttcctctcttctttacattgcctgcagaacatttttttctccagagttgacagttgttttccacaggaagtacagctatgataagagcttacttagtcataccaggtgcagaaacaacatggcattgagcagaagacactgtagctgaggaattacatctgtttctaaattatataatgacatatttgaacccagataaaaggagggaaaaatatgactcagagaacaaattgccatgaagtcaacttttcaatctgagtttgttcatatcttttctgcttctgtacaagtgattaatgcactctatatctcaaaattcagtggtgaaaatgaatactgacttaacattggcaagaatcaagaaactccatttgggatcccatcagaaaaagaaagacatatatttcagggccttctgaagacctggtctgttttctaagataatttaaactgtcacttacaaagttgtatataacaaaaataaatttgaaggatgtctgcccatttctcaaagccaagctccattcccttccctataaatttttttctaatgtgtgcttatatcaatattaactcatttcacaactgcctatgccatacccaatagtcctttgttatatatttacttttctatttgagaataataaagttagaaagtaagagatcagttatacaaactcaccataaatgagcacattaagtatatgttaagatataacattattttctctgagagagagagagagagggactaccaaatcaccataccttgaacaagatagagatgaatgttcctttcccgtaacagttcaaggtaagcagcaagggcaggtgagctgactctaccatctcaacctataacttccctctcacagtcaaagtgacttcttcaattcttattatcttccaatgagcagaaaggcagaaaaggactatgggatctgagcacaaccctctgtgagagcaaaaacagtcctgaagaggtacatatttatctgctcacaccccattggctagaccatacttcagtggcacatatggttgcaagacagtccaagaaatgcagtcataatctagaaagtcatgca

SEQ ID NO: 1257 - DNA, 1653 bp, Homo sapiens
tataatagctgctttaaatttcttatctgctaactccaacaacagggtcaccttggggttattctcaattgatcaatttccttctcttgataatgctttatattttcttggttccttgtatgttkcataatattggattgtatattggatattgtgtatattacatggtggagactctggattctgttatagtcctctaaaaagaattgagttctagagggcaattagcttcatttgacaagaactgcacaccttcttttggatgtcagctcaaatctcatacaaatattttaacttttggtgaagtctatcctgcacatctatgatttgtgaattagccagagatttgggcagagtatatactcaaaatttagggtttcccccttttggctatcttttttgcaagattgtccttcatttcccagtggtctcatttcataacagaaagacccttatgtcttttctatcagggtttagtcaccaaggtggagctgacatgggcctatcattagaataaaaacctaagacattcctttcttccaagtttcaagtccactctaaaatcttcctctcttctttacattgcctgcagaacatttttttctccagagttgacagttgttttccacaggaagtacagctatgataagagcttacttagtcataccaggtgcagaaacaacatggcattgagcagaagacactgtagctgaggaattacatctgtttctaaattatataatgacatatttgaacccagataaaaggagggaaaaatatgactcagagaacaaattgccatgaagtcaacttttcaatctgagtttgttcatatcttttctgcttctgtacaagtgattaatgcactctatatctcaaaattcagtggtgaaaatgaatactgacttaacattggcaagaatcaagaaactccatttgggatcccatcagaaaaagaaagacatatatttcagggccttctgaagacctggtctgttttctaagataatttaaactgtcacttacaaagttgtatataacaaaaataaatttgaaggatgtctgcccatttctcaaagccaagctccattcccttccctataaatttttttctaatgtgtgcttatatcaatattaactcatttcacaactgcctatgccatacccaatagtcctttgttatatatttacttttctatttgagaataataaagttagaaagtaagagatcagttatacaaactcaccataaatgagcacattaagtatatgttaagatataacattattttctctgagagagagagagagagggactaccaaatcaccataccttgaacaagatagagatgaatgttcctttcccgtaacagttcaaggtaagcagcaagggcaggtgagctgactctaccatctcaacctataacttccctctcacagtcaaagtgacttcttcaattcttattatcttccaatgagcagaaaggcagaaaaggactatgggatctgagcacaaccctctgtgagagcaaaaacagtcctgaagaggtacatatttatctgctcacaccccattggctagaccatacttcagtggcacatatggttgcaagacagtccaagaaatgcagtcataatctagaaagtcatgca

SEQ ID NO: 1258 - DNA, 635 bp, Homo sapiens
gcccagccctgcacaaccctgcaagctgtcagtctgcattggcaccaggcagctggcrtgacacaaaagcagactcgctacctcctcccagccattcccagggttagttctgagcctcttctttgcaccaggctcctcccagttctcccagatgcaacctaatttatcaaacctccttggacctcatatcccaacttaacacatcttcccagctactatttctattttctttgactatgattctctttcacactacggtgccttggctacccctccagcacgggccagaagcaaggcagtcaaactgggggagacaaacacagactttggtgtcaaatcagggcagaatccattttgtcctttatcagctgagtgacctcaggcaattatttactcttcctgagcctctcagcctcttcatccgtgaaatgggttgtcatgaaaattccatgaaacatacatgcaaagcacttggcaccttaccttagttaaaaaaaaaaattttttttttaactaagcacccaggagacactctgcacgtggtgggtaagagcaaacttagcggccttgtggcctgaagcaagcagctaccctctgtatgcctcagcctgcttgtcagtgaaatggggctgctg

SEQ ID NO: 1259 - DNA, 507 bp, Homo sapiens
ctgaattatttaaatctgtctgtgtgtttgtggatctgaacttcctcatatataaaacaagataattagaccaaatgttatagaaagccttttaatgaacttaatgacctaaatgtccatgaataggagactgcttaaataaattatggtacatcatatggtagatcaccatgcgagtcctaaaaaagactgaaaaagatctaaatgtaccaactgatagggaactagctctgtgatacattaagtggaggggggataaagcaacacaccgtaagttcatgatgttgtgttgctgtgtgaatacaatgggggagcatgtgggtgtacacacacacacacacacacacatacacacatgcgcacacgtgwtctgcacatacgtccttatctccagaaggagtcttaatcagcaaaaggcaagagctgactcaagagatggacatgacaggaggagcaaaccagaaatcaggaaaggaggccttattctttattctacgcccatttaca

SEQ ID NO: 1260 - DNA, 568 bp, Homo sapiens
agcataagtctcaaatttatataacataaagtaaaacagaatttattaggtatgtcaaagtcagtgacatttccctttaatccaatattaatcagttgactctgtgttgaattttgaaggtataaatcaaatttttaagacttttagattttatatcaaaacaatgaacaagatgtaaataagaaggaggacatgattttctgttttctgggatagaacctgccttaacatgtaatctaatggtgcactaaactgtccaactggcttttwttctgtaactaagtaatacataagttttgaagtacaaattatatatggaagcacggactatctattctctgaaaatgggcaactctccttatacatctgtgcttgttttctacatgatttatgaagtccaggcctttaaaaatgaacaattccggctcatacagctggacaacaaatgagactcacatatgctcaagcccacaccacgatctgaaccacaagggaagatatttcctgaagcacacagcagaaaggatctgaaaactgttcaagctctgaatgtcagaatagatccttc

SEQ ID NO: 1261 - DNA, 588 bp, Homo sapiens
tttccctcctgtgaccttctgtttttccatatctgacatcaaatctgacttaaaaggcagtgcagatgctcctttggggcaatagtaatagaaaccttggaggaagttgaacttagaactctgacttacaggagttatccttggctgtctgcctagcctgtgcctgagactccccctccacacccctgccaactttaaacagcttccctccaggtatcagggcaccccgctgagacagctttgaaatgaatagagtcaaattaattggttgccatattgccctattggattgatgtcaacacagtttagaacgattggtttcattgctcgtcatttctgtaaaaagttgggaaataagactcttaggaaggactgtaaccaccgtcataacagtgttcctttgagaaaattagattggacccatcaccattttaactgaaaatagtttcccaggatgaaaacaactagtcratttgagagatttgtaaatcaaattgcatcttaaatgcattaggagacgggcttactgttcaaatgtattccgtggtgaatcctgtgaaaggagttaagggtgctcttttacgaaaa

SEQ ID NO: 1262 - DNA, 355 bp, Homo sapiens
tgcattcttgtacacagtaccatgctcacttctgacagtctggttagaggagctgacaccaagaaaaaagatggaacaatctccggcctaatgcaccactaggtggtatgaccaggaagttctgtggctcttcaaagaaggccaagttccactggagagggatccaggaggtgacatggaggtggtgagacctggacggatgaggaggaggcagaytgttggagggaaatggaagtagtcctggtaaaccaggaaggaacacaatgaagaattcagagtaacagatttgaaatactgtgtgtgtgtgtgtgtgtgtgtgtgtgtgtgtgtgtgtgtgtgtatacaagaagaaagg

SEQ ID NO: 1263 - DNA, 1339 bp, Homo sapiens
ccccagtacttttgatggaacatacctagaggatctcagaaccagaaggaacttgaaaaacatgaaccatcccatgtaattttgtcttggggaagatgaggccaaggcaagagaaatgacctacccacrggtcacatatttggttgtgacatatgtcagagccaagacgattctccattactggactccctgcccagggcacttttcatacgcttttcaatttggatagaacatcctccttgctctctctcttcctcccttccctctccctgaacagccagctaccgctccctttcccctcctctggaacacctctcctggaatacccaaccgtgggctgtgccctaaactaaaaaatgacattgaacccaaaacactcattcagtgtcactgctgagtcagaaagtcaccggcttgatcagtgcggttgtccctcgatgcctctcctactttttaattgcgcccccatccactcttgctgtcactgctttaaacactggctgcacattagaatccccttgtgagctttaagaaaagtaccagtgcctgggctccccccgaagagattgtgattcagttgtctgtggtgggccacaggcgctggctttctcagcactctccaggtgagtttaacctgcaggcagagttgagagcccgtgttgtgcaatattagtcctaattattttcgtgtacctcctggacctaaattaccagttgatgtaggcaaagcacagaggaagtcaaattttcacagaagtgaatggattcacaaaagctgtctattttcctaagacaacataagctgcccttccctactgcaatcttatctagtgccagtgcctttgcctattacaaaatttaaaaagactttcaaatgtcattttctataaatctactggccagttcttggaataaaacaaatctccttggtcctgctcccactttgaaggtggccttaggtgcgcagggactttgtgtggccctagtgaatcttggcaaggaaaacagttctcaaaattgttcacaaacgtgtgcctgtgtattactgaaataagtctgtatacccaagccaaatgacagctaatggcttccttatcactaaatattggagtcaaaagaatttagaggccaggtagaaaatttctgaagagcagacaattttcttgtgatcaaattgtaagttccttatcaatattgcatcatccattaaccctttattgtaaaataagcaaagaacatgtaaggaaatgtgatatgagactctgaataggatgacatcagcccagcatgagggtcttgcatcactgttctgcaggattaaaagactaattaaattggc

SEQ ID NO: 1264 - DNA, 1339 bp, Homo sapiens
ccccagtacttttgatggaacatacctagaggatctcagaaccagaaggaacttgaaaaacatgaaccatcccatgtaattttgtcttggggaagatgaggccaaggcaagagaaatgacctacccacgggtcacatatttggttgtgacatatrtcagagccaagacgattctccattactggactccctgcccagggcacttttcatacgcttttcaatttggatagaacatcctccttgctctctctcttcctcccttccctctccctgaacagccagctaccgctccctttcccctcctctggaacacctctcctggaatacccaaccgtgggctgtgccctaaactaaaaaatgacattgaacccaaaacactcattcagtgtcactgctgagtcagaaagtcaccggcttgatcagtgcggttgtccctcgatgcctctcctactttttaattgcgcccccatccactcttgctgtcactgctttaaacactggctgcacattagaatccccttgtgagctttaagaaaagtaccagtgcctgggctccccccgaagagattgtgattcagttgtctgtggtgggccacaggcgctggctttctcagcactctccaggtgagtttaacctgcaggcagagttgagagcccgtgttgtgcaatattagtcctaattattttcgtgtacctcctggacctaaattaccagttgatgtaggcaaagcacagaggaagtcaaattttcacagaagtgaatggattcacaaaagctgtctattttcctaagacaacataagctgcccttccctactgcaatcttatctagtgccagtgcctttgcctattacaaaatttaaaaagactttcaaatgtcattttctataaatctactggccagttcttggaataaaacaaatctccttggtcctgctcccactttgaaggtggccttaggtgcgcagggactttgtgtggccctagtgaatcttggcaaggaaaacagttctcaaaattgttcacaaacgtgtgcctgtgtattactgaaataagtctgtatacccaagccaaatgacagctaatggcttccttatcactaaatattggagtcaaaagaatttagaggccaggtagaaaatttctgaagagcagacaattttcttgtgatcaaattgtaagttccttatcaatattgcatcatccattaaccctttattgtaaaataagcaaagaacatgtaaggaaatgtgatatgagactctgaataggatgacatcagcccagcatgagggtcttgcatcactgttctgcaggattaaaagactaattaaattggc

SEQ ID NO: 1265 - DNA, 1339 bp, Homo sapiens
ccccagtacttttgatggaacatacctagaggatctcagaaccagaaggaacttgaaaaacatgaaccatcccatgtaattttgtcttggggaagatgaggccaaggcaagagaaatgacctacccacgggtcacatatttggttgtgacatatgtcagagccaagacgattctccattactggactccctgcccagggcacttttcatacgcttttcaatttggatagaacatcctccttgctctctctcttcctcccttccctctccctgaacagccagctaccgctccctttcccctcctctggaacacctctcctggaatacccaaccgtgggctgtgccctaaactaaaaaatgacattgaacccaaaacactcattcagtgtcactgctgagtcagaaagtcaccggcttgatcagtgcggttgtccctcgatgcctctcctactttttaattgcgcccccatccactcttgctgtcactgctttaaacactggctgcacattagaatccccttgtgagctttaagaaaagtaccagtgcctgggctccccccgaagagattgtgattcagttgtctgtggtgggccacaggcgctggctttctcagcactctccaggtgagtttaacctgcaggcagagttgagagcccgtgttgtgcaatattagtcctaattattttcgtgtacctcctggacctaaattaccagttgatgtaggcaaagcacagaggaagtcaaattttcacagaagtgaatggattcacaaaagctgtctattttcctaagacaacataagctgcccttccctactgcaatcttatctagtgccagtgcctttgcctattacaaaatttaaaaagactttcaaatgtcattttctataaatctactggccagttcttggaataaaacaaatctccttggtcctgctcccactttgaaggtggccttaggtgcgcagggactttgtgtggccctagtgaatcttggcaargaaaacagttctcaaaattgttcacaaacgtgtgcctgtgtattactgaaataagtctgtatacccaagccaaatgacagctaatggcttccttatcactaaatattggagtcaaaagaatttagaggccaggtagaaaatttctgaagagcagacaattttcttgtgatcaaattgtaagttccttatcaatattgcatcatccattaaccctttattgtaaaataagcaaagaacatgtaaggaaatgtgatatgagactctgaataggatgacatcagcccagcatgagggtcttgcatcactgttctgcaggattaaaagactaattaaattggc

SEQ ID NO: 1266 - DNA, 467 bp, Homo sapiens
gaaggggctctaaatatccagaaataaatctttcttctactagcccgggctcaactatgaaagataagttacttttacttagctgcttgtgacctctgactatatattgcacagtaaaccaagtcagttcagtgtcttactagatcagctaatctataacagatttaagtgggaacggttgcttcggataaaatgcagttggaaaaaacccagaaaataacaagcgttgatgaagatgtggggaaatggaaactgttgtttgttgctagtgcacatgtaaygtggtgcagcccctgtggaaaacggcatgacattttctcagaaaattgaattaccatatgatccagcaattccaacactaggtatacatcccaaagaactggaagcaggaactgatcagatggatatttatacaccagtgtttataacagcattattcacaatagccaaaaggtggaaacaactcg

SEQ ID NO: 1267 - DNA, 1002 bp, Homo sapiens
ttctacttcctctgtgtaactcaaaacttaaattccgggagcacaaaagctgcttcagagttgtagagaatatagattgctcacctcctcctcataaaagtcatccctctcctccctgtccctttgcatccagaaatagtactctgattcctttgagtaattccctctcttccactttcagccaacatggcttggatggggttgacacaagtcctgctctaaggatacatctggattgccttaaaccagccagcctgttttctctcttggattggtttggggattagagtcagtgtgaagaggggttagctggtgtttctagggaaaggaaggtttctttctctactattgtaattggcagagtatgagtgtgaagcctgcatctgtagccaccttaaagctctgagggacatgatagaaattcacagtgcttgaaatgggaccaacccccaggaagcaaagccaagagccagatgctactgtcactgtttgaagcctgaatcaagccacacctgaaggcagctgtacctgtgtacttttgagttttatgggccaattaatttctctttttaccttaatccattttgagttggttttcctgtcacttacagcaaaaaaaaaaaaaaaaaaaaaaaaaaaaaaaaatctgaacctatggaaaaktaaacaaaatgaacaagagcaacagtaaaacacacaaaaatctatgagagatatcaactattcatttctgcttaaggggtgaagatcaatctgaattatcaaaatgactgaatccaacattattaaacagcaagacaaataataaaacagcaactccatttcatcagctttgggaaatctctaaaaatgtattcaattgcaaagggaggcaccctgtagatcttaaatagcttgctatacttttttttaaaaagcaaatggctaagaattatttctaactgttcacctttagtcattgttggaatacaaaaaacactgttcaagcactgttttaaaatt

SEQ ID NO: 1268 - DNA, 1275 bp, Homo sapiens
aaattctacttcagataatctgcagtgtagagggaaaagtgaaacatgcacatacacataactttaaaaggtagaaagtgatgagagtcagagggaagagacatagcacagtggaattcagagtggggagtcgctgctgtactatttcaggactcacattgtgtgcccatatagacagagagatgctagagaggatacaagaaaaatggaagccactgttcttgtgcttgttgggrctcggaaaacaatatcccgaaatgaaggcctcagaagcaagtgtttttttgaccttctccttccctcttgtctctcagtcccattctcccctgaggctagctttagccaaagaaactacaaatcccttttccccaaggtgggacatagaaactagaacctctttgcccacaagcccttcataaaacctaaaagtattgctctaattttccctctgcctttcaaagtaaaaactgccctaaaataaattatctgacctaccttgtttgactgtagttcataagactccccattcttgagaagggcctgccccacacccagaaggaaggaaagctgcacaaagaagccaagaaggacctagacagaccagcctcactgggtaaccccacttagtccactagcattaggtcatatcctttttgtctaatcatatttctacacagctgttcatactttgttaacctaagcataaaaatggacactgttctcctgtatctgtcggtcttcattctgaatgctcctgtgtatgcacatttaataaatgtttatgtattttctccaattaatctgctttttgtgagttgatttttcagcaaaccttcagaaggccaaggggaaagctctcccttgtcccctacatgcttaaggtgtttggaaacttggagggagacaaaactcaaaccatgagtgatttcggtctatatcccagcgattgccctgcctggccctcaacagaccttctagttggagaaggaaatatcctgaagaatatttgtgaaaatgaaaacaaaaacaccaaggcaccaatttcatgcctggacaaggatgtcttgagctgaaggaagaaaatgaaagcaacagttacggccttatcactatgaacaagaaagtcttataagggtggaaacattttgctttattttttttgtccccatagcacttggcttcaaagaacaaaagatggtgttcaccaagcagacaacttaccaaagccattttttgaaatgatgcccaataatcaatattaattcagtttatatc

SEQ ID NO: 1269 - DNA, 1275 bp, Homo sapiens
aaattctacttcagataatctgcagtgtagagggaaaagtgaaacatgcacatacacataactttaaaaggtagaaagtgatgagagtcagagggaagagacatagcacagtggaattcagagtggggagtcgctgctgtactatttcaggactcacattgtgtgcccatatagacagagagatgctagagaggatacaagaaaaatggaagccactgttcttgtgcttgttgggactcggaaaacaatatcccgaaatgaaggcctcagaagcaagtgtttttttgaccttctccttccctcttgtctctcagtcccattctcccctgaggctagctttagccaaagaaactacaaatcccttttccccaaggtgggacatagaaactagaacctctttgcccacaagcccttcataaaacctaaaagtattgctctaattttccctctgcctttcaaagtaaaaactgccctaaaataaattatctgacctaccttgtttgactgtagttcataagactccccattcttgagaagggcctgccccacacccagaaggaaggaaagctgcacaaagaagccaagaaggacctagacagaccagcctcactgggtaaccccacttagtccactagcattaggtcatatcctttttgtctaatcatatttctacacagctgttcatactttgttaacctaagcataaaaatggacactkttctcctgtatctgtcggtcttcattctgaatgctcctgtgtatgcacatttaataaatgtttatgtattttctccaattaatctgctttttgtgagttgatttttcagcaaaccttcagaaggccaaggggaaagctctcccttgtcccctacatgcttaaggtgtttggaaacttggagggagacaaaactcaaaccatgagtgatttcggtctatatcccagcgattgccctgcctggccctcaacagaccttctagttggagaaggaaatatcctgaagaatatttgtgaaaatgaaaacaaaaacaccaaggcaccaatttcatgcctggacaaggatgtcttgagctgaaggaagaaaatgaaagcaacagttacggccttatcactatgaacaagaaagtcttataagggtggaaacattttgctttattttttttgtccccatagcacttggcttcaaagaacaaaagatggtgttcaccaagcagacaacttaccaaagccattttttgaaatgatgcccaataatcaatattaattcagtttatatc

SEQ ID NO: 1270 - DNA, 747 bp, Homo sapiens
gcatataatatctagggagtataaatatgtttatcatgctgaatctctccaagcacatggtatctctttccatttcttaatatatatttttgtgaattgcaattttttwaaaaaaatgactaattttctttaaatgtttcaagtcaacagatacaggacaaataaagcaataatatgtaaaagctatataaaagagtatttttaaaacattttgcagttgtcttttgcaaatattttccccaagtctatggcgtttgtcttctcattctcttgacagtgccttttgaagaggagaagtttttaattttaatgaaatccatcttatttctttttagtgaatagtgcccttgaagttctctgtaaaagtcattgtcatacccaagataataagggtttttttcctatggtgtcttctaggagttgtagatttttgtatgttacatttagttctatgagccattttaagtaaatatttttgaagagtgtaaggtctgtatttatactcatttttttgcatgtgaatgtccagttgccccgcatcatttgttgaaatattatctttgttccatcatatttcctttgctcttttatcaaagatcacttgactataagtgggtatatttctaagctctctactctgttccactggtttattagtctattattttgctaataccacactgccttgattacagaagacttataagtctcaaaatcatatagtgtcagtctactcactttgttctt

SEQ ID NO: 1271 - DNA, 747 bp, Homo sapiens
gcatataatatctagggagtataaatatgtttatcatgctgaatctctccaagcacatggtatctctttccatttcttaatatatatttttgtgaattgcaattttttaaaaaaaatgactaattttstttaaatgtttcaagtcaacagatacaggacaaataaagcaataatatgtaaaagctatataaaagagtatttttaaaacattttgcagttgtcttttgcaaatattttccccaagtctatggcgtttgtcttctcattctcttgacagtgccttttgaagaggagaagtttttaattttaatgaaatccatcttatttctttttagtgaatagtgcccttgaagttctctgtaaaagtcattgtcatacccaagataataagggtttttttcctatggtgtcttctaggagttgtagatttttgtatgttacatttagttctatgagccattttaagtaaatatttttgaagagtgtaaggtctgtatttatactcatttttttgcatgtgaatgtccagttgccccgcatcatttgttgaaatattatctttgttccatcatatttcctttgctcttttatcaaagatcacttgactataagtgggtatatttctaagctctctactctgttccactggtttattagtctattattttgctaataccacactgccttgattacagaagacttataagtctcaaaatcatatagtgtcagtctactcactttgttctt

SEQ ID NO: 1272 - DNA, 747 bp, Homo sapiens
gcatataatatctagggagtataaatatgtttatcatgctgaatctctccaagcacatggtatctctttccatttcttaatatatatttttgtgaattgcaattttttaaaaaaaatgactaattttctttaaatgtttcaagtcaacagatacaggacaaataaagcaataatatgtaaaagctatataaaagagtatttttaaaacattttgcagttgtcttttgcaaatattttccccaagtctatggcgtttgtcttctcattctcttgacagtgccttttgaagaggagaagtttttaattttaatgaaatccatcttatttctttttagtgaatagtgcccttgaagttctctgtaaaagtcattgtcatacccaagataataagggtttttttyctatggtgtcttctaggagttgtagatttttgtatgttacatttagttctatgagccattttaagtaaatatttttgaagagtgtaaggtctgtatttatactcatttttttgcatgtgaatgtccagttgccccgcatcatttgttgaaatattatctttgttccatcatatttcctttgctcttttatcaaagatcacttgactataagtgggtatatttctaagctctctactctgttccactggtttattagtctattattttgctaataccacactgccttgattacagaagacttataagtctcaaaatcatatagtgtcagtctactcactttgttctt

SEQ ID NO: 1273 - DNA, 745 bp, Homo sapiens
atgtgtacattattggtgattatagtatatgccaactatgaaaatgtaatcagttaataaagataaattgtttgcataycattgcaagacattgacaaaagattttagcaataatgcaatgctagcattttttggaccttatcttttttctgcatacctaaaattttatttaaaccattcagcattcaggaattatttggttggcacaatagtaattgtggttttgccattaaagcatggtaaaaactgcagcaactttggcacaaacctaatatcttcattagaacgtttcttccaaaaatacatgatggggaagcataaaatacagtcttctcatttcagctctaacatgtaagaagtattcactatcatccctataacaagaaaaaagctgaacaaactgtaaatccacaactttatttggactcatcagagaactgagtttgcaggacagattgccatctgaattgcaaagagacaggtaaatttaaagagtcccagctaaaaattgctttacttgagcagaggtcactagagccataaactcttagaaatacgtaaatggtaaagttgatgaattgctggaggctagatatagactggcataagagggaggaaattctgagtgtggctgtcataggggagccctcacattttcacagattttacttgtaagaaccccactaggttctcatgataaagagccaagaaatacaccctcatccctctatatgagcaaggaaaa

SEQ ID NO: 1274 - DNA, 745 bp, Homo sapiens
atgtgtacattattggtgattatagtatatgccaactatgaaaatgtaatcagttaataaagataaattgtttgcataccattgcaagacattgacaaaagattttagcaataatgcaatgctagcattttttggaccttatcttttttctgcatacctaaaattttatttaaaccattcagcattcaggaattatttggttggcacaatagtaattgtggttttgccattaaagcatggtaaaaactgcagcaactttggcacaaacctaatatcttcattagaacgtttcttccaaaaatacatgatggggaagcataaaatacagtcttctcattycagctctaacatgtaagaagtattcactatcatccctataacaagaaaaaagctgaacaaactgtaaatccacaactttatttggactcatcagagaactgagtttgcaggacagattgccatctgaattgcaaagagacaggtaaatttaaagagtcccagctaaaaattgctttacttgagcagaggtcactagagccataaactcttagaaatacgtaaatggtaaagttgatgaattgctggaggctagatatagactggcataagagggaggaaattctgagtgtggctgtcataggggagccctcacattttcacagattttacttgtaagaaccccactaggttctcatgataaagagccaagaaatacaccctcatccctctatatgagcaaggaaaa

SEQ ID NO: 1275 - DNA, 705 bp, Homo sapiens
ttcttacttatttatattaatatccctacatgatggagttatatggataaattcagggctaaaactttagtcgttctatgcaaatatgtttccaggtttgcagactactccacatttacaatctactggtcaattgtcatttttaagrtattaaaaacatattctcagacatttaagtgcaaaagtcaaacctagataagattcagtagctattacagtaaatagtgagaagagaggtgaagaatgtgtgtgtgtgcgtgtgcgtgcgtgtgcatgtgtgtgagactgaggccaggtgaatgtcagcctagaaataaaaagaaaaaaagcagaagtcctaaactaatacctatgctctaaggtaattttctagttggagttattttcttttatcttcatttccttgatccactatttatctcacatttatcaaatactagcaaattagaaaagtcatatcaatgtcaggtgaagatggaagggtagcatcatatcagctcccaaatttgggtgattatattattgcaataggataaaataaaatcatttctagttttgatattacataacaagtcctctataaatactagtgtacaggtttttgtgttaacataaatttttatttcttttgggcaaatatatagatgtggaattactgggtagcatggtaagtttatgattatgtctcctagaaactgctagact

SEQ ID NO: 1276 - DNA, 705 bp, Homo sapiens
ttcttacttatttatattaatatccctacatgatggagttatatggataaattcagggctaaaactttagtcgttctatgcaaatatgtttccaggtttgcagactactccacatttacaatctactggtcaattgtcatttttaaggtattaaaaacatattctcagacatttaagtgcaaaagtcaaacctagataagattcagtagctattacagtaaatagtgagaagagaggtgaagaatgtgtgtgtgtgcrtgtgcgtgcgtgtgcatgtgtgtgagactgaggccaggtgaatgtcagcctagaaataaaaagaaaaaaagcagaagtcctaaactaatacctatgctctaaggtaattttctagttggagttattttcttttatcttcatttccttgatccactatttatctcacatttatcaaatactagcaaattagaaaagtcatatcaatgtcaggtgaagatggaagggtagcatcatatcagctcccaaatttgggtgattatattattgcaataggataaaataaaatcatttctagttttgatattacataacaagtcctctataaatactagtgtacaggtttttgtgttaacataaatttttatttcttttgggcaaatatatagatgtggaattactgggtagcatggtaagtttatgattatgtctcctagaaactgctagact

SEQ ID NO: 1277 - DNA, 1274 bp, Homo sapiens
aatttgctgtattactccaaattcctgcatggtaacaatttcagaagaccagtttggaaggagtagttactctttagtttgctgaaattgtcacctgataaatttaattaacttaaattacctatcacttctctgtggatatttgaatctatgtctcatattcagactaatcatttaatttcacaggtgagaaattagagtttaattataattagagataggtgacctcacagaagatgatggtgatgaaaattggttagaacagaagaaatctttaagtttgatttatgtttccaccatacagtggtaattcatccattctgacagtttgaaaattataagcaatgtcttttgattattctaacacataaccacattttaaaaatataaagttaattgtcaatcactcttaagattaattgtcattcttaagaggtaccttggctaggatacacatgttaatttatttaaataatttaatgagcaatagagtaacattttgaatttctgaactttacttcaattttctaatactaatacaatgagaaggtgtaaattgctccagtgtttaatgtttggtgaattttttaaaggtagaattcagcatgcaagaatatatcaataaggcatagagcataggttttgtgttgtatagttttgcagataagagaatactccatttaggacattaattttatgttttataacaacaatttgtattagagccttactgcccagaaaagggtgacaaatggacttcccaaaaacataatatttttgaacttacttttaatgggagcagctctccattctaaagctgtactccattttagtttatcaacaaggcaaatctaagttatagataattaactattttgcttaagttcaaaaagcaatttcaacacaagaagcaaatacaractaaaacctctgtcccataaagcttgcagccatggctcctagagttcccagtaattttattctttatccttcctctggaatctcctatcacccagttgaaatacatgtctcctaaacctttcttttttctgatttgtagataagttaatttctctctttgctcttatttattagctgatgaaatgagataatattaaatctataatgatttcatttaactttaaaatgtgttttgagatgaattttgcataaaaaaaatgttgtagaaagtaacactttattgtatggcattatgaccagtcattaggtttggtgaattggttcttcttgctaatgtttgtgttaaattaaaa

SEQ ID NO: 1278 - DNA, 1274 bp, Homo sapiens
aatttgctgtattactccaaattcctgcatggtaacaatttcagaagaccagtttggaaggagtagttactctttagtttgctgaaattgtcacctgataaatttaattaacttaaattacctatcacttctctgtggatatttgaatctatgtctcatattcagactaatcatttaatttcacaggtgagaaattagagtttaattataattagagataggtgacctcacagaagatgatggtgatgaaaattggttagaacagaagaaatctttaagtttgatttatgtttccaccatacagtggtaattcatccattctgacagtttgaaaattataagcaatgtcttttgattattctaacacataaccacattttaaaaatataaagttaattgtcaatcactcttaagattaattgtcattcttaagaggtaccttggctaggatacacatgttaatttatttaaataatttaatgagcaatagagtaacattttgaatttctgaactttacttcaattttctaatactaatacaatgagaaggtgtaaattgctccagtgtttaatgtttggtgaattttttaaaggtagaattcagcatgcaagaatatatcaataaggcatagagcataggttttgtgttgtatagttttgcagataagagaatactccatttaggacattaattttatgttttataacaacaatttgtattagagccttactgcccagaaaagggtgacaaatggacttcccaaaaacataatatttttgaacttacttttaatgggagcagctctccattctaaagctgtactccattttagtttatcaacaaggcaaatctaagttatagataattaactattttgcttaagttcaaaaagcaatttcaacacaagaagcaaatacaaactaaaacctctgtcccataaagcttgcagccatggctcctagagttcccagtaattttmttctttatccttcctctggaatctcctatcacccagttgaaatacatgtctcctaaacctttcttttttctgatttgtagataagttaatttctctctttgctcttatttattagctgatgaaatgagataatattaaatctataatgatttcatttaactttaaaatgtgttttgagatgaattttgcataaaaaaaatgttgtagaaagtaacactttattgtatggcattatgaccagtcattaggtttggtgaattggttcttcttgctaatgtttgtgttaaattaaaa

SEQ ID NO: 1279 - DNA, 1560 bp, Homo sapiens
atggtaacatgaccatgggtaaatgggtaatggcatagaagagaagcagagtaaacaaacacactgtgtgtatcattcacactgagaaaagtacagtgaaatgatcatagctctttggctgagaaggtacaagatacagttgctttcattctattttaacataaggcatatttctgagatgaacattcttgtaacatatcagtactctatggtacagtgttaagcaatgtgtgcatacattgctataggatttttaaaaagccttatatttatgcattggtcctacctttacacttcatttcatgttgatcaatgagtaatatgacattcttacaattacagcaaagcgagtcaccgtcctctgagactgtttgagatgactgaattatgtcatcaaggtcatccctagaatgtatttggtttttcacctacaaaataaataacactgtttcaaaatgtccccaaaatatttatagcatatacwaaatgtacagaagtgggaattgcccatctgtttctatgagcacaaacacaggtacctgttccatactttttttttaagcaatttcctttatgttgactctagttcagaagaccacatggtctatggataaattagtttcccagttcctatgctatttagaaaactgacagagagacttgggttaattaaggaacaaagattaagagaatgtcttcctgagcttgagttattttaattgcaaaaacaatctatttatacatacaattaggtatttagattaccccattttacacaagagattttcataagtaaaaaaattcaaatggatcaaataattggtgaagagaaaaaccagagtagcagcaagtgaccctctaagtcttttggaagttgaactttctccaaagccaggaactctactttacttgtaatatgcttacctcattcttaaatctttgcatatatcacttaattccacttctagacatactgctgatgttctgtcaccatgtggtggagaataatgcacattttctaattcaagttttatgctttcatatttatttgcactacagttgtcacataacggcttctggaacacattctgtattggttttgtactgttgtgtttgtaacaacagaaacaccatcatctttttttttttttttaaatcacatgcttcatatctttggagcaggtaagccacatacctaaaaggctttttgaatcactaaattgaggcatatgtccgatgtttaatttccagttagcggtgttttggttttttgtcatttgcctcacaacctatttgacttcttttatttcatccataactacttctgggtttcttgcttttgtactttcagtatcattataaaaattttccttgtctgagttaaaaacatgttcagtatctggtttgttgtcattttcacagtctactttatttctatttaaataaagctccgaaggtgactggcaagcatattctggagacccagagtatgaatgagaaagaaaggcatttttgagactgggttatttttgttcaggaaatatctggactactacagag

SEQ ID NO: 1280 - DNA, 1560 bp, Homo sapiens
atggtaacatgaccatgggtaaatgggtaatggcatagaagagaagcagagtaaacaaacacactgtgtgtatcattcacactgagaaaagtacagtgaaatgatcatagctctttggctgagaaggtacaagatacagttgctttcattctattttaacataaggcatatttctgagatgaacattcttgtaacatatcagtactctatggtacagtgttaagcaatgtgtgcatacattgctataggatttttaaaaagccttatatttatgcattggtcctacctttacacttcatttcatgttgatcaatgagtaatatgacattcttacaattacagcaaagcgagtcaccgtcctctgagactgtttgagatgactgaattatgtcatcaaggtcatccctagaatgtatttggtttttcacctacaaaataaataacactgtttcaaaatgtccccaaaatatttatagcatatactaaatgtacagaagtgggaattgcccatctgtttctatgagcacaaacacaggtacctgttccrtactttttttttaagcaatttcctttatgttgactctagttcagaagaccacatggtctatggataaattagtttcccagttcctatgctatttagaaaactgacagagagacttgggttaattaaggaacaaagattaagagaatgtcttcctgagcttgagttattttaattgcaaaaacaatctatttatacatacaattaggtatttagattaccccattttacacaagagattttcataagtaaaaaaattcaaatggatcaaataattggtgaagagaaaaaccagagtagcagcaagtgaccctctaagtcttttggaagttgaactttctccaaagccaggaactctactttacttgtaatatgcttacctcattcttaaatctttgcatatatcacttaattccacttctagacatactgctgatgttctgtcaccatgtggtggagaataatgcacattttctaattcaagttttatgctttcatatttatttgcactacagttgtcacataacggcttctggaacacattctgtattggttttgtactgttgtgtttgtaacaacagaaacaccatcatctttttttttttttttaaatcacatgcttcatatctttggagcaggtaagccacatacctaaaaggctttttgaatcactaaattgaggcatatgtccgatgtttaatttccagttagcggtgttttggttttttgtcatttgcctcacaacctatttgacttcttttatttcatccataactacttctgggtttcttgcttttgtactttcagtatcattataaaaattttccttgtctgagttaaaaacatgttcagtatctggtttgttgtcattttcacagtctactttatttctatttaaataaagctccgaaggtgactggcaagcatattctggagacccagagtatgaatgagaaagaaaggcatttttgagactgggttatttttgttcaggaaatatctggactactacagag

SEQ ID NO: 1281 - DNA, 1560 bp, Homo sapiens
atggtaacatgaccatgggtaaatgggtaatggcatagaagagaagcagagtaaacaaacacactgtgtgtatcattcacactgagaaaagtacagtgaaatgatcatagctctttggctgagaaggtacaagatacagttgctttcattctattttaacataaggcatatttctgagatgaacattcttgtaacatatcagtactctatggtacagtgttaagcaatgtgtgcatacattgctataggatttttaaaaagccttatatttatgcattggtcctacctttacacttcatttcatgttgatcaatgagtaatatgacattcttacaattacagcaaagcgagtcaccgtcctctgagactgtttgagatgactgaattatgtcatcaaggtcatccctagaatgtatttggtttttcacctacaaaataaataacactgtttcaaaatgtccccaaaatatttatagcatatactaaatgtacagaagtgggaattgcccatctgtttctatgagcacaaacacaggtacctgttccatactttttttttaagcaatttcctttatgttgactctagttcagaagaccacatggtctatggataaattagtttcccagttcctrtgctatttagaaaactgacagagagacttgggttaattaaggaacaaagattaagagaatgtcttcctgagcttgagttattttaattgcaaaaacaatctatttatacatacaattaggtatttagattaccccattttacacaagagattttcataagtaaaaaaattcaaatggatcaaataattggtgaagagaaaaaccagagtagcagcaagtgaccctctaagtcttttggaagttgaactttctccaaagccaggaactctactttacttgtaatatgcttacctcattcttaaatctttgcatatatcacttaattccacttctagacatactgctgatgttctgtcaccatgtggtggagaataatgcacattttctaattcaagttttatgctttcatatttatttgcactacagttgtcacataacggcttctggaacacattctgtattggttttgtactgttgtgtttgtaacaacagaaacaccatcatctttttttttttttttaaatcacatgcttcatatctttggagcaggtaagccacatacctaaaaggctttttgaatcactaaattgaggcatatgtccgatgtttaatttccagttagcggtgttttggttttttgtcatttgcctcacaacctatttgacttcttttatttcatccataactacttctgggtttcttgcttttgtactttcagtatcattataaaaattttccttgtctgagttaaaaacatgttcagtatctggtttgttgtcattttcacagtctactttatttctatttaaataaagctccgaaggtgactggcaagcatattctggagacccagagtatgaatgagaaagaaaggcatttttgagactgggttatttttgttcaggaaatatctggactactacagag

SEQ ID NO: 1282 - DNA, 2597 bp, Homo sapiens
tgtatgtgtgtagatggaaggctagatatacagataatctctcattcatattagtcctataaccagactcttaatcaggaaactcaagaggcatttctccaagagcaagaacaaagcaggatgcccactgtatctccagcaaccattcaagattatcctagaggtattagcaatgcaattaaacatgataaataaatcaggtagaggcataacaataggtaaagatgtaaaactggctgggcatggtggctcatgcctgtaatcccagcactttgggaggccaaggcgggcagatcacctgaggtcaggagttggagccagcctggccaacatggtgaaaccctgtctctaataaaaattcaaaaattaactgggcatggtggcatgtgcttgtagtcccagctacttgggaggctgaggcaggaggatcacttgaacctgggaggaggaggttgcagtgagctgagatcatgccactgcactccagcctgggcaacagtgtgagactccatctcaaaaaaaaaaaaaaaaaaaagaagtaaaactatctctataacagtatacgtagaattgaacaaggcaataggacataaaattaatatataaaaatcaagccttcctatacccaaacattaagtaggtagagagtataatgatagagaaaccccctctcttacaatagcaacacagaaaattaagtgacttaggaataaacttaagaagatacatgtaaaaatctatgtaaggaaaactttaacacacagtgaaaataaacttgaagaactggaaaggcattcccatttctagcataggatgacctaacatctgttttcccacagtgaatattgtagtataaatttgatgcaatgccaatcagaataccatagccttttgatgaagttagacaagttgatgttaaagttcacatggaaaaacaaacatgcaaaaatagccaggaaaacaatgaaaaaacaaaaactgcaaaaggggaactagtccgacaagacattaaaacacactattttcaggcgcggtggctcatgcctgtaatcccagcacggagtttcgctcttgttgcccaggctggagtgcagtggcgcgatctcagctcgctgcaacctctgcctcctgggttcaagcgattctcctgcctcagcctcctgagtagctggtcttgaactcctgactacaggggagctacatcacccagccaggaataaggatttttaataagctcttcccattccccaccctgacctccggctgatgcatggtgcggcccgggaactcctggccaggttcataatcctgcacccaggaaagaccacatatttaccagcttggacagtgacctatttggcctggtttttttcttttaaatcttttaagtctttctaggggagaaatgcttcatggattctagctgctcatcctgtctgtggagccaatctccctccagcatgatcagatagctcagatgagcctctgctcctagctggaggcagcgctttcccacactcctgaggaggaggggagaattcctccggggcagcacctcaggaatgtgctcagccactgcccarccccaccaccccagcgggggaaggacctgcccaggtcagtttgggaggaggcaccaggtgtctgcggctagctctctgtccctcctggctggcatccgtctgcctgcagagaataaacattctgatctgctcctccatgctgtacatatcacagaagcagactcgcacagggtgggatttggggaaaccatgggtatctaaaccttaccattgattagggactcttcataattcagggtgacgcacacacgttgtacagccaagtacaagtactctcttgtggccaggtgcggtggctcacacctgtaatcccagcactttgggaggccgaggcaggcggatcacgaggtcaggagttcaagacctgcctggccaacatggtgaaaccccgtctctactaaaaatacaaaaattagctgggtgtggtggtgtgcgtctgtagtcccagctacttgggaggctgaggcagagaactgcttgaacccaggagacagagtttgcagtgagctgagatggtgccactgtactccagcctgggcaacagagtgagactctgtctcaaaaaaaaaaacaaaaaaaaaaaaacaagtactctcttgtactctctacaagagagtctgagcaccatctgccagaccctcagctctgaactcaggtcaggtaaaaggaaaaggaggggccaggcccggtggctcacacctgtcatcccagcactttgggaggccaaggcaggtggatcacgaggtcaggagatcgagaccatactggctaacacggtgaaaccctgtctctactaaaaaatacaaaaaattagccaggcgtggtagcgggcccccatagtcacagctacttgggaggctgaggcaggagaatggcgtgaacctgggaggcagagtttgcagtgagccgagactgcaccgctgtactccagcctgggcaacagagcaagactccgtctcaaaaaaaaaaaagaggaaaaagaacaatgacttaccaacccccaattccaatttt

SEQ ID NO: 1283 - DNA, 2597 bp, Homo sapiens
tgtatgtgtgtagatggaaggctagatatacagataatctctcattcatattagtcctataaccagactcttaatcaggaaactcaagaggcatttctccaagagcaagaacaaagcaggatgcccactgtatctccagcaaccattcaagattatcctagaggtattagcaatgcaattaaacatgataaataaatcaggtagaggcataacaataggtaaagatgtaaaactggctgggcatggtggctcatgcctgtaatcccagcactttgggaggccaaggcgggcagatcacctgaggtcaggagttggagccagcctggccaacatggtgaaaccctgtctctaataaaaattcaaaaattaactgggcatggtggcatgtgcttgtagtcccagctacttgggaggctgaggcaggaggatcacttgaacctgggaggaggaggttgcagtgagctgagatcatgccactgcactccagcctgggcaacagtgtgagactccatctcaaaaaaaaaaaaaaaaaaaagaagtaaaactatctctataacagtatacgtagaattgaacaaggcaataggacataaaattaatatataaaaatcaagccttcctatacccaaacattaagtaggtagagagtataatgatagagaaaccccctctcttacaatagcaacacagaaaattaagtgacttaggaataaacttaagaagatacatgtaaaaatctatgtaaggaaaactttaacacacagtgaaaataaacttgaagaactggaaaggcattcccatttctagcataggatgacctaacatctgttttcccacagtgaatattgtagtataaatttgatgcaatgccaatcagaataccatagccttttgatgaagttagacaagttgatgttaaagttcacatggaaaaacaaacatgcaaaaatagccaggaaaacaatgaaaaaacaaaaactgcaaaaggggaactagtccgacaagacattaaaacacactattttcaggcgcggtggctcatgcctgtaatcccagcacggagtttcgctcttgttgcccaggctggagtgcagtggcgcgatctcagctcgctgcaacctctgcctcctgggttcaagcgattctcctgcctcagcctcctgagtagctggtcttgaactcctgactacaggggagctacatcacccagccaggaataaggatttttaataagctcttcccattccccaccctgacctccggctgatgcatggtgcggcccgggaactcctggccaggttcataatcctgcacccaggaaagaccacatatttaccagcttggacagtgacctatttggcctggtttttttcttttaaatcttttaagtctttctaggggagaaatgcttcatggattctagctgctcatcctgtctgtggagccaatctccctccagcatgatcagatagctcagatgagcctctgctcctagctggaggcagcgctttcccacactcctgaggaggaggggagaattcctccggggcagcacctcaggaatgtgctcagccactgcccagccccaccaccccagcgggggaaggacctgcccaggtcagtttgggaggaggcaccaggtgtctgcggctagctctctgtccctcctggctggcatccgtctgcctgcagagaataaacattctgatctgctcctccatgctgtacatatcacagaagcagactcgcacagggtgggatttggggaaaccatgggtatctaaaccttaccattgattagggactcttcataattcagggtgacgcacacacgttgtacagccaagtacaagtactctcttgtggccaggtgcggtggctcacacctgtaatcccagcactttgggaggccgaggcaggcggatcacgaggtcaggagttcaagacctgcctggccaacatggtgaaaccccgtctctactaaaaatacaaaaattagctgggtgtggtggtgtgcgtctgtagtcccagctacttgggaggctgaggcagagaactgcttgaacccaggagacagagtttgcagtgagctgagatggtgccactgtactccagcctgggcaacagagtgagactctgtctcaaaaaaaaaaacaaaaaaaaaaaaacaagtactctcttgtactctctacaagagagtctgagcaccatctgccagaccctcagctctgaactcaggtcaggtaaaaggaaaaggaggggccaggcccggtggctcacacctgtcatcccagcactttgggaggccaaggcaggtggatcacgaggtcaggagatcgagaccatactggctaacacggtgaaaccctgtctctactaaaaaatacaaaaaattagccaggcgtggtagcgggcccccatagtcacagctacttgggaggctgaggcaggagaatggcgtgaacctgggaggcagagtttgcagtgagccgagactgcaccgctgtactccagcctgggcaacagagyaagactccgtctcaaaaaaaaaaaagaggaaaaagaacaatgacttaccaacccccaattccaatttt

SEQ ID NO: 1284 - DNA, 2597 bp, Homo sapiens
tgtatgtgtgtagatggaaggctagatatacagataatctctcattcatattagtcctataaccagactcttaatcaggaaactcaagaggcatttctccaagagcaagaacaaagcaggatgcccactgtatctccagcaaccattcaagattatcctagaggtattagcaatgcaattaaacatgataaataaatcaggtagaggcataacaataggtaaagatgtaaaactggctgggcatggtggctcatgcctgtaatcccagcactttgggaggccaaggcgggcagatcacctgaggtcaggagttggagccagcctggccaacatggtgaaaccctgtctctaataaaaattcaaaaattaactgggcatggtggcatgtgcttgtagtcccagctacttgggaggctgaggcaggaggatcacttgaacctgggaggaggaggttgcagtgagctgagatcatgccactgcactccagcctgggcaacagtgtgagactccatctcaaaaaaaaaaaaaaaaaaaagaagtaaaactatctctataacagtatacgtagaattgaacaaggcaataggacataaaattaatatataaaaatcaagccttcctatacccaaacattaagtaggtagagagtataatgatagagaaaccccctctcttacaatagcaacacagaaaattaagtgacttaggaataaacttaagaagatacatgtaaaaatctatgtaaggaaaactttaacacacagtgaaaataaacttgaagaactggaaaggcattcccatttctagcataggatgacctaacatctgttttcccacagtgaatattgtagtataaatttgatgcaatgccaatcagaataccatagccttttgatgaagttagacaagttgatgttaaagttcacatggaaaaacaaacatgcaaaaatagccaggaaaacaatgaaaaaacaaaaactgcaaaaggggaactagtccgacaagacattaaaacacactattttcaggcgcggtggctcatgcctgtaatcccagcacggagtttcgctcttgttgcccaggctggagtgcagtggcgcgatctcagctcgctgcaacctctgcctcctgggttcaagcgattctcctgcctcagcctcctgagtagctggtcttgaactcctgactacaggggagctacatcacccagccaggaataaggatttttaataagctcttcccattccccaccctgacctccggctgatgcatggtgcggcccgggaactcctggccaggttcataatcctgcacccaggaaagaccacatatttaccagcttggacagtgacctatttggcctggtttttttcttttaaatcttttaagtctttctaggggagaaatgcttcatggattctagctgctcatcctgtctgtggagccaatctccctccagcatgatcagatagctcagatgagcctctgctcctagctggaggcagcgctttcccacactcctgaggaggaggggagaattcctccggggcagcacctcaggaatgtgctcagccactgcccagccccaccaccccagcgggggaaggacctgcccaggtcagtttgggaggaggcaccaggtgtctgcggctagctctctgtccctcctggctggcatccgtctgcctgcagagaataaacattctgatctgctcctccatgctgtacatatcacagaagcagactcgcacagggtgggatttggggaaaccatgggtatctaaaccttaccattgattagggactcttcataattcagggtgacgcacacacgttgtacagccaagtacaagtactctcttgtggccaggtgcggtggctcacacctgtaatcccagcactttgggaggccgaggcaggcggatcacgaggtcaggagttcaagacctgcctggccaacatggtgaaaccccgtctctactaaaaatacaaaaattagctgggtgtggtggtgtgcgtctgtagtcccagctacttgggaggctgaggcagagaactgcttgaacccaggagacagagtttgcagtgagctgagatggtgccactgtactccagcctgggcaacagagtgagactctgtctcaaaaaaaaaaacaaaaaaaaaaaaacaagtactctcttgtactctctacaagagagtctgagcaccatctgccagaccctcagctctgaactcaggtcaggtaaaaggaaaaggaggggccaggcccggtggctcacacctgtcatcccagcactttgggaggccaaggcaggtggatcacgaggtcaggagatcgagaccatactggctaacacggtgaaaccctgtctctactaaaaaatacaaaaaattagccaggcgtggtagcgggcccccatagtcacagctacttgggaggctgaggcaggagaatggcgtgaacctgggaggcagagtttgcagtgagccgagactgcaccgctgtactccagcctgggcaacagagcragactccgtctcaaaaaaaaaaaagaggaaaaagaacaatgacttaccaacccccaattccaatttt

SEQ ID NO: 1285 - DNA, 627 bp, Homo sapiens
tgcatggcatgcctgtatcaaaatatctcgtgtaccccataaatacatacccctactatgtacccacaaaaattaaaagttaaaaaaatctcttactactctatatatcctcctactagttctgtttctctcatgggaccctgactcatccaaattttggtactagaagagaggaacagaatcttaaatctatttccagtggccaagagggcatttaggtactccatggcatgatgtggcaatagagatatacaaaatattaccattggatactctcaatcaaacacatataaaaggcaaggttctgggtgcccacgtgtttgatgatatctgagaacattttaattaaactgaggagtatgatattggctggttgctggakaaagtggggaaagaaagggatgagtttagcctttcacattctcagcttaaactgtgcataaatgaactgaaaacttctatgggccgggcatggtggctcatgcctataatcccagcactttgagaggccaaggcggggggatcacctgaggtcaggagtttgagagcagcctggccaacatggtgaaactccatctctactaaaaatacaaaaattagctgggtgtggtggcacgcacctataat

SEQ ID NO: 1286 - DNA, 743 bp, Homo sapiens
aatccctccacaatggtggctctggtctacactccacaagcagtgccctcatcaacttccccacttccccacccaacatgaagacttcttttttttttctttttgaggcagggtctcacttgttgccctggctacttasaggtgcgatcatagctcactgcagccccaaactcctgggctcatgggatcctctcacctcagcctcctgagtagctgggatgacaggcatctgccactgtgcccagctccaatacttgtctcttcctagattagttttgcctaaaagattgcattagttttctacagctgcagaacaagttaacacaaatcgtgtggcttaaaacaccatttatttttcatctcccattttctgtgggccaggattctgggctcggcttagctgggtgctctgctcagactgtaacccggtgttggccaggctgcattctcatcagaggctccactggagaaagatctgattccaggctgcctcaggtggctggcagtattcatctccgagtggttgtagaactcaaggagacttgcttcttcaatgtcagcaggagagatagtctcatacctttacatccttttttaaagggctcacctgattagatgcaccctggatgatgtcctttttcattaacataaagtcaactgatcagggactttaattacattggcaaattcttttccccttttccatatggcacatcatcacctttgttagaatctattaatta

SEQ ID NO: 1287 - DNA, 673 bp, Homo sapiens
aatatatattatgtattgactattttgtttctctttccattcaggttatatttaaaaagaaagtttctcttttgaatattgccacaagaataacgggcggtgggaaatctggaacaggtaatttggcaatatacatttaatgtcatgtgcactcaagatagaagacaacrtcccacccctgaatagatcagcagggggctcattgaaaatgcactttctgattcagcaggcctgagattgtgcatttctactgagttgtcaggtgttgttgatgctgctggtccttggccatgatcttagtaacaagcttatagacttccctacattgaaattgtgtagaagaaccgttggaaaacagttcaagacataagagataagaggatccggggacagcataattttgctcttatttcagagcatgtttctatggaaaggggaaggagaaagagaaaaaagtaatagaaattatagatgtcagatggtactgcttaaaccagagggaggaagttgtcataataacccataaacactggagaatgaggagcaaggtgaccactgatgtagtaattattttcatcaagagagggattgcaaggcaagaaagaggggaaggaagaagttatttaggtaattttggggtttctgctgaggaagcctgagtgaactcacttca

SEQ ID NO: 1288 - DNA, 673 bp, Homo sapiens
aatatatattatgtattgactattttgtttctctttccattcaggttatatttaaaaagaaagtttctcttttgaatattgccacaagaataacgggcggtgggaaatctggaacaggtaatttggcaatatacatttaatgtcatgtgcactcaagatagaagacaacgtcccacccctgaatagatcagcagggkgctcattgaaaatgcactttctgattcagcaggcctgagattgtgcatttctactgagttgtcaggtgttgttgatgctgctggtccttggccatgatcttagtaacaagcttatagacttccctacattgaaattgtgtagaagaaccgttggaaaacagttcaagacataagagataagaggatccggggacagcataattttgctcttatttcagagcatgtttctatggaaaggggaaggagaaagagaaaaaagtaatagaaattatagatgtcagatggtactgcttaaaccagagggaggaagttgtcataataacccataaacactggagaatgaggagcaaggtgaccactgatgtagtaattattttcatcaagagagggattgcaaggcaagaaagaggggaaggaagaagttatttaggtaattttggggtttctgctgaggaagcctgagtgaactcacttca

SEQ ID NO: 1289 - DNA, 673 bp, Homo sapiens
aatatatattatgtattgactattttgtttctctttccattcaggttatatttaaaaagaaagtttctcttttgaatattgccacaagaataacgggcggtgggaaatctggaacaggtaatttggcaatatacatttaatgtcatgtgcactcaagatagaagacaacgtcccacccctgaatagatcagcagggggctcattgaaaatgcactttctgattcagcaggcctgagattgtgcatttctactgagttgtcaggtgttgttgatgctgctggtccttggccatgatcttagtaacaagcttatagacttccctacatkgaaattgtgtagaagaaccgttggaaaacagttcaagacataagagataagaggatccggggacagcataattttgctcttatttcagagcatgtttctatggaaaggggaaggagaaagagaaaaaagtaatagaaattatagatgtcagatggtactgcttaaaccagagggaggaagttgtcataataacccataaacactggagaatgaggagcaaggtgaccactgatgtagtaattattttcatcaagagagggattgcaaggcaagaaagaggggaaggaagaagttatttaggtaattttggggtttctgctgaggaagcctgagtgaactcacttca

SEQ ID NO: 1290 - DNA, 673 bp, Homo sapiens
aatatatattatgtattgactattttgtttctctttccattcaggttatatttaaaaagaaagtttctcttttgaatattgccacaagaataacgggcggtgggaaatctggaacaggtaatttggcaatatacatttaatgtcatgtgcactcaagatagaagacaacgtcccacccctgaatagatcagcagggggctcattgaaaatgcactttctgattcagcaggcctgagattgtgcatttctactgagttgtcaggtgttgttgatgctgctggtccttggccatgatcttagtaacaagcttatagacttccctacattgaaattgtgtagaagaaccrttggaaaacagttcaagacataagagataagaggatccggggacagcataattttgctcttatttcagagcatgtttctatggaaaggggaaggagaaagagaaaaaagtaatagaaattatagatgtcagatggtactgcttaaaccagagggaggaagttgtcataataacccataaacactggagaatgaggagcaaggtgaccactgatgtagtaattattttcatcaagagagggattgcaaggcaagaaagaggggaaggaagaagttatttaggtaattttggggtttctgctgaggaagcctgagtgaactcacttca

SEQ ID NO: 1291 - DNA, 673 bp, Homo sapiens
aatatatattatgtattgactattttgtttctctttccattcaggttatatttaaaaagaaagtttctcttttgaatattgccacaagaataacgggcggtgggaaatctggaacaggtaatttggcaatatacatttaatgtcatgtgcactcaagatagaagacaacgtcccacccctgaatagatcagcagggggctcattgaaaatgcactttctgattcagcaggcctgagattgtgcatttctactgagttgtcaggtgttgttgatgctgctggtccttggccatgatcttagtaacaagcttatagacttccctacattgaaattgtgtagaagaaccgttggaaaacagttcaagacataagagataagaggatccggggacagcataattttgctcttatttcagagcatgtttctatggaaaggggaaggagaaagagaaaaaagtaatagaaattatagatgtcagatggtactrcttaaaccagagggaggaagttgtcataataacccataaacactggagaatgaggagcaaggtgaccactgatgtagtaattattttcatcaagagagggattgcaaggcaagaaagaggggaaggaagaagttatttaggtaattttggggtttctgctgaggaagcctgagtgaactcacttca

SEQ ID NO: 1292 - DNA, 586 bp, Homo sapiens
taaattgttacctaaattgaactgtatgatgcacagcaaagacgtcaatgagaatagaaaattatatcctaacagtaaaaatcactggaaaaaaaaataaaagatatccttcactatacaaatattttaaatatttctctktctaaaaatctctgccatgcagatattagaagccaaataacaaattgaaaagaagttattaccacaaatataacaaagtctccgtgttcctaacctgtaaaaaaacttcaacaaatcaataagaaaactgtggacaagttacttaagcaaattaaaataggcaaattttataccttatcaattagtgaagactacttatatgtaaaatttaacatgaaaaaatatgtagtgggctaagtacacttatatgttgctggtaagaatgcaaaatatttaacattttaagaaaacaatttgtcttttcatatgaagagtattaaacagatttttaaccttggttcgagtaatttcactcataggaattttctatagaaaaaaagtcacacatccaagagattgacattattgatttcacacacacatacacacacacacagagacatac

SEQ ID NO: 1293 - DNA, 586 bp, Homo sapiens
taaattgttacctaaattgaactgtatgatgcacagcaaagacgtcaatgagaatagaaaattatatcctaacagtaaaaatcactggaaaaaaaaataaaagatatccttcactatacaaatattttaaatatttctctttctaaaaatctctgccatgcagatattagaarccaaataacaaattgaaaagaagttattaccacaaatataacaaagtctccgtgttcctaacctgtaaaaaaacttcaacaaatcaataagaaaactgtggacaagttacttaagcaaattaaaataggcaaattttataccttatcaattagtgaagactacttatatgtaaaatttaacatgaaaaaatatgtagtgggctaagtacacttatatgttgctggtaagaatgcaaaatatttaacattttaagaaaacaatttgtcttttcatatgaagagtattaaacagatttttaaccttggttcgagtaatttcactcataggaattttctatagaaaaaaagtcacacatccaagagattgacattattgatttcacacacacatacacacacacacagagacatac

SEQ ID NO: 1294 - DNA, 1283 bp, Homo sapiens
tgcatgggtgtctgtggatgctaagatcaatagtgcaggggcctcacaaaagaaatgagcaatgctgttactgcctcggtagggtagcctcagyatgaaggtggtgtctaccacagacaccagaatgccactggtccatgatcctgttgccagctggacacacactttccaggtcatgatgttagggtaacgcagaggattgcagattgcaacatagcgatcataggacatcactgcaagaagggcgcactgggtacacccaaaaatgaggaaaaagagaagtcgagctgcgcaaagtgtgaatgcaatgaccttctttctggaaagcaggtggactagtgcctgaggaactatgttggtagagaaacagaggtcagccagagacaagttgcagagaaaaaaatacatgggtgtgtgaagttgggagtcaacatgaacaagggagattagaagcagatttccaagcacagtgaccaggtagacacccaataatacgataaatagcagctgctcggtgtgtggcccatcagagagtcccagaaggaggaattctgtcacttgtgtctgatttatctgtctcatagtttgttgtccttttcagtaagaagtcactatgtgctaaccatagacaggcatacctataaaattatataattcagaagtgcaggcttaggaactgccccaatttctactgaaaatttcaagaacccccttcataagatgatcatgtttctttcattggaacattttcagtgttgtaaaacaaactttaaaagatgttgcattcattgttgatgtcatctggcaagaatagatttttaaaattatttttctcactctgaataccacacttttaataatacaatattaaatacagactgagttcatctataaagtcctgccatttaatttctgtttgttcttaactaaaacccctgagtcgtaagtgctcttgtcacatctcctcttccccgcttatgataatatagttttctgttgtattttccgtgaaaggacagacacgaaggtataagaaatcagaaagagccaaagtactggtatgttttatttaagaaactaacctgtcttacaggagctgggaaaccaaagattaactcaggatacccttgggaatcctatctgaagcctcagcttgagttctgttcagtctcaactgtgaatgaacttccaacataacagacacaccatcaaaacagaattttcattttaagccaccagcgtgactagtttcatactcagcccaaacagcactactccccagc

SEQ ID NO: 1295 - DNA, 1283 bp, Homo sapiens
tgcatgggtgtctgtggatgctaagatcaatagtgcaggggcctcacaaaagaaatgagcaatgctgttactgcctcggtagggtagcctcagtrtgaaggtggtgtctaccacagacaccagaatgccactggtccatgatcctgttgccagctggacacacactttccaggtcatgatgttagggtaacgcagaggattgcagattgcaacatagcgatcataggacatcactgcaagaagggcgcactgggtacacccaaaaatgaggaaaaagagaagtcgagctgcgcaaagtgtgaatgcaatgaccttctttctggaaagcaggtggactagtgcctgaggaactatgttggtagagaaacagaggtcagccagagacaagttgcagagaaaaaaatacatgggtgtgtgaagttgggagtcaacatgaacaagggagattagaagcagatttccaagcacagtgaccaggtagacacccaataatacgataaatagcagctgctcggtgtgtggcccatcagagagtcccagaaggaggaattctgtcacttgtgtctgatttatctgtctcatagtttgttgtccttttcagtaagaagtcactatgtgctaaccatagacaggcatacctataaaattatataattcagaagtgcaggcttaggaactgccccaatttctactgaaaatttcaagaacccccttcataagatgatcatgtttctttcattggaacattttcagtgttgtaaaacaaactttaaaagatgttgcattcattgttgatgtcatctggcaagaatagatttttaaaattatttttctcactctgaataccacacttttaataatacaatattaaatacagactgagttcatctataaagtcctgccatttaatttctgtttgttcttaactaaaacccctgagtcgtaagtgctcttgtcacatctcctcttccccgcttatgataatatagttttctgttgtattttccgtgaaaggacagacacgaaggtataagaaatcagaaagagccaaagtactggtatgttttatttaagaaactaacctgtcttacaggagctgggaaaccaaagattaactcaggatacccttgggaatcctatctgaagcctcagcttgagttctgttcagtctcaactgtgaatgaacttccaacataacagacacaccatcaaaacagaattttcattttaagccaccagcgtgactagtttcatactcagcccaaacagcactactccccagc

SEQ ID NO: 1296 - DNA, 1283 bp, Homo sapiens
tgcatgggtgtctgtggatgctaagatcaatagtgcaggggcctcacaaaagaaatgagcaatgctgttactgcctcggtagggtagcctcagtatgaaggtggtgtctaccacagacaccagaatgccactggtccatgrtcctgttgccagctggacacacactttccaggtcatgatgttagggtaacgcagaggattgcagattgcaacatagcgatcataggacatcactgcaagaagggcgcactgggtacacccaaaaatgaggaaaaagagaagtcgagctgcgcaaagtgtgaatgcaatgaccttctttctggaaagcaggtggactagtgcctgaggaactatgttggtagagaaacagaggtcagccagagacaagttgcagagaaaaaaatacatgggtgtgtgaagttgggagtcaacatgaacaagggagattagaagcagatttccaagcacagtgaccaggtagacacccaataatacgataaatagcagctgctcggtgtgtggcccatcagagagtcccagaaggaggaattctgtcacttgtgtctgatttatctgtctcatagtttgttgtccttttcagtaagaagtcactatgtgctaaccatagacaggcatacctataaaattatataattcagaagtgcaggcttaggaactgccccaatttctactgaaaatttcaagaacccccttcataagatgatcatgtttctttcattggaacattttcagtgttgtaaaacaaactttaaaagatgttgcattcattgttgatgtcatctggcaagaatagatttttaaaattatttttctcactctgaataccacacttttaataatacaatattaaatacagactgagttcatctataaagtcctgccatttaatttctgtttgttcttaactaaaacccctgagtcgtaagtgctcttgtcacatctcctcttccccgcttatgataatatagttttctgttgtattttccgtgaaaggacagacacgaaggtataagaaatcagaaagagccaaagtactggtatgttttatttaagaaactaacctgtcttacaggagctgggaaaccaaagattaactcaggatacccttgggaatcctatctgaagcctcagcttgagttctgttcagtctcaactgtgaatgaacttccaacataacagacacaccatcaaaacagaattttcattttaagccaccagcgtgactagtttcatactcagcccaaacagcactactccccagc

SEQ ID NO: 1297 - DNA, 1283 bp, Homo sapiens
tgcatgggtgtctgtggatgctaagatcaatagtgcaggggcctcacaaaagaaatgagcaatgctgttactgcctcggtagggtagcctcagtatgaaggtggtgtctaccacagacaccagaatgccactggtccatgatcctgttgccagctggacacacactttccaggtcatgatgttagggtaacgcagaggattgcagattgcaacatagcgatcataggacatcactgcaagaagggcgcactgggtacacccaaaaatgaggaaaaagagaagtcgagctgcgcaaagtgtgaatgcaatgaccttctttctggaaagcaggtggactagtgcctgaggaactatgttggtagagaaacagaggtcagccagagacaagttgcagagaaaaaaatacatgggtgtgtgaagttgggagtcaacatgaacaagggagattagaagcagatttccaagcacagtgaccaggtagacacccaataatacgataaatagcagctgctcggtgtgtggcccatcagagagtcccagaaggaggaattctgtcacttgtgtctgatttatctgtctcatagtttgttgtccttttcagtaagaagtcactatgtgctaaccatagacaggcatacctataaaattatataattcagaagtgcaggcttaggaactgccccaatttctactgaaaatttcaagaacccccttcataagatgatcatgtttctttcattggaacattttcagtgttgtaaaacaaactttaaaagatgttgcattcattgttgrtgtcatctggcaagaatagatttttaaaattatttttctcactctgaataccacacttttaataatacaatattaaatacagactgagttcatctataaagtcctgccatttaatttctgtttgttcttaactaaaacccctgagtcgtaagtgctcttgtcacatctcctcttccccgcttatgataatatagttttctgttgtattttccgtgaaaggacagacacgaaggtataagaaatcagaaagagccaaagtactggtatgttttatttaagaaactaacctgtcttacaggagctgggaaaccaaagattaactcaggatacccttgggaatcctatctgaagcctcagcttgagttctgttcagtctcaactgtgaatgaacttccaacataacagacacaccatcaaaacagaattttcattttaagccaccagcgtgactagtttcatactcagcccaaacagcactactccccagc

SEQ ID NO: 1298 - DNA, 1283 bp, Homo sapiens
tgcatgggtgtctgtggatgctaagatcaatagtgcaggggcctcacaaaagaaatgagcaatgctgttactgcctcggtagggtagcctcagtatgaaggtggtgtctaccacagacaccagaatgccactggtccatgatcctgttgccagctggacacacactttccaggtcatgatgttagggtaacgcagaggattgcagattgcaacatagcgatcataggacatcactgcaagaagggcgcactgggtacacccaaaaatgaggaaaaagagaagtcgagctgcgcaaagtgtgaatgcaatgaccttctttctggaaagcaggtggactagtgcctgaggaactatgttggtagagaaacagaggtcagccagagacaagttgcagagaaaaaaatacatgggtgtgtgaagttgggagtcaacatgaacaagggagattagaagcagatttccaagcacagtgaccaggtagacacccaataatacgataaatagcagctgctcggtgtgtggcccatcagagagtcccagaaggaggaattctgtcacttgtgtctgatttatctgtctcatagtttgttgtccttttcagtaagaagtcactatgtgctaaccatagacaggcatacctataaaattatataattcagaagtgcaggcttaggaactgccccaatttctactgaaaatttcaagaacccccttcataagatgatcatgtttctttcattggaacattttcagtgttgtaaaacaaactttaaaagatgttgcattcattgttgatgtcatctggcaagaatagatttttaaaattatttttctcactctgaataccacacttttaataatacaatattaaatacagactgagttcatctataaagtcctgccatttaatttctgtttgttcttaactaaaacccctgagtcgtaagtgctcttgtcacatctcctcttccccgcttatgataatatagttttctgttgtattttccstgaaaggacagacacgaaggtataagaaatcagaaagagccaaagtactggtatgttttatttaagaaactaacctgtcttacaggagctgggaaaccaaagattaactcaggatacccttgggaatcctatctgaagcctcagcttgagttctgttcagtctcaactgtgaatgaacttccaacataacagacacaccatcaaaacagaattttcattttaagccaccagcgtgactagtttcatactcagcccaaacagcactactccccagc

SEQ ID NO: 1299 - DNA, 1283 bp, Homo sapiens
tgcatgggtgtctgtggatgctaagatcaatagtgcaggggcctcacaaaagaaatgagcaatgctgttactgcctcggtagggtagcctcagtatgaaggtggtgtctaccacagacaccagaatgccactggtccatgatcctgttgccagctggacacacactttccaggtcatgatgttagggtaacgcagaggattgcagattgcaacatagcgatcataggacatcactgcaagaagggcgcactgggtacacccaaaaatgaggaaaaagagaagtcgagctgcgcaaagtgtgaatgcaatgaccttctttctggaaagcaggtggactagtgcctgaggaactatgttggtagagaaacagaggtcagccagagacaagttgcagagaaaaaaatacatgggtgtgtgaagttgggagtcaacatgaacaagggagattagaagcagatttccaagcacagtgaccaggtagacacccaataatacgataaatagcagctgctcggtgtgtggcccatcagagagtcccagaaggaggaattctgtcacttgtgtctgatttatctgtctcatagtttgttgtccttttcagtaagaagtcactatgtgctaaccatagacaggcatacctataaaattatataattcagaagtgcaggcttaggaactgccccaatttctactgaaaatttcaagaacccccttcataagatgatcatgtttctttcattggaacattttcagtgttgtaaaacaaactttaaaagatgttgcattcattgttgatgtcatctggcaagaatagatttttaaaattatttttctcactctgaataccacacttttaataatacaatattaaatacagactgagttcatctataaagtcctgccatttaatttctgtttgttcttaactaaaacccctgagtcgtaagtgctcttgtcacatctcctcttccccgcttatgataatatagttttctgttgtattttccgtgaaaggacagacaygaaggtataagaaatcagaaagagccaaagtactggtatgttttatttaagaaactaacctgtcttacaggagctgggaaaccaaagattaactcaggatacccttgggaatcctatctgaagcctcagcttgagttctgttcagtctcaactgtgaatgaacttccaacataacagacacaccatcaaaacagaattttcattttaagccaccagcgtgactagtttcatactcagcccaaacagcactactccccagc

SEQ ID NO: 1300 - DNA, 1310 bp, Homo sapiens
aaagtatctcagaataacgttttaaatacatcaaataaaatgtataggattactaaggaaaccagttatatcaaaatacagttatcgaaataattttagaaaacagatttgtaaacagcaatatatgtgcttctttattaatacactaaaattttgaaatgtagtggtgggtctaataaccatcttcatttcaaaataatgatgagtttaaatatttggagatctctccaacaactgcaatacaatataaaaattcttataattactactgctgacaaagtcataaatacttctaatattggtgtgggttggttacttgcattcaaattggaaggaaacatcaactttcagttaggggaaaataaaaataaagaagtaacattttactccaagttgcagaactcacttgggttacaggaatccccaggagatttcttaaaaaaaaaaaaaagacataattacaccctacataatctagtaacagagtctcagcatctggattggtctgtgagtcaaagaaatgaaagatttcaattcctaaytggtcttcagactaaagttggaatttggcattgggaggaaggtccctttgcacttctacttaactgtttggtgctttagatttttagcattgctccctgctcactttgcaggcagaaggccttaagcaaacagctcagtccaacatgcatcacctgtatgacaaaatccaatttataacccttccacctttgcccactactggtaagccatggactctacactcctttcctcacttcctgggatttctcctgcaacatcttttctccagacaggaatgtagctgtcctgggccaaagttaccactaacaaccaatctgggaaaagtttgacctaatttcttttctcttctccacttttattttaaccaccagaggaagaagcctgaaaacaatttcaccttactgttttactttacaatgtacagattaattacttaaaaggttcttttttaactcaaaatacagattattctttatgttattctcctcttttacacatctaggaaaatctgtcaaaacaaaaacagtctcatatcaaatcatataaatgtaatggttacacaatattaccattatatcaggtaaatggaggtgtggatgttgattcaatggtaaaataaaaaccagtgcccacaaactctaaaatctttgaaaggataaaagcctcttaccctatccttaaaaggaactctatattcctcctcaggttttgaagataagttacttaattttaacattttgtttgcttaattgtattttaaatataca

SEQ ID NO: 1301 - DNA, 874 bp, Homo sapiens
catgaacatctgttgtgaggtaatctttctaaataagatcatgggagcaccaacagatgtggctttctaaagtctgcataagactttcaagcatatcttgccaatttatccccatgttaggatgaatacaacttttatggaattagggcaaaattcagatgaatagggtgaagatgcatttaataaaagaaacttattttttctgttaattgaaccatctgtgctcttgactgggtattttgatcttcattgtcaaagagccatctacccttattatcaagaacttacttataatgaaatccatttaactagcttttacaaattcataaataatcactatatacttggaatatattcttcttttcctgtatatgacagagtattaataaaatgatttagataaatacacttgcactaattttgattaaacagtttaaatttgtatacatttttgacctcacaaaattctttacggatttaaattcatcataatttaactgtcagttaatcagaaatgtaaaacataaactctgaaaatatgacaatttcaacacttttttgattcatgytttaacttatgtaatcctatatatatgataatataataaataccatgatttataaaagagcaacaactgagtccaaccttaaatatcatttttttcacccatctaatattatcataagtgccttctttgctaggcctgggatgtatattagtggacaatacagaaaaaatgcttacccataggcaggccctcctttattttatatgccataaagggagtagatggtatatgtgcctagacataaactgacacacacatgcaaatacatagcacataaataccattgaaagcataattttctgtga

SEQ ID NO: 1302 - DNA, 638 bp, Homo sapiens
catagatatagatatagctgtagatttatagatatgtcaatataaatataattttcagactctctgaatctctaaaacagggaactttactgcatcacatgaattttctaaacacatgatagtgcttataaaaacatctaaggcattatattatttatacaacctggaaaatttctaagcttaagccttatttccttatagtctataaacactgtattgctctcattgctctctttcctctcactctctttaattttcaastgagaattcatgaacacttggtatatcctaaagcatgtgtgtgccttttccctaaagctctcatttatggtactattacagaatgcagtttactattcctcttcctgcaagcaactaacaaaaacatgtgctcacatttttcaatcaaactggttataactactgtgtcacagtttgctcttatattagatttcaaccaaattcaattacacagtgtgctccttgctgccataggatgaatggcaggacaaagatgaatgaacacaactggcacgagtgattgatcccaacatgccagcaggttgattaaagtgtctagaaacaaaatgaaaaatagtattcatctgtaactactggtcaatttttaaattaactgc

SEQ ID NO: 1303 - DNA, 664 bp, Homo sapiens
accaatattgatttcccaatgtgacattgttgcattattttttactcggattacctggtcacttgatgacaaatacactacatggtcctccttcttttatgacaaacaaaacaccagtttattttcacaaggatacatacttattgtatgtatgagtttgtcttttcatccacacagtcacagtctgcactgctaatagaaggggtatagaatgttggatctaaaggcatgcaatctcatacatcatagaatatcatcacaggtacacatcagagtccagtgctactcttcagtatctactgttgtgcttaatagagatggtgcatccccaaagctgttcccattcaaagatcagcatggggtaccaaaaactaacatgctcactttttaaaaatcaagagtgtaattcataattcaaaagttagtaaacataaactgactctagatattagaattggagatgaccctagatattagaattagaagacaatatatcaaagcaggtattattaatatgtgtaatggattaaaaatatgtttaatagattaaaggaggaagsagtcttaacgagtaaacaagtaattttaagaagaaagaaaacttcacaaaataagatccaaatagatatagtaagactgaaatacaatacttacgagatgtctt

SEQ ID NO: 1304 - DNA, 733 bp, Homo sapiens
taataataaaatgcctcaaaatatagagaaaataaattgataaaatagaaaaagtaaatagataaacccaccatcatagcttaatgacattgataatattgatatgtcagttagtgattgatataatttagatttttggcccttccaaatctcatgtcaaaatgtaatccccagtgttggaagtggagatgctgggaggtattttcatcttggggtcatgtccttaatgaatgggttagtgccatcctctttatgatgagtgagttctctctctgagttcctgtgacatctggatgcttataagtatgtcgtgcctctcccctttctctcttgctcccactctcaccatgtgagacgcttgctacccctttgcctcccaccatgattataagcctttgcaggccctccctagaagcagatgctactgtcatgcttcttgtactgtctgaagaactgtgactcaattaaacttattttctttattaattacccagactcaggtatttctttatagcaatgcaagaatggcctaatacaataatagatcaaaaataatgacaacaaagtaaaatagcaagaataactctgccgattttttcgtyccttttcatttccacgctgaaaaattaagtccgaagacattatttgagagacagtaacagaaggatctgtctccaaaacagaggctaaatatatcatagcccagaacagggtgtgaaatcctgaccaaggt

SEQ ID NO: 1305 - DNA, 679 bp, Homo sapiens
ttatccccacttgcagggtggccttgaacactgactgggacaacagagtgacgtacccagcccagccaaggacaaaagtgtattcagcaggcactcaggcactttgggatcacccccttctcgcagggcagtgtgggacaaagcggtgcagaggtcacgggttgtatcagggtatccagggaatgcccttgtctgagggtgacaggcccacctctcgtctccacrcagacccgcctctcactccagtcctgacagccttcctggagacccaggcgggacttgtgggcatccttcactgctctgtggtcagtgagcccctggccacactggtgctgtcacatgggggtcatatcctggcctccacctccggggacagtgatcacagcccacgcttcagtggtacctctggtcccaactccctgcgcctggagatccgagacctggaggaaactgacagtggggagtacaagtgctcagccaccaactcccttggaaatgcaacctccaccctggacttccatgccaatggtaagatgggcactggcagccagggagagtggagggagcctgaggaggagcctgctccagtctgttccttctagaagtctagtggactcaaccgcaggactgagctaactggctacgccacataaaagacaggggctgtgcagtgacccaa

SEQ ID NO: 1306 - DNA, 431 bp, Homo sapiens
ttattcttggttacttgtccagacatatgtcaagaaagtgtacaaataaatgtccagttctgaatcaaaatctctaggtagaaccgtgacatctgtatttttataaacttcactggtgagcctaaatacagccacagttgagaaccaccagtaagagaaaatggtagaggcaagaaccctggccaacataacatttaaaagtagacataaagcaataaaacatttttcaggaaaagcggatatatatatatataaaggtcctggatgtaaataaaacagcttgccatggcctagcaactgaatgcaagcaggagtttggatatgaatgatggcaaactttaaacagctaccattccttgaactgtkacgttaagctaaacactaacctatctatacctctctatttatctagatgtgtggatacctacaca

SEQ ID NO: 1307 - DNA, 471 bp, Homo sapiens
ggcatttttctttttaaaaattgctatttatatctataatttgtagtgtagtatagcataatgctatcttacttgttagattyttttcattttttttaaataaatgttgtctgaagactaaattagcaacatcacctatatggtgacactactttgtccaaaaatccccaaagctgccttgttggagagcagggaagctttgtactctaggcaagctgttatttggtacatatagctaaaatctaaaaagcacaacaaagactgtaaactcactcaattttacgtaattatttttgaatactctatggtcccttataaaatgtaaggactttataaatagttattgaatattttcatgatagtaatcatgtgtttcatcacctgccttactcttgagaagattttacaagatctgtcaatctcataggcaataaagaacatagctgatttctgtatatgatttccatcaaa

SEQ ID NO: 1308 - DNA, 1267 bp, Homo sapiens
ttaattaaatagttaagcatatttatttctgattatacttgttcactcaagaacaacatacgtgcatcacaagtaataatgtcgctgaagtgttttctgatgctaaattccaatttctcttgactaacaaacttgcggaaaacccttggtcattattttttttgtattgttctttttgtattgtattttttgttcttgttctgcactaaaggctttttcatacttcttgctgggatcagcttgcatcagaatggttrtttctgtcataaagcttctatgataatttcagtgactactcaattctctcctctatagtcatctaaaatctagttttcaagtagcttttgttcaatgtagaattctggtaacagtataaactcctaaaagccaggcagtcctaggttttaatttcagtttttattagtttccagggatgctataacaaattgccaccttttaactgggtgacttaaaacaacagaaatatgttctttcacagttctggaggtcagaagtccaaaatcaaggtaccaacagtttggttccttctggagagtttgagggggaatctggcccacacctctcttcccagcttctgatggctgccagctaggcttggcattccttggcttgtagatgcatccctccaacctctgcctccatcttcacatcacctctctataactgtgtctaaattcttctgcctttcacttataaacatacctgtcattagatttaggtgttaccctaaatccacgatgatctcattttgggatgtttaacttaattacatctgcaaaaagacctttttttttttttttcaaacaaagtcgtgttcacaggttttatgggtcagacactgacatactttcgtagggccagtattcaacctgttacatggtcccagtggctttggattgtcactgaaattgaaaactgaattcatataagcccaaacaatgaaaggtatttgtcccctattgtaactgtaaggtagggtgaacatcagcactgaatgattcaacaactcaaaaatatcgtaagagatctggatgttttatttctagagacttttaggttcagggagtgcatgtgcaggtttgttacatgcgtaaattgcatgttgctgagatttggtgtatgaattgatcccgtcaccaagatagtgagcatagtaccggatagggttttcaacacacacctccttcctaaccttctgccacaaagagtccccagtgtctatggtttccatctttgtgtccatgtg

SEQ ID NO: 1309 - DNA, 907 bp, Homo sapiens
gcatatatatgaacctatataataaattaactattagagaggtcctagaaccatttcaatttctctcccatcccacaatacttttgtttcttctttttttgttgttttgagagcatatttttagtgggagatgctgttgtttgtgctttgtaatgatgaaaacttctgtctttttgtttttaatcagttcccacacaccgactgtgtggctcaaagtgtaatatggctgtttttcttaaactagtgagcaaatatgagactgtgtatattagccttcatggtcctgctcacacacagcaaagctgatctttagttttatcataccttataattgttcaaacaaaaatggtcagagtgctgtgagtgttgggtttggcaaccaacacagtttcatatggtaatgagatttcccccctgtaggagggctatgaactgctaattagcatctatgacctaatattctctagcaaccaagagtaatagcagtaatttccagttttatgcagagtacaagcctctaatattaccaacacttttgtttcatttataattaactgcacacaattattacagtcaagaaagtaaatcctaatgttcctaggtaataaaaaaaagaaattatgtttgtaaaacttgtatgtgtgtcatgctgactgactggasttctttggaagccctgaggatctttatcaatcaattaatttttctttttgtctataccgatatcacccttaattttaatttgtaattcctagtttactacttaattctttgttctttgcttgaaaactcatatttattagacctgcttttaagttcatgaacaaagaagacatttaaaagctagtaactagggcaaaatgttctgatattagctgacaatgtgtttcaagagaccggtaatgca

SEQ ID NO: 1310 - DNA, 907 bp, Homo sapiens
gcatatatatgaacctatataataaattaactattagagaggtcctagaaccatttcaatttctctcccatcccacaatacttttgtttcttctttttttgttgttttgagagcatatttttagtgggagatgctgttgtttgtgctttgtaatgatgaaaacttctgtctttttgtttttaatcagttcccacacaccgactgtgtggctcaaagtgtaatatggctgtttttcttaaactagtgagcaaatatgagactgtgtatattagccttcatggtcctgctcacacacagcaaagctgatctttagttttatcataccttataattgttcaaacaaaaatggtcagagtgctgtgagtgttgggtttggcaaccaacacagtttcatatggtaatgagatttcccccctgtaggagggctatgaactgctaattagcatctatgacctaatattctctagcaaccaagagtaatagcagtaatttccagttttatgcagagtacaagcctctaatattaccaacacttttgtttcatttataattaactgcacacaattattacagtcaagaaagtaaatcctaatgttcctaggtaataaaaaaaagaaattatgtttgtaaaacttgtatgtgtgtcatgctgactgactggacttctttggaagccctgaggatctttatcaatcaattaatttttctttttgtctataccgatatcacccttaattttaatttgtaattcctagtttactacttaattctttgttctttgcttgaaaactcatatttattagacctgcttttaagttcatgaacraagaagacatttaaaagctagtaactagggcaaaatgttctgatattagctgacaatgtgtttcaagagaccggtaatgca

SEQ ID NO: 1311 - DNA, 2731 bp, Homo sapiens
tttataaagcaagtacaactttaaactagaatcagtttcctaatatagtccaagaaaggacttactagaggttaacctatgctggaaatgatagttggtctaaacaaacaaccagtagttattgagtgtctactctgtttctatcgtaactggttaggcaactggagatagcaaaagaaatctacctgctgaatggatcaatgaaaataaattcagacataagtcttttcccttaagacactcagttataaagacaaagccagaaatcataaaagcacctgggagtaattgaatgttatgatgggcagcacaatcagaatgcaaagcaaggaatgatttagtgtataggctaatcaggtcacaggtgatgaaggagttggtgctagaattaggccttcaagtatgaatggacaatagaaatggaagagaaggtagagtgaacgttatggaagaagcagtaggagtggtcataaacagagcagaaagaatctggaaaaatgaccacacagatggagaggatctacgcaaagagaactgcagaaaatcagtcagaaggctcaatactctgggtgccttcccctggaccaggcaataagaaggaataaaatcagagactaccagttcccgccctcagaaggagataatctacctgaggcacataaatatgaaaaaataaacagagaacctttaaaagccgacatatacgaaaggaccctaaagacagtaggtgcttaggaaaagcgatttagcactagagggtgtgtgtgtgtgtgtttgtgtgtgtgtgtgtgtgtgtgtgtgttgtttttttgttttgagacagggtcatcctgtgttacccaggctagtttctaactcctgggctcaatggattctccccactcagcctcctgagtagctgggactgcaggtgcgcaccactgcacccagcttacttgaggtaaatttttaatattgcactgtttgagcttgaaaagatcctttgtagttgatttggctagagagggagtaaagggactgtacaatataatcttccagttttaagcacatggattcatgcatgatcaaacacgtccttcacatatgagtatatgcacatggctatgatgttttaattgayagcttttgcttgtttgcttttttatactgctcaaagaataattttggctgaccactcttctatttatttaagtcaggaatttttgtgccagaaagatggtatctgttatttgtggcacttgcactacaccctccatttcgcaaggtcagatgtaggtgtatccatgcaagcttttttcctatggccctaagatgttggtggaagaaagctttactgatgtcccaggcaatgaggataatcgagtcaattacaggagctgtgtacagttcttaagagcatggtgctctaggcaagtctgtctcacagggcacagggttaattagtgtttattaagtagttcaaatataaaaaagagagaaccaaatagtagcagggcttagaggtggtagtttcccttttttctggtcctcgctttccttctggcatctaggctttcaggcaaccttctgccaccctgtggttttggctacatctggaatcccttaactattttaaaccctttccatctgtttctagactcaagttcagcaaaagagatgcactggttagactcttgcttggccttctttgaataataactctatttaaagaatgccttcacactgccaagcacaaagctagtatgaagcacgagtggattcacagacattatctcatcagaggagcataaccacactacaaaccaaaggctagagtggttaagtcacttgaccaaggtcacgcaacaaggaagtggcaaagccatggttaaattttaattccttctggctctaatgtccatagtcttttttctctttctgctttcctacatctacagattgaacttgtagtaagaaacttagtgctgtttataaagctctttcacatttgtcagtagtatcaatatcaataagcaacagtgggaaaaacttttgaaattactgttggccaagattggcagcatgaggtttagccaaatgctcactggaaatgtctttattggcaatttcgaagggttgtaaactgttgtattcactccactctctggtttgtgtgggccttaaccaggtaggaaaaggtctacatgttgatggctcacatgtcttctaatgacatgaaaagccaacaagtaaagggactgtgcttccaatgccttcaagactggactcttcttttgggttagtgaaattttccgcagttataataatactgaactcctccgagtctcagcttattcattttctaccatctactctgtttccatcccagaactgttgtaagaatcaagaaataataagaatgtggaaatactctgaatagtttaaagttactgaaatagaaaaataacgttgctaatatttaagccactgatatttttattactcatagttgaaactaattataatcagtttacaatatatgtaaaaaaaccctgaaagcttgaaatgaagcacttttcataaaaggttgaggtttggggatgtaattctttgactgttgtaatatattagtatgcagacaatttttggacagagagtagagattaacccataaatgtctgctacctgctagcagtagatttttgtctgtggtgatatctaataaattgctagtgtttttttctgcaatgca

SEQ ID NO: 1312 - DNA, 2731 bp, Homo sapiens
tttataaagcaagtacaactttaaactagaatcagtttcctaatatagtccaagaaaggacttactagaggttaacctatgctggaaatgatagttggtctaaacaaacaaccagtagttattgagtgtctactctgtttctatcgtaactggttaggcaactggagatagcaaaagaaatctacctgctgaatggatcaatgaaaataaattcagacataagtcttttcccttaagacactcagttataaagacaaagccagaaatcataaaagcacctgggagtaattgaatgttatgatgggcagcacaatcagaatgcaaagcaaggaatgatttagtgtataggctaatcaggtcacaggtgatgaaggagttggtgctagaattaggccttcaagtatgaatggacaatagaaatggaagagaaggtagagtgaacgttatggaagaagcagtaggagtggtcataaacagagcagaaagaatctggaaaaatgaccacacagatggagaggatctacgcaaagagaactgcagaaaatcagtcagaaggctcaatactctgggtgccttcccctggaccaggcaataagaaggaataaaatcagagactaccagttcccgccctcagaaggagataatctacctgaggcacataaatatgaaaaaataaacagagaacctttaaaagccgacatatacgaaaggaccctaaagacagtaggtgcttaggaaaagcgatttagcactagagggtgtgtgtgtgtgtgtttgtgtgtgtgtgtgtgtgtgtgtgtgttgtttttttgttttgagacagggtcatcctgtgttacccaggctagtttctaactcctgggctcaatggattctccccactcagcctcctgagtagctgggactgcaggtgcgcaccactgcacccagcttacttgaggtaaatttttaatattgcactgtttgagcttgaaaagatcctttgtagttgatttggctagagagggagtaaagggactgtacaatataatcttccagttttaagcacatggattcatgcatgatcaaacacgtccttcacatatgagtatatgcacatggctatgatgttttaattgacagcttttgcttgtttgcttttttatactgctcaaagaataattttggctgaccactcttctatttatttaagtcaggaatttttgtgccagaaagatggtatctgttatttgtggcacttgcactacaccctccatttcgcaaggtcagatgtaggtgtatccatgcaagcttttttcctatggccctaagatgttggtggaagaaagctttactgatgtcccaggcaatgaggataatcgagtcaattacaggagctgtgtacagttcttaagagcatggtgctctaggcaagtctgtctcacagggcacagggttaattagtgtttattaagtagttcaaatataaaaaagagagaaccaaatagtagcagggcttagaggtggtagtttcccttttttctggtcctcgctttccttctggcatctaggctttcaggcaaccttctgccaccctgtggttttggctacatctggaatcccttaactattttaaaccctttccatctgtttctagactcaagttcagcaaaagagatgcactggttagactcttgcttggccttctttgaataataactctatttaaagaatgccttcacactgccaagcacaaagctagtatgaagcacgagtggattcacagacattatctcatcagaggagcataaccacactacaaaccaaaggctagagtggttaagtcacttgaccaaggtcacgcaacaaggaagtggcaaagccatggttaaattttaattccttctggctctaatgtccatagtcttttttctctttctgctttcctacatctacagattgaacttgtagtaagaaacttagtgctgtttataaagctctttcacatttgtcagtagtatcaatatcaataagcaacagtgggaaaaacttttgaaattactgttggccaagattggcagcatgaggtttagccaaatgctcactggaaatgtctttattggcaatttcgaagggttgtaaactgttgtattcactccactctctggtttgtgtgggccttaaccaggtaggaaaaggtctacatgttgatggctcacatgtcttctaatgacaygaaaagccaacaagtaaagggactgtgcttccaatgccttcaagactggactcttcttttgggttagtgaaattttccgcagttataataatactgaactcctccgagtctcagcttattcattttctaccatctactctgtttccatcccagaactgttgtaagaatcaagaaataataagaatgtggaaatactctgaatagtttaaagttactgaaatagaaaaataacgttgctaatatttaagccactgatatttttattactcatagttgaaactaattataatcagtttacaatatatgtaaaaaaaccctgaaagcttgaaatgaagcacttttcataaaaggttgaggtttggggatgtaattctttgactgttgtaatatattagtatgcagacaatttttggacagagagtagagattaacccataaatgtctgctacctgctagcagtagatttttgtctgtggtgatatctaataaattgctagtgtttttttctgcaatgca

SEQ ID NO: 1313 - DNA, 572 bp, Homo sapiens
  misc_feature (1)...(572): n = A,T,C or G
aagaaaattaaaatttctaaattttgaccctaaaaacaaccctttgagcccatcagaaaccaaaacaagaggctgttgcctctctcctgtctctgaacataaatgttgcatgtacttttgtttctctgcagaggcacttctctaagccaactctaggtctgtgaaggctttttatggttgcagactgctgtagtcagcaggattgtgaaaaacaggctggaatttaccatacagtcatgatggaaaacatcagargtaatgcagagctgcaggcttgtcaagaaccttgtgtgcctaaagtcagaaagaaaggttgctagtgtcagaatatccaaaagatcatccctaggtcctctctctgggtagtctgccccaggatcatcttgtcccaagtgaaaactgttctttcctcggtgggtaaagtgaaacttgaatccagcatgtgaaggctgaagcggttggctagttgatatttcacacgataatgtgaacagcaataaaaaagactaagtaaactttctcaactctgatcaaataattaaagaaaaataaaaancaagcactcttagatc

SEQ ID NO: 1314 - DNA, 1292 bp, Homo sapiens
ccttattgttttttgttgtttcacttttcacacctgatgtcatatatatttgcttattaaaggttgaatgtcccttatctgaaaatccaaaatgctgcaaaatataaaacttttcaagtaccagtatgatgctcaaataaaatactcattggagcatttcaggttttggattttcagattaaggatgctgaatcagtaagtatgatgcaaatgtccccaartcacaaaaatctgaaacctgaaacacttctggtcccatgcatttgagataagcgataatcaacctacatctcttattctgtcctccttccctccatcagagcagagctgcctcttgtttgttgttggacttttgctgctgggacagtgcctgatatgccctaaacactcagatacttatgacaatgaatagactgagggatggatgaaccattctctaatccaaggaaatacacgttggtccttcttccagcttctccttagaacacatctactgacatattctagaaaggtcataagcaaatggcatccagccctggtaggacaggctttgcttcaatccctccttacaatgaggtagtatattgctaccaattacctacatatgatatttcctctttttttcttgctctactattggttttgtctagatgcatcaaggtatacttaattgacatgtaccatggtcatacaatcttacattcaatctaaatctatcaaaataatttctaagaaaacactgtaagaagaggaggttttagagtgtcaaaactctaatttcaattgtctggggccctgagctccaattcaaaacaactgactagtttacatttactgatagaaaagtgaaaagaactagaattcattaagcctccatcagcaacaagcattgtgctcaaagcttgttaaatgctatctcggcaaatctatggtatctctgtaaatcatcgcacgatttcaatcatataaatgaagaaaatgatgcttggggtggctttaaaaacttagccaaaattatagaattgagaatctgacacctatctgaatccaaaattcattctccttctataccaaagacataacattcacaccattcaagggaaaaatcagtcctttttccttctcatgcacaagcccatgactaatatttggctaaggattttcttgaggggtcagaagagttctaaagaggtattctcaagcatgaaatccacagcctctgaaactgaacttatctagcatgcacagggatttgatcgcttttcatgggaaattacttctagcttaggaaa

SEQ ID NO: 1315 - DNA, 577 bp, Homo sapiens
  misc_feature (1)...(577): n = A,T,C or G
ttaattttaatcttaccctttattctagtttatcttaaactcatttcttatgtttcagaaaacgctgttttaatttatgaaaaatgcaaagtagrtaatttctaaaaatatcttcagtttcttatggttaatcgttttttgtgcataccctgtatccctaaggcagtacttcctttctttatgttacttaatattgttttacttgtccttgaaaaagaagaaatctgtccaggttttgtgttaggaaaaaatatttaatttctctaagttctctgtacttttcattaggtatggagtaaatatctcatctcttaaactgaaagggtttgtttttattagacatctactagccagatttccaaggtcaatgaatcattggtttagaatgactctgcttgattntctcttgtctttcagccgaacttactgactcagaagggtgtttttttccctgaatcatttgagaacaactgcagttctctgacaagggtagtacttgaacagtaacaaaaccaaaggcactgatttccttgcctattctgttatttcacctctcttttttaaaggcttcgcatca

SEQ ID NO: 1316 - DNA, 1454 bp, Homo sapiens
  misc_feature (1)...(1454): n = A,T,C or G
gatctctttacagaatcagtacaaagcactcgggtactactttgaagaaagtggataatataaacttagctaatttacttagttctagaaatttggagaatttgtgctttctgttgttgaatatatgataaatgtctgtagaaaaaaatttagctgatagagtgataccctctagttcttgagatgaacttgctggctgccttttataattagaaactattttttaccatagctagctggagccctgggcagcactcgcttgacataaccttgtttggtggtgagtaatgtctaaaacttcagttgaaaggtttttgtgacattatgagctattagtgggagtcattccacttgtgtatatgtattaaagttaatgcctaatattaaccagaggcatatgttaactgtaacccaaattcaagaaaactcacaataaagtatggacagtttactttactaggtcaatgaagaaagacacaattgtgacactaaagatgaatttgatacttcatgtgaatgttttctgtcattttgtcttacacagagtgctagccagcccttcagctagaattggacatcagcctattgttgagcattagctatgacacttgcacttggcagccagctgaaaacattgtgtgtgtagcttgcaggttagagcttcttttcttaagctcaggggagccataaaacccttgaagctgcatgtagactagtacacttgtgggtctgtgcattttcaggagtgttggtctttggatattgagcttcttgaagaagtctaagagctgataaaacttaagagctgtctagacrgatgccttttaccaagcaagaattaggatgggtcaagtgaagggctggaagaattactaccatatgcatagatcatgcagagagggcctcgagatggtccatgaaaaatctcatactttgtaactaagatgtgaacacacagtttattttatgtaatttcttttgatgtggtataaaaaaatttaagtgtggtagtatccaaggtggccctcaattattctcacctgctgttattcatgctcttatatagtccccttgcacactgaatcaaggctgggctgtgtactcattaaatatggaaaaagtgaagtgaaaatatgtaactttcagaggctaaatcataaaggacattgcagtttacaccttgttcattttcttggatcacccaatctggagaaaaccagctgatgtgtcatgaaacactcaagcagatctatggagaggtccacaaggtgaagggcttagatttcgtgcctatatccagcacaaatttgctagccatcggagtgagccatctgggaagcacatcttccagccccagtcaagccttcagatgatggtatcctggccaatatcttaactgcaaactcatgagagattctgagccaggactgcccagtgctgctcctcccaggtnc

SEQ ID NO: 1317 - DNA, 1297 bp, Homo sapiens
ttccccctcatttgtcttttttttttttaagacggagtttcgctctttgttgcccaggctggagtgcactggcatgatctcggctgactccaacatccacctcccagcttcaagcgattctcctgtctcagcctactgagtagctgggattaccggcacctgccaccatgcccggctaatttttgtatttttagtagagacagggtttcaccatgttggccaagctggtctcaaactcctgatacacccgccttggcctcccaacgtgctgggactacaggtgtgagccacccagcctggcccatttgtctatttttttaatctatctatctgtttatttattatcaagcggactcatggattcttattttattcattgttacaagctaagttgatatgagttgagtttctgtcacttaaaatcagaatattcctgaaaagccttcaggaacttctgagaaaagtgacacagtttccctgggcattgcactcaagaggtccttataatcttcacacctgccaaagtgcttcctgatgctgccattaaatcccttctggcccactctacaagtccaaattctctgacaatcaggctcaaagaagacaaatgtggccagtaaatggcccctagatctttgtggagcaatcatgtgagaactgagtatggctttaggaaggtaaggtacttcttgctatatccaaggttcttctcactatcttctgtcccttctcagcagcttcgctcaaagagctgggccagctgccgactcctcttccaatgtttccaaccatcctcagagcttctcctcattcccctcttatgcttagctatacctctggctctatttgtttcaaatgttgagtattatgcctaaaaagactgctgatgatggacttgatattttttgtttgcccctccagaaccattcttcaaccttcctcacccagctcaatgactgaactgaactgcatcaaccataccaacagctggattcagccaacggtgagtactggcaagaaataagaaagcaagagagtactkgggtatcattatcccaaatttcaccctttccagctcaccatgggtgtctatactcctctatcaaatcctttttccatgtagccatcttccctgagttctggaaaccctagttttcctctcttcaggtcataagtatggccagctctggggtatgccaccattgccttttggtctatctgaacaccactgcatgttggtttcacttaaccccgagtatacatttgaaaatatttccttaattaaactttccttgat

SEQ ID NO: 1318 - DNA, 1089 bp, Homo sapiens
gtagagagagcaaagtgcccagcagccttaaaataagatgccggttgtcattgcagacccttgtatctcacgaggaatgaacaaggggagcctcagaatgctgctgctggtccatggccctgagctgggtcggggaaagaggcagacatggcttggactaaagagctgggratgacatgagatacacagggatcttcctgatgcagtgggaaacaatttgcttttatttctgaaataaaccctcaagtgaccttgaggcttgagagtgccttttggaaacgatctgtgatacaaaagtcctggcccaaatgggaggggctccagtgtgcaggtgacatcaagggcataggctttggggcctgacagtggagctggcatcccagctctgtctttaatgtctcactctgcctaaattccatcatcttaaacaggggctaataacgataacacttgtcacatagagtccctttgagaattacatgaagaatgtaaaaagtttagcacagggcctggcatctagcaaacactcaataaatcctggagctccaggacaggaatgggagagagacatttctctctaagctttgttatactgcttgaaattttattttatttattttattattattattattctttgcagacaggatctcactctatagctcaggatggaatgcaatggcacattcatagctcactgcaggcttgacctccctggcacaagtgatcctcccacctcagcctcctgagtagctgagactacaggcatgcaccaccatatccagataattttttaaaattttttcttagggacaggtctctctatgttgccagggctgctctcggactcctgggctcaagtgatcttcccagcttggcctctcaaagtgctgggattacaggcatgagccaccacacccagcttgaaatttttagataaagtgtctgtatcacctgttttaaaaattttaatttaaaaagtcagtacctttttaaatgacaaataataattatacctattcatggggtacacagtgatgttttcgtacatataatgtatggtgatcagatcagggtcattagcattca

SEQ ID NO: 1319 - DNA, 1089 bp, Homo sapiens
gtagagagagcaaagtgcccagcagccttaaaataagatgccggttgtcattgcagacccttgtatctcacgaggaatgaacaaggggagcctcagaatgctgctgctggtccatggccctgagctgggtcggggaaagaggcagacatggcttggactaaagagctgggaatgacatgagatacacagggatcttcctgatgcagtgggaaacaatttgcttttatttctgaaataaaccctcaagtgaccttgaggcttgagagtgccttttggaaacgatctgtgatacaaaagtcctggcccaaatgggaggggctccagtgtgcaggtgacatcaagggcataggctttggggcctgacagtggagctggcatcccagctctgtctttaatgtctcactctgcctaaattccatcatcttaaacaggggctaataacgataacacttgtcacatagagtccctttgagaattacatgaagaatgtaaaaagtttagcacagggcctggcatctagcaaacactcaataaatcctggagctccaggacaggaatgggagagagacatttctctctaagctttgttatactgcttgaaattttattttatttattttattattattattattctttgcagacaggatctcactctatagctcaggatggaatgcaatggcacattcatagctcactgcaggcttgacctccctggcacaagtgatcctcccacctcagcctcctgagtagctgagactacaggcatgcaccaccatatccagataattttttaaaattttttcttagggacaggtctctctatgttgccagggctgctctcggactcctgggctcaagtgatcttcccarcttggcctctcaaagtgctgggattacaggcatgagccaccacacccagcttgaaatttttagataaagtgtctgtatcacctgttttaaaaattttaatttaaaaagtcagtacctttttaaatgacaaataataattatacctattcatggggtacacagtgatgttttcgtacatataatgtatggtgatcagatcagggtcattagcattca

SEQ ID NO: 1320 - DNA, 1181 bp, Homo sapiens
gcatcttctcatttgggcctctcaactcaccctagaagttagtaccattgtgcccatttgagaggtgcgaacactgaggctcagcaactgacttgtcagggtcatatgaccagtcagcagtagcatctcgattcaaacccagattgtcgtcactcagattcagactctcaactctacacagttctgccttcccaagaccagccacctctcttaaaagtagatttttaaaagtcaatcctctgatttctttctaagtatacatatttttttcctatcattcataaagcatttgtttcaagcaaaaaaactgaaaacctcgctgttcaagtagaaaatccagctatggctctataattctgaaattcccgttccaggaaatgtatactgttgactttttcaaaagattagtgagctgtgagccctctcctgagaggattacatcttacttcagggcgaccaggtggctcctgatgttctgaaatactcgaacttggccacacactctggaattttaaattagttaccagtatttactaacaaaggaaaacaacccatgtatataaaacacatacacccgcacacaaacaccctttattggttgccagataatgatttgtctgaagtgtgttgtctgagttggtgtgcgaatttcgtattataaaagcaaatgacaatagcattccaacagggacctaggccaaagtcaagaggaaagaatatccaaacgtagcattagcattccagaagtcaaatgactattattatgtcagtggggcaaaagcctatgcccattgagctgtttgtacatgaygcagtcatattgcactaacagacatttcactaataatgaaaaccagtaggaggctgagcgtaaagctggatgttatgactcgcgactgtagattacctgaatccagtaaatttactgtctcccacatctattgttctttttacaatattgttccacctctgcctcaaacaatacaatggaaaaggcgttatggatggcacatgtacaaagagtcaaacacctgccctatatttccaactttcaccttgcttcgcaaattatagcacaatgttacagcaacagcaaattttagtcttacagctgcccacttctgctgtgcaaaggacaagattaggaggattttggaaagaaagcaaaaaaaaaaatccac

SEQ ID NO: 1321 - DNA, 2346 bp, Homo sapiens
acaatttttaaaagagtcagacatggattatcctggtgatgggagttgagcataatgatgtgctaggaagtgagggtgccccagacactacctcatcagctacaggcttgttggggtttctagcgccatcaggcctggtgtaggattgcagcaatcagcctggcatggttgtgcggacaacctgagctctcatagcccagctctgaacctctgacatcaaaggtcacccctgttggaaagctgtgcaccaagacacctcagggatgagctggcctcccgcaggagcagcctgcatcagatgctcacagatcaggccccagtcactggtccaatagatcatgcctggaatcacagtgggggggtccccaagtacacacacagcctgagtgctaacaattggaagcagagagagcctcttggggcccctttcctcagaacgtgctgtgcgcatggcaggcccttggagcatcacaaatcctttctgcagtgaggctccttcatttcatctcccttgggaagagctatggggccactgaaggattctggtttgtctgctttcagaactaagtccttctttattgctgagtaaattgcaagccagttgctgctagacagactacaccttgaagctcaagatgcatggaagtgaatatgctgtttcgtctccatattcattatatgaatagtagtgactgtttccagtcactatgctgctgtgtttaggaaagaaatgtaccatctttcaagtagaaagctgaagctgctacttctcatgctgtcactgctgcttggaatgttgccctctccgtctctcctttccctgcttgcctccacagactcctattctctttcagggtactttgctaaagttgaaaaacaagtgacaacatgctatgcaaaccaagatttcgatattggacatgtactcacacataccaggcataggacragaagaacatacatgcaccaaagtgggatttttttctatgcacttttctacattttgcatatttcttccactgaacatatattaattttatgaacatggaagagagcacccctcatttcctccatgaaggcttctcccacccccacagccagcaaatcagtccatcttctgacctctaacttgtgcatgcaccccagtaggttgtaattggctttgtatttcttcctattttctcactagacatgagtcgtcgctcaaaggggtttggcttgtcctctcccaggcacactcaccctcagcttctgaccccacgcctgggacaaacaggccctcagtgaatgatttatgaaactaaactaggtcactgcaaagcccaacctgaagactgcttcaacctgaatggaaggaaatggtaaactctcaccttccaggaatatccctgctggaatataaattacacaatcctgtcatggacagacctcattaatttcaaccatttcgtctgttcaaccattgtagagatgagaaaactgaggcctagagaggtctagggattttcccaaatcacacatcaagtaagcggtggagccaaagaggaatccaggttcttcaagtcttaatattttccctctcaccaggtaagagtacaacagagaaagtataaggtgccaaagaatgatagtaagagttagcatttactgaattgagaactttcagtgtgccaaccccttttctaggcctttcttgcatattacctcatttaagctatttaacatgtactgtcatcattctcattttactagtggcaaaactgaggttcagagaggttgggtaactctttcaaggttgcaaggctagtccagcctcaataatccctagcccaagtccctgtgctattagcggctaatgaaacccaagggccagagctgagcaacgtggaagttctgcctgcaaggaccgcaccgggcctcgaggctatgttaggattaggctgataacaatcagatccagggatagttggagagcaaaaggctgtggcaccaaaacagatgggtcagaatcacatgtttgtctgacagaaaaaaggctgaggggagccaattaaagctcagccacatctcacacgcctttcttcttggtgtctgtctctgtttcgttattttgcttacctttccttacagcttcttcgttggcttctctcctcctctcccactaatgccacagcaggtcctgagatctgctggactcttcttgcttctgtgctaggacagtggcctcttgtatagtgtaccttcctagggatgaggctcttctgcccttccatctctcacttctttgcttagccacaattcctttgttctttttctgcttctgacttaaatcctcatctgaggatg

SEQ ID NO: 1322 - DNA, 1261 bp, Homo sapiens
tctctccctaaaggattgttgtgatataaatagcatgttgtacgtaaagtatgtagcaaattactgacccaccgtaagcccttaataaatgatagagaattgttattgtgcatatactgttgtcacttcaaaaatgaggctccagggcaggcctgtgacagtccttttccttcttaatatcacttaataacagagttattaggtaagaggactacagggtcttaacttcatatggtgaccaattcgtagaaggtggtagaaaatagatgttggttcaatataaagaagacatttctaaccttcatacatgccaaagatgaagttagtatattgcctgcaaccaaaggcatgcaaatagtacatactatgatcataattagtattgccattattaatacaccttagagttactttcatcaaaccagtatcagagacttgaatctctttcatagcatctctatcatattgtattgtattgtgtcatattaatgttaagtctcatattatagtatattatcgtaagactaacagcagctaccatttataagttcctaggtcaggccctgtggcaagcattttcatgcattatctcatctatcctcatagccactctatgggatgggcgctggtctcatccctattttataagtagtaaaactgagactcagctgaggctccggagttaggtaaccacatgataataataataagagatgcagatacaggtttgaacgtgggcaatgcctcctggttcatcctgctatgttctgagtacttactaagtgctaggcattatgccaaggacaagattcaccggcactgtgtctgasccctcccaacaatcccatggttgtctgcctcattttgcagatgagaaaatgaaggttgagagcatgcagtgaggcctgacttcagtttcccaatctgtagaacacatcatccacaaagccatgctcctcttggcctctgggcttttaccctcagcagtgtccctcaagccccctaacccatctcgcggctatctcccacctcatcgcagccggagcaccggggccgcagactctcgcagtaatggcggccgcaccagggtgcaccatccttccagaagtagatgaggtccaccagcggctcggagcacttggcacacacaaagcaggtggggtgccactgcttgttgtagcctgccctgtccgagtagaccacggggctgtcaggaggggccgctcccttgcagagctcgcagacctggaaggatggggaa

SEQ ID NO: 1323 - DNA, 547 bp, Homo sapiens
tttttctgaaaattcaccattgaaagtgaaagcatttaaactgattttgtgctattcaaaaaaagaggctttcatttaatctatttaaaagaaacacaattactttttggtagaaagctgtctaaattcataatttttactttggtayagggaggagcagagaggggactagaatgatgcttgggggccgggcacggtggctggcacctgtaaacccagcattttgggaggccgaggcaggcagatcatctgaagtcaggagttcgagaccagcctgaccaacatggtgaaaccccgtctctactaaaaataaaaaattagcgaagagtggtggcatgtgcctgtaatcccagctactcgggaggctgaggcaggagaattgcttgaacacgggaggcaggggttgtagtgagctgagatcacaccactgcactccagcctgggcaacagagcaaaactccatctcaaaaaaaagaaaaaagaatgatgcttgtggggatgcaactattcaggggctttggaaatagccagatgatcagctgggcaa

SEQ ID NO: 1324 - DNA, 547 bp, Homo sapiens
tttttctgaaaattcaccattgaaagtgaaagcatttaaactgattttgtgctattcaaaaaaagaggctttcatttaatctatttaaaagaaacacaattactttttggtagaaagctgtctaaattcataatttttactttggtacagggaggagcagagaggggactagaatgatgcttgggggccgggcacggtggctggcacctgtaaacccagcattttgggaggccgaggcaggcagatcatctgaagtcaggagttcgagaccagcctgaccaacatggtgaaaccccgtctctactaaaaatamaaaattagcgaagagtggtggcatgtgcctgtaatcccagctactcgggaggctgaggcaggagaattgcttgaacacgggaggcaggggttgtagtgagctgagatcacaccactgcactccagcctgggcaacagagcaaaactccatctcaaaaaaaagaaaaaagaatgatgcttgtggggatgcaactattcaggggctttggaaatagccagatgatcagctgggcaa

SEQ ID NO: 1325 - DNA, 547 bp, Homo sapiens
tttttctgaaaattcaccattgaaagtgaaagcatttaaactgattttgtgctattcaaaaaaagaggctttcatttaatctatttaaaagaaacacaattactttttggtagaaagctgtctaaattcataatttttactttggtacagggaggagcagagaggggactagaatgatgcttgggggccgggcacggtggctggcacctgtaaacccagcattttgggaggccgaggcaggcagatcatctgaagtcaggagttcgagaccagcctgaccaacatggtgaaaccccgtctctactaaaaataaaaaattagcgaagagtggtggcatgtrcctgtaatcccagctactcgggaggctgaggcaggagaattgcttgaacacgggaggcaggggttgtagtgagctgagatcacaccactgcactccagcctgggcaacagagcaaaactccatctcaaaaaaaagaaaaaagaatgatgcttgtggggatgcaactattcaggggctttggaaatagccagatgatcagctgggcaa

SEQ ID NO: 1326 - DNA, 561 bp, Homo sapiens
acgttggccagactggtctcaaactcctgatctcaggtgattcgccctcctcgacctcccaaaatgctgggattacaggtgtgarccactgcgccaggccaacagattcatttttcaggccacaggtttcaaactcattagtgggttaagaaaccattttagtaacagcaaccgacattttgttttaacttaaatacaatggcacagaattgaaaacaccaaagtgcattatatgtaataagaatattatttcatgtttaaactgttgtttgtcacatattcacctatatgagtactgggtcacaacctaagctgtgtttcttacagcaggtactggtcacaaattgaactgctccaggtgaactatcctactgtaaactgggagagtatgggttccctacttgaacataggttccctcaactgttaaatgaaggtagagtaaaggtgcaggctagctgagatattctggaaaaactctctagctttatgattcactgagttttagaataaagagaaaaatccgcttttatttctaacgtcttggatagccacccaattat

SEQ ID NO: 1327 - DNA, 561 bp, Homo sapiens
acgttggccagactggtctcaaactcctgatctcaggtgattcgccctcctcgacctcccaaaatgctgggattacaggtgtgaaccactgcgccaggccaacagattcatttttcaggccacaggtttcaaactcattagtgggttaagaaaccattttagtaacagcaaccgacattttgttttaacttaaatacaatggcacagaattgaaaacaccaaagtgcattatatgtaataagaatattatttcatgtttaaactgttgtttgtcacatattcacctatatgagtactgggtcacaacctaagctgtgtttcttacagcaggtactggtcacaaattgaactgctccaggtgaactatcctactgtaaactgggagagtatgggttccctacttgaacataggttccctcaactgttaaatgaaggtagagtaaaggkgcaggctagctgagatattctggaaaaactctctagctttatgattcactgagttttagaataaagagaaaaatccgcttttatttctaacgtcttggatagccacccaattat

SEQ ID NO: 1328 - DNA, 561 bp, Homo sapiens
acgttggccagactggtctcaaactcctgatctcaggtgattcgccctcctcgacctcccaaaatgctgggattacaggtgtgaaccactgcgccaggccaacagattcatttttcaggccacaggtttcaaactcattagtgggttaagaaaccattttagtaacagcaaccgacattttgttttaacttaaatacaatggcacagaattgaaaacaccaaagtgcattatatgtaataagaatattatttcatgtttaaactgttgtttgtcacatattcacctatatgagtactgggtcacaacctaagctgtgtttcttacagcaggtactggtcacaaattgaactgctccaggtgaactatcctactgtaaactgggagagtatgggttccctacttgaacataggttccctcaactgttaaatgaaggtagagtaaaggtgcaggctagctgagatattctggaaaaactctctagctttatgattcactgagttttagaataaagagaaraatccgcttttatttctaacgtcttggatagccacccaattat

SEQ ID NO: 1329 - DNA, 1124 bp, Homo sapiens
tgcataggttataagcaaacactatgcccttttatatcagagacttaggcattgaaggatttggtatctgcagggggtcctggaaccaatccccctcagatactsagggatgactgtaatttcaaagccatactgagaaaaagtcagatgcaggctctgtgacttgtttttggccatgaccctctcccctctggcaatccaggcaagtctgtggactccttcctggaataatatttttaggcaaataaaattatgattataaaagaaggcagatatgtatcaatataacaacgtgtgtgtgtgtgtgtgtgtgtgtgtgtgtgtgtgtgagagagagagagagagagaaagagagagagagagagagagagagaggagaagggagagagaaattagctcaggactgttctctgctgtcattttgaaggggagatcaccctctgtggtgttgtgaggcagctgtaacaactgaaatgtgccatagggccaggcgcggcggctcatgcctgtaatcctagcactttgggaggccgagacgggtggatcacctgaggtaaggaattcgagaccagcttggccaacatggtgaaaccccatctctactaaaaatacaaaaaaaaaaaaaaattagccgggcgtggtggcacatgcctgtagtcccagctacttgggaggttgaggcaggagaatcgcttgaactcaggagagggaggttgcagtgagccaagatcgcaccactgcactccagcctggatgacagagcaagactccgtctcaaaaaaaaaaaaaaaagaagaagagaaaaagaaatgtgccataaaaatacctgtgatttctaatgatgacaaagtcacaagcagtgctaatatcactgtgacctggtgaccttcatacaggaaggaaatattgagtacaattaggaactaatttcacaggccccccccaaatttcgtctgtggatcccagatgaactcctgccattgggcaagagaattgggaacatagttgtgcaaaaactgctactcactgttttattcagcgattagaatggctaggagcaaaagaggcagatctgggcgttctgcatgatgcaatctttagactgctttaaatacctttaatgc

SEQ ID NO: 1330 - DNA, 1124 bp, Homo sapiens
tgcataggttataagcaaacactatgcccttttatatcagagacttaggcattgaaggatttggtatctgcagggggtcctggaaccaatccccctcagatactcagggatgactgtaatttcaaagccatactgagaaaaagtcagatgcaggctctgtgacttgtttttggccatgaccctctcccctctggcaatccaggcaagtctgtggactccttcytggaataatatttttaggcaaataaaattatgattataaaagaaggcagatatgtatcaatataacaacgtgtgtgtgtgtgtgtgtgtgtgtgtgtgtgtgtgtgagagagagagagagagagaaagagagagagagagagagagagagaggagaagggagagagaaattagctcaggactgttctctgctgtcattttgaaggggagatcaccctctgtggtgttgtgaggcagctgtaacaactgaaatgtgccatagggccaggcgcggcggctcatgcctgtaatcctagcactttgggaggccgagacgggtggatcacctgaggtaaggaattcgagaccagcttggccaacatggtgaaaccccatctctactaaaaatacaaaaaaaaaaaaaaattagccgggcgtggtggcacatgcctgtagtcccagctacttgggaggttgaggcaggagaatcgcttgaactcaggagagggaggttgcagtgagccaagatcgcaccactgcactccagcctggatgacagagcaagactccgtctcaaaaaaaaaaaaaaaagaagaagagaaaaagaaatgtgccataaaaatacctgtgatttctaatgatgacaaagtcacaagcagtgctaatatcactgtgacctggtgaccttcatacaggaaggaaatattgagtacaattaggaactaatttcacaggccccccccaaatttcgtctgtggatcccagatgaactcctgccattgggcaagagaattgggaacatagttgtgcaaaaactgctactcactgttttattcagcgattagaatggctaggagcaaaagaggcagatctgggcgttctgcatgatgcaatctttagactgctttaaatacctttaatgc

SEQ ID NO: 1331 - DNA, 1124 bp, Homo sapiens
tgcataggttataagcaaacactatgcccttttatatcagagacttaggcattgaaggatttggtatctgcagggggtcctggaaccaatccccctcagatactcagggatgactgtaatttcaaagccatactgagaaaaagtcagatgcaggctctgtgacttgtttttggccatgaccctctcccctctggcaatccaggcaagtctgtggactccttcctggaataatatttttaggcaaataaaattatgattataaaagaaggcagatatgtatcaatataacaacgtgtgtgtgtgtgtgtgtgtgtgtgtgtgtgtgtgtgagagagagagagagagagaaagagagagagagagagagagagagaggagaagggagagagaaattagctcaggactgttctctgctgtcattttgaaggggagatcaccctctgtggtgttgtgaggcagctgtaacaactgaaatgtgccatagggccaggcgcggcggctcatgcctgtaatcctagcactttgggaggccgagacgggtggatcacctgaggtaaggaattcgagaccagcttggccaacatggtgaaaccccatctctactaaaaatacaaaaaaaaaaaaaaattagccgggcgtggtggcacatgcctgtagtcccagctacttgggaggttgaggcaggagaatcgcttgaactcaggagagggaggttgcagtgagccaagatcgcaccactgcactccagcctggatgacagagcaagactccgtctcaaaaaaaaaaaaaaaagaagaagagaaaaagaaatgtgccataaaaatacctgtgatttctaatgatgacaaagtcacaagcagtgctaatatcactgtgacctggtgaccttcatacaggaaggaaatattgagtacaattaggaactaatttcacaggccccccccaaatttcrtctgtggatcccagatgaactcctgccattgggcaagagaattgggaacatagttgtgcaaaaactgctactcactgttttattcagcgattagaatggctaggagcaaaagaggcagatctgggcgttctgcatgatgcaatctttagactgctttaaatacctttaatgc

SEQ ID NO: 1332 - DNA, 1281 bp, Homo sapiens
cggtgttctcaactagggacaattttgcgccccgtaccccactcccccagggacatttggtaatgtctggagacacgtttggttgtcacagctgtggacgaacggcatctggtgctaatggcatctagggggtaaaagccagagatgctgccaaacatcccacaatgtacaggacagcccccacaacaaagaacaaactggtcccaaatgtcagcagggctgggattgagaagcctttctctagagctgtggttcttaactctcagatgtttcgagaatctgaaggaagctgtggacccacttcctaaaggaagtgtgcatgctagcaacactgtgcaaacaacgccggggcttcgcagacctgcagagaccagttcgtgggctcccgagtcccagatgccacagcatcactgtgattttttaaattaagcttccctatattgaggcaggcctgcatcgcagtttgttttacatgtattataycagctcactccttgaaaccatcctaggaactgagtatgattatatactttacagataggggaatggtggctgcctgaagttagataactttccaaagccacttaattagtggtggcatagccggggttcagaactaacccatttgatgggttcactgcccacccatcaaaacccacaggtctgagaacaagaaggacatcagtgtcccagctgcacaaatggtcagcagcagaatttccagatgggtgtccagggcctgccaggagatattcctgctgataggagttctctgctgtccctgcggactcccattcacactacctaatgggccccagtacaaatgctcactggctgtgcaggcacattcctgataacaaaatagcaccacgagaagtcttaaagtagccactgtactgccatgttcagtttgggactgtacactggagtctgagaaggatgatgagaaaaccccatgtacaatatggccacgtcacctctacttttggaagggaaaaggggggtatgccaatagactctgggaagtgaagaaccctggtaaggaaatgccaacctcctcatccttctgaagggggtctgagatgtttacaattcactgggaaagaacccagggaggctggaggtctgggccctgacaagagtctcataggcctttctcctccaactgttcaacaggctgccccatcactccctctcctcacccgctcccaaggatgggctgaagagaaagaaatgaggctacaaagggtctgctgtttggagttaaggatgccacagaaa

SEQ ID NO: 1333 - DNA, 1280 bp, Homo sapiens
catctgattccccttttctgagaaagtctcttattcagtgttaacaatccaatgatatcttgtgaccttttctatgcaaatatgaacaatttgaggctatcacagtctctcatgagttgctccttaaagggacattcttaattgcttttataatctcaattttattttaacctccattacctataatatcttacttgaagcttgaaattaacttttctttcttcagcattttatcctttcctatttcggtaagcaatgattttacttttccaccaaagttttagggggtttcatccagcatagacatgattaattcactgtgataaagtatatctttattaccctattctattaatcacattcactgaaagagaagcatgtctttcttttctatggagacttttcaaagatatactgtccttttgcatatagaagtaaaactaatggtgttataaaaatagtacaaaaagtctttagatattttcttggtaattaggctgttttataccctctcacttaatttcttgttaactcaatccttttgtaatcatcagatgggcatctgttaagtgactgacctagaaatcaaagttgtaaccttagtctactcagaataatactctaaacaataatgggaaccccatttaggctataatttgagaaagagaataagatcagttaacaaatgtaacatcaccttttagattagttaacaaagataacatcgccattagattttcgaagataacaccatctttttttgatgttaacaaagataacatcatcattagattttcttttctacctaagagtttctcttttcttttgtttgtttgtttgtttctttttttttttattattatatggagtctggctctgttgcccaggctggattgcagtgacatgatctcggctcacaacaacctctgcccccgggttcaagcgattctcctgcctcagcctcccgagtagctgggaytacaggagagtgccaccacgccctacaggagagtgccaccacgcccactaatatatatatatatatatatattttttttttttgtatctttagtagagacagggcttcaccatgttggccaggctggtctcagacctcgaactcctgacctcgtggtccgcccacctcagcctcccaaagtcctgggattacagacatgagccactgtgcttggccctaagtgtttctttgaaacaggctaaatatgccatcccctccttaaagttaaatgtatttaaatatgttcctattactactgatt

SEQ ID NO: 1334 - DNA, 1280 bp, Homo sapiens
catctgattccccttttctgagaaagtctcttattcagtgttaacaatccaatgatatcttgtgaccttttctatgcaaatatgaacaatttgaggctatcacagtctctcatgagttgctccttaaagggacattcttaattgcttttataatctcaattttattttaacctccattacctataatatcttacttgaagcttgaaattaacttttctttcttcagcattttatcctttcctatttcggtaagcaatgattttacttttccaccaaagttttagggggtttcatccagcatagacatgattaattcactgtgataaagtatatctttattaccctattctattaatcacattcactgaaagagaagcatgtctttcttttctatggagacttttcaaagatatactgtccttttgcatatagaagtaaaactaatggtgttataaaaatagtacaaaaagtctttagatattttcttggtaattaggctgttttataccctctcacttaatttcttgttaactcaatccttttgtaatcatcagatgggcatctgttaagtgactgacctagaaatcaaagttgtaaccttagtctactcagaataatactctaaacaataatgggaaccccatttaggctataatttgagaaagagaataagatcagttaacaaatgtaacatcaccttttagattagttaacaaagataacatcgccattagattttcgaagataacaccatctttttttgatgttaacaaagataacatcatcattagattttcttttctacctaagagtttctcttttcttttgtttgtttgtttgtttctttttttttttattattatatggagtctggctctgttgcccaggctggattgcagtgacatgatctcggctcacaacaacctctgcccccgggttcaagcgattctcctgcctcagcctcccgagtagctgggattacaggagagtgccaccacgccctacaggagagtgccaccacgcccactaatatatatatatatatatatwttttttttttttgtatctttagtagagacagggcttcaccatgttggccaggctggtctcagacctcgaactcctgacctcgtggtccgcccacctcagcctcccaaagtcctgggattacagacatgagccactgtgcttggccctaagtgtttctttgaaacaggctaaatatgccatcccctccttaaagttaaatgtatttaaatatgttcctattactactgatt

SEQ ID NO: 1335 - DNA, 740 bp, Homo sapiens
atatggaccgaatagggctgggtggaaccctgctgcactctgaawcatagaccaaagttgtggtttaggagcagtatcataaaatctggcactttccaaggcatattttttcccattcaccttctagggaaaaaagtaaacctgaaatttaattttttatgtcaggttggatgaagaagaaccagaacttctgctttatatgatctcagtttaccagagatctaaattttggtatgagagcatatagattaaaatgcctactaatttccatcaaatgaatttctttcccatccagtttcccagtgcaagaacatatgggaaagccacaattttagaggaagtattttattaattaaatagcacattctatacctaaaatatacctgaccatggcagctcctcatacagtaatacctcttatgaatgtcctaaattttacttctttattacctttatgctcaagtccctgaatatagatttttaccttcctaagaaggtgatctgataagaatgtgcttcaaaattctagcaccatgctgggcaaatcttggatagtcctgttgtttgtcaatcttgagacctctttcattttttaaggcaattaatcacctgcggtgatactaaggtttgcttggaatttttacattttgagttgcttctttgatagcatcatccagattttattaaatgggaatcaaataaacaattaaaacagctaatcgtgccatctccctctcttt

SEQ ID NO: 1336 - DNA, 740 bp, Homo sapiens
atatggaccgaatagggctgggtggaaccctgctgcactctgaaacatagaccaaagttgtggtttaggagcagtatcataaaatctggcactttccaaggcatattttttcccattcaccttctagggaaaaaagtaaacctgaaatttaattttttatgtcaggttggatgaagaagaaccagaacttctgctttatatgatctcagtttaccagagatctaaattttggtatgagagcatatagattaaaatgcctactaatttccatcaaatgaatttctttcccatccagtttcccagtgcaagaacayatgggaaagccacaattttagaggaagtattttattaattaaatagcacattctatacctaaaatatacctgaccatggcagctcctcatacagtaatacctcttatgaatgtcctaaattttacttctttattacctttatgctcaagtccctgaatatagatttttaccttcctaagaaggtgatctgataagaatgtgcttcaaaattctagcaccatgctgggcaaatcttggatagtcctgttgtttgtcaatcttgagacctctttcattttttaaggcaattaatcacctgcggtgatactaaggtttgcttggaatttttacattttgagttgcttctttgatagcatcatccagattttattaaatgggaatcaaataaacaattaaaacagctaatcgtgccatctccctctcttt

SEQ ID NO: 1337 - DNA, 1334 bp, Homo sapiens
tgttgaatttatactattttgatgaatatatatatatacatcaaaattattgaaataatgaaaattaaatatttgttgtattgatgcaaaatttcatttgaaaactgcattttttcaggctggtgatagcagatctgtaatataatatctaacaaatggatagttctttgcaaatatttgttcagtgctaagcacttggaaatttgggcatgrcgatttcataaaattcaagctgctatttatgattgtttgaattatacagtgcgatggatggcagcaattaaccaagaaaatatgaagtgaattatccaaataattaaatcagaggctaagctgtaattacatattgaaaatccacttgcaacatttaattattctgcaagacttgcattattttttgtcatagagagctgtttgatatggtgggaaaaaaagctgacctggcagtcagaaaccctagcttctgctgtcaactacaaaactaccccactccgtgtcttattctgtcacagattctctagctttaatataggaaaggaatttgtgattgcttaggccctttccacctcagaaaatgttaggagtcactgtaacacatgtagaaacaaccaaccctatgtaaaaacaaccaaccatgaagttgaatctccactttagtcaacatgtgatgcattatttagacttaggaaagggatcgctggtgctcattatcatgaagacaatcagcttttggaggaaaatttaaaactccagcaaaaatcttagcatggagagcacaagtcatctacacagtcgcagagatggcttctagaacatgttggccactgtaggtgagctaaccactaccccatgccattcagtgttagaacccaggactgctgaaccttaggtggataactgctacacaatatggaagttaacatataatttacttttatgtttaacctgatttcagtgatcagtcctcagttgtaaactagcctccgtcacttactagctgtgttaactagagccagttatttaacttttcaacgttactttctctatttatgaaatgggaaaatagttcccacttcacagcgtgccaggatgactaaagaaataatgtcctttatggtggatttatcataatgctcaccagacaataaatgctcctatttatttggagtttgcttggaactcctatttaatcctcacatttatccgaaagctcaacttatttcacgttctttcattgggcttgagctctgtcatgttatgacctcagagataacatgccatagtctaagatgtttagctaatatgaaactgttttagcctgtggctttgcctaa

SEQ ID NO: 1338 - DNA, 1334 bp, Homo sapiens
tgttgaatttatactattttgatgaatatatatatatacatcaaaattattgaaataatgaaaattaaatatttgttgtattgatgcaaaatttcatttgaaaactgcattttttcaggctggtgatagcagatctgtaatataatatctaacaaatggatagttctttgcaaatatttgttcagtgctaagcacttggaaatttgggcatggcgatttcataaaattcaagctgctatttatgattgtttgaattatacagtgcgatggatggcagcaattaaccaagaaaatatgaagtgaattatccaaataattaaatcagaggctaagctgtaattacatattgaaaatccacttgcaacatttaattattcwgcaagacttgcattattttttgtcatagagagctgtttgatatggtgggaaaaaaagctgacctggcagtcagaaaccctagcttctgctgtcaactacaaaactaccccactccgtgtcttattctgtcacagattctctagctttaatataggaaaggaatttgtgattgcttaggccctttccacctcagaaaatgttaggagtcactgtaacacatgtagaaacaaccaaccctatgtaaaaacaaccaaccatgaagttgaatctccactttagtcaacatgtgatgcattatttagacttaggaaagggatcgctggtgctcattatcatgaagacaatcagcttttggaggaaaatttaaaactccagcaaaaatcttagcatggagagcacaagtcatctacacagtcgcagagatggcttctagaacatgttggccactgtaggtgagctaaccactaccccatgccattcagtgttagaacccaggactgctgaaccttaggtggataactgctacacaatatggaagttaacatataatttacttttatgtttaacctgatttcagtgatcagtcctcagttgtaaactagcctccgtcacttactagctgtgttaactagagccagttatttaacttttcaacgttactttctctatttatgaaatgggaaaatagttcccacttcacagcgtgccaggatgactaaagaaataatgtcctttatggtggatttatcataatgctcaccagacaataaatgctcctatttatttggagtttgcttggaactcctatttaatcctcacatttatccgaaagctcaacttatttcacgttctttcattgggcttgagctctgtcatgttatgacctcagagataacatgccatagtctaagatgtttagctaatatgaaactgttttagcctgtggctttgcctaa

SEQ ID NO: 1339 - DNA, 1334 bp, Homo sapiens
tgttgaatttatactattttgatgaatatatatatatacatcaaaattattgaaataatgaaaattaaatatttgttgtattgatgcaaaatttcatttgaaaactgcattttttcaggctggtgatagcagatctgtaatataatatctaacaaatggatagttctttgcaaatatttgttcagtgctaagcacttggaaatttgggcatggcgatttcataaaattcaagctgctatttatgattgtttgaattatacagtgcgatggatggcagcaattaaccaagaaaatatgaagtgaattatccaaataattaaatcagaggctaagctgtaattacatattgaaaatccacttgcaacatttaattattctgcaagacttgcattattttttgtcatagagagctgtttgatatggtgggaaaaaaagctgacctggcagtcagaaaccctagcttctgctgtcaactacaaaactaycccactccgtgtcttattctgtcacagattctctagctttaatataggaaaggaatttgtgattgcttaggccctttccacctcagaaaatgttaggagtcactgtaacacatgtagaaacaaccaaccctatgtaaaaacaaccaaccatgaagttgaatctccactttagtcaacatgtgatgcattatttagacttaggaaagggatcgctggtgctcattatcatgaagacaatcagcttttggaggaaaatttaaaactccagcaaaaatcttagcatggagagcacaagtcatctacacagtcgcagagatggcttctagaacatgttggccactgtaggtgagctaaccactaccccatgccattcagtgttagaacccaggactgctgaaccttaggtggataactgctacacaatatggaagttaacatataatttacttttatgtttaacctgatttcagtgatcagtcctcagttgtaaactagcctccgtcacttactagctgtgttaactagagccagttatttaacttttcaacgttactttctctatttatgaaatgggaaaatagttcccacttcacagcgtgccaggatgactaaagaaataatgtcctttatggtggatttatcataatgctcaccagacaataaatgctcctatttatttggagtttgcttggaactcctatttaatcctcacatttatccgaaagctcaacttatttcacgttctttcattgggcttgagctctgtcatgttatgacctcagagataacatgccatagtctaagatgtttagctaatatgaaactgttttagcctgtggctttgcctaa

SEQ ID NO: 1340 - DNA, 1334 bp, Homo sapiens
tgttgaatttatactattttgatgaatatatatatatacatcaaaattattgaaataatgaaaattaaatatttgttgtattgatgcaaaatttcatttgaaaactgcattttttcaggctggtgatagcagatctgtaatataatatctaacaaatggatagttctttgcaaatatttgttcagtgctaagcacttggaaatttgggcatggcgatttcataaaattcaagctgctatttatgattgtttgaattatacagtgcgatggatggcagcaattaaccaagaaaatatgaagtgaattatccaaataattaaatcagaggctaagctgtaattacatattgaaaatccacttgcaacatttaattattctgcaagacttgcattattttttgtcatagagagctgtttgatatggtgggaaaaaaagctgacctggcagtcagaaaccctagcttctgctgtcaactacaaaactaccccactcmgtgtcttattctgtcacagattctctagctttaatataggaaaggaatttgtgattgcttaggccctttccacctcagaaaatgttaggagtcactgtaacacatgtagaaacaaccaaccctatgtaaaaacaaccaaccatgaagttgaatctccactttagtcaacatgtgatgcattatttagacttaggaaagggatcgctggtgctcattatcatgaagacaatcagcttttggaggaaaatttaaaactccagcaaaaatcttagcatggagagcacaagtcatctacacagtcgcagagatggcttctagaacatgttggccactgtaggtgagctaaccactaccccatgccattcagtgttagaacccaggactgctgaaccttaggtggataactgctacacaatatggaagttaacatataatttacttttatgtttaacctgatttcagtgatcagtcctcagttgtaaactagcctccgtcacttactagctgtgttaactagagccagttatttaacttttcaacgttactttctctatttatgaaatgggaaaatagttcccacttcacagcgtgccaggatgactaaagaaataatgtcctttatggtggatttatcataatgctcaccagacaataaatgctcctatttatttggagtttgcttggaactcctatttaatcctcacatttatccgaaagctcaacttatttcacgttctttcattgggcttgagctctgtcatgttatgacctcagagataacatgccatagtctaagatgtttagctaatatgaaactgttttagcctgtggctttgcctaa

SEQ ID NO: 1341 - DNA, 2036 bp, Homo sapiens
catataaaaccccaactcaataggtccaactgttcacttgatctctcaagtcacctgcttggtcctcttccaagtatactttcatttcttttgttcctgctctaaaaatttttaataaactttcactcctgctctaaaacttgcctcagtctctccttctgccttctgcctcctctaatgaattttaggagccaagaattgaggtgtctgtaaacccttgtgtattcaccaccactaacatactttggtgccctgtttcagatatgttccaacactaacagcaccattgctcgggagaattttgaaaaaccaaggtgggccgggcacggtggctcacgcctgtaatcccaacactttgggaggctgaggcaggtggataacgaggtcaggagttcaagaccagcctggccaagatggtgaaaccctgtctctactaaaactacaaaaattagccaggcgcggtggcaggcacctgtgatcccagctactcgggaggctgcgacaggagaattgcttgaacccgggcggcagaagttgcactccagcctgggcgacagagtgagactttgtctcagaaaaaaaaaaaaaaagaaaaaccaggatgggctaaagatttctagatgcactttcaatggaatgctgggtctgtatgcttgctttataccttttgtctttggctattttacaactctgtacattgaagagggtaatttttcttgtttatagaattgcaaacgaagtttcaccagtttgatttccaccctatatgaacaattattccaaacaacacattttattgttcctccaagatataagttttacatctatgagcaaatgcatttcagtatccctgattacctttaatattttcagtttatcctttgaacatcttactgtttatctaacaaattagtaagttaaaggagctaataagtgaaacttttgacatgtgtgtacttagtatctgtaaaataatcatgattttatctttgtattttaacttcatcactcaccttttgtcacataagtcagcaacctctgtatttctattcctcaacaagccaaattcagtgaatcaccaaagtcaaacaactctgcatttacagcaccttgtgtcctctctattcctcataatcaatgccattttgttaattctagcatttattttctcgatttagttatgtatatctcccaaattcaatatttctcctaaaaatctaaatttctagaccaaagcatcctatggtaccccataaatacagatgattatttgtcaattaatttttaattaaatttctgacaaccattggggtgatcaatttaatatgcaaattagattcagctacacctctgcttaaaacgtcatggtttccccatttttccaagataagttaggttcccaggaaaggatcaaaaagcttttcctcatcagctttctgcctccctccagagatttttctctccctccagagatttgtctctcctgagatcagcaagactgaattattttcatttccctggaaacaaacccctacacttccttcagtgtgactttatttatatttttaattatttatttttatttcaataggtttttggggaacaggtggtgtttggtcacatgaataagttctttagtggtgatttctgagatttaggtgcacccatcacacytgagcagtgtacactgtacccaatgtgtagtcctttatccctcattctgcctcccaccctttcccccacgtcaccaaactccattgtattgttcttatgcctttgcatcttcatagctaagctcacacttatgagtgagaatacacaatgtttggttttccgttcctgagttaattcacttagaataatggtctctgattcaatccacattgctgcaaatgccattatttcattcctttgtatggctgagtaatactccataaggtgtatatcaacaatttttttatccactcattgactgatgggcatttgggctggttccatatttttgcaactgtgaattgtgctgctataaacatgca

SEQ ID NO: 1342 - DNA, 1212 bp, Homo sapiens
tgcaagttccaatgattatgactataaaatttatattaaacatttccataagtgacttcggaataatcatccttttattgctttactttctttaaacttgctttcactttactctgtggacttgacccaaattctttcttgtgcaaggtccaagaatgctttygtgaggtgtggattgcgtcccgtttctggtaacatcttgactagaaaaggctctgcctctaagctccctcaggttgttgacagaattcatctccttgcgctatggaattcatggtaaattgcttctacaaagccagcaaaggagagaagggtaagggggtgggaacggggtgaatgatgagaaattacttaatgggtacaatgtacattatttgggtgatgaataccctagttcccaatctttttggtagcagggacctgttttgtggaagacaatttttccacggacttgggggtaggggatggttttgggatgaaactgttccacctcaggtcatcaggccattagttagattctcataaggagtgtgcaacctggattccttgcatgtgcagttcgctatagggttcgctctcctatgagaatcgaatgccccagctgatctgacaggaagcggagctcaggcagtaatgcttgtgctcacctcctgctgtgcagcctggttcctaacaggccacagaccagtatctgtctgtggcccaggggttggggactcttgccctaaagccgtgatttgatcagtatacattctcttcatgtaaaaaaattgcacttgtacccccaaatttttacaaataaacaaaattttaaaaagagagagaacctctagatatttattaaaaaagctagcatgactgagttttatataacacaattaacaaaatcacagtgtgacaacctatcactatattctattggggagaagcaagtcttccaatggtacttagtctttcaggccagctcttggttgaagattatgcaaaagaatttttgtttattgttcccaggcattttccttcattattttctctggggactatttattactcagcacatagctaacagtctctttgggtctaatcaaagccccttccttataaggcatgcacacatgctcacgtgagtctgtgtatgtcttttgtgtgtgtggtctgtgtatgtgtgtgtggtgtttgtattatgtgtgcgtgtacatgtgtgttgcatgc

SEQ ID NO: 1343 - DNA, 587 bp, Homo sapiens
gtatgtgctatccctttatatgatggacagcacagtaggtttgttcacaccagcatcacagcaaacaagtgagtaatgtgtgttgctatgatgttaggacagctacagcgtccttaggcaatagtaatatttcagcaccgttataatcttatgggaccatcattgtctgtgtggtccatcagtggcyaaaatgtcattatgtggtacaagactgtacttcctttaaaccttcagagattaaaagaaatgtaaaatgccccaatctacctcaagcttcttgcaaatgatcttttaaaacctgatttaaaaaatcaatctttagaactgtaaataacacaaagtgggaaatgacactaacttttgccaaacaaaatattgcctcttaaaaataataatcagtaaaccatatgtcaatataaatcacacatatattgcttgttattatgcagagcaggcacacctcagagttatttctggttctgttccacaccactgaaataaaacaaatattgcaataaattgagtcacactgtttttggtttcccagtgcatatacaggttatgcttacagtttactattaagtgtg

SEQ ID NO: 1344 - DNA, 587 bp, Homo sapiens
gtatgtgctatccctttatatgatggacagcacagtaggtttgttcacaccagcatcacagcaaacaagtgagtaatgtgtgttgctatgatgttaggacagctacagcgtccttaggcaatagtaatatttcagcaccgttataatcttatgggaccatcattgtctgtgtggtccatcagtggctaaaatgtcattatgtggtacaagactgtacttcctttaaaccttcagagattaaaagaaatgtaaaatgccccaatctacctcaagcttcttgcaaatgatcttttaaaacctgatttaaaaaatcaatctttagaactgtaaataacacaaagtgggaaatgacactaacttttgccaaacaaaatattgcctcttaaaaataataatcartaaaccatatgtcaatataaatcacacatatattgcttgttattatgcagagcaggcacacctcagagttatttctggttctgttccacaccactgaaataaaacaaatattgcaataaattgagtcacactgtttttggtttcccagtgcatatacaggttatgcttacagtttactattaagtgtg

SEQ ID NO: 1345 - DNA, 1745 bp, Homo sapiens
tatagacccaccctcaggggcttattctctttcccagggatgttccttgctgagaaaaagaattcagtgatatttctcccatttgctttttaaagaagagaaatatggctctgttccrcccggctcaccggtggtcagagtttaaggttatctctcttgttccctaaacattgctgttatcctgtttttttcaaggtgcccagatttcatattgttcaaacacacatgctctacaattcatgcagttaacacaattatcacagggtcctgaggcaacatacatcctcctcagctgatgggattaagagattaaagtaaagacaggcataggaaatcacaagggtattgattggggaagtgataagtgtccatgaaatcttcacaatttatgtttagagattgcaataaagacaggcataagaaattataaaagtattaatttggggaactaataaatgtccatgaaattgtcacaatccacgttcttctgccatggcttcagccagtccctccatttggggtccctgactccctgcaataggcagctacccagcaatgttatctatacttatgacatctgctactatgcatgcactgatgaatcacatgtctctccatccaaccaaaacttttattggaatgcctgcatttttttaatgtctattgaaaagtgtatattttgggtaccacaagcaccacaacatattctgtaaaaatataatcatctttacctaaactccatagcaactagatcttcctgttgtcattatcttctaattgaataaaatcatcaggaacccagatatccaagctagaaggataaaatatcttcttttcaacccttcattcactatagcccagagatagaatccatttctttatttcatttccagcactcttgagaaggtttcatcgtatctccttggactgttttaatagctgggaactgtctttcctgccccctatttggtttccctacaaactgtccttcacatttttgccagaaggatagttgtaaaatgcaaatcccacattttcactactctgttaaaacatataactctaaagcagcattgtcaagtagaaatataattctagccacatatgtaattttaaatttttcagtaatcagttaaaaaaagtaaagacaggtgaaattcatgttaataatacagtatattttacttagctcaatatatctaaaacgttatcatttcaacacgcaatcagtaaaaaaaaaaagaggtattttacaattttttttgtagtaagcttttgaaatctggtgtgtattactttacatttatagcacatcttaatttggtttagccacattttaagtactcattgccacatgtggatcgtacctcccatactggtctgcacaggactaatacataaaaggtccaaattcgtttgtctggtttatgagggtccttgattatctgcttccattcctcattttcagcaccatctccaatcaacttctcaacaaactctaagtcctagctctgctgaaatttttcaagatctactaagttcttagcatctatgctttcgccaatattatcctcccctttacttggaagagtgccccatcttctctacttggtgacttgattgttctttacaccactttctctgcaaagtttttccaagtccctactactgaagacccagatgcccactcttcttgtacatgtcccagttcatatatggtgtgaatggaagttttgttttgtccc

SEQ ID NO: 1346 - DNA, 1745 bp, Homo sapiens
tatagacccaccctcaggggcttattctctttcccagggatgttccttgctgagaaaaagaattcagtgatatttctcccatttgctttttaaagaagagaaatatggctctgttccacccggctcaccggtggtcagagtttaaggttatctctcttgttccctaaacattgctgttatcctgtttttttcaaggtgcccagatttcatattgttcaaacacacatgctctacaattcatgcagttaacacaattatcacagggtcctgaggcaacatacatcctcctcagctgatgggattaagagattaaagtaaagacaggcataggaaatcacaagggtattgattggggaagtgataagtgtccatgaaatcttcacaatttatgtttagagattgcaataaagacaggcataagaaattataaaagtattaatttggggaactaataaatgtccatgaaattgtcacaatccacgttcttctgccatggcttcagccagtccctccatttggggtccctgactccctgcaataggcagctacccagcaatgttatctatacttatgacatctgctactatgcatgcactgatgaatcacatgtctctccatccaaccaaaacttttattggaatgcctgcatttttttaatgtctattgaaaagtgtatattttgggtaccacaagcaccacaacatattctgtaaaaatataatcatctttacctaaactccatagcaactagatcttcctgttgtcattatcttctaattgaataaaatcatcaggaacccagatatccaagctagaaggataaaatatcttcttttcaacccttcattcactatagcccagagatagaatccatttctttatttcatttccagcactcttgagaaggtttcrtcgtatctccttggactgttttaatagctgggaactgtctttcctgccccctatttggtttccctacaaactgtccttcacatttttgccagaaggatagttgtaaaatgcaaatcccacattttcactactctgttaaaacatataactctaaagcagcattgtcaagtagaaatataattctagccacatatgtaattttaaatttttcagtaatcagttaaaaaaagtaaagacaggtgaaattcatgttaataatacagtatattttacttagctcaatatatctaaaacgttatcatttcaacacgcaatcagtaaaaaaaaaaagaggtattttacaattttttttgtagtaagcttttgaaatctggtgtgtattactttacatttatagcacatcttaatttggtttagccacattttaagtactcattgccacatgtggatcgtacctcccatactggtctgcacaggactaatacataaaaggtccaaattcgtttgtctggtttatgagggtccttgattatctgcttccattcctcattttcagcaccatctccaatcaacttctcaacaaactctaagtcctagctctgctgaaatttttcaagatctactaagttcttagcatctatgctttcgccaatattatcctcccctttacttggaagagtgccccatcttctctacttggtgacttgattgttctttacaccactttctctgcaaagtttttccaagtccctactactgaagacccagatgcccactcttcttgtacatgtcccagttcatatatggtgtgaatggaagttttgttttgtccc

SEQ ID NO: 1347 - DNA, 559 bp, Homo sapiens
tgagccaccgcacccggcccatatgtaagttttaaaattaaatgagtagattacatattttcaggacattacaaataatacacttcattttgtcactgtagaaattcttttaacctgtgtagatctcaggagtaccgcatctttctaaattattttttgttctttttgtcttaagtcactaaagtacttggtcatggtaaaactggtaaagtttatctcctctgccactcatttctccccctaccatatccatgattcttctacaacctattattttaaaacacatagataatggggaaaaaagaaggacagataattyggatagaaaattcatgccaggggtgtctccatctcctatgaaaggaggaagtgcaaagaagctaacaaaatgctttaaatacacagtaaaatactcccttatctgagctctagtgataaataaacaattgaactattaaataatttgctgctatgttactaaatcagaacattttatcataacagtttttccatatctcaatgacattttaaaataaaagtatagagcattatttgcctt

SEQ ID NO: 1348 - DNA, 559 bp, Homo sapiens
tgagccaccgcacccggcccatatgtaagttttaaaattaaatgagtagattacatattttcaggacattacaaataatacacttcattttgtcactgtagaaattcttttaacctgtgtagatctcaggagtaccgcatctttctaaattattttttgttctttttgtcttaagtcactaaagtacttggtcatggtaaaactggtaaagtttatctcctctgccactcatttctccccctaccatatccatgattcttctacaacctattattttaaaacacatagataatggggaaaaaagaaggacagataatttggatagaaaattcatgccaggggtgtctccatctcctatgaaaggaggaagkgcaaagaagctaacaaaatgctttaaatacacagtaaaatactcccttatctgagctctagtgataaataaacaattgaactattaaataatttgctgctatgttactaaatcagaacattttatcataacagtttttccatatctcaatgacattttaaaataaaagtatagagcattatttgcctt

SEQ ID NO: 1349 - DNA, 607 bp, Homo sapiens
cctcactgccagggctgttatgagcaggtggggttggctttgctgttgtctgagtggtgttctgggccatccttcagggcagtacaaaacctatggtcaggacaggtccctcagacatttatcccagctcttttcaaccagccctctgctatagggcttgggtgttggtttgaagcactaggattttcccaatttcacattttatgaaaacctcaaataacatccaactagaaattaggttgggtatgagagtcagtttaatcyaataccaagcttaagagcataagctttgtaagtagaatgactggagttcaaatcctgatgtgaccacacactggctatatattctttgatgttatttaacttctttaaggctcagttgcctaatctgtaaaatatggagagggtctagcagagtcagaggtaggagcaatgggtttagatacttgggttgattctctggtgcacactcattagctatatgatcgtgggcaagttacttagtgtcttttcatcttttccttatcagtaaaatgggataatggtagtaccttcttccaagatttgatctgagaactaaatgaaataatgtgcataagttgccagt

SEQ ID NO: 1350 - DNA, 607 bp, Homo sapiens
cctcactgccagggctgttatgagcaggtggggttggctttgctgttgtctgagtggtgttctgggccatccttcagggcagtacaaaacctatggtcaggacaggtccctcagacatttatcccagctcttttcaaccagccctctgctatagggcttgggtgttggtttgaagcactaggattttcccaatttcacattttatgaaaacctcaaataacatccaactagaaattaggttgggtatgagagtcagtttaatctaataccaagcttaagagcataagctttgtaagtagaatgactggagttcaaatcctgatgtgaccacacactggctatatattctttgatgttatttaacttctttaaggctcagttgcctaatctgtaaaatatggagagggtctagcagagtcagaggtaggagcaatgggtttagatacttgggttgattctctggtgcacactcattagctatatgatcgtgggcaagttacttagtgtcttttcatcttttccttatmagtaaaatgggataatggtagtaccttcttccaagatttgatctgagaactaaatgaaataatgtgcataagttgccagt

SEQ ID NO: 1351 - DNA, 579 bp, Homo sapiens
ttcaaacaactgtggatagaagatatttggggaaaaaaaggatggttgtgtctatactgaacatgtgcagacttttttccttgtcattccctaaacaatacagtttaacagctatttatatagtatttacattgtattaggtattataaataatctagagatgacttaaagaatatgggaggttgtgcctaggtaacatgcaaatactacgccattttattataaaagacttgagcatccatggatttwggtatttgaggggttggggttggaaaccagtcccccacagatactgagggacaactgtacatgtaacagttgtgaggatgaagtacattaatacatgtaaagcacataggctagtgcctgtactctctgaatcttagttgttatttgtccctgaaatattttcgtaaatgtctaacaatctattatattacactttttattttattgctacttatcttcttcgccaaggaatagtgtaacaacacatgctgtacattttcagccctatcagattgtgataaatactgttggttgccggccagcaactattttgtccctcccttcttgctt

SEQ ID NO: 1352 - DNA, 748 bp, Homo sapiens
tttattcattcaactgttacttagaaaacacctactaggaaccggcaacagcttagcacgtgaaatacaataatagacactaaaaatctcaatattcaggagctgatactaaagcatgagagaactgcaataaataagcaaataactttgrtagtattttgatgctgataagtgtcatgaagaaacatgaaacagggaaggggggtagaaagcgctgggaggagggcatgtagatgttaagtagggtagtttaggaaggcctcactggagtgacaattaagtaaagacatagaacaggtgagaaagtgagccacctgtatcaaaactacaaagaaaaggcccttgatgttgactctgatgaagaactagtgcccaaacagcatctcatcagggacacagcaagtgcaaagccctggggcatgagtctacttggtatgtctgtatgtaccaagagcagcaaggaggactgcatggctggagtacaaggaaatggggggaaagtacagaagatgggagttgaggccggcgggcatggtggctcacacttgtaatctcagcactttgggaggctgacatgggcagatcacttgaggtcaggagttcgagaccagcctgggcaacatagtgagatcctgcctctatcaaaaatacaacaaattagccgagtgtggtggtgcacccctgtggtcccagctactcgggaggctgaggcagaagaactgcttgaacctgggaagcagaagttgca

SEQ ID NO: 1353 - DNA, 748 bp, Homo sapiens
tttattcattcaactgttacttagaaaacacctactaggaaccggcaacagcttagcacgtgaaatacaataatagacactaaaaatctcaatattcaggagctgatactaaagcatgagagaactgcaataaataagcaaataactttgatagtattttgatgctgataagtgtcatgaagaaacatgaaacagggaaggggggtagaaagcgctgggaggagggcatgtagatgttaagtagggtagtttaggaaggcctcactggagtgacaattaagtaaagacatagaacaggtgagaaagtgagccacctgtatcaaaactacaaagaaaaggcccttgatgttgactctgatgaagaactagtgcccaaacagcatctcatcagggacacagcaagtgcaaagccctggggcatgagtctacttggtatgtctgtatgtaccaagagcagcaaggaggactgcatggctggagtacaaggaaatggggggaaagtacagaagatgggagttgaggccggygggcatggtggctcacacttgtaatctcagcactttgggaggctgacatgggcagatcacttgaggtcaggagttcgagaccagcctgggcaacatagtgagatcctgcctctatcaaaaatacaacaaattagccgagtgtggtggtgcacccctgtggtcccagctactcgggaggctgaggcagaagaactgcttgaacctgggaagcagaagttgca

SEQ ID NO: 1354 - DNA, 634 bp, Homo sapiens
tacttctgctttacaaaaaccaatcatgtttacagcataatttaaatgaataccataatctctaaaatgttaaattacatatatttaccataaaaagtttttaaaaccttataaataaatgtgttctaatgtttacctgggcagataattcaagttaataattaggtttttgaaccaaggcatgcacttcctttgasatacatatctggacacggaaaagctgcatattatcttaatagaaaattaccaatatgcgcagaaatcaatccttggagacataattccaaggcactgatacacttgcatgcaggcacggggggggttgcggggggatataattgctaaggttaaacagtttgaaattcatcaagcgaacaagccgcatttaatggccatgatggaccttttctttttctgctgaaaggagaatatttatacagctcaaccctttcatatctcttccaagccagccctaatcatctgacaaaaatgacaatcccttgatttagctccagctactactccactggtttggtattcaacacagttctacaataatcaaatctgaattgccttgatgaagataactgatgcttccatgacgaccatactattaagtctaacagtgcaactt

SEQ ID NO: 1355 - DNA, 634 bp, Homo sapiens
tacttctgctttacaaaaaccaatcatgtttacagcataatttaaatgaataccataatctctaaaatgttaaattacatatatttaccataaaaagtttttaaaaccttataaataaatgtgttctaatgtttacctgggcagataattcaagttaataattaggtttttgaaccaaggcatgcacttcctttgacatacatatctggacacggaaaagctgcatattatcttaatagaaaattaccaatatgcgcagaaatcaatccttggagacataattccaaggcactgatacactygcatgcaggcacggggggggttgcggggggatataattgctaaggttaaacagtttgaaattcatcaagcgaacaagccgcatttaatggccatgatggaccttttctttttctgctgaaaggagaatatttatacagctcaaccctttcatatctcttccaagccagccctaatcatctgacaaaaatgacaatcccttgatttagctccagctactactccactggtttggtattcaacacagttctacaataatcaaatctgaattgccttgatgaagataactgatgcttccatgacgaccatactattaagtctaacagtgcaactt

SEQ ID NO: 1356 - DNA, 211 bp, Homo sapiens
tttacatttttgaatttagcgtgcagaaagatgccagagtaacataccccctaccctcagtttgttatttatatatatggaaagtaggagtttaggtctacarattttctttgttgctaatactgggcctcaaaatatgtcttttagataactggttggctcttttcagtagtactgaactcttcacctttttccttcttcaatgtcagta

SEQ ID NO: 1357 - DNA, 565 bp, Homo sapiens
tgcctacctatgctgtgaacagtccagctcaggtggagccactttagtgaccaaggtgtgcagtgggggtgggtgtacaggcaaattgtgcttcytgttttaagatagtgttaagtatgtgactcccatatgtgaccctgtgagaacctggctattaaatgtcctgacgtttttcttgctcactgctaagccagcagctgtgataaaattagatttttttctcattatttgtttcttatagtaaaatattaatattcatactataaaaaatgattgatgacaaggctagttcaaatgtctgagagatttagctagcatctgaaaacaaactcatccatttttttcatttattttcttcttctttgaaaatagatcaaagacattctaaaaggttccctgcgttttaaccagagccagctagaggccgaagagaacgaacagatcaccattgcggacaaccactactgctccagcggccagggccagggccgaggccaaggccagagcgttcaaatgtcaggggccgttaaacaggtacagaaactctgaggaacatgttacatta

SEQ ID NO: 1358 - DNA, 543 bp, Homo sapiens
ttcatagtgtagttgacagagagaaagctgtctggtgatcacattttcttcctcactttttcaaatgtcatttgttaattgccctattgaacatttccaaagatattcattgaaagttgtttttataaacatcagaaaattaagtttataaagttcttatggaggcaaataaactgatgttcaaaactggcctcctttttcagctaattcatgcataaatattatgacaagtacaaaatcagttacgatgggtgcaataaaataacaagatttgaaatcctactgctgaytcaagtgtggcctcagtagactaatcagtgaaagagaagccaaggactagattcaggtctggactctcgttgccagctagctggaagcgtcactcacccttcctgggccttggcttcctcatctgcaaataaagaacagctaggttgacttctagggcttttacatctttaatattctacgatcctatgagctacagtactctcaacagaagcatgggaaatcaaattttccttaattaattgcatttaacca

SEQ ID NO: 1359 - DNA, 543 bp, Homo sapiens
ttcatagtgtagttgacagagagaaagctgtctggtgatcacattttcttcctcactttttcaaatgtcatttgttaattgccctattgaacatttccaaagatattcattgaaagttgtttttataaacatcagaaaattaagtttataaagttcttatggaggcaaataaactgatgttcaaaactggcctcctttttcagctaattcatgcataaatattatgacaagtacaaaatcagttacgatgggtgcaataaaataacaagatttgaaatcctactgctgactcaagtgtggcctcagtagactaatcagtgaaagagaagccaaggactagattcaggtctggactctcgttgccagctagctggaagcgtcactcacccttcctgggccttggcttcctcatctgcaaataaagaacagctaggttgacttctagggcttttacatctttaatattctacgatcctatgagctacagtactctcaacagaagcatgggaaatcaaattttccttmattaattgcatttaacca

SEQ ID NO: 1360 - DNA, 1218 bp, Homo sapiens
tgtttcttttaacataaagtgatgttcctatttcttttgtatttttggttcctatgtactagacatttcaactctttattttcaaaatttctctagccttagattttagttgtcacttttattaactccatatagctagttcttttttaatcttatttaatgctctgttttaataggtgaatttagtaattttacttttattgtattactgatatattggaccttgaccgaatctccaagtagttgttgtagcctttacttccacagtctgtacagatataccaatacaccatttcctgggctaatattttcatttgcacatctcctattgtttattatccaagcttcatataatatatatacacttctcaatacaatggctttgtccagtgtttgcatagaataaaattatgtttcatccacaaaactcatacaatgtttttcacaaaattaagtaggggagaaatctagagttatttttcatatacattattaaatgggatgaccttattactatagatattctgaaaagtatttggagtgtcaagaaagcagattcacatcctggatgtcaatggcactgagaaggcaacttgtacatgttactgtgtagaagactactggttgttagcaaccatattaaagttcataagcaatgtgtatagcatggtttgttattggaaagcacattgccatattgtgcacattttaggaaattgataagttcacaggtaaaagacaataacttcttcccrtttaaaaagtaggaaatagctttccaattagcaaattgcctaaaatgtgggcaaaacatctgatttttaaaaacagattacagatattaggtaacagatgtctgtattcagttctgacatttcaattgctcaaagtggtttcgtttctcactcactgctgtagttttgtaatccactaaagtaacggtaccccaaaatgtttcttttctaacttctgacctctgctatttgttttaacaaattttattatattttatctcacctggttagtaaatcaccttgaaaaagtgtgaaattattttaaaaaaaatgaaagctaaataagcccttttaaaaaagaaaatgagaagctgggcttttatataggaaatttaaacaaaagagcttgaaattctacaagagacatttgaataagtgaagcagaatttatataagatacatttaacgtttcgttatatgatgc

SEQ ID NO: 1361 - DNA, 1303 bp, Homo sapiens
tttgatgtatgtgcttgtaaatggatatcagtacaaaatacccaacacagtttactaatgtgattgttttatcaaaatccttgcaggaaggaatggctttaaatcagtttttttttccttttcaggtcttataatcattttaaagctataataataaatttacttagttaggcctattgccaaaataatgaaggacaggtctgaatcaaatacactaaatttgctttcagcacttgccacaatgagaagagcttgtttcaaagcaatacaatggtaccaaggtgaatggggarttctggtgaatctgcggccttcctgggaaagttgtttggaactaaaaagcagtaagcacagagaatatattagaagatttcctcctgtaaaaataatgaactgacaaagtatttgctgagatcaaaccttttaacctcagaaacaaaggctctatgaaaacaatgccaaagagtgaccataacgaaacattctcctttacctcctctgtgacgcttctgtgtactcacagttgtcatttttcccaaaggtagcctcagtgtgatgttaggagtagtctgtttgagtttatggtttttaatactgatgatttggggcgattatggaagcttgcctgaaactttcctacttcctataaaacacttcccttatctacatgaatactttgtagtgcattcactatttactcataaacatgctttccttattctgtaattttttaatctaaatcttaatacttcaattcctttgagtggggaccatatcatttaaatcccatagacactacttatgtagtattagatgctgaatacactttgcctagatgtaacgaggtggaaatatgctacttggcagtttaaaattcattccacaaagatttattcagtatttaccatataatatggactgccctaagtggtggggagagaagatagatgtgatcctgtctcttagagagcttaatgtgaatggtggagatgggcaagtaagaagacaacagagtgacatatattctgatggaaaaaggagaggtcttatcggcaactcaggatggggaatggaggaaaatttccagaagtgctctaagtgggcatctttaaaatagtaggagacagagaatagaaactgctgtggatggatcccaggcagaaggcagagcatgtacaagtctcctacactgagagaacatggaaagtttaaagacataaaagaaattcaatgtggtgggagggtatgtcctagaggtaataacacctgacatttgtaaagtttacaaccacatcctcatgca

SEQ ID NO: 1362 - DNA, 620 bp, Homo sapiens
atcagggaggctagagctatgttcttcccgccttgcaggcaggatgtgccatggtcaagagtagcagtgtagccacgttaaacatgaaataagagtcacctaaatttagtcaagcgtatgttatttctaatctgctaatgagatgctgacatttggaaataccctactttctcagtccaggtaacctgtgttcctccatcctgggctccatgagtctagctggtgggtctttatagagggaagggagggttgcaggtttggtttctagctcagtgacagctttcagtctgtccttgtgtaaccgttgatctgtaaggcgatcgaaagtgtcaaatggcctgagaatgaatggctgcaattttcagtgttcttgctaacggacacttcgttcctgtaagttgcaggagccaggccagttcaatacagccagcttrtttttaacgtccccttgtccctgtgtgggtggctgcccagatctgtgggaggcggtatgtctgggttcaggtagggatgtttttatgtaatcagatatgttgatcacataggagagaccaaagagattgtctaaaaaaagataaaaccccacagcggcccacagatggaaaaggtgttgagcagta

SEQ ID NO: 1363 - DNA, 653 bp, Homo sapiens
ccacttagaactgcttggcatgcagtatgccttcagtatattctagcagttgctgttgctatygtgaaaccaaagagttcataaaagtgatcctataaataatataatcaaagaagtattcataagatgcttctataaataatatcatttctgtcacacactccttgcaaagaattcaaggagaaagtactactgggtagatgtttgattctggaatctaccatttaacaactgtaacatgtctgggatattttcttaacttctcttagccttgatttctctacctataaaatgggatgataataataatgcaaaacttagggggttattaagcatagcaaattataggatacatgtaaaatacagctcctggcagataataactgctcaataaatgttagctatctctggcagttataattcacagtcacagacttggatatgcaaaatagagctttatttgtctgtagctgaatgtttctcacctcttgaatttccatttccactgatggcagaaatcataaatcttgccaatttatgataaattcagtgactttcaggctttttttcttaatctctagtttgagtaaattctcagttgattttggattctttccttttgctttctcccaaagggtgaggtcctggggagc

SEQ ID NO: 1364 - DNA, 1049 bp, Homo sapiens
ctctcctgagagtggatgggatccgggaagccagtcatgttgcctgttcactcacactccctcccttcctcccttccttccttgacagagtctcgatgtgatgcccaggctggagtgcaatggcatgaccttggctcactacaatctctgcctcctgggttcaagcagttctcctacctcagcctcccaagcagctgggattataggcacctgccaacatgcctagctaatttttgtatttttagtagagacagggttttactatgytggccaggctggtcttgaactactgacctcaagtgatccacccaccttggcctcccaaagtgctgggactacaggcgtgagccaccatgcccggcccaagaccactttttatgctaatcagttagtgacagccttggagactcaggctgagagtttctccctgctacttctcaaccctgcaagagctccgtataacaccaatctattacagaacttctcatggtttctaaacactgaagttggtagtggaagggtgatggtgaagattgagtttaggtgtagatgcaatattttgtcaaaaagattttaatcttttaaaaatctctccttctagtttacatattaaaatataagataaaagttaagaaaacagttctgcatatgtgaatcatattattttaggctctcagagataaagcctagtctacgttatctgcatatggaggacacacataagcatgtggactcaaaattattttccagtagaataaaagaatgttacaactgtgaagggcttacaatcaaatatagtacaattccttcacgttatagtgtgagaagacaggcctgtaaaggttaagtgacttgcccaaggtctggttttctgactgacagaaaaccagactgaagaaaaccagtgtgtttcatatgacagaaaacacacacacacatacacacacacattcacatatgtgtagggaaggagaggagaaatgatatatattaatttgcatgttaaactctcagatgtctggaagcaatatgatatttaaaatatcata

SEQ ID NO: 1365 - DNA, 645 bp, Homo sapiens
tgcataacagtaaaattcatttgtggtttttcagcttcagctcccatcttcattaacacaagtggggctgtaatggtagaaacaagatatcaaattttactccccctcaagacacccactcaaagccctgaaccctagaactaaaagcaaaataaaactatttaccagccagagggaaggaagaataatagcatgtggcttgtaaacttaacaaatgtaatcacagtaattgagaagcccaggaaataatttgaccagcataattatattacaaattgcatattgcacaattaaacaattgcattttggccacaaatggarctccaagtatacaatttgtggtgaaggggagaggtaatttaaaattagaaaagaaaagcaaaggcccagaaatacatttacatttatatccatattggagggcataaaaaaagtaataaggaaaaaggtcagtgttttcaagagaaaataatacaactggcttgaatgaattttgccaaatactttgtggatgttttaccactatttgactttccaatgtgtataaaacatttccaaatggctcattccttcttattaagtaaaaattcctgtattaggagctcttgtttttggctcttaaattggattaataaagtcctgaat

SEQ ID NO: 1366 - DNA, 645 bp, Homo sapiens
tgcataacagtaaaattcatttgtggtttttcagcttcagctcccatcttcattaacacaagtggggctgtaatggtagaaacaagatatcaaattttactccccctcaagacacccactcaaagccctgaaccctagaactaaaagcaaaataaaactatttaccagccagagggaaggaagaataatagcatgtggcttgtaaacttaacaaatgtaatcacagtaattgagaagcccaggaaataatttgaccagcataattatattacaaattgcatattgcacaattaaacaattgcattttggccacaaatggagctccaagtatacaatttgtggtgaaggggagaggtaatttaaaatwagaaaagaaaagcaaaggcccagaaatacatttacatttatatccatattggagggcataaaaaaagtaataaggaaaaaggtcagtgttttcaagagaaaataatacaactggcttgaatgaattttgccaaatactttgtggatgttttaccactatttgactttccaatgtgtataaaacatttccaaatggctcattccttcttattaagtaaaaattcctgtattaggagctcttgtttttggctcttaaattggattaataaagtcctgaat

SEQ ID NO: 1367 - DNA, 594 bp, Homo sapiens
caatattgggctaagcattgtaggtggtaaaaggatagatcttcaagactggaaattctaacagggttgaaaagtgtgcatacatagctaacatccaagacagaaagtggtaacactgcaaggacaataaaacattatgggctggaattaagctagaaggataaaagaaggtttgaagctgaggttgcatctgaactaggcctttgagagcggatagtatttgaatatcaggggtacttgctcagctttctccctggaactttctgatccttacatggctgaatctgtcttgatttttagtttgagatcaaaattatccactcagaaatctcttccctggacactcaatgaaatgacagctccccaactcactctccaccccatcaccctgttttattgtattcatagcacttactgctcwctgaaattcctgtttatttatttatctaatctttttactcattagaataaaagttctgtaaaagtagatactttgtcctgtagattagtgctgcattcccaggacctagactgttgactggcctacagcaaatactcaaaaaatgtaggagaatgaattgaatgaaaggaggg

SEQ ID NO: 1368 - DNA, 649 bp, Homo sapiens
atttttttttaatggaaagaataggacaatatagcccctggaagattcctggaatgcaagtatcctgtgctcatcaaatacagactcatgggccctcacaggctacgagaatagctgacatcctcttcttagagtggaaggatctagtaatgatggacgcctaaatgcaaagaaggctattccacctccacctggagaccaggggaatcactaccaagcccccaaaattctgattcataaaattttagcctgaaaaattttaaaggaaggcataaccagacattcagtggtctacaacagcccaaatggcatccaagattaaaacttacatgttgtgattctcaacccaacctttcttcctcaacactacgaaatctcccttcagcctccttaatatattttcrggcacctgatgatgtttggttgtggcacttacagaaactcaaaacaagcaggatattttatacaaatctgatcgtacaatataaaagttattattaataataaagtctcaccatatgcacacatcttaaataacgggattcctcattaaatactcatcaagaatctcataatttaaaagctggaaggtaaattacaaacaacgcttaccctaccaccaccatggcaccacttcggccattcttga

SEQ ID NO: 1369 - DNA, 583 bp, Homo sapiens
tatgggatcaacaccagcagtggtgacttgaaaaactgtctcacaggtacaagactaaatatcaggatacagggggccaggggaggagggactgctattagacaaaagacgcaaaccaaatatccaaaccaggccaggcgcagtggctcatgtctgtaatcccagcactctgggaggccaaggtgggtgcactcraggtcaggagttcgataccagcctggccaacgtggcaaaaaccccatctctactaaaaatacaaaaattagccgggcatggtggcgcatgcctgtaatcccagctacttgggaggctgcggtgggagaattgtttgaacctgggaggcagaggttgcagtgcaccaagatcataacactgcactgcagcctgggaaacagaatgagactcctttcaaaaaaaaaaaaaaaaaaagagttccccactgtaagagtgagccagttgctgccagggtttgggtcctcatgaccagagctggagcacggtatctacctcaaagcatctaggagtaagaacattctgaaaggtaagtccaagttcttaaagagttctaagaattcatttgggg

SEQ ID NO: 1370 - DNA, 2400 bp, Homo sapiens
  misc_feature (1)...(2400): n = A,T,C or G
gcatgtatatatgtaaacaaacacacataaacacatctaatttcaaaggctagtcataacacaaagatgaatactaacagttcaaatcatttagtaatttactagtttagtgttaagtatatgtagctattaaaatacagaatatagctagtggctaaaaaagttagtattactgatttgaaaagggaaagtggaaagtaaaaagccctaacttcttaatttctaacacaaatcacttgaaacttaagcacagaattctgaagatcaatataaatcactgaccaaaaaacccccataacttcttcagtaaatagaacacttacagcatcaaacaaaatcagagagaatggaagggatatttttatctctamggtgaactactgaaataggttgctagcagccatgtcctaacctatttacccctactaccaaattaatctttctgcagtagcccttagttcatttaatctactgttagaaattcacaatttatgaattaagtttacactttcaggcttgctacaatccatcctcccactcttttttcagacaccttttctccatttcctaaaaccaacaaccctccaggcgcaacaccctgagattccatttctatcactcggcttcagctccttcctcagcctctctcctcttcagtgcattttatcctaagcgaactaacacaggaacagcaaaccaaatactgcatgttctcataagtggaagctaaacaacaaaaacacatggatacaaatagggcaacaacagacactggggcctacctgagggtggagggtgggagaagggagaagatcagaaaaaataccattgagtactagcttattacctgggtgacaaaataatctgtacaccaaacccccatgacacgcagtttaactatataacaaacctgctcatgtaccctgaaacctgaaataaaaggtttttttttaagacttaaaaattctagcaaaatatctgttttaccttgtttaatggagcatctcccaaacatatcataattttttttttttacttagcatgccttttaacatcttgtaaagcaccagctttcgactgaaaagccatctgagaaagagctcttgcctctactcccgtatcagcctctggaactggcctccaggcacaactctcctctccacctccgattccccccacccaatctgttctacagccagcagccgtctcttaaaaatgcaaatctgattagcactaaagcaattaaaacactttaatgcatttctagggttctagtgtgaaaatgagcttatcaaggtctcctggatcctcctagatctgacctcaacctatctctatactgtttgctataccattcttctcaccccctgtgctccagtcacactggccttctagttcctctgctgagcatgctttctccaaagggctttgctctgaccagaacctatttctccacctttcaccaagaatctatctctccaccctcgaccatcaactctttaccaagttacaactactggtctttcagttctcacttcaatcatgactttcacagactccatccaaactctcaaaaccttctgttcttgtataacactttatatttttccttcaaaatacttaatacaacttgcattgatacatttaatgagaagagggtcttgttttgctaatctctgtattccttagctcccagtattatgaccggcacacacaaggcaggcaaacattttttaaattaatgaaacactgccaggcatggtgactcacactggtaatccccacactttggaaggccaaggcgggaggatcgcttgagcccaggagttcaagaacagcctgggcaacatagcgagacccccaactacanaaaaataaaaaacagttagctgggcatgatagcatgcacctgcagtcccaactactcaggtggctgaggtgggaggattgcttgagctcaggaggtcaaggctgcagtgagccgtgattgtgccattgcactctagcctgggtgacagaggaaagcctgatttaaaaaaaaaaaaaaaagaagaaataaaattaatgaatctctgataatataattatcacctaatcataataagagaatccctatcaactataaacatttttataaccaatcactttaacaaaaaccttcaacaatctcctgtggaattttagctttaaaatgtatgttaatccatagagtacgtttccattgctactgcataagtacaaccaagcaagagataaacaaattttaaatatatttgaatacattagaaatctcacatacttcttacactagcagtgtatgagaattctcgtttctccacatcccttctcagcatttgatatcatcagtcttttgtaattttagccatcacagtggtatgt

SEQ ID NO: 1371 - DNA, 619 bp, Homo sapiens
ttgagaagttaggtcaacttcagagaattagacaaatagagtgcttatctgattcacattatcttccaagactgctggaggactaaagggatatgaaaagtagctttttcctcaaacaaaaatatgcttacactactaagggtactacgatgtcctggaaggactttccatgccaacattctgtagcaggcacaaatrgtctctatcccatccttctaacatcatcttgtaattctcctatctcataatcaaaggccattcactgagcagcttctgtgttccatgcactgtattaaacaataaaaatacagacatgagaaacacctattttctttccctcaataggatctcagcatcacagtataaatttgtgtataaatcacactaaattcaatgtaatttaagatgtaagtgtgacccagttggtccttaagcatccttttctagaatattggagcagagactctgaggatgaatatgagtgctttaatgaaacaagatggcaaaaacgcattcagaaacagtgaatagcttgagaaaacgcaagaaagcatgaatgcactagattcacagatggtgatgaggatgaaggtctgtaagtagtttcagttgaactgca

SEQ ID NO: 1372 - DNA, 1947 bp, Homo sapiens
tgcatgttgactggcacggattctgtaccatccttggaagaacctaattgttctgccatcattttctgtgtaccaaggcttagattaagaattctgggtgagtaaggctaatagaagcaaggactcaagattctaatgaacatttgtgcagatttctaagtactgtatgtctacgagtaattcgtatgttttgtgaattttcttgaaaagttgactttttttgaagaattttcttgttgacaagacagaacaccatgtgctggcacctaaaaggtaataaaagagccatcgaccactttactaaaagatcctcaagggtatttataaatgtttcctttaaggagtgactatgtcttgttctgaatttcctccacctgctcaaaaagtcttggaaatagttcactgccctcagtaagttttgtcagcaagagagaaagtttgtaagttaatgctcaaatgcagcaatcattacttgttatttttaatttaattttagtataaattaacttatctctgtgcaactatcattaaagctaataaccctaaaaaggattaagattagaaagtaatgctgtcagtgacaaagctcattaacagcctacaagctgatgaactacatctaggataattggcctaattataatacatttgtttctttagccaggtattccttgcttcactctctactgattacttatgggtctcagtttggccaattaactttctcttcccactctatccatttctaaaattgatagtgtatagcttaggtgtgacttgctgtcagtgtgcctgtgctctggatagttaagggctgaattaagaagacaagaagtagagagacagaggtagctttatcctagaatgcaggacataaagtagatatagaaagaatcataattattttggggtttctacctatttaagtgaggttgttaacatcgggttttttttttttgttttttttkggtttttttttttttttttttgagacggagtctcgctctgtcacccaggctggagtgcagtggcgtgatctcggctcactgcaagctccgcctctcaggttcacgcaattctcctgcctcagcctcctgagtagctgggactccaggcgcctgccaccacacccagctgattttttgtatttttagtagagacggggtttcaccgtgttagccagaatggtctcaatctcctgacctcgtgatctacctgcctcggcctcctaaagtgctgggattacaggcgtgagccaccacgcccggcctgttaacatgcatttaaaccttaacagtaccgtagacttctgatatattctagcctattcattctcacaaagcattttaaattattttatttttatgataagtaacaggccacccaactacaactggcttaacaaaaaaaatagtttacattttatgtaaaatgtagtctggaattagagaattacacatttggaaaagtagctaacgaataactctaaggaacactttgcttaagttctctaccatcctcaggatatcagtttttatttcctttgtctatagtcctttatagttttaggatggcttccataggctagaaacaggacagaaaccaggacaatgaaagcaaatcatcacatgatttccccttctattaccagaaaaaaatcccagaagaacttatcttacatctcattggccaaaaaatgatgatccattcatgcacagatgagcgggagattggtataacacctgaatttttcattatttgtcaaaagaaaggcttagaataaaaggtgctcagtaatgacttctgactatccaactgcttacctttgaatatatgtatacctccaaaattcatgtgctggaacttaaaccccaatgtgatagcattaaaagataggacctttaggagataattgagtcatgaggtcagagcactcatgaatggaat

SEQ ID NO: 1373 - DNA, 1947 bp, Homo sapiens
tgcatgttgactggcacggattctgtaccatccttggaagaacctaattgttctgccatcattttctgtgtaccaaggcttagattaagaattctgggtgagtaaggctaatagaagcaaggactcaagattctaatgaacatttgtgcagatttctaagtactgtatgtctacgagtaattcgtatgttttgtgaattttcttgaaaagttgactttttttgaagaattttcttgttgacaagacagaacaccatgtgctggcacctaaaaggtaataaaagagccatcgaccactttactaaaagatcctcaagggtatttataaatgtttcctttaaggagtgactatgtcttgttctgaatttcctccacctgctcaaaaagtcttggaaatagttcactgccctcagtaagttttgtcagcaagagagaaagtttgtaagttaatgctcaaatgcagcaatcattacttgttatttttaatttaattttagtataaattaacttatctctgtgcaactatcattaaagctaataaccctaaaaaggattaagattagaaagtaatgctgtcagtgacaaagctcattaacagcctacaagctgatgaactacatctaggataattggcctaattataatacatttgtttctttagccaggtattccttgcttcactctctactgattacttatgggtctcagtttggccaattaactttctcttcccactctatccatttctaaaattgatagtgtatagcttaggtgtgacttgctgtcagtgtgcctgtgctctggatagttaagggctgaattaagaagacaagaagtagagagacagaggtagctttatcctagaatgcaggacataaagtagatatagaaagaatcataattattttggggtttctacctatttaagtgaggttgttaacatcgggttttttttttttgtttttttttggtttttttttttttttttttgagacggagtctcgctctgtcacccaggctggagtgcagtggcgtgatctcggctcactgcaagctccgcctctcaggttcacgcaattctcctgcctcagcctcctgagtagctgggactccaggcgcctgccaccacacccagctgatttkttgtatttttagtagagacggggtttcaccgtgttagccagaatggtctcaatctcctgacctcgtgatctacctgcctcggcctcctaaagtgctgggattacaggcgtgagccaccacgcccggcctgttaacatgcatttaaaccttaacagtaccgtagacttctgatatattctagcctattcattctcacaaagcattttaaattattttatttttatgataagtaacaggccacccaactacaactggcttaacaaaaaaaatagtttacattttatgtaaaatgtagtctggaattagagaattacacatttggaaaagtagctaacgaataactctaaggaacactttgcttaagttctctaccatcctcaggatatcagtttttatttcctttgtctatagtcctttatagttttaggatggcttccataggctagaaacaggacagaaaccaggacaatgaaagcaaatcatcacatgatttccccttctattaccagaaaaaaatcccagaagaacttatcttacatctcattggccaaaaaatgatgatccattcatgcacagatgagcgggagattggtataacacctgaatttttcattatttgtcaaaagaaaggcttagaataaaaggtgctcagtaatgacttctgactatccaactgcttacctttgaatatatgtatacctccaaaattcatgtgctggaacttaaaccccaatgtgatagcattaaaagataggacctttaggagataattgagtcatgaggtcagagcactcatgaatggaat

SEQ ID NO: 1374 - DNA, 1533 bp, Homo sapiens
tcactccctcccccagtgcaagaattaaacacggatctgcagccggatggattctatctcctgtcttttatccagctggaaagctacttactagttctttatcgtcttttggtaacagatattctcccaggaatctccactctcgctgttaaacttcccagcaagttcaaaggggctctcatctctccaagatctgctagttaacttactgctgctacatggcattgcctttgataatttagcccctcccagaggctgatttttctccatctcaggataaaataaggtgtgttttttgttgttgttgtttttgtttttgttttttkttgttgttgttttttgagacagagtttcgctcttgttgcccaggctggagtacaatggcgcagtctcggctgactgcaacctccaactcccgggtccaagcgattctcctgtctcagcctcccgagtagctgggattacagatatgcgccaccatgcccggctaattttgtatttttagtagagacggggtttcaccatggtggtcaggctggtctcgaactcctgacctcgggtgatccgcccgcctcggtctcctaaagtgttgggattacaggcgtgagccaccgcacttggcctaaaataaggttttatcaagccgtcaaagccctggactttggcactgttttcaaagggtgttaaaacattcccaaaggatgaaccctcttgaactaaggaatcactgaggggaaaggaatgcaagcaggtctgacaggatctgcagctttcccctgatttattgcaccttgctttagaggaactaaatgctcattctgatgagtttagtgaatatgagacactctctgtggatccaggatttcaccatatgctattgggtcatatgtctcaaaactcaggtgtgctcatcgttgaactaataacctcagttattcatttggtttcaaaatgcttatcctggcacgtacagtactgttttcttttagggctgagattttatctaacacaattacagtttctgataagctattctgtgtttaaagcacatatttttaaaaaatcagaggtctgcatctccaagcacagggcagtccaggataaatcagacccactaaaaatataaggactatagctgatctttgtattattgttgttagaaaggtaattattccaaattgcagaaagaatgaaaatagaaaaaagaaaaatatgacaagtaattctaggctattcttttgatgtgtttccttttagtctttttaaaaaaagataaaattttgaattttttttttcatttaacttatcacagatattttgcctttattttgccagtctgcttcatgactatggcttttagagatcgcttttcaaaaggacatgttttagtgaacgctatcaagctggaaattttaaaaagcaagaaatccagatcatcacacattttttcattattttttagtcatcaaattatttttcatgtgtatttcagaggattgctcttccaagaaatactctgtaatacactgtatg

SEQ ID NO: 1375 - DNA, 1533 bp, Homo sapiens
tcactccctcccccagtgcaagaattaaacacggatctgcagccggatggattctatctcctgtcttttatccagctggaaagctacttactagttctttatcgtcttttggtaacagatattctcccaggaatctccactctcgctgttaaacttcccagcaagttcaaaggggctctcatctctccaagatctgctagttaacttactgctgctacatggcattgcctttgataatttagcccctcccagaggctgatttttctccatctcaggataaaataaggtgtgttttttgttgttgttgtttttgtttttgtttttttttgttgttgttttttgagacagagtttcgctcttgttgcccaggctggagtacaatggcgcagtctcggctgactgcaacctccaactcccgggtccaagcgattctcctrtctcagcctcccgagtagctgggattacagatatgcgccaccatgcccggctaattttgtatttttagtagagacggggtttcaccatggtggtcaggctggtctcgaactcctgacctcgggtgatccgcccgcctcggtctcctaaagtgttgggattacaggcgtgagccaccgcacttggcctaaaataaggttttatcaagccgtcaaagccctggactttggcactgttttcaaagggtgttaaaacattcccaaaggatgaaccctcttgaactaaggaatcactgaggggaaaggaatgcaagcaggtctgacaggatctgcagctttcccctgatttattgcaccttgctttagaggaactaaatgctcattctgatgagtttagtgaatatgagacactctctgtggatccaggatttcaccatatgctattgggtcatatgtctcaaaactcaggtgtgctcatcgttgaactaataacctcagttattcatttggtttcaaaatgcttatcctggcacgtacagtactgttttcttttagggctgagattttatctaacacaattacagtttctgataagctattctgtgtttaaagcacatatttttaaaaaatcagaggtctgcatctccaagcacagggcagtccaggataaatcagacccactaaaaatataaggactatagctgatctttgtattattgttgttagaaaggtaattattccaaattgcagaaagaatgaaaatagaaaaaagaaaaatatgacaagtaattctaggctattcttttgatgtgtttccttttagtctttttaaaaaaagataaaattttgaattttttttttcatttaacttatcacagatattttgcctttattttgccagtctgcttcatgactatggcttttagagatcgcttttcaaaaggacatgttttagtgaacgctatcaagctggaaattttaaaaagcaagaaatccagatcatcacacattttttcattattttttagtcatcaaattatttttcatgtgtatttcagaggattgctcttccaagaaatactctgtaatacactgtatg

SEQ ID NO: 1376 - DNA, 1214 bp, Homo sapiens
aagaaaattaagaaaatgcgagtcactgattacaaaggaataaatctaatcaatctacagttcagtaaacttgtgaggttaaatataattttaaaaatccaccactcttctgtaagaggagactaaaaaatatttacagcttaatttaagaacaaataacaattttcctttcaaaagggcctaaataaataaaattcatatagacaacctctggctgaatgcaaacctctatggttaagaataaaacttgggtgaagttaataataaattaaactaagaactcaaaatgttatgttattctaattattgaccatcagttctaccaatgtaaaacaaataatgtttaatttcatgattaaaaaaaaacccaaaatgccccatagagattattattagcagtaacacaaaataagttattttaaagctattattcatcctgagcaagcaggtaaaatttctacttacaaaacttaagtgttactttttctcaagtagccagtcccgcaatggtgtgatgaatgcctttaccaaggaactattaaaaactcagttaaatatttatatattgatatttattgtcagcatcttctacaaaaaccttgttcaccaatgccctcagcatattttatatttatcttgttaatttcagtcaaatggctagccagtaaagcgtagattaaagagcatgcaatctataygaagtccatctcctaccttagaccccctttgtctagagtcagtcttatcatctgtactaagaactttaaataaacacatttaattagaatttctttaatactttggtgggaaaggactatgtaactgcatgtctaatttttttttaaagttaaaaagtctctaataaattttcctaaaatctgttaagaccagatgcccaatagaaaaatggggagaattcacactgaacattaacaagaaagacatgaaaaaatactcaacatctgaatcataaaataaaaatacaaattaaaactataatgtaatactattttccaaaacagatttctctccttttctctcctctcccgacctccccttaattattcactctctgagccagcaatcattcatcttggaatttatcctctagatattttatatacatagcaaataatgttaacaaggctactcattacaacactgtttataacagcaatgcttctggttaaatgaatcatggtgtagccatccat

SEQ ID NO: 1377 - DNA, 1246 bp, Homo sapiens
tgcatatactgccaaataatgaaatagaatagggctaggatacatctagtttataattattatagttgttgagtattgttccactgttaaatatcttttttttggaaagctctaactgagatatattcaagcagatataattattgctgttccatagatgctaaacaagatatttcatgttatctgtaatgaggcatgaagtaattacaatttcaatggtgagcacttgataagttgtagatcatcttccaatgtaagaagacatcctcactccactttataatgtttaaactagaactcacacggtgtgcctgtgaaagcagtcagcagtgaacaacttaaatagaaaatactgagcatagagttgatggactgatgtgcatggattgggcaaggatctcataaaaatcttaacatgagctgatcctatgggcctaartaacatcaggaaaggtttaggttacacccaaaggtaggaaggaagaaaggaaaaggacagacttgccaagggaagtattgttacctgaagtttccaaggtaacaaaattatcttttggggatacctttataataagacacatgagtttatgaatgtaggctttaaactttttttttttctttttttttttagagatggggtctggctaagttgaccaggctggtttcaaacttctgggctcacgtgatcctttcacctcggtgttcagggtagctgagacttacaggcacacaccaccatgcttggctatggctttttttgtgtgttgtttttttttttatttctggcgatggcaggaatgtaaattttaggagagaatgagagactagctcttgttagggattctaaaattccactaaataattcctgactctgacagttggcaggtatattctggatgggctctaataaattagatcagtatttaacaaggagaattatttttgctttgctttctgtgactttggattcactcagaaggaaagtgagggcaggatgagtatggaccacagttctcatgctccttctggcagctctaaaaccatcagaatctaggaccatccctgcccttgactgcatggggagtttggatctactaacatgaagttgccaagtcacagtaatatcaaattcagcctgggcccagctgttgagtccctgaagttctcaggcaaaatgagaactggtaggactggtaagaacagagcatcaggtgggtgggcagcataagatgtgtgtgctagaaag

SEQ ID NO: 1378 - DNA, 564 bp, Homo sapiens
ctggggttaackggtgtgagccactgcacccggcctcatcatgtgtgtctttcttttccctcatagcatttgctgctctgtaattacactcttcattaatgtgttcatgtctttcttccctgcctctcctcctagggcaaaagcttgctgaccacaaagaacttgtctgtgctgattactgctagatcttggatgtcaaacacagtgaccacattatggatgcagtggaaaattgttaaatgaatgaacaaagtataggtctgccagtttccttggtaggagttaaatgccagtatatgtttatattaccttaatttgttttctttatctataaataaatcttgcctacttctgtttgcagggtaaaattaaggtgattttcttctacaacatgattgagctagcatactctccaggagggaacagacaggcattctgaaaggatgtttggtatttttagagccttttatacatttgtttctgctgttgtgctaatatgctaatgtttatcaaggttgtatttttttccctcccttttctttcttgctgctggcagagcagcat

SEQ ID NO: 1379 - DNA, 630 bp, Homo sapiens
tcccataggcccttaaatctttatgtgttgcttttcttttaagttgtatttttccccttcccctccaagcttagaaatgtttgctctatcaaagaaacgcaggaaggaagggaatgatggcaaggatattgtacaagtccaaagggaacaaaacctaggtgcccacctaccccagctagtttaagaatgtgatgctgttcctatcacggtcactttgccaaaatccatgtgaaggaaggaaaaaagctgggaattagtccagctttcatcaggcctctggcttactatatgatccctaggcaagacactttccctcatcaggcctccaggttcctgactgtaaactgaggtgattggaccccagtggtccctttatatcttgaaaccccagtatttgaaasatgtgactaactgggaaacttctccagtatagggtcccaaagacctttttaaaagtggatcactgccattccccttcaccttcagcctgtgaagcactgtgtcagtaagggccagtcaggaagacagggattttgtgaggtcatttaatagaatttaacaaagggccggaaagattgtaaggcacacaggcttgggaggcaacacagagatggatggacaacagcagga

SEQ ID NO: 1380 - DNA, 630 bp, Homo sapiens
tcccataggcccttaaatctttatgtgttgcttttcttttaagttgtatttttccccttcccctccaagcttagaaatgtttgctctatcaaagaaacgcaggaaggaagggaatgatggcaaggatattgtacaagtccaaagggaacaaaacctaggtgcccacctaccccagctagtttaagaatgtgatgctgttcctatcacggtcactttgccaaaatccatgtgaaggaaggaaaaaagctgggaattagtccagctttcatcaggcctctggcttactatatgatccctaggcaagacactttccctcatcaggcctccaggttcctgactgtaaactgaggtgattggaccccagtggtccctttatatcttgaaaccccagtatttgaaacatgtgactaactgggaaacttctccagtatagggtcccaaagacctttttaaaagtggatcactgccattccccttcaccttcagcctgtgaagcactgtgtcagtaagggccagtcaggaagacmgggattttgtgaggtcatttaatagaatttaacaaagggccggaaagattgtaaggcacacaggcttgggaggcaacacagagatggatggacaacagcagga

SEQ ID NO: 1381 - DNA, 630 bp, Homo sapiens
tcccataggcccttaaatctttatgtgttgcttttcttttaagttgtatttttccccttcccctccaagcttagaaatgtttgctctatcaaagaaacgcaggaaggaagggaatgatggcaaggatattgtacaagtccaaagggaacaaaacctaggtgcccacctaccccagctagtttaagaatgtgatgctgttcctatcacggtcactttgccaaaatccatgtgaaggaaggaaaaaagctgggaattagtccagctttcatcaggcctctggcttactatatgatccctaggcaagacactttccctcatcaggcctccaggttcctgactgtaaactgaggtgattggaccccagtggtccctttatatcttgaaaccccagtatttgaaacatgtgactaactgggaaacttctccagtatagggtcccaaagacctttttaaaagtggatcactgccattccccttcaccttcagcctgtgaagcactgtgtcagtaagggccagtcaggaagacagggattttgtgaggtcatttaatagaatttaacaaagggccggaaagattgtaaggcacacaggcttgggaggcaacacagagwtggatggacaacagcagga

SEQ ID NO: 1382 - DNA, 1317 bp, Homo sapiens
aaagagtggcaactccttgaatctttctgtatgttgattttaygtcaattaaataattcttaaaaggcaaagagacaaagaaaagcccttggataaggagaaaatattttaggaaagatacttaaataacaatatcagactttggtgggcaaagttatttactaaaacttttatagctatgagggatcttagaaatcacctagcccaaacctccatatatttgatttgacgattcagacttaggatgtccagaaaaggataagtcctcaaatgtcataggtatacataatttcttccagtaattaaataataagtatgtattcagcccagaagaagtcttttaataaagtttgtcatttcctgacatgctttggtctgtgccctgcaaatatagaagaacaaattgtaaacttctctggccatctttagtcaaaaggggacaatcaaaattttaaaggctgatttgctacagcatactgttataaaattaatgacagccttaatgaaatcctttaatctgatgattaaaaagatcctatgaaataaactgcaagcatgattttcaaacgtatttttaggtcgggcatggttgctcatgcctgtaatcccagcactttgggaggccaaggcaggtggattacctgaggtcaggagttcaagaccagcctggccaacatggtgaaactccatctctagtgaaactacaaaaattagccaggcatggtggtgcatgcctgtagtcccagctacgcaggaggctgaggtaggaaaatcgcttgagcctgggaggtggaggttgcaatgagcagagatcgcactattgcaccctagcctgggcgacaagagtgaaacttctctaaaataataatagtaaataaataaaagcatttttagtcctggagaaatgaaggtaaggcaaattatctgagtctctaaaacttttcattaataatagcttacatttgtgtagggattttaacttttccaaagcacttttgtaacatccacctaattgtattcttacaccatctctgtaaagtagccatagagggaataacaattcccatttgccattgaggaaactgctgccataagaggttattaaagaacttgttcaaggccaagcaaatcagtaggggaactaacactgaaaaaccacatttgtaactccaaacccagtcagacaaccaattccagtgggtaataatatctcttgctcagggaaaatcattctcataaacaagattgtattaccttgagggagtcaccacttgaagtaagaaaaaggaaactttgagatggtttagacacaaatca

SEQ ID NO: 1383 - DNA, 1227 bp, Homo sapiens
ggattctggccagttccttccttgcttgctatgtgacctcargaggtcactggccctctttgggccttggatccaaattctccaaatgatttgtcagcttcgagtttacaggtagggagtggtggtagcagtgaggggctgcttggaggaagtggcatttgaactgacaatcagagggggacagcaacagagactgacaggaaacagaaggaaagagggggtccggaagggacatgtccctgtccccggatgttgggtttccttccagtggtcagaggtggcaggaggcagtttcaaaaggaatcaaaatgcttacaaatcacaacctgggaaatggtgcccttccctaaaacactttcacatccttcttctcaaagggctctgtgatgccaccagggcaagatgatgtgcctatttgacctacgactgaactgacaaggcctgagaaattggggttccattccacatggtgggacgcagggaactggctctcagtcgaaggggccaggtttatttgagggaggactggcccaggaaggagacattgagctcctgcctgggacaccccttcttttaatgctgctctcaatgatttggttcaaaagccacctcttcctgaaagtcctccttggtttctcttaaactcagactccacgtgtgttctccggcttgtggccgatgactgcctctgtcactgtggccagctgccgcgccacgcaggatgaggttctgtctgtgtctgtgagcacccagctctgccacagggccggctggccatagggagggccaagccttctggcaagtctacaagtgccagggccacaggttccctgccaggcactatagtcctgaccaggcagggaaagcccctggcctcgggagcatttttgggcaagtcatttaactccatgggcctcaggttctccatctgtgcaatgggtcaacagcagtgcccacttcagagggttggagtgggaatcaatgcagatgcaggggtgggatgggtcaacacagaggctggcagatagtagccgctcagctaatagagagcttagggggtcagatttgctccatccttgccagggcggggcaataccgagtccttgtccccagcagaaaccgtggtccctttgctgttccagatgctctggaccctgggtactggctccccctggcggtcatgataggaagcgcccttcccctctggctcctgtagagggcgtcgcg

SEQ ID NO: 1384 - DNA, 1227 bp, Homo sapiens
ggattctggccagttccttccttgcttgctatgtgacctcaggaggtcactggccctctttgggccttggatccaaattctccaaatgatttgtcagcttcgagtttacaggtagggagtggtggtagcagtgaggggctgcttggaggaagtggcatttgaactgacaatcagagggggacagcaacagagactgacaggaaacagaaggaaagagggggtccggaagggacatgtccctgtccccggatgttgggtttccttccagtggtcagaggtggcaggaggcagtttcaaaaggaatcaaaatgcttacaaatcacaacctgggaaatggtgyccttccctaaaacactttcacatccttcttctcaaagggctctgtgatgccaccagggcaagatgatgtgcctatttgacctacgactgaactgacaaggcctgagaaattggggttccattccacatggtgggacgcagggaactggctctcagtcgaaggggccaggtttatttgagggaggactggcccaggaaggagacattgagctcctgcctgggacaccccttcttttaatgctgctctcaatgatttggttcaaaagccacctcttcctgaaagtcctccttggtttctcttaaactcagactccacgtgtgttctccggcttgtggccgatgactgcctctgtcactgtggccagctgccgcgccacgcaggatgaggttctgtctgtgtctgtgagcacccagctctgccacagggccggctggccatagggagggccaagccttctggcaagtctacaagtgccagggccacaggttccctgccaggcactatagtcctgaccaggcagggaaagcccctggcctcgggagcatttttgggcaagtcatttaactccatgggcctcaggttctccatctgtgcaatgggtcaacagcagtgcccacttcagagggttggagtgggaatcaatgcagatgcaggggtgggatgggtcaacacagaggctggcagatagtagccgctcagctaatagagagcttagggggtcagatttgctccatccttgccagggcggggcaataccgagtccttgtccccagcagaaaccgtggtccctttgctgttccagatgctctggaccctgggtactggctccccctggcggtcatgataggaagcgcccttcccctctggctcctgtagagggcgtcgcg

SEQ ID NO: 1385 - DNA, 1227 bp, Homo sapiens
ggattctggccagttccttccttgcttgctatgtgacctcaggaggtcactggccctctttgggccttggatccaaattctccaaatgatttgtcagcttcgagtttacaggtagggagtggtggtagcagtgaggggctgcttggaggaagtggcatttgaactgacaatcagagggggacagcaacagagactgacaggaaacagaaggaaagagggggtccggaagggacatgtccctgtccccggatgttgggtttccttccagtggtcagaggtggcaggaggcagtttcaaaaggaatcaaaatgcttacaaatcacaacctgggaaatggtgcccttccctaaaacactttcacatccttcttctcaaagggctctgtgatgccaccagggcaagatgatgwgcctatttgacctacgactgaactgacaaggcctgagaaattggggttccattccacatggtgggacgcagggaactggctctcagtcgaaggggccaggtttatttgagggaggactggcccaggaaggagacattgagctcctgcctgggacaccccttcttttaatgctgctctcaatgatttggttcaaaagccacctcttcctgaaagtcctccttggtttctcttaaactcagactccacgtgtgttctccggcttgtggccgatgactgcctctgtcactgtggccagctgccgcgccacgcaggatgaggttctgtctgtgtctgtgagcacccagctctgccacagggccggctggccatagggagggccaagccttctggcaagtctacaagtgccagggccacaggttccctgccaggcactatagtcctgaccaggcagggaaagcccctggcctcgggagcatttttgggcaagtcatttaactccatgggcctcaggttctccatctgtgcaatgggtcaacagcagtgcccacttcagagggttggagtgggaatcaatgcagatgcaggggtgggatgggtcaacacagaggctggcagatagtagccgctcagctaatagagagcttagggggtcagatttgctccatccttgccagggcggggcaataccgagtccttgtccccagcagaaaccgtggtccctttgctgttccagatgctctggaccctgggtactggctccccctggcggtcatgataggaagcgcccttcccctctggctcctgtagagggcgtcgcg

SEQ ID NO: 1386 - DNA, 1227 bp, Homo sapiens
ggattctggccagttccttccttgcttgctatgtgacctcaggaggtcactggccctctttgggccttggatccaaattctccaaatgatttgtcagcttcgagtttacaggtagggagtggtggtagcagtgaggggctgcttggaggaagtggcatttgaactgacaatcagagggggacagcaacagagactgacaggaaacagaaggaaagagggggtccggaagggacatgtccctgtccccggatgttgggtttccttccagtggtcagaggtggcaggaggcagtttcaaaaggaatcaaaatgcttacaaatcacaacctgggaaatggtgcccttccctaaaacactttcacatccttcttctcaaagggctctgtgatgccaccagggcaagatgatgtgcctatttgacctacgactgaactgacaaggcctgagaaattggggttccattccacatggtgggacgcagggaactggctctcagtcgaaggggccaggtttatttgagggaggactggcccaggaaggagacattgagctcctgcctgggacacccctycttttaatgctgctctcaatgatttggttcaaaagccacctcttcctgaaagtcctccttggtttctcttaaactcagactccacgtgtgttctccggcttgtggccgatgactgcctctgtcactgtggccagctgccgcgccacgcaggatgaggttctgtctgtgtctgtgagcacccagctctgccacagggccggctggccatagggagggccaagccttctggcaagtctacaagtgccagggccacaggttccctgccaggcactatagtcctgaccaggcagggaaagcccctggcctcgggagcatttttgggcaagtcatttaactccatgggcctcaggttctccatctgtgcaatgggtcaacagcagtgcccacttcagagggttggagtgggaatcaatgcagatgcaggggtgggatgggtcaacacagaggctggcagatagtagccgctcagctaatagagagcttagggggtcagatttgctccatccttgccagggcggggcaataccgagtccttgtccccagcagaaaccgtggtccctttgctgttccagatgctctggaccctgggtactggctccccctggcggtcatgataggaagcgcccttcccctctggctcctgtagagggcgtcgcg

SEQ ID NO: 1387 - DNA, 1227 bp, Homo sapiens
ggattctggccagttccttccttgcttgctatgtgacctcaggaggtcactggccctctttgggccttggatccaaattctccaaatgatttgtcagcttcgagtttacaggtagggagtggtggtagcagtgaggggctgcttggaggaagtggcatttgaactgacaatcagagggggacagcaacagagactgacaggaaacagaaggaaagagggggtccggaagggacatgtccctgtccccggatgttgggtttccttccagtggtcagaggtggcaggaggcagtttcaaaaggaatcaaaatgcttacaaatcacaacctgggaaatggtgcccttccctaaaacactttcacatccttcttctcaaagggctctgtgatgccaccagggcaagatgatgtgcctatttgacctacgactgaactgacaaggcctgagaaattggggttccattccacatggtgggacgcagggaactggctctcagtcgaaggggccaggtttatttgagggaggactggcccaggaaggagacattgagctcctgcctgggacaccccttcttttaatgctgctctcaatgatttggttcaaaagccacctcttcctgaaagtcctccttggtttctcttaaactcagactccacgtgtgttctccggcttgtggccgatgactgcctctgtcactgtggccagctgccgcgccacgcaggatgaggttctgtctgtgtctgtgagcacccagctctgccacagggccggctggccatagggagggccaagccttctggcaagtctacaagtgccagggccacaggttccctgccaggcactatagtcctgaccaggcagggaaagcccctggcctcgggagcatttttgggcaagtcatttaactccatgggcctcaggttctccatctgtgcaatgggtcaacagcagtgcccacttcagagggttggagtgggaatcaatgcagatgcaggggtgggaygggtcaacacagaggctggcagatagtagccgctcagctaatagagagcttagggggtcagatttgctccatccttgccagggcggggcaataccgagtccttgtccccagcagaaaccgtggtccctttgctgttccagatgctctggaccctgggtactggctccccctggcggtcatgataggaagcgcccttcccctctggctcctgtagagggcgtcgcg

SEQ ID NO: 1388 - DNA, 1139 bp, Homo sapiens
ggatccaatctcctcccctcaggccccacctccaacattgggaatcacatttggacatgagatttggaagsaacaaacatcccagacatatcagctgccttcatgggagctgctaccagaatcagaaaaagccacccaaaccaaagcagatacgttctctatctttttcctggagctatggagtctctcacctagtgtctgtggaaactccttcattctctctccacttaccctttactacccatggccccaaattgttacccaacatggctgccgtaaccctacctgaccttgcaagttgggtgtccatcgtccatctctggtccaatcagctgcgaccagaagggcagaatcatgtgatatgatgtccacatgacatggatgggatctccagggatctatggaggtaggaaggaaatgcttgctgtatttgttactggcccccgcagggcccttcctctgagatcccagcaaaggggtaagagcagtccatgtgctatggtttatatgtgttctctttgctccttacatccacagcccagagaggcatcacagtctgactgtgagagaaacagccaagacaggagtgacgagactcaacctgttcagggaagtcactagaaacccaggcgtcctagatgcagcgggtataagcccccaagaccaggactggctcccagcgccccatgagagatgtgtggcttagtggctagggccaggcagccctgggtccaaatcctagccccatccctgacccagcaagtcactcagctccttccgtcctcattcatcgcgaaattgggataatcccgtacttatctcaccagcttttttttttttttaattgagatggagtcttgctctgtcacccaggctggagtgcagtggcacgatctcagctcactgcgacctccacctcctgggttcaagtaattcttctggtttcagcctcctgagtagctggaactacaggcacatgccaccatgcccagctaatttttgaatttttagtagaaatggggtttcaccatactggtcaggctggtctcaaactcctgacctcagatgatctacctgcctcagcctccgaaagtgctgggattacaggcgtgagccactgtgcctggcctgccagattt

SEQ ID NO: 1389 - DNA, 1139 bp, Homo sapiens
ggatccaatctcctcccctcaggccccacctccaacattgggaatcacatttggacatgagatttggaagcaacaaacatcccagacatatcagctgccttcatgggagctgctaccagaatcagaaaaagccacccaaaccaaagcagatacrttctctatctttttcctggagctatggagtctctcacctagtgtctgtggaaactccttcattctctctccacttaccctttactacccatggccccaaattgttacccaacatggctgccgtaaccctacctgaccttgcaagttgggtgtccatcgtccatctctggtccaatcagctgcgaccagaagggcagaatcatgtgatatgatgtccacatgacatggatgggatctccagggatctatggaggtaggaaggaaatgcttgctgtatttgttactggcccccgcagggcccttcctctgagatcccagcaaaggggtaagagcagtccatgtgctatggtttatatgtgttctctttgctccttacatccacagcccagagaggcatcacagtctgactgtgagagaaacagccaagacaggagtgacgagactcaacctgttcagggaagtcactagaaacccaggcgtcctagatgcagcgggtataagcccccaagaccaggactggctcccagcgccccatgagagatgtgtggcttagtggctagggccaggcagccctgggtccaaatcctagccccatccctgacccagcaagtcactcagctccttccgtcctcattcatcgcgaaattgggataatcccgtacttatctcaccagcttttttttttttttaattgagatggagtcttgctctgtcacccaggctggagtgcagtggcacgatctcagctcactgcgacctccacctcctgggttcaagtaattcttctggtttcagcctcctgagtagctggaactacaggcacatgccaccatgcccagctaatttttgaatttttagtagaaatggggtttcaccatactggtcaggctggtctcaaactcctgacctcagatgatctacctgcctcagcctccgaaagtgctgggattacaggcgtgagccactgtgcctggcctgccagattt

SEQ ID NO: 1390 - DNA, 1139 bp, Homo sapiens
ggatccaatctcctcccctcaggccccacctccaacattgggaatcacatttggacatgagatttggaagcaacaaacatcccagacatatcagctgccttcatgggagctgctaccagaatcagaaaaagccacccaaaccaaagcagatacgttctctatctttttcctggagctatggagtctctcacctagtgtctgtggaaactccttcattctctctccactyaccctttactacccatggccccaaattgttacccaacatggctgccgtaaccctacctgaccttgcaagttgggtgtccatcgtccatctctggtccaatcagctgcgaccagaagggcagaatcatgtgatatgatgtccacatgacatggatgggatctccagggatctatggaggtaggaaggaaatgcttgctgtatttgttactggcccccgcagggcccttcctctgagatcccagcaaaggggtaagagcagtccatgtgctatggtttatatgtgttctctttgctccttacatccacagcccagagaggcatcacagtctgactgtgagagaaacagccaagacaggagtgacgagactcaacctgttcagggaagtcactagaaacccaggcgtcctagatgcagcgggtataagcccccaagaccaggactggctcccagcgccccatgagagatgtgtggcttagtggctagggccaggcagccctgggtccaaatcctagccccatccctgacccagcaagtcactcagctccttccgtcctcattcatcgcgaaattgggataatcccgtacttatctcaccagcttttttttttttttaattgagatggagtcttgctctgtcacccaggctggagtgcagtggcacgatctcagctcactgcgacctccacctcctgggttcaagtaattcttctggtttcagcctcctgagtagctggaactacaggcacatgccaccatgcccagctaatttttgaatttttagtagaaatggggtttcaccatactggtcaggctggtctcaaactcctgacctcagatgatctacctgcctcagcctccgaaagtgctgggattacaggcgtgagccactgtgcctggcctgccagattt

SEQ ID NO: 1391 - DNA, 1139 bp, Homo sapiens
ggatccaatctcctcccctcaggccccacctccaacattgggaatcacatttggacatgagatttggaagcaacaaacatcccagacatatcagctgccttcatgggagctgctaccagaatcagaaaaagccacccaaaccaaagcagatacgttctctatctttttcctggagctatggagtctctcacctagtgtctgtggaaactccttcattctctctccacttaccctttactacccatggccccaaattgttacccaacatggctgccrtaaccctacctgaccttgcaagttgggtgtccatcgtccatctctggtccaatcagctgcgaccagaagggcagaatcatgtgatatgatgtccacatgacatggatgggatctccagggatctatggaggtaggaaggaaatgcttgctgtatttgttactggcccccgcagggcccttcctctgagatcccagcaaaggggtaagagcagtccatgtgctatggtttatatgtgttctctttgctccttacatccacagcccagagaggcatcacagtctgactgtgagagaaacagccaagacaggagtgacgagactcaacctgttcagggaagtcactagaaacccaggcgtcctagatgcagcgggtataagcccccaagaccaggactggctcccagcgccccatgagagatgtgtggcttagtggctagggccaggcagccctgggtccaaatcctagccccatccctgacccagcaagtcactcagctccttccgtcctcattcatcgcgaaattgggataatcccgtacttatctcaccagcttttttttttttttaattgagatggagtcttgctctgtcacccaggctggagtgcagtggcacgatctcagctcactgcgacctccacctcctgggttcaagtaattcttctggtttcagcctcctgagtagctggaactacaggcacatgccaccatgcccagctaatttttgaatttttagtagaaatggggtttcaccatactggtcaggctggtctcaaactcctgacctcagatgatctacctgcctcagcctccgaaagtgctgggattacaggcgtgagccactgtgcctggcctgccagattt

SEQ ID NO: 1392 - DNA, 1139 bp, Homo sapiens
ggatccaatctcctcccctcaggccccacctccaacattgggaatcacatttggacatgagatttggaagcaacaaacatcccagacatatcagctgccttcatgggagctgctaccagaatcagaaaaagccacccaaaccaaagcagatacgttctctatctttttcctggagctatggagtctctcacctagtgtctgtggaaactccttcattctctctccacttaccctttactacccatggccccaaattgttacccaacatggctgccgtaaccctacctgaccttgcaagttgggtgtccatcgtccatctctggtccaatcagctgcgaccagaagggcagaatcatgtgatatgatgtccacatgacatggatgggatctccagggatctatggaggtaggaaggaaatgcttgctgtatttgttactggcccccgcagggcccttcctctgagatcccagcaaaggggtaagagcagtccatgtgctatggtttatatgtgttctctttgctccttacatccacagcccagagaggcatcacagtctgactgtgagagaaacagccaagacaggagtgacgagactcaacctgttcagggaagtcactagaaacccaggcgtcctagatgcagcgggtataagcccccaagaccaggactggctcccagcgccccatgagagatgtgtggcttagtggctagggccaggcagccctgggtccaaatcctagccccatccctgacccagcaagtcactcagctccttccgtcctcattcatcgcgaaattgggataatcccrtacttatctcaccagcttttttttttttttaattgagatggagtcttgctctgtcacccaggctggagtgcagtggcacgatctcagctcactgcgacctccacctcctgggttcaagtaattcttctggtttcagcctcctgagtagctggaactacaggcacatgccaccatgcccagctaatttttgaatttttagtagaaatggggtttcaccatactggtcaggctggtctcaaactcctgacctcagatgatctacctgcctcagcctccgaaagtgctgggattacaggcgtgagccactgtgcctggcctgccagattt

SEQ ID NO: 1393 - DNA, 712 bp, Homo sapiens
tgaactcctgacctcaagtgatctgcccaccttggcctcccaaagtgttgggattacaggcatgagccactgtacctgatgacctgcttttttaatggtcatttagtcttggggaatgaataaataagtaaataagtgtcagaggggcgactgccagcccctgcgggagacaggcagacttgatgcatgattgctttgccggttgctctgtctttgtgaagaagtcagaagctctgagatgagaaacttctgccttcagcaaaggagatgcctctcatcactctgcctcccttaggcactgattccagggttgtgggaagtaacactcagtagatgcttagaatagtctctagctgttcaataaatgttaactattgttgctcccatcttacaggtaaggaaactgaggccaagtaaagtgagatcatttctcccacgccacacagagggggcagagccgacactgccctcccccagggcctgggctcataagcaccatggtggtcggtgtcctctgaaggataacagcccttcagaggatgctacagtccttcagcccctcttccagcctgaatgtcctcatctcatccatcaggctcygaggtgaaggtggaagtgaggccagaggggcagtgctgtgccaagtgagggcatgaggaagagatgatggcataggctgtcacttttaccagcacacgaacattggagcagc

SEQ ID NO: 1394 - DNA, 613 bp, Homo sapiens
atcatctctgggttacttttaaaaatgtaaatgctatgtaaataggtgttatactgtattggtttttcatttgtattatttttgtattcttttttattgtttgtttgctttttcccaaatattttctatctatggtttgttgaatctgaggatgtggaacctgtggatatggagggctgacttatatagagggaacatcataaaacctttttctcccttagatcattacttcttgagcacctggcaaatgtaaagtactgttctagaagctgaaggatttccgtaaatgcagaatatgttaccctaccctcaaggattttacagtccagttggtgaatggaataggtcgtgcatagtrcaagtcaataggcacaagcacatgaacaaatcagacagtaggggtcatggtatataagagaagggtgatccagaaataccaaaaagtatctatgcagagtgtgagtcaacactgtgtacataaaactaagtttttaggcccagttaattaacattgctgtttttactttttcattagcatgttggcagataaattgaacatgactccagaagaagctgaaaggtggattgtaaatttgattagaaatgcaagact

SEQ ID NO: 1395 - DNA, 597 bp, Homo sapiens
tattacttttaaattagatgaagttggattcaacacagttgaataccaatgtaataatattacccagagcaaaccaactctggagactgccagagcagcaataatttgatcagctgaggagatcttttgtctcttgacccaggcaatgaaatttatcagtgctataaagccattggcaaaatttccaagaataaatgcaaccactactagaatggaaaaaacaatgtgtagaaaactcatcatgtctaaacaaaaaagcaagtaaaaaattcaggcctaatgtcactgatggtgactcctctgatattcaagactttaagttaaatatgcacttgattcctgaatgtycaataacattctttatacttttaaattctgtgaacaatgtcaacagaaaagcaccagcttaaactaatgaatgagttcaatgctgcctttatgggaaatactgttagtcccaaaacaactcaaattaattcttattcataaagtctctattcttgctataggctgaaatttttcatactgatgttgaagggaaagctgaattctcatttgctagcattcaaataaagacatatcctctttcattgcttt

SEQ ID NO: 1396 - DNA, 1197 bp, Homo sapiens
  misc_feature (1)...(1197): n = A,T,C or G
gcatatgcagttagaaacgtcatttcttccgcttttgaattaaagaaaatctgtttttgaagttgagatctcatgtaaattattttagtattctttctaaagcacttttaagcccctgatttgctaattatatccttaccttccgtttgtaaaattccttctaaacttcagataagagaactcaaatcctctctttttgaaaaataaaatcaatgtanatatagtatagaaattgtggaaaatatttcagtcaaactttttgtaaatgttaaaatagtatctgtgaaccctatgtattaattatgggatgagccttaacgttgtaattttgtcatcaatgatgaaatgaaagggtgttgacatatttctttaataggaggttctattataagaaagaaatgtacagtcttgttcccagctaaattctacttgactgtattaattcttggtgttatgaaatttaaacaatgtgatttaaaccttaagatgaatcatccccccacctgatttgtgtatttttttaatcatatatcttcctcagtacaatgtaaggactgtaaaaaaagagataatgtctgtcttgctttctgttgactcccaggaactcgaaaccagcaccaagaatagatggtcaaaaatgatactttaatgaacaaataaatrggtggctaaaatggataagttgatgtggtaaaccagtgaaaaggaaactcacacaaaatctgcagttgcatgaattcccctgttccagtctcaggttaagattacaggcttatccaagcagaatccttctcctaaggaaaagtttggctattccacaattttaggggaaatatgacaataatatagtcttgatgcagctgtatcaggtgtctgagttggagacaaggtagaacaccaaaattagatggcacctattataatagtttgaaaaatcatataaacaactttggtctatttgaatatgtatttttttctattgtcaattatttgtattatgatattttctagttgattatttaaacaaaaatgacatttcatttcaaaaaattgagttagtaaccagctactttaccaaaatgtttttaatgtaatacctgttattgaagtgctaccatttatttagaagtcaagttcaagacaaaaatggcaaggacgtgtggaaattgagaccggaacaaatgtaaaacaatgtgt

SEQ ID NO: 1397 - DNA, 700 bp, Homo sapiens
tgactttcatgaccaccaccaagggactggatgatggaagacagaacaacagagatgatagttctgcctcaaggaaaccctgaccaataagaaatagaagactaatgacagccgagcagatacattctccctcctctctcacttccacggactaatgccagctgtggtttccccctgtagcccttctggaaaaagtgctggaagccaagtacacgcatctgatgaccgtcatgctgtctctctcacctcactgtgaagtggctgycagcagagccataccagacatcaccacacattgtttcacatttcttcctgtctcaatttccacacgtccttgccatttttgtcttgaatttgacttctaaataaatgttagcactttaataacaggtattacattaaaaacattttggtaaagtagctggttactaactcaattttttgaaatgaaatgccattttatttaaatagtcaactagaaaatatcataatacaaatatataattcacaatagaaaaaaaattcaaatagaccaaagttgtttatatgatttttcaaactattgtaataggtgccatctaattttgatgttctaccttgtctccaactcagacacctgatacagctgcatcaagactatattattgtgatatttcccctaaaattgtggaatagccaaacttttccttagaggaaggat

SEQ ID NO: 1398 - DNA, 1239 bp, Homo sapiens
gtaagaatgcctatgtctaggttaaaatctatgttcttccatgttccagctgtaagatcttggccaagtcactgaaccattctgggcctcacaacatcacagtacagatatcataggaytgttgtagagaaacagtgaatcaatatgcccagactaatgcctataggatatgtaactgttcattaaatttttgcaactatgaattgtgttgttgttggaatacagaaaataaattaattatagcttggagaaatcaaggaaggctttacagaggaggtaaaatttgagttgtcccctaaaaacttcacattaataagtaaaggtagtggaaataaaaagtcagccacataaatggcttaaaagaacctgcaccatttactgactttgatggccaaaccacactaatcagagctatctacaaacttcaaataacttctgtaaaactatttaggctggcgtgctattctccttatatgttgatttatgttcttagaaagaccactgtaagaaaaaaataaagctttttagaaacacatagttgtcagaaacaatcaaagattccctctctggaagcctgcataagagaaccgcttagcagaataaacttattccgaatgtgtgggcatacacaggaatcaatcagccctttcctgcagctcttgtctgttcattttatatagttgcccagtttgacaagaaatccaggaaagggctgagaagtgttgtcagcataaagatgggagagaagtgatgtactaggctaataaaaggactcacaaaggtccctgaagtcataaatccttctcacgacttttaaaagctgtttcctttgtaggattgctgtgatggaggttagacagagtgccctttccatcttctcccctgcatgttggaaaccccaagctaagtgcgtgaaaggaagacaaaatgtaatacgactttctgccttaactattcttctcttccctccacgtgattatgttccagccttgcccatggagaaaggggctctgctgcccgggcctccccagccctctcctgcctgggctgacctgccctccctatcagttctgatgattacttccttccccatgcacttggagaactaccagattctcttacacattaatctaaatcctggcactcatccttagcatttttattaaatagataatttttcttgttgtttttaagtcaattcttcaggtgaatctggcatgggaaatattgcaaatgatg

SEQ ID NO: 1399 - DNA, 906 bp, Homo sapiens
cataaacttagatacaggggaaaaaaagaaattgtccagtattgcagaatttgtaggagctaagctgagcctggagcattactttttactccaaaatctatgcctgaaagatacttaactctacttgcaatactatgaccaggaaaagtagtatctcacattkgaataataatgctttgtaggttacaaaacctttcatgtcaccttgttacatctgatccataaaattctctagtgaggcaggaaagtgagggatataagataaaaagaagttataacatgcccaatagtgcatactttttttttttttttactccaaagtccaagttttcttccccactaaatcatacctctccctgggcagtaaaataataataataataatattaaaataatgtaaacatgtgtcaaatgcgtacaacatgccaaaaggcttctctcctctctgccattcttttttgcttgaacttcttagtatttcttttaacattttattgtctacagtaatgttaatgggcccacagttgtctcagctttcaatttagaattacctttccattatacactgttccatatattacaaacattcaggagccctgtagatcattcctttatccttttcttgctattctcaatattactaacctagtacaagatctcttcatttcacacctgaattactacagcttcctaatcaatcttcttgtctcctccaattttatttatcttcttgcttctatgcaatactttcccttggctgtaacttcttgagcagagtaacttatcttgtacattctctttccttccctgtaattaaagcatttgtgttagaaaaatgccaaagtttcttaaaattttgatattaagagattcctacagcattctttttaccagggtaccctgctt

SEQ ID NO: 1400 - DNA, 670 bp, Homo sapiens
taagtctcacaagatttgatgattttataaggggtttcccctttcgcttggctctcattctctcttgcctgctgccatgtaagacatgcttttcgccttctgccatgattgcgaggcctccccagccgtgtggaactttgaaccattaaacctgtttttctttataaattgctcagtcccgggtatatctttatctgcagtgtgaaaatggattaatacaccatctcatagcattttgcccttcttttttcttggttgatgtatcagtggtccttatattacagttcagcgcaataatttataatcataattatggccatgagttatgttcagttaattttgtttaagaaggctaggaagtatagagtagtaagtgtataattagtagcacgtgtattgtacttagcagtttacaaatgctttcacatctggttttatcttctgtaagataggctttgttacccctatgtttgtacttgagaaaatgaaggcttagttacagttaagtggtttgtcagaaacacagaattagtaagggktatgatctaggcttgatcatgtatcctctgactctagattctctcgcattatatcacacttctcataattgccatctaaaagggtttactgttgtttaaaggcataatttttatttttttctggatttcca

SEQ ID NO: 1401 - DNA, 1201 bp, Homo sapiens
aattgttggcatgcctactctttaccactagactgtgagtccctcaaggatagggatccctgtttattcatcatggtatcttcattggctggcacaatgtctggcttgttgtaaggtagtaaataattttttttgatggataaacatttttacgatgccagttttacacgtgggttatattttctctgaagcacaaaaccttaaaagagtttaaaaacattttaaaaaccatgtttcatttgttaacttgcataaaagatcaatgaatcgttgactgcttctttaggcaatattttactaagcaataggtggcagtagtgtgttgtacttgactttacctttgtgatttttttttttttcagctttcataatcttaatgcagtgtcaaagtgtaaaggacacaattgcagtactctgatacctaactttttgtaacatgatcatgttttaagcaagtgagcatctcatagaaaataaagcaaaacaacaacaaaacacagccaaagtcagtcaatgtgcatctcttgcctgtctaaactatattcagattcattagagaattacaactgcacggtcttaacagcatttcctcaccaactgtttaatagctgcttcaaaataacagtgatttgcaataatgaaaatcaaaaattatctcagaggatatgtgtttcttttttttttttattttcccccgagatggagtcttgctctgttgcccaggctggtgcgatctcagctcactgcaacctctgcctcctgggttcaagtgattctcctgcctcagcctcccgagtagttgagattacaggagygtgccaccatgcccagctaatttttgtattctcagtagagatgggatttcatcatgttggccaggctggtctcgaactcttgacctcatgatcctcctgcctcggcctcccaaagtgctaggattataggcgtgagccaccacgcctggcccaatatgtatttcttggtatcctaagaagcctacttaggcctttatttcaaaaatagtgtattaagttcattgactttaactacagttattaaatgctttatttttcttcttttactcttttttttttccctgtcagtattaaggtcacctatcttgtttattgagcttcatttagttgactttctgtcatcattaggtatttagaattaaggattgttaccacctctccagcct

SEQ ID NO: 1402 - DNA, 533 bp, Homo sapiens
catcttcggtggtggcggtgaaagaggcatgacactaaatcggcccttaggactctcccctccgtccccaccccgcacccccttcccacacacaccctcattcctgcaccccctcctcaaacgcaagaaagggagaaagacagaaattaaagtaacaggtgakcctccaaggcggtggaggcgggggatctcaaagggtgagcaagcgatgggggtcggggaatgttttggctgagctatcgaaaataggggacccactttccagccccatcacacccgttaatcctcagctgcagccagcctttgggtggggttgcgcctgtcaaagcttctgaatggagagaagcccaaggctatggaatgcatcagctccaactccaggaagggaatagggctttgtgcatatgaatggggctttacaaggcggtgcctcggcttccaaagcgatgcgcctcgcctcgcctcgcccagagcgagactcggtctgaaaataaataaacaaatataaataagaaaataattcatcaataaat

SEQ ID NO: 1403 - DNA, 1646 bp, Homo sapiens
gcatattttaccacaggaaaataaataaataaataaaacaaaaagttctttaacttgttgaaagtagacagaaaagtgttagaaaaaactaaacagaaaaaaaaaaggagagaagagataagtaaagtaaaacaccagctgcctggatctgcggcctggccaagcttctcacttggaggcaatccctgcaggcctccctgcccctcccatccactcgccctccaaggagacccagccagagggggtctggaaaagcctctggctttgctcacccggcctatgtgacccacagtaattctgggtaggtttttccttcaccagggcagcaccaagctcacaccctctttaccgaccttttccaccaacacaatctcatcagatgcttaatcctggtcttatttcacagacgcatgagtttcattccagggtctctggggttactctgcccatgagaagccctgagaaacggggtgctttctgtgtggggcataagtgtcccctgtggcaagaggcctggctgtcctgggcgggggtccttccgggctggggtgccatccttccagcacatcctcctcctctacactccctgggagggcccaggctgtccccgccccataggcctggctcccactagcagggaaggcctcatcttatccgcaaagggtgggcctggatcagcaggaagcccaccgtctcctcgtgcctggcaccctccagaataagagacaaattactgacagaggttgcaagctgctcaaaaaattcactctagaaaagcaggggctccgttccccaatcaaagccctggggcggatgtccatgtttctagaacctgtaaggtcattctgtggtgttagcccatgttgaaagagagtctagctgggaggtgtagaaagtctgatacgtgtgtttcctttgtaggatttccttccgtctggaggagggaggggtgatcagcaggcacttagggatgatctcagcggtgacggcttcgtattccagggggcttccagggggcttccagggggctggtgttcctcctcactctggcctgtccaactctgagtcccaaatttggggctggcagacagggtcaccatggtcgggggctcctcatttttgccatggctgggtgggcaagagatgtccacagggctggggtggacagagcagccatcctgtgggtcaggttagaccccaggtcccattggtcagggacaccccctccttagccccttatcccttcctcaactaagacatgagcagcgtgtgctccaggtggggaattcccatgccagctgtgtgggcaggacgcagctgccagtgtcactgtggccggcacccttccctattctcacgccatttgcattcttgagtacagccagttcagtttctggtcctgccccaccctggcagccacgatacccttgggcccygtggtatcaggagaaccagctccgaggtgggtgaggctctgtctgagacagcgagtcccagggatccccagggaagttacaggcttaggagaacactggggagccgctggccccagacacttggtggggctgccccacccgcagccaggctcggaaaacctctctgtggtctcctgtgtggagaggaggcggggagctggttagcccgag

SEQ ID NO: 1404 - DNA, 617 bp, Homo sapiens
tttcaccgtgttgaccaggctggtcttgaactcctcacctcagatgatccaccctcggcctcccaaagtgctgagattgcaggggtgagccaccgcgcctggccttcccctctcttttgagtgttgggattataaatggattttgagggatttaaatttttcccagaatccacctgttgaagataattaagctgagactcagttgtggaagtgtccaagttgcttgttaytgacacaactggtgctggaaatgagcctcctgattcccactgttaagccatgtgacttttaagttgaagacttttttaatatcacggagtgttgttactgaataaattccagccataggaattgtgtatttatcatatgtaaccaaaatcccaagaataccagaaaatcagctgtgtgttcagactcgtgcatcttttctttttcccataacagtccccggaatatgtgaattgaagttagaattaagcgtgtcgtacgtaatatttgataaggggctaatatacattatttaaaataatggcattttaggaatttgatgacgcattcaaatttaattgttctactttttgtggcggtttctctgttgcagactggaaatagcaaag

SEQ ID NO: 1405 - DNA, 654 bp, Homo sapiens
  misc_feature (1)...(654): n = A,T,C or G
attaagaaaacagaacatataattttgaacgctgagaaaaataaaaatttaaaaactacactgtatacacggtatacctcaactgtgaataatagtagtcatgtaaagtcagtcataattatgtaactcctccctcccgattttacaacaaatgattctataacgctgggaggatgggagaaaagagatgtgtgtgtgtgtgatggtggtgaggcaatcaagatctgatatagaanaatgcagaaaaaggagtatacacatgtttcttcggattaaaanaactaataataaatcaccaagagtggtaaagttttaaatcaagatctgatatagaaaagtgcaganaaagtagtatacgcattttttttttcaggaaaaaattaactaataaaccactaagaggggtaaagtgttaaaatagttgcattgttctatattccactcactgtgtccagaaaacagtgttctatggctttaartagtaaacatcttgccccgtccaacaccatgtctggcctagggtaattgttctttctagtctttattctttgtctccagccaaactccatttgggcacattctcctatagccttttctacctgaagatactctgtgttttaaagctaagcttaggtggcgctttttccattaaat

SEQ ID NO: 1406 - DNA, 1619 bp, Homo sapiens
gggatataggttgttcactccttatgagaatcgaatgcctttctgatctgtcaccatcttccgtcacccccaaatgggaccatctagttgcaggaaaacaagctcagggctcccactgattctacattttggtgagatataattatttcattatatattaataataatagaaataaagtgcacaatgaatgtaatatacttgaatcatcctggaaccatcccccacctcaggttcctggaaaaattatcttccacaaaagcagtccctggtgccagcatggttggggacacctggttaacagatgtgagacccctttgccttgtcttggaataatgtgcagatatgcattgtgtgaatgacatctgatggcgccatcttgccctgtacatcattttagggacagctccagtatttcatgaaaattaaaatttcttctagtgacgaacaaaatgatactcagaagcaattttgtgaagaacagaacactggaatattacacgatgagattctgattcatgaagaaaagcagatagaagtggttgaaaaaatgaattctgaggtattttctttagttattttcaaatgtttttatatgtgtgtatattttaaagaactgtattttggaaatataaaggatttttaagtcatatatatgtgtgtatatattctatatatcctttgtcatatatctatatacgtacgtataggataaagccatgttcttaattcaccttcatttgcctgcaacagttgagtagtgacctgcacaatggcctcaatccaaaggagaagtatttgatatttttcataagaattgatgatctttccacatcagaaataagttttgctactgaaaacagattttctcgtttttggacattagttttttaaaaaatgttaatagagaagtcaattgattatttttactgrtaagaaagtaggaaatgtatagctgggtcagaggccacattgtggataccattatccttacttttgcagagaggaacagtttgctccaagtagtttctcatttcaatgtaaagaggtttgaaaagaatgacatgccatgatacacatttagtaataatttattgataagtattttctttctggagaaatagttcagtatatttcccctatttcaccattactactgtttcaaacattataaagaggaaataaaagttaccgcaatggcaaataatctcatgatttctaagaaaatctctataagttgtatcttatttaccattcatattttgaaacaaaaggtttcttttgtatttatatatttacaccacagaagtaagtgtggttttgtggaggatcactagaagtagcatcagcagacctggggaaaatcctgcatctgtgtatattttttgacctctccttttaagaatcgcgatcttaaatgagttcagtattatatgtagaagagcaatgcctagatacagatgtgtacagtgtagaagggtacagtgcttatttgacagttataaataaatgtaattcttataactgagtatagaaatattagaaatgtagaatatcggtaaaacgttcttaagtaaaagaaacttaaagaactttgagaaattgcttctgtccaaatata

SEQ ID NO: 1407 - DNA, 602 bp, Homo sapiens
caccctctctttgctattactccttgaaaaagccagttgaaaattaacattttttaggaaactttctatgatttaggctatcaaattcttattaatttatatgtgctattttgtatttatttaaccttctgttttgaaggtgcttataatttaaagcatagtccctgcactcaaagagttatcttaggagaaactaagaaatgaattgacttctttttcttttattactttgaatttctgttgcttttaaatttcatatatatatttttaaattccagatttcaatagtaagggcaacagcaaggatcttgtttcccgtgaaatcttacgaactgttcctactgccctcatccatcttaccatggggcagacttgttggatgatagggtaatagtgtaggaaagagggatcttaggtgttggggattttctgttttgtgccttttcgaatggtaaaaattctaagtatttatagtcttacttgaaattacattttggagactaaaatgacacaaactacaaattgaatgtacaaaaaaagacatgctagatttckgaaatagccatccaagttttcgctgcataacaaagttagtgcttatt

SEQ ID NO: 1408 - DNA, 1308 bp, Homo sapiens
tgcattcgcatgattctatgctagaagaaacaatggacaagtcacacatttcagtgagcaaaactagtcacagagctccacctaactgccagggggctggaaatagagaagagccaagggaatacttgctgagcattgctgttgctgccgaaagtgtcccccatgatcgtgaaatcttaaagtcacataccacccatggggaaaaaggttccagggcagtcagacattttcttctctctcaattggtcgttaaaagctggtataaagtagatctcgctcctttgtgaactaaagcgtgttaagcttctatttggcaaaataaaataatcatactaaacaatatatgctcctaaaagctaattaaagagcaagctcaaatcatcacgaaggcagatcagttttaagcaaagcttcttaagtgtcattatccgccagacgtgcatacaaagtgttttgtgaatttttccttcatcctatctttaacctctcaaacagccgcctacagagagccrgagagtggcaggagaatgtgttaccaccagcagcacatgtgagcctctccacatttatgaaggatgattacataactatgatgagaaggaatttttctcactttccaaggaaggccagtggggaggaaatgggcttttataactccagagtgattcaatgagattagtcagtaaaatacctttatgaccaaagagagtagctactatgttgatatggtgaatcttgaaaggagcaattccgcaacttctgtccacacagttttataaacttgagagtcatctggggagtggaatagattggagatgcttccctctgttccagatgttctggatcagaatcttagagggtgactttcagaagctgcatttaaataagtgactctagagcaaggggtagtaagctttctagaaagggctagatcataaatattttaggttttttctgccatagtctctatctccactactcaactgttaccttagtgcaaaagcagcctttgacaatacgtagataaatcagtacagcaaagtaccaataacattttgtttacaaaaacaagtggcaatacatggggcttaggctaataaagatttaaagacttttgataaatgtgtacacacatataactaacactccgatcaaacacagagtatttccatcacactaggtagtcctctggtgccccttcctagtcagaacccaaagctctaaaggaatgagtgttctgaactttctcaccataaatttgttttttctactcttgagcatcatataaatggaaacatagagtatgca

SEQ ID NO: 1409 - DNA, 1308 bp, Homo sapiens
tgcattcgcatgattctatgctagaagaaacaatggacaagtcacacatttcagtgagcaaaactagtcacagagctccacctaactgccagggggctggaaatagagaagagccaagggaatacttgctgagcattgctgttgctgccgaaagtgtcccccatgatcgtgaaatcttaaagtcacataccacccatggggaaaaaggttccagggcagtcagacattttcttctctctcaattggtcgttaaaagctggtataaagtagatctcgctcctttgtgaactaaagcgtgttaagcttctatttggcaaaataaaataatcatactaaacaatatatgctcctaaaagctaattaaagagcaagctcaaatcatcacgaaggcagatcagttttaagcaaagcttcttaagtgtcattatccgccagacgtgcatacaaagtgttttgtgaatttttccttcatcctatctttaacctctcaaacagccgcctacagagagccagagagtggcaggagaatgtgttaccaccagcagcacatgtgagcctctccacatttatgaaggatgattacataactatgatgagaaggaatttttctcactttccaaggaaggccagtggggaggaaatgggcttttataactccagagtgattcaatgagattagtcagtaaaatacctttatgaccaaagagagtagctactatgttgatatggtgaatcttgaaaggagcaattccgcaacttctgtccacacagttttataaacttgagagtcatctggggagtggaatagattggagatgcttccctctgttccagatgttctggatcagaatcttagagggtgactttcagaagctgcatttaaataagtgactctagagcaaggggtagtaagctttctagaaagggctagatcataaatattttaggttttttctgccatagtctctatctccactactcaactgttaccttagtgcaaaagcagcctttgacaataygtagataaatcagtacagcaaagtaccaataacattttgtttacaaaaacaagtggcaatacatggggcttaggctaataaagatttaaagacttttgataaatgtgtacacacatataactaacactccgatcaaacacagagtatttccatcacactaggtagtcctctggtgccccttcctagtcagaacccaaagctctaaaggaatgagtgttctgaactttctcaccataaatttgttttttctactcttgagcatcatataaatggaaacatagagtatgca

SEQ ID NO: 1410 - DNA, 644 bp, Homo sapiens
gcaaagcatgaagcaagcatcaaagtatatggaactgctracgtagaggtcgaacctgaaaatacactctgtgaaaggtcaaccaaaagcatgacaaggagagcaggtctcataaggttattgtaggaagcttctcctaagagtataataaccaaaaattacagctaacccttctagaacatttactgtgtgctaggcattgctgtaagtgttttatatctattaactcatttaaatctcactgtaagacttagacagtatctgctattattatcaccattttacagatgaacaaatggtgcaaatcctctgagccaaattgtggctaagaagaggagaatttgagagccaaaactcagtacgttgtagcaacaaacttattccttccaattagtaagcaagatgtttctccattcttgttatacgtaaaaaaaaaaaaaaaaaaaaaaaaaaaaaaaaaaacccctaatcctaattttagggccaaatgatgccagttacctatttttttaaacaatgtatcctatatttgtttccaagacaacaaacagagtgggaaagaacagcatccaatcatttatgtcagaaagttggagaatcctccccacttcctgagccagaatgtccttcatctgtaaacatag

SEQ ID NO: 1411 - DNA, 644 bp, Homo sapiens
gcaaagcatgaagcaagcatcaaagtatatggaactgctgacgtagaggtcgaacctgaaaatacactctgtgaaaggtcaaccaaaagcatgacaaggagagcaggtctcataaggttattgtaggaagcttctcctaagagtataataaccaaaaattacagctaacccttctagaacatttactgtgtgctaggcattgctgtaagtgttttatatctattaactcatttaaatctcactgtaagacttagrcagtatctgctattattatcaccattttacagatgaacaaatggtgcaaatcctctgagccaaattgtggctaagaagaggagaatttgagagccaaaactcagtacgttgtagcaacaaacttattccttccaattagtaagcaagatgtttctccattcttgttatacgtaaaaaaaaaaaaaaaaaaaaaaaaaaaaaaaaaaacccctaatcctaattttagggccaaatgatgccagttacctatttttttaaacaatgtatcctatatttgtttccaagacaacaaacagagtgggaaagaacagcatccaatcatttatgtcagaaagttggagaatcctccccacttcctgagccagaatgtccttcatctgtaaacatag

SEQ ID NO: 1412 - DNA, 644 bp, Homo sapiens
gcaaagcatgaagcaagcatcaaagtatatggaactgctgacgtagaggtcgaacctgaaaatacactctgtgaaaggtcaaccaaaagcatgacaaggagagcaggtctcataaggttattgtaggaagcttctcctaagagtataataaccaaaaattacagctaacccttctagaacatttactgtgtgctaggcattgctgtaagtgttttatatctattaactcatttaaatctcactgtaagacttagacagtatctgctattattatcaccattttacagatgaacaaatggtgcaaatcctctgagccaaattgtggctaagaagagsagaatttgagagccaaaactcagtacgttgtagcaacaaacttattccttccaattagtaagcaagatgtttctccattcttgttatacgtaaaaaaaaaaaaaaaaaaaaaaaaaaaaaaaaaaacccctaatcctaattttagggccaaatgatgccagttacctatttttttaaacaatgtatcctatatttgtttccaagacaacaaacagagtgggaaagaacagcatccaatcatttatgtcagaaagttggagaatcctccccacttcctgagccagaatgtccttcatctgtaaacatag

SEQ ID NO: 1413 - DNA, 626 bp, Homo sapiens
gaagcttttgtagaagatgtcactggacttgcttttttctttttttgagacagggtctcactctgtcacccaggttggtgtgcagtcgcaccatgcagcatcgacctccctgggctgaaatgatcctcccacctcagtctcctgagtagctgggactacaggcatatgccaycatgcccggctaattttttgtgttttgagtaacaacaaagtctcgctgtgttgcccaggctggttttgaactactgggctctagcagtctgcccccgtcagcctcccaaagtgctggattaccgacgtgagtcatgtacccagacgtatgttattatatgaggaagaacagcaagattttcaagataaagagaacgataaggcagaaatgtgagaagtggtaagtgttagctgcactgtattaccagaggatgaggcaagtccaggtgagcgaggtgggagctgtagccagggcagcattgacaagctttttggcactctgttaagaccttgggtatgcgttgcagaattggaaatcgtatacctagaaatgggtactatcccccaggaaagaatttcattgatttaaaagagtaacaaattttccaggaaattcactttataagaaattctgt

SEQ ID NO: 1414 - DNA, 626 bp, Homo sapiens
gaagcttttgtagaagatgtcactggacttgcttttttctttttttgagacagggtctcactctgtcacccaggttggtgtgcagtcgcaccatgcagcatcgacctccctgggctgaaatgatcctcccacctcagtctcctgagtagctgggactacaggcatatgccaccatgcccggctaattttttgtgttttgagtaacaacaaagtctcgctgtgttgcccaggctggttttgaactactgggctctagcartctgcccccgtcagcctcccaaagtgctggattaccgacgtgagtcatgtacccagacgtatgttattatatgaggaagaacagcaagattttcaagataaagagaacgataaggcagaaatgtgagaagtggtaagtgttagctgcactgtattaccagaggatgaggcaagtccaggtgagcgaggtgggagctgtagccagggcagcattgacaagctttttggcactctgttaagaccttgggtatgcgttgcagaattggaaatcgtatacctagaaatgggtactatcccccaggaaagaatttcattgatttaaaagagtaacaaattttccaggaaattcactttataagaaattctgt

SEQ ID NO: 1415 - DNA, 571 bp, Homo sapiens
cacgtctcttgcagagcctgctggggacgctcctgaaggtgtggacagcagggagctgagccttcccagaaagctggcagcacaagtgtccatcgactgcacagtcagagtcccccagcgaagcactccctccacccacagcctcagctggtgcctggccaccttggcacaggcgaaaatggggggtgggggaatgagagagctgagtgctcacccacccccactctgcatctaaggcctctgaaatactcagccatcccatctcccaaattgcaaagtggagaaaaacaacaggcttygccatttactttctttgggcacttgagggattaaagaaattaagtccctgaaacactccaggcactttggtatcgtaaacaggtgtagaaaagtcacttgatgcttcttttaaagcctgtttaagtgtgcacatgctcttaaaactcaaccccttatagaagctgggagttttacagcaggggctcgaaattaatctgtagggacctaaagctggtgaactggagacgagaccagggcggcgtgggccccaggtgcagaggccggtgtgccc

SEQ ID NO: 1416 - DNA, 571 bp, Homo sapiens
cacgtctcttgcagagcctgctggggacgctcctgaaggtgtggacagcagggagctgagccttcccagaaagctggcagcacaagtgtccatcgactgcacagtcagagtcccccagcgaagcactccctccacccacagcctcagctggtgcctggccaccttggcacaggcgaaaatggggggtgggggaatgagagagctgagtgctcacccacccccactctgcatctaaggcctctgaaatactcagccatcccatctcccaaattgcaaagtggagaaaaacaacaggctttgccatttactttctttgggcacttgagggattaaagaaattaagtccctgaaacactccaggcactttggtatcgtaaacaggtgtagaaaagtcacttgatgcttcttttaaagcctgtttaagtgtgcacatgctcttaaaactcaaccccttatagaagctgggagttttacagcaggggctcgaaattartctgtagggacctaaagctggtgaactggagacgagaccagggcggcgtgggccccaggtgcagaggccggtgtgccc

SEQ ID NO: 1417 - DNA, 1092 bp, Homo sapiens
ctgctgtgtctgtgcgaagaactaggtgcagtgcacagaatgaaaggcgccgtccttgttaaaaaggacctcagagcctaactgaaaacagacaatagggaagaagcagacacatgatcaattaattgaaagaggccacaggataaatgaggaggaggccgtgtgagaaggttactccactcctgggatctgacttccgggttagggtmttaccttggccactgccctctgtttcagcatctcctacgtaaagtggtggtaatactcatagctgatatttaaaaccaccaaacagccctgcttgctacctgcagtcccaatctacgagatgcccttctgtcatcagcaatggcacctcttccccctggaaagcaccctgggctgctcacggaaaaacgatcacctgagtggcggggccgcaggtagtgagcttttgtcctggagctgtggtgtcctactcccagttccacctgggttggttgggagaggacttgctgaggaggggcatttaaaatgagacttgaagaataaaagacacctgctgggtggcagttctgggaggcctggcagggaatgaggtgtggagggaagggggctgggagaaagtgtggtaagacgcaaggccccctggggagggttccaggcctgggaggagcctggcaaccacatggaggtgaggacaggcggctgtggacaagggaggcacagagaccacagccgggtctctgaatggatgctagggcagaggcggcctctgaaggctggagatggggaaattacaccgtcaacctcagctcactgtggaaaaggaactgggccagcaaaaggagtgaggacccgagtgatggggcggagtctgccatgtgctcatcttctaggcaagcagggatcacccagaccaggtcaggaggcagcggtggctgagcacaatggccatgggagccactggaaagatggatgctggtgtccagaaagcacttcatggaaagcccttggtccccgacatcctgatgggagagggcccttggatattagagaagatgtgattcctgcaccatttaacctggatcagagcccagagaaagacgggaa

SEQ ID NO: 1418 - DNA, 1092 bp, Homo sapiens
ctgctgtgtctgtgcgaagaactaggtgcagtgcacagaatgaaaggcgccgtccttgttaaaaaggacctcagagcctaactgaaaacagacaatagggaagaagcagacacatgatcaattaattgaaagaggccacaggataaatgaggaggaggccgtgtgagaaggttactccactcctgggatctgacttccgggttagggtattaccttggccactgccctctgtttcagcatctcctacrtaaagtggtggtaatactcatagctgatatttaaaaccaccaaacagccctgcttgctacctgcagtcccaatctacgagatgcccttctgtcatcagcaatggcacctcttccccctggaaagcaccctgggctgctcacggaaaaacgatcacctgagtggcggggccgcaggtagtgagcttttgtcctggagctgtggtgtcctactcccagttccacctgggttggttgggagaggacttgctgaggaggggcatttaaaatgagacttgaagaataaaagacacctgctgggtggcagttctgggaggcctggcagggaatgaggtgtggagggaagggggctgggagaaagtgtggtaagacgcaaggccccctggggagggttccaggcctgggaggagcctggcaaccacatggaggtgaggacaggcggctgtggacaagggaggcacagagaccacagccgggtctctgaatggatgctagggcagaggcggcctctgaaggctggagatggggaaattacaccgtcaacctcagctcactgtggaaaaggaactgggccagcaaaaggagtgaggacccgagtgatggggcggagtctgccatgtgctcatcttctaggcaagcagggatcacccagaccaggtcaggaggcagcggtggctgagcacaatggccatgggagccactggaaagatggatgctggtgtccagaaagcacttcatggaaagcccttggtccccgacatcctgatgggagagggcccttggatattagagaagatgtgattcctgcaccatttaacctggatcagagcccagagaaagacgggaa

SEQ ID NO: 1419 - DNA, 1092 bp, Homo sapiens
ctgctgtgtctgtgcgaagaactaggtgcagtgcacagaatgaaaggcgccgtccttgttaaaaaggacctcagagcctaactgaaaacagacaatagggaagaagcagacacatgatcaattaattgaaagaggccacaggataaatgaggaggaggccgtgtgagaaggttactccactcctgggatctgacttccgggttagggtattaccttggccactgccctctgtttcagcatctcctacgtaaagtggtggtaatactcatagctgatatttaaaaccaccaaacagccctgcttgctacctgcagtcccaatctacgagatgcccttctgtcatcagcaayggcacctcttccccctggaaagcaccctgggctgctcacggaaaaacgatcacctgagtggcggggccgcaggtagtgagcttttgtcctggagctgtggtgtcctactcccagttccacctgggttggttgggagaggacttgctgaggaggggcatttaaaatgagacttgaagaataaaagacacctgctgggtggcagttctgggaggcctggcagggaatgaggtgtggagggaagggggctgggagaaagtgtggtaagacgcaaggccccctggggagggttccaggcctgggaggagcctggcaaccacatggaggtgaggacaggcggctgtggacaagggaggcacagagaccacagccgggtctctgaatggatgctagggcagaggcggcctctgaaggctggagatggggaaattacaccgtcaacctcagctcactgtggaaaaggaactgggccagcaaaaggagtgaggacccgagtgatggggcggagtctgccatgtgctcatcttctaggcaagcagggatcacccagaccaggtcaggaggcagcggtggctgagcacaatggccatgggagccactggaaagatggatgctggtgtccagaaagcacttcatggaaagcccttggtccccgacatcctgatgggagagggcccttggatattagagaagatgtgattcctgcaccatttaacctggatcagagcccagagaaagacgggaa

SEQ ID NO: 1420 - DNA, 1260 bp, Homo sapiens
atttattgccactccaccattttgcattgagatatatgtgcaaaccaaagtgccaatgatttgcttgcaaacatcaaaggtaggagaataaaatgaaattgggcatattagattatttggtattgaattcaacgtctgcagctccccatttttctccatcacccgcctttcctacaaatcaatttacaagactttcrctggaaatattacttagtatcaaaatctgtgggcagaacccagcagctggatcattctcctagtagaaggcagagagatgttgagtgggatggcgccaggcttgcgtcagggcggctgtgctggatggacctcccgcctccacccctcaggccccacagcactggggcagaagcacagacacacgcgtgcacacacacagtgatctggccccagaaagcttcctgggcttggggaagtcacaggaagaggctctgtgttctcaggagagattccgggcacggcacctgcctctgcctgtgtgaggatcagggctaccatcctctcaaggtggaggcgtgagtgggctagcctgaaaggatgtccacaatgtgtctggaagggtggtcactgtccagccacctgtgtgggcagctgcccagcctgcagcatgcctggccagctcctctcctcactccaagggacctcctcgtccacttggctgctccctgctgtcctctgaccaggctcagtccctcactgtccttaccccttcccagtggtttctcctctgccccaggcttgatccagtgacaacatcacattatccctattaatttttaatcctttaaaattgttttcaaagaaaagtttacctggcagggtagaacaacttggggaccagaacatgggatgtttaggctcgaactggctttctctccccaggccccgctgctcctggctgggccctctctggtctcagttttcacatctgttaaccggggtgattcctgccctgattacttctccaggcattggaatcatgtgagagaatggatgtgaaaacactctgctatgttaccacacatgcactcagcgctttcccggcctcagcccagtttcctcactgtgtgacttgggcaggttgctcagtctctgtggacttggggttccttgtctctaacacttcctccaaggggttgctctcaggaggggaggcagtaaggctcactgtgaccctgcaggctcatgcctcactatgggccagccacatgctgagccctcaataactggtagtgattatta

SEQ ID NO: 1421 - DNA, 1260 bp, Homo sapiens
atttattgccactccaccattttgcattgagatatatgtgcaaaccaaagtgccaatgatttgcttgcaaacatcaaaggtaggagaataaaatgaaattgggcatattagattatttggtattgaattcaacgtctgcagctccccatttttctccatcacccgcctttcctacaaatcaatttacaagactttcgctggaaatattacttagtatcaaaatctgtgggcagaacccagcagctggatcattctcctagtagaaggcagwgagatgttgagtgggatggcgccaggcttgcgtcagggcggctgtgctggatggacctcccgcctccacccctcaggccccacagcactggggcagaagcacagacacacgcgtgcacacacacagtgatctggccccagaaagcttcctgggcttggggaagtcacaggaagaggctctgtgttctcaggagagattccgggcacggcacctgcctctgcctgtgtgaggatcagggctaccatcctctcaaggtggaggcgtgagtgggctagcctgaaaggatgtccacaatgtgtctggaagggtggtcactgtccagccacctgtgtgggcagctgcccagcctgcagcatgcctggccagctcctctcctcactccaagggacctcctcgtccacttggctgctccctgctgtcctctgaccaggctcagtccctcactgtccttaccccttcccagtggtttctcctctgccccaggcttgatccagtgacaacatcacattatccctattaatttttaatcctttaaaattgttttcaaagaaaagtttacctggcagggtagaacaacttggggaccagaacatgggatgtttaggctcgaactggctttctctccccaggccccgctgctcctggctgggccctctctggtctcagttttcacatctgttaaccggggtgattcctgccctgattacttctccaggcattggaatcatgtgagagaatggatgtgaaaacactctgctatgttaccacacatgcactcagcgctttcccggcctcagcccagtttcctcactgtgtgacttgggcaggttgctcagtctctgtggacttggggttccttgtctctaacacttcctccaaggggttgctctcaggaggggaggcagtaaggctcactgtgaccctgcaggctcatgcctcactatgggccagccacatgctgagccctcaataactggtagtgattatta

SEQ ID NO: 1422 - DNA, 1260 bp, Homo sapiens
atttattgccactccaccattttgcattgagatatatgtgcaaaccaaagtgccaatgatttgcttgcaaacatcaaaggtaggagaataaaatgaaattgggcatattagattatttggtattgaattcaacgtctgcagctccccatttttctccatcacccgcctttcctacaaatcaatttacaagactttcgctggaaatattacttagtatcaaaatctgtgggcagaacccagcagctggatcattctcctagtagaaggcagagagatgttgagtgggatggcgccaggcttgcgtcagggcggctgtgctggatggacctcccgcctccacccctcaggccccacagcactggggcagaagcacagacacacgcgtgcacacacacagtgatctggccccagaaagcttcctgggcttggggaagtcacaggaagaggctctgtgttctcaggagagattccgggcacggcacctgcctctgcctgtgtgaggatcagggctaccatcctctcaaggtggaggcgtgagtgggctagcctgaaaggatgtccacaatgtgtctggaagggtggtcactgtccagccacctgtgtgggcagctgcccagcctgcagcatgcctggccagctcctctcctcactccaagggacctcctcgtccacttggctgctccctgctgtcctctgaccaggctcagtccctcactgtccttaccccttcccagtggtttctcctctgccccaggcttgatccagtgacaacatcacattatccctattaatttttaatcctttaaaattgttttcaaagaaaagtttacctggcagggtagaacaacttggggaccagaacatgggatgtttaggctcgaactggctttctctccccaggccccgctgytcctggctgggccctctctggtctcagttttcacatctgttaaccggggtgattcctgccctgattacttctccaggcattggaatcatgtgagagaatggatgtgaaaacactctgctatgttaccacacatgcactcagcgctttcccggcctcagcccagtttcctcactgtgtgacttgggcaggttgctcagtctctgtggacttggggttccttgtctctaacacttcctccaaggggttgctctcaggaggggaggcagtaaggctcactgtgaccctgcaggctcatgcctcactatgggccagccacatgctgagccctcaataactggtagtgattatta

SEQ ID NO: 1423 - DNA, 1295 bp, Homo sapiens
gcatgcagcttccccatccctgatacagatttcatgaacacataaatacataagactccagggctgacttactcaattgacattatattatttgtttatcatccttttgaatatcaaatcaacacagagaatcagaagtagtctacagttgatttgcacaataaaatatgacttttcaaaatttattccttctggtacgtacctctcaaactctaaataggtagcaatatagtatcttgaaatagtaattgtttgcttacttattggcactttctgtaaattactcagaggcacttaaattgtagaaggccaggtgtggtggcttacgcctgtaatcccagcactttgagaggctgaggcgggtggatcacttgaggttaggagtttgagaccagcctggccaatgtggtgaaaccccgcctctactataaaaaaaaatacaaaaattaaccagacgtgatggcacatgcctgtagttccagctacttgagaggctgaggcaggagaatcacttcagtccagaaagggaggttgcagtgagccaagattgcaccactgtactccagcctgggtgacagaaaaaaaaaatgtctataggagaaatatgattattagaacaaaatacagaaagaaacatgtgtttaattctcagctttgtcttgaaaaaagctctagtggaaacaaacaaaaaatgctcatagtggaaacaaaccctatgggtttcaaactgctgatccacagcttgtttccatgtaatcctgtctgatgccctctgattgctgtgaagactgacttttgacaatggtctgcatgggacctatggaatactttgcacaagtcactcctgatggttagatatatgtacaaccctgatgaaaacatggaatttctatctgaatgtttatgcacatatgcacacacacaaacacacacacaacatgctcctcactatttttattctgcttaaatgaatgttacagtcaggctcaaagactgtactgtacccagatgttacaycatcaacttgggtctgaaggcttcacccttggactgagccatgttattggcctgctaggtttatctacaatttgcaagcaacctatcataaaccttctcaccctccataatcttgggaaccagctctcctcacaatcttcttgtatatatctctatccattctattactttgattatttttctacaaattaaaaactcctttgattcttggattcttcttctgctaggaaaattctaacgctgattctttttctacaaggagaatcctaactggacat

SEQ ID NO: 1424 - DNA, 1156 bp, Homo sapiens
agcctacagtcagataagtcccagctttctgctttcaggcactttctggactacagtgcagggttggttatctccatcagagcacagtggtatcattgaattaagcagacagagtctagtgtacaggaagactgatgcatctggaatttgtgaacagaataacaaagaggttaaagttgcatgcagaaagaatgtcaaaaaatctgtataggaatcccgtagagtttgttgctaaatactaagctgtgcckatgtaaaagaaactccctgaggccaggcaaaaaaactgctggaaagctgtaagttgaaaagtttctagaattcgtacagggccgggagacatttgagttttggtcagctagaatcaagagtctttttgaacacctggcctttaggggagatgtcaaaggggttataccttagtcatgtgcctaaattgtctttttcaactgaggttttatgaaacataatatgaataagtattttcttaattctttcaagcttggtataataccattctaaatacattagagagaaattaattcattatctacagcattgccttagacattagggtttaattatcttgtggaacacccattgagagggagtattttaataccctctcttcaaagcttaaaaacaagcttcaaaaggatcaactaaatatactgcctatcagaccaaaatctagaccccagcaatgtaaaatacacactatccatcacctaatcaaaaattactagaccctaatattcagaatttacaaagaacttaaatatatttacaataaaaaaaaacccatcaaaaagtgggcagaggatatgaacagacacttctcaaaggaagacatttatatggccaaaaaacgtatgaaaaaaagcccaacatcactgatcatcagagaaatgcaaatcaaaaccatgccagttagaatggtgattattaaaaagtcaggaaacaatagatgctggcaaggctgtggataaatagtaatgcttttaaactgttggtgggaatgtaaattagttcaaccatcgtagaagatagtatagtgattcgtcaaggatctagaaccagaaataccatttgacccagcaatcccattattgggtatatacccaaaggaatataaatcattctactataaagacac

SEQ ID NO: 1425 - DNA, 1156 bp, Homo sapiens
agcctacagtcagataagtcccagctttctgctttcaggcactttctggactacagtgcagggttggttatctccatcagagcacagtggtatcattgaattaagcagacagagtctagtgtacaggaagactgatgcatctggaatttgtgaacagaataacaaagaggttaaagttgcatgcagaaagaatgtcaaaaaatctgtataggaatcccgtagagtttgttgctaaatactaagctgtgccgatgtaaaagaaactccctgaggccaggcaaaaaaactgctggaaagctgtaagttgaaaagtttctagaattcgtacagggccgggagacatttgagttttggtcagctagaatcaagagtctttttgaacacctggcctttaggggagatgtcaaaggggttataccttagtcatgtgcctaaattgtctttttcaactgaggttttatgaaacataatatgaataagtattttcttaattctttcaagcttggtataataccattctaaatacattagagagaaattaattcattatctacagcattgccttagacattagggtttaattatcttgtggaacacccattgagagggagtattttaataccctctcttcaaagcttaaaaacaagcttcaaaaggatcaactaaatatactgcctatcagaccaaaatctagaccccagcaatgtaaaatacacactatccatcacctaatcaaaaattactagaccctaatattcagaatttacaaagaacttaaatatatttacaataaaaaaaaacccatcaaaaagtgggcagaggatatgaacagacacttctcaaaggaagacatttatatggccaaaaaacrtatgaaaaaaagcccaacatcactgatcatcagagaaatgcaaatcaaaaccatgccagttagaatggtgattattaaaaagtcaggaaacaatagatgctggcaaggctgtggataaatagtaatgcttttaaactgttggtgggaatgtaaattagttcaaccatcgtagaagatagtatagtgattcgtcaaggatctagaaccagaaataccatttgacccagcaatcccattattgggtatatacccaaaggaatataaatcattctactataaagacac

SEQ ID NO: 1426 - DNA, 896 bp, Homo sapiens
ctcctgataatctattgtgccaacctaaaataatcaaaagagtcagaatctaatttaaagagagtttattcaagtgcagaatttaaggatagccttcttggaaataccaacttctaagggatggaattagaattcagaagtaggaaagtttaggtttcatttagataggcagagggagatgagttttagcaggattacaacattttacatacaaggctagagcataattacagcaatgtgattggttacagatggtttttctttkggggaagggtatatttaacactttttacggagggcataatagtcatgggttttctgtcatctggtctaagcaaagcaggacaacaaatgagaaattaatctgtaacaagggtcactaaaaggcagaggtttgtgtccctgatatcatttaattctgtctagtcactgtgaagaaaaagataaataagaaagtgagttaatttataatctgagaaatagaagttgtaaccatatgtgactcagatcacagtcacatctttcttaaggcttaaagtgttttgggggttccaacagcttttaaattgtgtttattttcaaaattgtcaaataatttcagcagacttagactcaaattttcagaggcaaagtttcaacttccctaaaacccttagttttgcctttcccatgcactggttaattgtggtttatgcctaactacctcctgtatcaatcttgagttttagagaatgtttccagaagggattaaggcacctttgaattctatttagtactggtccaacagatcgttaattaccctttccttatttttctttgtaggaccaataatcatccttttcttttgatgcctggtttatatatttgagctcagctctagtaaaatctacctgcca

SEQ ID NO: 1427 - DNA, 896 bp, Homo sapiens
ctcctgataatctattgtgccaacctaaaataatcaaaagagtcagaatctaatttaaagagagtttattcaagtgcagaatttaaggatagccttcttggaaataccaacttctaagggatggaattagaattcagaagtaggaaagtttaggtttcatttagataggcagagggagatgagttttagcaggattacaacattttacatacaaggctagagcataattacagcaatgtgattggttacagatggtttttctttgggggaagggtatatttaacactttttacggarggcataatagtcatgggttttctgtcatctggtctaagcaaagcaggacaacaaatgagaaattaatctgtaacaagggtcactaaaaggcagaggtttgtgtccctgatatcatttaattctgtctagtcactgtgaagaaaaagataaataagaaagtgagttaatttataatctgagaaatagaagttgtaaccatatgtgactcagatcacagtcacatctttcttaaggcttaaagtgttttgggggttccaacagcttttaaattgtgtttattttcaaaattgtcaaataatttcagcagacttagactcaaattttcagaggcaaagtttcaacttccctaaaacccttagttttgcctttcccatgcactggttaattgtggtttatgcctaactacctcctgtatcaatcttgagttttagagaatgtttccagaagggattaaggcacctttgaattctatttagtactggtccaacagatcgttaattaccctttccttatttttctttgtaggaccaataatcatccttttcttttgatgcctggtttatatatttgagctcagctctagtaaaatctacctgcca

SEQ ID NO: 1428 - DNA, 505 bp, Homo sapiens
agaaaaattccagggatcctgtagagttgtaccatstaatacaagcggcaatttaaattcaaatttaaataattaaagttaaataaaagtagaaatttaattcctcagttgcattggccacattttaattgctcagtagcttcttgtagctagttgctacagtattgaacagaacaaatatatagaatattggacagcacagatactaaacattcccccatcatcttagaaagttacattgcacagtgctacttctgagtacttatatttggtcatctcagttctgttttcttatttttatttttatttattttttagagatagggtcttgcaatattgtccaggctggtcttaaacacctggtctcaagtgatccttccacttcagcctcccaaatttctggtattacatgtgtgaaccatcatgcctgacctcagttctgttttcagtttccatggttttattctatctgtctgaagctcatattaattttccatgtggatat

SEQ ID NO: 1429 - DNA, 505 bp, Homo sapiens
agaaaaattccagggatcctgtagagttgtaccatgtaatacaagcggcaatttaaattcaaatttaaataattaaagttaaataaaagtagaaatttaattcctcagttgcattggccacattttaattgctcartagcttcttgtagctagttgctacagtattgaacagaacaaatatatagaatattggacagcacagatactaaacattcccccatcatcttagaaagttacattgcacagtgctacttctgagtacttatatttggtcatctcagttctgttttcttatttttatttttatttattttttagagatagggtcttgcaatattgtccaggctggtcttaaacacctggtctcaagtgatccttccacttcagcctcccaaatttctggtattacatgtgtgaaccatcatgcctgacctcagttctgttttcagtttccatggttttattctatctgtctgaagctcatattaattttccatgtggatat

SEQ ID NO: 1430 - DNA, 477 bp, Homo sapiens
agcctgtttcgacttctgcatgactttcatctaatattcttatcttcttattttttatgctccttctatgttatcctgtcatagtacttcttagggagtgtactgttcctggtctctatgccattttcaggcayggcttctgtatttatccatttaccatcaaaattgggcaagggaataacaagtgacattaagtggctcacttatgtgtcaaatatgtttctccctgcctctgttgtatattggtagctttatctcctcctgatgatcaaattcaattacctctaccaaccaggtgatttttcttttctgctgctcccttgttatgtgaagtccaaagtgctagactgacagccatagattaaggttcacggggactcttgctgtttcccctagtagaagcattctttctttggtagtcaggacttctcaacctgcagagcccagcactgtgaggcaggaaacaaaaattcccca

SEQ ID NO: 1431 - DNA, 2127 bp, Homo sapiens
atatggccatgagaagtgagtttttttctaaattctatttaaaattgaagctcaatatttctacttccaggttacagcagtaggacaaagctgaacatttctgtgaggtaaaattactgttctcagttgcttccaggcagcagagcatagggagagagagagcaggaccttaccaactcattgtcaagacattccaggttcatataaaaaatctgtggcagatgcaaccaggcattcagtcctcacattaaaaagaagttcagttatattcttccacatgtctgtctcttgagtcacgctgctctctcctaaactgatctgccctccatatgagctttgtaagtggcatcctgagattgcctttcactgtctttctggcaattttttttcatttctctcctttgttggatcttattttctctatcccttatcttcctcttcttgaattacccaattgtgggacaactccttcttttctgtggacaattttttaaggggaaaaaaaaaatctaaccatttaaattgtaaatggtttttataatttaaattataaagcttaaaattaataaaaagcctattttcatttccctcatgtcttttgttatttaattttctgtccagatacattaaatatcaaagctccaaggccataaatatctaattacatcttgaaatcaaattaaggttttagttatctaagttattctctagtttttgccttatttrttttatcttcacgtttatagaaatatagacagaatgttataatttaccatttttccactattttatgcagtgcatttttcctttgtagttgtgatattcattttatatttaagtatagaaatgcaaacatacacggattcatttcagtcattcatttattgaacatatattgttgactgcttgttatgtagcaggcactatgctagacattaaagatgcaactatgactaaggcatgcataataattgtagtgtagtaaaatggttcccaatcttaattacactttggattccgctggaaagctttttaaaattacaatgcccaggcctcatttcaactaattaaatcctaatctatcagagatgggaaacaatcattaatatcttttaaaactcctgggtgattctaatgtgcagccagagtttagaatcactggtctactaagacagcctaaattaaatgtgctgtttacattgtgaatgatgtcattaaagaaataaattcatgatttgacaatgtgtgtcagtttgtcttttctaaaagtggccacagcagtatgtttagtcccatatgctcttcctgaatcttgccactgcccatcaagagatagaatacatttcccctccccttgaacctggatggtcttgcgactactcaacccaatagaggtcagtggaaataatgctgtgtgagttttaagcctagattacaagaagtgcacagtttcattctggcttgctttcttggaatgctcccttttgaagccagcctccatgctgcaagaaaagtccaagacacctggagaggccagtattaggcttatggctgacaaccttggcaaagttctcagccagcagccagcatcatccactatagatgtaagtgagtgaacttcagacagttccagcacccagccttcaagtctttcagctgaggcctgaattcattgcataatagagatatatcatccttactgtacctcatatgaattattgacctaaaaaatctgtgagcttaatattaagaaatggttatcttgtatcactgagattttaggtaatttgttacacagttgtggtaacttgaacagaatgtaaaagggaagacttcacctagtttacagggttgggaaagtcttccctaagaaagtaaaatttaagccaaatgtataaaataggtcataaccagaatataaaagttaaaactaaacttttaggaaagacacatagaagaaaatctttacagccttggagtaagcagactttttttatgatctaaaaaaaagcataaaccataaaagaaacaatggatgaattaaataacattaaaattaaaaaaaatctgctctgttaagacaaattgaaaagtcaggccaagttgggagaaaatatttgtaatgca

SEQ ID NO: 1432 - DNA, 2127 bp, Homo sapiens
atatggccatgagaagtgagtttttttctaaattctatttaaaattgaagctcaatatttctacttccaggttacagcagtaggacaaagctgaacatttctgtgaggtaaaattactgttctcagttgcttccaggcagcagagcatagggagagagagagcaggaccttaccaactcattgtcaagacattccaggttcatataaaaaatctgtggcagatgcaaccaggcattcagtcctcacattaaaaagaagttcagttatattcttccacatgtctgtctcttgagtcacgctgctctctcctaaactgatctgccctccatatgagctttgtaagtggcatcctgagattgcctttcactgtctttctggcaattttttttcatttctctcctttgttggatcttattttctctatcccttatcttcctcttcttgaattacccaattgtgggacaactccttcttttctgtggacaattttttaaggggaaaaaaaaaatctaaccatttaaattgtaaatggtttttataatttaaattataaagcttaaaattaataaaaagcctattttcatttccctcatgtcttttgttatttaattttctgtccagatacattaaatatcaaagctccaaggccataaatatctaattacatcttgaaatcaaattaaggttttagttatctaagttattctctagtttttgccttatttattttatcttcacgtttatagaaatatagacagaatgttataatttaccatttttccactattttatgcagtgcatttttcctttgtagttgtgatattcattttatatttaagtatagaaatgcaaacatacacggattcatttcagtcattcatttattgaacatatattgttgactgcttgttatgtagcaggcactatgctagacattaaagatgcaactatgactaaggcatgcataataattgtagtgtagtaaaatggttcycaatcttaattacactttggattccgctggaaagctttttaaaattacaatgcccaggcctcatttcaactaattaaatcctaatctatcagagatgggaaacaatcattaatatcttttaaaactcctgggtgattctaatgtgcagccagagtttagaatcactggtctactaagacagcctaaattaaatgtgctgtttacattgtgaatgatgtcattaaagaaataaattcatgatttgacaatgtgtgtcagtttgtcttttctaaaagtggccacagcagtatgtttagtcccatatgctcttcctgaatcttgccactgcccatcaagagatagaatacatttcccctccccttgaacctggatggtcttgcgactactcaacccaatagaggtcagtggaaataatgctgtgtgagttttaagcctagattacaagaagtgcacagtttcattctggcttgctttcttggaatgctcccttttgaagccagcctccatgctgcaagaaaagtccaagacacctggagaggccagtattaggcttatggctgacaaccttggcaaagttctcagccagcagccagcatcatccactatagatgtaagtgagtgaacttcagacagttccagcacccagccttcaagtctttcagctgaggcctgaattcattgcataatagagatatatcatccttactgtacctcatatgaattattgacctaaaaaatctgtgagcttaatattaagaaatggttatcttgtatcactgagattttaggtaatttgttacacagttgtggtaacttgaacagaatgtaaaagggaagacttcacctagtttacagggttgggaaagtcttccctaagaaagtaaaatttaagccaaatgtataaaataggtcataaccagaatataaaagttaaaactaaacttttaggaaagacacatagaagaaaatctttacagccttggagtaagcagactttttttatgatctaaaaaaaagcataaaccataaaagaaacaatggatgaattaaataacattaaaattaaaaaaaatctgctctgttaagacaaattgaaaagtcaggccaagttgggagaaaatatttgtaatgca

SEQ ID NO: 1433 - DNA, 2127 bp, Homo sapiens
atatggccatgagaagtgagtttttttctaaattctatttaaaattgaagctcaatatttctacttccaggttacagcagtaggacaaagctgaacatttctgtgaggtaaaattactgttctcagttgcttccaggcagcagagcatagggagagagagagcaggaccttaccaactcattgtcaagacattccaggttcatataaaaaatctgtggcagatgcaaccaggcattcagtcctcacattaaaaagaagttcagttatattcttccacatgtctgtctcttgagtcacgctgctctctcctaaactgatctgccctccatatgagctttgtaagtggcatcctgagattgcctttcactgtctttctggcaattttttttcatttctctcctttgttggatcttattttctctatcccttatcttcctcttcttgaattacccaattgtgggacaactccttcttttctgtggacaattttttaaggggaaaaaaaaaatctaaccatttaaattgtaaatggtttttataatttaaattataaagcttaaaattaataaaaagcctattttcatttccctcatgtcttttgttatttaattttctgtccagatacattaaatatcaaagctccaaggccataaatatctaattacatcttgaaatcaaattaaggttttagttatctaagttattctctagtttttgccttatttattttatcttcacgtttatagaaatatagacagaatgttataatttaccatttttccactattttatgcagtgcatttttcctttgtagttgtgatattcattttatatttaagtatagaaatgcaaacatacacggattcatttcagtcattcatttattgaacatatattgttgactgcttgttatgtagcaggcactatgctagacattaaagatgcaactatgactaaggcatgcataataattgtagtgtagtaaaatggttcccaatcttaattacactttggattccrctggaaagctttttaaaattacaatgcccaggcctcatttcaactaattaaatcctaatctatcagagatgggaaacaatcattaatatcttttaaaactcctgggtgattctaatgtgcagccagagtttagaatcactggtctactaagacagcctaaattaaatgtgctgtttacattgtgaatgatgtcattaaagaaataaattcatgatttgacaatgtgtgtcagtttgtcttttctaaaagtggccacagcagtatgtttagtcccatatgctcttcctgaatcttgccactgcccatcaagagatagaatacatttcccctccccttgaacctggatggtcttgcgactactcaacccaatagaggtcagtggaaataatgctgtgtgagttttaagcctagattacaagaagtgcacagtttcattctggcttgctttcttggaatgctcccttttgaagccagcctccatgctgcaagaaaagtccaagacacctggagaggccagtattaggcttatggctgacaaccttggcaaagttctcagccagcagccagcatcatccactatagatgtaagtgagtgaacttcagacagttccagcacccagccttcaagtctttcagctgaggcctgaattcattgcataatagagatatatcatccttactgtacctcatatgaattattgacctaaaaaatctgtgagcttaatattaagaaatggttatcttgtatcactgagattttaggtaatttgttacacagttgtggtaacttgaacagaatgtaaaagggaagacttcacctagtttacagggttgggaaagtcttccctaagaaagtaaaatttaagccaaatgtataaaataggtcataaccagaatataaaagttaaaactaaacttttaggaaagacacatagaagaaaatctttacagccttggagtaagcagactttttttatgatctaaaaaaaagcataaaccataaaagaaacaatggatgaattaaataacattaaaattaaaaaaaatctgctctgttaagacaaattgaaaagtcaggccaagttgggagaaaatatttgtaatgca

SEQ ID NO: 1434 - DNA, 1086 bp, Homo sapiens
gattgattttacactggaaagtccttccctacaggtataagtgatggcactgtctaggatgggtgcagatgttctggctctgatgagaatgcagtggtcatagtctctgtgaagcttatcagctgatgttggtgtcagcaaaaaccccagggatctttaacagccaaggctgtggctatctgcaccaataacaaaggcttttatagtctttttttcttccattgggaagtcatggctaaaggagtctcttcgcgttgggtctagcttgtggttgtgttcccaggaacactggcaacagtgtctaatgcacaacgtccttggagtggccacagacctgaggcctgaagcacaggtctgaagggacctaaaaggcctgaagagaccaagtttctaggtccagggtggtggtgacaccagtgtttgtgacagacacacctgctgtgacactggtaacaatgtgtgaagcacaagtgcttgtggagcatctgggaagccagaatcgaaagtgtgagcatgcgctgagttacagtgacttgaagccagggagatgaactagcccatagcagcaatgactctggcatctgaggtatggtgctcacagtccatctccagagccaatatatgcagtgcaggcacatgaggagctayggtggctccagggactagcttcttgtgatgatagctcaattgttagcagcgcagacactcacagaaaggttgtaaaactgctctccatagtgtgggtgcacagagcaactggggtcccaaggcctgggaaagtgttagccctatcagtggtggcttctttgtttgaagtatgagttcatgcaatgtggccacagacctgtggttttgaatgtaggcaagcacagaacatctacggacaagtgtctggggtgtgggctcccacagggtgaatatagccctgggactggggtgcatgcagggttgagaggggtattagtttctgcccctgagttgccacgacagcagttcttttttcagtggagagaacacagcactgtttccttctcaggggactctatgatggagatggttgtctcagtgatgaaagcaggcagtgtc

SEQ ID NO: 1435 - DNA, 1247 bp, Homo sapiens
attatttactattcctttaatcaggcaaatctgttgcattccaggatttgaactttgggtaacttatactcctgcagagaccagatatctgaaaatgtgtgtacagagaaagaggaaagtgggccacctttatcttttatgaccatgcagtaaagaagttaaaacttgctatttatctgtaatgttttctctcttttctccatacacacactttgagtgatattttaaacagttttatcctatttccccccaaatcttcttcattaatggtttattgaaacttcaaatccatgatataggcctaaacaaaattttataccaattatcatttgaaagcatgtgtattattttgtaatttgtgtcagatgcctcttctagaaaagcttttacaaaggtcattttttttattactgttgcaagaaaacaacttaggaaagtttggaaaataaatttatttgcaaatagaaggtcaaagacagtggtaatgattttcaatatgcttgaaaaaataaaaaattattcttaaaagtgataaaaagttgattgatatttaaagttattttattacttcttatttagaatttgaaaaataacaatgttttatttttgctgttttcctccacattttttggtggtagggaaaattagcatattcaactgtggatttttcccatatatgagacatagaaattgcatattatctagtgtggttgcatagtctgtgttctacattatttatccaggtaaagaataactcttaggtcgcttccctaatcaatttagtatgagaactgtgttagtccattttcctgctgctgataaagacatacccgagattggaagacaaaaaggtttaattggatgtactgttttacatggctagggaggcctcggaatcatggcaagaggcaagaggcacttcttacctggtggcagcaagagaagatgaggaagatgcaaaatcggaaacccctgataaacccatcatgagaatagagttggggaaaccgtccccatgattcaaattatctcccactgggtccctcccataacacatgggrattatgggagtacaattcaagatgagatttgggtggggacaaacagccaaaccatatcaagaactttgcagttataactcaaatctaatttgaaccaaatcataaaaggttatataaggtggtattatgcaggaaaaatagaaacagagaatacaattactggtaatctgatgttattccactaat

SEQ ID NO: 1436 - DNA, 646 bp, Homo sapiens
ttctcttcgtctttgattttttctagagtgattttgatatgtctatttatagtttttaaaaatttatcttgttttgagttctctgaggttctgggatctgtgatttcatgtctttcattaattttccataatttcyagcctttattacctcacacactgctttttttccttctctcttttttctgcttggtgttctcattaggcttaaccctttgtagagtgtaattaatgcctctgagtttgtctgttttggggcccaagcacctgtgctttgtacttctgtaccaaagtaaagttaacactaactgacagaacttttggctcctccacttgaagataaatttgctccagtaagccaaggatattccacctaaatgaatctcaggtgcacatcctcagaagtaaagcaggtagctatcacatcctagggcagtaaatgacgtctgtgtacagagcagcagaggttactttgtacacaataagagcctatagcaagagatagacaaaaaatgaaacaattctagaattccatgaggctggctgctcctggatggtgcagtgtgtaaaacaattattgtattctgtggtccaagaccctcttccatacctccatttctatgatgtgggtttcctggtcaggttctat

SEQ ID NO: 1437 - DNA, 685 bp, Homo sapiens
aaagtagtttataaagagtgagaagtcaagaatttaaaagtccctcccccgcacacctttttttttttttttttttttgagatggaatctctctgttgccaaggctggaatgtgcagtgacatgatcttggctcactgaaacctctgcctcccaggttcaagcgattctctggctgcagcctccccagtagctgagactgcaggtgtgcgccaccacaccaggctaatttttgtatttttagtagagacagsgtttcaccatgttggccaggccggtcttgaactcctgatctcaggtgatctgcccgccttggccacccaaagtgctgggaattcaggcatgagcaccacgcccagcaaaaaggctccttctttgatgggaccactacaatttaaaaatcattagaaaaatgttcctatctgcttcaaatgaaggaataaggtgatgtgcattcttgagctactattggactgtctcattgttgactcttgttagtttcagaatttccagcccagagcccatagatgtgagaacttttttaaactatagaggctaaaaatctaaaactttagatttagtatggagagatttagaccagtggcttcacagtacgatgtgaatatcacttgaattgcaggatctactgggctccaggaaaaaaattctacaactttttctgtattt

SEQ ID NO: 1438 - DNA, 830 bp, Homo sapiens
atcagaagttcagtggacttctgataacgtctaatttcacggagcgccacagtaccaggcctgtaacgatgaggtttcttcacccctccagtagagggcgcactcttgcgagcggcttttgtagccagttgcttcctgggtgctttaccaccggtcgatttgcgggcagtctgctttgtacgagccatggtacagagacctccttacttaccccccttctccttcggctggagctcggcgagcgagaggcggcgctggcgttggagagcgacggcggcgcggcggcggctgcgaacctataccaacattttctactagtaaaaaaaaaaatcagaagcaacccaaatggctaccacaagtaaaatgacccatgtggaaatgtattgtctgaaactctacatcacgggctcttgtccctgtggcgtctgtggatgcaaaatattaagtttggtgcatttttctggggaacaaggagctttttgagtctcaaagagtatggtggtcagttttatgtgtcaatttgatgaggctctattgcctaattattcaactaaacattagtctcagagtggctatggagctcttttgtagatgaggttaatacctatagttagttgactttaagtaagtaaaggagattactcttgatggtgtgagtgagmctcatctaaccagctgaaggctctaagagcaaaaactgacgtttcctgatagaggaattctgcttcaagacctcagcatcaattcctacctgtttccagcctgccttacagatttcagacttgccagctttcacaatcatgtaggccaattcctagagatgaatctct

SEQ ID NO: 1439 - DNA, 830 bp, Homo sapiens
atcagaagttcagtggacttctgataacgtctaatttcacggagcgccacagtaccaggcctgtaacgatgaggtttcttcacccctccagtagagggcgcactcttgcgagcggcttttgtagccagttgcttcctgggtgctttaccaccggtcgatttgcgggcagtctgctttgtacgagccatggtacagagacctccttacttaccccccttctccttcggctggagctcggcgagcgagaggcggcgctggcgttggagagcgacggcggcgcggcggcggctgcgaacctataccaacattttctactagtaaaaaaaaaaatcagaagcaacccaaatggctaccacaagtaaaatgacccatgtggaaatgtattgtctgaaactctacatcacgggctcttgtccctgtggcgtctgtggatgcaaaatattaagtttggtgcatttttctggggaacaaggagctttttgagtctcaaagagtatggtggtcagttttatgtgtcaatttgatgaggctctattgcctaattattcaactaaacattagtctcagagtggctatggagctcttttgtagatgaggttaatacctatagttagttgactttaagtaagtaaaggagattactcttgatggtgtgagtgagactcakctaaccagctgaaggctctaagagcaaaaactgacgtttcctgatagaggaattctgcttcaagacctcagcatcaattcctacctgtttccagcctgccttacagatttcagacttgccagctttcacaatcatgtaggccaattcctagagatgaatctct

SEQ ID NO: 1440 - DNA, 616 bp, Homo sapiens
gaggtcaggagttcaataccagcctggccaatatggtgaaaccccatctctactaaaaatacaaaaaattggccgggcgcgatggctcatgcctgtaatcccagcactttgggaggccaaggcgggaggatcacgaggtcaggagatcgagaccatcctggctaacacggtgaaactccgtctctactaaaaatataaaaaattagccaggcgtggtggcgggcgcctgtagtcccagcaactcgggagactgaggcagaagaatggcatgaacctgggaggcggagcttgcagtgagccgagatcgcgccactgcactccagcctgggcgacagagcgagactccgtctcaaaaaaaaaaaaaaaaagaaaaaaaaatyagctgggcgtagcgacgcgtgtctgtagtcccagctacttggaggctgaggcatgagaattacttgaactgggaggcagaggttgcagtgagccaagattgcgccattgactccagcctgggtgacagagcgagaccctgttttaaaaaaaaaaaaaaaaaattgggggatgactccaaacattcaaaggaaaaaagtcaataccaaaccattactgccattcagatgttttatgt

SEQ ID NO: 1441 - DNA, 1266 bp, Homo sapiens
taatcctatacctttgaataaacagagcaaaataatttggagtaattaaggatgatcacttctgagaggcataaacctcaagtaatgagatccaagaaagaagacaatatccataggatgctggaatgaactcatttaagagccaaggtgaaaaggcaagtttggggaaatcttccccagcttaggaaatagtgactgaatggaaagctgactattctgaggtcagcagttgccattatacctctgctacattttgtcctttggtggaatcacagatatttatgtgacaggtacagtgagagatccatggtcaaaacaaataaaatctcatcagctttaccccagaagaatcctagtctgctggaggcaagagcagaaagtaaagaaacaatcaggaaacagagatgttatagacgtcttgctgatwtggtatagccctacttagaatgtagtatgtggatatcagattccaggatttgtttacattattttaaaacagaaaataagtaaatagataatacagatggaagaatatatttgtgtatttgtgtatacttactaaaaagcaggttttaaaagaaccagtttaataacaacgtacatagtaagccccggcatgttactcttttaggcccctagcttgtttaaatctattttccattgattggttaactcaaaaatattaagcagctactatatgccaggcaccatgttctttagaacatttatagagcatagacgaggtgccatgaatcctgccgagcactttagatatgatggttaaccatgtacgcttggtccttgcactcatggagggctcacattaaataataatcacacagtggctattgattttattttaataagggctataaaggaaaatattaataactggggagtttacctgtctagtagggcaggtaaggcatgctggagatcagaagaggctctttcacagaaaattaatcattaatatgtaacgtagcacactaaattttacgttaaaaactgaagaattgctaatctttaaaatctgatttgtatacagatatgtcattcattaaaacagtgctgtgaatccagatatttacttttatttctttcaacatccttaaaagatggtgagaaggcagatatttctgtgaacatgtatgaagatatcaacattatcactggtgcacttaaactgtacttcagggatttgccaattccactcattacatatgatgcctaccctaagtttatagaatctgccagtaagtatga

SEQ ID NO: 1442 - DNA, 1722 bp, Homo sapiens
agaccctgggtccccaaatcaccatctggaagaaagctgcctgccaacctattttggggcaaaatagcctccaagatgtgtaatagctgtaagacaatagaagtttcttagttacagcagctagtggtaccccagcaatacaagtacccttattattgtcatttactaaaaatttccaataagatgttctgctggactttatttatttttttgagacagagtatcactctgtcaccctggctggagtgcagtggtgtgatctcagctcactgcaacctccgcctcccaggttcaagcgattcttctgcctcagcctccatagtagctgggattacaggcacaagccaccactccaggctaatttttgtatttttagtagagatggggtttcaccatgttggtcaggttggtctcaaactcctgacctcgtgatccgcccaccttggcttcccaaagtgctgggattacaggcgtgagccaccttgcctggcctattttaagtgctttttatgtattatctttttttaataattttttttttttgaggcagagttttgctttgttgcccaggctggagtgcagtggcacaaccctggctcactgcagcctcaacttcttggggtcaagcaatcctccagcctcagcctcctgagtagctgggactaccggtacatgccaccatgcccagctaatttaaaatttttaaacattttttgtagagatggggtctcattttgttgcctgggctggtcttgaacttctgggctcaagcaatcctctcacctcagcctcccaaggtgctggaattacaggcatgagctactgcacctgacctcaggcatcctattaagagagttagtgaatggagtgattataacctaagatcaatcttcatccagaaagcatacccaagggttgctaatggaatttcaactagaacaggggttttatgttttgccatgttgactccaactctctctagagtggcaaagaaacagaaaataccaggtctgcccagacctacaagaattgaatagttacaagttagcagagcacattccaaatcacacaaaaaggcttactctaaatgcaccatgactactatctgggttggttgcattttccaaatcagttgtgtggggttgggaaccttaaactatctagtttaaatttagatcaagctcctatatcaaattcccacactcctcccttgattctaacctcccagaataacattctctctaatcctttgctctccttcctgcttatctgctttcatttgttcttatagcctaatccactttataagatctgttcaggctcccatcagggctaatgctttagtctcctcctggctctctgcgatctcctgtttttagctccaacagctgggatctcgaagccctcacttgtaggctcagccctatgtttatatttgggaacaaytctttggcagggctgggagaatttaaagagtcttaggccagtatctagacaactcagcctcaagccagcctgtctactgatgccattttaacactcttcttgtatttattcagcaattaccatgccctaccacccaccccctaccatatgccaggcactgtgtgaagtattggagagacatcataccaagacacagtccttaccttgagagcctttaggtttagaaagttagatgggcaagttaaccaatgaccaaccatggctgtgacaggggca

SEQ ID NO: 1443 - DNA, 634 bp, Homo sapiens
gtttcaagtgattctccttcctcagcctcccgagtagctgggattaccggcacccaccaccatgcccggctaatttttgtatttttagtagagacggggtttcaccatgttggccaggctggtctcgaactsctgacctcgtgatccacgcgcctctgcctcccaaagtgttgggattacaggcttgagccacggcgcccggctagaattatcttttcttacaattttttccttatacttctgtcatgtccttcatttccacatagcgtacttttaaatgtgatttaaaatgattcaaggatcacacaactcttttctaaacactaatatatatgaagcattcaatagtgacaaaaatggcctccaatacttttttctagctataaaaatgtgtcatttcatactgtgctcacagcatatgttgaatgtgcacaaggaaaaataatgtcagccaaatttctatttaattgatacagaatattcacttatttaaatgtctgcctttggctctcacatcaaatttataatgcagtaatttttggataaaagatacactttaaaatatgaaaaaaaatcatttgctcaaggagtaaaatggaaaataaaaactccctgagtcggcattgaaggtgag

SEQ ID NO: 1444 - DNA, 991 bp, Homo sapiens
ttaggtacatttgctccagagttcacagggactaatggatgtgtataccagctgaagaagatcacaattagagtgcagtttttttaagctgaaaagactagatttatttataaaatgaagtgaaagtcattattaggaaagtcatcattggaaagtcattgtcaggacattctattttaaagtctaaaaacaaagaagaagggaggaagaaaaaaggaaggatgaaaggaaggaagaaagaaagatgaaaagagaaagcaagcaagaaaataacaaagaaacaaagaaagatgtttcttggcatttttctggttctccattaaataatagtttagatagttgccagactataactgtcttctaataagaaattatgtgtctggacttaaccacatttactgtctatgccaggtcaagtaaattaaaaaattgttgagattgtaaaaagggagtcaaaacaatcagaaactcatgtggtagagacatcacaccatttggagagacagatatgactaaatttgcttagtacttaatctaatcttggagaaattaccaaatctttctgaccttcattttgttatccttaaaataaaggtgaaaatgaacctagttcataaggctcataaaaaatcaataagatagtgttttagtttgttctcatgctgctaataaagacacaccagagactgggtaatttataaaggaaagaggtttaatggactcacagttccacatgactgggaaggcctcacaatcatggtggaaggcaaaggaagagcaaaggcacatcttacatggcggcaggcaagagggcatgtgcaggggaactcccatttataaaaccatcagatctcatgagacttattcactatcacaagaacagcatgggaaaaacccgcccccrtgattcaattacctcccaccaggtccctcctatgacatatggggattatcaaggtagatttgagtagggacacagagccaaaccata

SEQ ID NO: 1445 - DNA, 558 bp, Homo sapiens
gactgttcttaaatgaaagcttttccccttgtccctcctgctaccccgaacctttggcaaactttcttttgatgtgtgtgtatgtgcgcatgtgtgtttcccctgagtgtgaaaattctagggcaaattgaattttgtcttgatggttgccaaggcccagacatcacatgtttcaatgttactggctcccactgaaccaaaggcagggtttagttgaaactaactctactaccatttggcttcccaaggaaaaaactgctccaggccaggcacagtggctcacacctgtaatcccagcactttgggaggccaaggcaggaggatcacctgaggtcaggagtccaagaccagcctggccagcatggtgaaacccccatctctactgaaaatacaaaaattagccaggcatrgtggcttgtgcttgtagtcccagctactcaggaggctgaggcaggagaattgcttgaacccaggaggtggaggttgcagtgagccgagatcatgccagtgcactccagcctgggcaacagagtgagactccatctcaaaaaaaaaaaa

SEQ ID NO: 1446 - DNA, 2749 bp, Homo sapiens
cttcaactccctttttaataagtattttattttataaagtttggctagagttgttatacgatatctgtagtatatatttatttatattcaaagtgtttatgatataatattacatttaaaatttgtttacattagatactgattttttaaaatagaaaatatgaccttcaggtagtttgatcagaatatttgagtgtaaactttgccaaaggataacttatgtaaattggtgaggattattcacttggtgtgtaaaaaacatgcagtagtagccaaaggtattaccttttattttgatttttgtgtgtgtattttttgtccaaagaatataaatgtatagaagagatatagtattttccgtaaaaatttgggggagattcatggttcacactatttaaaattttttttctttgtaaaatgttgagtgtttttactataatagtatctctaagcttggatacactccttacttttctgtctgtatggaaaaagcaaaaggaataagaaaccaaagtttattgtgggaactgaggttaagagaggcataactatcagcatttacacaattaataagttatagtgctaggacacaactccaaatttgtcagactaaaatccatgctcttatccatatatcacttgctactatgccaacacattttatcttcagataatttaataaatgtaaatcttttttctggataattcatgtcttacaaatcacaattttttatatgtcaggttgttttcttccagcaaataccatctagaaatttgtttatttcagtttttcaatggctatatttattaatgtattcaactaatatttactgagctgtaggggaaaataatataaattaaacagacaaaatgtcaaacctcatgaattatttccatatcaaaactttgttggcctctgtgaaatagtcactgtgatcgcttctcggcctttttgctaagatcaagtgtagtatctgttcttatcagtttaaaataatcactgtgggaagttttacacctattctggagatgtgtctatcactcaaaatattttgggaatgcatctctttcacaattttctaaacagttttctcttaatcttcaccaaatcctaaacgagaagtgtttgctcttagggtatatattttaattttaaaacaactaaacatcatcccaacctaaaggcaacaaattagttacatagtaagttaagtaattttttttccactgggttacccaacactttgtcttgctcattaagattatagattgaaatatgatagctgttttctttgacttttaatgtcaatctaatagcagttctcttaataaattctattttattccagaaatgaagggcggaattcttgggctaccatttcataaacttcctaattcagatttgaagagaagcagtcatatttttcagtcacattttaacatagtgtcgctggactgtagacatgtcttatatatttacttggtctgtgtctgagtggggaaaaggataggagacgtaacatacaaataaagaaaggaaaaaaaaaatcccaaagggattacagtgtttttcctgagctgttaagagactgatcacatatataatgtacattttgagcatttcttgtctcatttatacttttccttatgattgggtatgacctcactccatttatgctcaactctaattttatccaacattcctgatctttcctgttgtaataatgttgggtcatttaaattctgcactacagaattgttatttgatgtacctttctctctattaaatataagatccttaaaaacatgctttgtacgtttcattgattattgtatcccataaagcctcatcacaataaataycaaatgggttgggtgagatcacttatgcaatataatcccagcactttgggaggccaaggcgggatcccttgaacccagaagttcgagatctgcctaggcaacatagtgagacttcatctctacaaagaaaagaaaaataaaattagctgggtgtggtggtacacacctgtagtcccagctacttctgggactgaggcaagaggatctctgggagaggtacaggctgcagtgagtcctgattttgccacagcactccagcctgggtgacagagtgggaccctgtctccaaaaataaaataaaataaactaggttaaatttttgagaagaacaattaatatcaaatgagtgaatgacgaatgtttgaacagaagagattatatatgagacaaatttacagcgttggtttgcaattgtgtttataattccacaaggaacaaaatcagggatatataagaaaatatctgctttagtcagggaggaaaaaataaagaattaagaaaaagagtcctaaaagtttagttactaatgaacagaatattcattatgcattggagtgtatctgagatttttgcaagaaggaggatgttagctaagaaaattgtatttgaagctcataagtgctttaaaattcttatacttacgggaatattaagctctgaaatgctaaagacagttacatgttttatactctgtagaaagggtttctatcataaaaataaaaaagaataattctgtatttaaattttttcatcattaaatatgatcacatttcaacttataattttacaggtacctacagaatactggacatacggattcagaatccataaggctttatcaccttgaatcaaggatttatttgatatcatcctcggtctttacttc

SEQ ID NO: 1447 - DNA, 2749 bp, Homo sapiens
cttcaactccctttttaataagtattttattttataaagtttggctagagttgttatacgatatctgtagtatatatttatttatattcaaagtgtttatgatataatattacatttaaaatttgtttacattagatactgattttttaaaatagaaaatatgaccttcaggtagtttgatcagaatatttgagtgtaaactttgccaaaggataacttatgtaaattggtgaggattattcacttggtgtgtaaaaaacatgcagtagtagccaaaggtattaccttttattttgatttttgtgtgtgtattttttgtccaaagaatataaatgtatagaagagatatagtattttccgtaaaaatttgggggagattcatggttcacactatttaaaattttttttctttgtaaaatgttgagtgtttttactataatagtatctctaagcttggatacactccttacttttctgtctgtatggaaaaagcaaaaggaataagaaaccaaagtttattgtgggaactgaggttaagagaggcataactatcagcatttacacaattaataagttatagtgctaggacacaactccaaatttgtcagactaaaatccatgctcttatccatatatcacttgctactatgccaacacattttatcttcagataatttaataaatgtaaatcttttttctggataattcatgtcttacaaatcacaattttttatatgtcaggttgttttcttccagcaaataccatctagaaatttgtttatttcagtttttcaatggctatatttattaatgtattcaactaatatttactgagctgtaggggaaaataatataaattaaacagacaaaatgtcaaacctcatgaattatttccatatcaaaactttgttggcctctgtgaaatagtcactgtgatcgcttctcggcctttttgctaagatcaagtgtagtatctgttcttatcagtttaaaataatcactgtgggaagttttacacctattctggagatgtgtctatcactcaaaatattttgggaatgcatctctttcacaattttctaaacagttttctcttaatcttcaccaaatcctaaacgagaagtgtttgctcttagggtatatattttaattttaaaacaactaaacatcatcccaacctaaaggcaacaaattagttacatagtaagttaagtaattttttttccactgggttacccaacactttgtcttgctcattaagattatagattgaaatatgatagctgttttctttgacttttaatgtcaatctaatagcagttctcttaataaattctattttattccagaaatgaagggcggaattcttgggctaccatttcataaacttcctaattcagatttgaagagaagcagtcatatttttcagtcacattttaacatagtgtcgctggactgtagacatgtcttatatatttacttggtctgtgtctgagtggggaaaaggataggagacgtaacatacaaataaagaaaggaaaaaaaaaatcccaaagggattacagtgtttttcctgagctgttaagagactgatcacatatataatgtacattttgagcatttcttgtctcatttatacttttccttatgattgggtatgacctcactccatttatgctcaactctaattttatccaacattcctgatctttcctgttgtaataatgttgggtcatttaaattctgcactacagaattgttatttgatgtacctttctctctattaaatataagatccttaaaaacatgctttgtacgtttcattgattattgtatcccataaagcctcatcacaataaatatcaaatgggttgggtgagatcacttatgcaatataatcccagcactttgggaggccaaggcgggatcccttgaacccagaagttcgagatctgcctaggcaacatagtgagacttcatctctacaaagaaaagaaaaataaaattagctgggtgtggtggtacacacctgtagtcccagctacttctgggactgaggcaagaggatctctgggagaggtacaggctgcagtgagtcctgattttgccacagcactscagcctgggtgacagagtgggaccctgtctccaaaaataaaataaaataaactaggttaaatttttgagaagaacaattaatatcaaatgagtgaatgacgaatgtttgaacagaagagattatatatgagacaaatttacagcgttggtttgcaattgtgtttataattccacaaggaacaaaatcagggatatataagaaaatatctgctttagtcagggaggaaaaaataaagaattaagaaaaagagtcctaaaagtttagttactaatgaacagaatattcattatgcattggagtgtatctgagatttttgcaagaaggaggatgttagctaagaaaattgtatttgaagctcataagtgctttaaaattcttatacttacgggaatattaagctctgaaatgctaaagacagttacatgttttatactctgtagaaagggtttctatcataaaaataaaaaagaataattctgtatttaaattttttcatcattaaatatgatcacatttcaacttataattttacaggtacctacagaatactggacatacggattcagaatccataaggctttatcaccttgaatcaaggatttatttgatatcatcctcggtctttacttc

SEQ ID NO: 1448 - DNA, 2749 bp, Homo sapiens
cttcaactccctttttaataagtattttattttataaagtttggctagagttgttatacgatatctgtagtatatatttatttatattcaaagtgtttatgatataatattacatttaaaatttgtttacattagatactgattttttaaaatagaaaatatgaccttcaggtagtttgatcagaatatttgagtgtaaactttgccaaaggataacttatgtaaattggtgaggattattcacttggtgtgtaaaaaacatgcagtagtagccaaaggtattaccttttattttgatttttgtgtgtgtattttttgtccaaagaatataaatgtatagaagagatatagtattttccgtaaaaatttgggggagattcatggttcacactatttaaaattttttttctttgtaaaatgttgagtgtttttactataatagtatctctaagcttggatacactccttacttttctgtctgtatggaaaaagcaaaaggaataagaaaccaaagtttattgtgggaactgaggttaagagaggcataactatcagcatttacacaattaataagttatagtgctaggacacaactccaaatttgtcagactaaaatccatgctcttatccatatatcacttgctactatgccaacacattttatcttcagataatttaataaatgtaaatcttttttctggataattcatgtcttacaaatcacaattttttatatgtcaggttgttttcttccagcaaataccatctagaaatttgtttatttcagtttttcaatggctatatttattaatgtattcaactaatatttactgagctgtaggggaaaataatataaattaaacagacaaaatgtcaaacctcatgaattatttccatatcaaaactttgttggcctctgtgaaatagtcactgtgatcgcttctcggcctttttgctaagatcaagtgtagtatctgttcttatcagtttaaaataatcactgtgggaagttttacacctattctggagatgtgtctatcactcaaaatattttgggaatgcatctctttcacaattttctaaacagttttctcttaatcttcaccaaatcctaaacgagaagtgtttgctcttagggtatatattttaattttaaaacaactaaacatcatcccaacctaaaggcaacaaattagttacatagtaagttaagtaattttttttccactgggttacccaacactttgtcttgctcattaagattatagattgaaatatgatagctgttttctttgacttttaatgtcaatctaatagcagttctcttaataaattctattttattccagaaatgaagggcggaattcttgggctaccatttcataaacttcctaattcagatttgaagagaagcagtcatatttttcagtcacattttaacatagtgtcgctggactgtagacatgtcttatatatttacttggtctgtgtctgagtggggaaaaggataggagacgtaacatacaaataaagaaaggaaaaaaaaaatcccaaagggattacagtgtttttcctgagctgttaagagactgatcacatatataatgtacattttgagcatttcttgtctcatttatacttttccttatgattgggtatgacctcactccatttatgctcaactctaattttatccaacattcctgatctttcctgttgtaataatgttgggtcatttaaattctgcactacagaattgttatttgatgtacctttctctctattaaatataagatccttaaaaacatgctttgtacgtttcattgattattgtatcccataaagcctcatcacaataaatatcaaatgggttgggtgagatcacttatgcaatataatcccagcactttgggaggccaaggcgggatcccttgaacccagaagttcgagatctgcctaggcaacatagtgagacttcatctctacaaagaaaagaaaaataaaattagctgggtgtggtggtacacacctgtagtcccagctacttctgggactgaggcaagaggatctctgggagaggtacaggctgcagtgagtcctgattttgccacagcactccagcctgggtgacagagtgggaccctgtctccaaaaataaaataaaataaactaggttaaatttttgagaagaacaattaatatcaaatgagtgaatgacgaatgtttgaacagaagagattatatatgagacaaatttacagcgttggtttgcaattgtgtttataattccacaaggaacaaaatcagrgatatataagaaaatatctgctttagtcagggaggaaaaaataaagaattaagaaaaagagtcctaaaagtttagttactaatgaacagaatattcattatgcattggagtgtatctgagatttttgcaagaaggaggatgttagctaagaaaattgtatttgaagctcataagtgctttaaaattcttatacttacgggaatattaagctctgaaatgctaaagacagttacatgttttatactctgtagaaagggtttctatcataaaaataaaaaagaataattctgtatttaaattttttcatcattaaatatgatcacatttcaacttataattttacaggtacctacagaatactggacatacggattcagaatccataaggctttatcaccttgaatcaaggatttatttgatatcatcctcggtctttacttc

SEQ ID NO: 1449 - DNA, 882 bp, Homo sapiens
ggaaagcttgtgaaaacacagattactaaggcccatctgcagagtctctgattcaatagatctgagttggggatcaagaattttctaataaatttccaggtgatgccaatgctgctggtctgggaacacactttgaacacctcataactagacttttaacaacaatttgcatagacctctgtgctcctcacctgccctgaccccctgcctctcagatgtagatatgttcctgaattctgtgtttacaatgatgagaaaggtggggttttttttttaatttgaggtgaaattcacatactctaataattttaaactgtacaattcggtgtcttttagtacattcacagtgtgtgatccagccagaccctctatttagttctaaaacattttcatcacccccaaaggagtccttatacctgatgacaaagcttttatactcccaaaatatatcatctggtcacctatcatatgcttaataaccacctctctataggtcaccctgaaccttaccctgaaccaaacacattcatgggaaagcagaccagcatccgagaaggcaagtcccattcctgaatgctggccagagatcatcaattaaaaggggcttctccttggaagatccagctgcctcaacagggaacaaaatgatagcacactccacctcctatcagaagtccagggcaaggctgggagcattggggtttccaagtcaccaacggccaaaagagaatagagtggtccctytgacagcgtgatcagccccgcagccttgagaactcatcctcccatgtctattagagccctgcacaatcacagactctcttaaaagctcacacacaacccaggaaagtttgtgcttgagtaaataatgaagatagaaat

SEQ ID NO: 1450 - DNA, 717 bp, Homo sapiens
cagctgcctatgaatgtggctcccttcttggactttccagttaggtgagccaataatgcccctactgtgttgagagcagctagcattggtttcagtctctttcactcgagagtcctactatttcagatggctgctggcatagttggagctcagaatggacctggcagcctgagcaccaaggaacctccacatagaactgacaagacacctggtgattgaggactgagggggatgcaacagcccacctgcattttggcagatcccgtagcacattacaccatagcaagcaagagaagaaagcaggagatggcagaagccaggtgtcatttgaaaggactacctgccaagaacaaaatttaaagtatactgagttttccaattgtatttttcctataaaattcatcttactttacscttttttattttctttccatgttagaagccatttgatctagccttgggataggatttggtgttaactccaaaggaaagaatgaaagcatgtgttctccctccacgcccaactcctgtgtgaaggctggctccatgtctgcaaaaactaggccttttttacccttgaggagggagaaatgtttaatgttgtcgagatttggagctttgtcttttgggccatttatgttcctctgtacttcagcaagaaccacatgttaaatcaagtttaacctaaaactgcctccttacatattttaggcttgg

SEQ ID NO: 1451 - DNA, 717 bp, Homo sapiens
cagctgcctatgaatgtggctcccttcttggactttccagttaggtgagccaataatgcccctactgtgttgagagcagctagcattggtttcagtctctttcactcgagagtcctactatttcagatggctgctggcatagttggagctcagaatggacctggcagcctgagcaccaaggaacctccacatagaactgacaagacacctggtgattgaggactgagggggatgcaacagcccacctgcattttggcagatcccgtagcacattacaccatagcaagcaagagaagaaagcaggagatggcagaagccaggtgtcatttgaaaggactacctgccaagaacaaaatttaaagtatactgagttttccaattgtatttttcctataaaattcatcttactttacgcttttttattttctttccatgttagaagccatttgatctagccttgggataggatttggtgttaactccaaaggaaagaatgaaagcatgtgttctccctccacgcccaactcctgtgtgaaggctggctccatgtctgcaaaaactaggccttttttacccttgaggaggragaaatgtttaatgttgtcgagatttggagctttgtcttttgggccatttatgttcctctgtacttcagcaagaaccacatgttaaatcaagtttaacctaaaactgcctccttacatattttaggcttgg

SEQ ID NO: 1452 - DNA, 717 bp, Homo sapiens
cagctgcctatgaatgtggctcccttcttggactttccagttaggtgagccaataatgcccctactgtgttgagagcagctagcattggtttcagtctctttcactcgagagtcctactatttcagatggctgctggcatagttggagctcagaatggacctggcagcctgagcaccaaggaacctccacatagaactgacaagacacctggtgattgaggactgagggggatgcaacagcccacctgcattttggcagatcccgtagcacattacaccatagcaagcaagagaagaaagcaggagatggcagaagccaggtgtcatttgaaaggactacctgccaagaacaaaatttaaagtatactgagttttccaattgtatttttcctataaaattcatcttactttacgcttttttattttctttccatgttagaagccatttgatctagccttgggataggatttggtgttaactccaaaggaaagaatgaaagcatgtgttctccctccacgcccaactcctgtgtgaaggctggctccatgtctgcaaaaactaggccttttttacccttgaggagggagaaatgtttaatgttgtcgagatttggagctttgtcttttgggccatttatgttcctctgtacttcagcaagaaccacrtgttaaatcaagtttaacctaaaactgcctccttacatattttaggcttgg

SEQ ID NO: 1453 - DNA, 1338 bp, Homo sapiens
acaataaatcagcaagccattataatgaattcactagcaaaaaagccacagcgctatatgctataaggaagcctggagacatgacagtgttcccgctcccttatcgagttataattgaacaggaaattgaatttttatattttttaacagttaaataatattataagatgtttaaaaatcctgactctgaatgataaattgaagaaaagtgtaacagagatattaaatgctgtgatttcagaattggtacaaatccttatggggtggaatgtcctrtgaaactccagagacatgatgagactataaagctagatcatcaaggctatgtggtatttaaaaatgagaagaagagacagaatattccagatggaatatgtaatatgagcaacagcagccagaggtaaggatgtgcacggtgccctacagagacagtgaaagaagggccattttgactgcagccaaacattcatacaaacattcatacaagtagtaagtggtaggatagaaagttcatgcaagtccatattgcagaatatcttagaagttaaaatacagaattttgactctattctacctacattgtggaacaactgaaggcttttgacaagaaagaacattataggtggatttaacagataatactctgaaggatgaactgttatttgaatcagaataaatatttaccaatatgaaaggcacagtatagtgttgagaaagatgccttttggtgtgcaataaagaaggttgatgtgcaataaagaagtacctctgccatttggtgtttatgtgatgttgcaaagatagctaagctttgtaagcctcacttttctcatccacaaaatggagacaatagtaccatctatcttgttggctttaatgttaaacaaaaaagatagattttataatcttaaaaaaattctgaacagagtaagttctcaataattattgcccattatcatcaccgccatcatcattattattaacatcattttaaggagttaaggtagagttaggctttaaagaagtagagagctaatgaattagacattgggcaggcaaaattcagttttctatatggtagaattcagatgttaataagctaaatagaaatgaaaagatgactccaacacccaattttacactttattttttaaatgtcagacagaacttagtttaagttctgactctgcctcctttcagctttgtggccctgattcacacaggtcatctatctcacttacttcagtcaggtgttattctgttctttcttggttcacttgtgcaaatatagcccaccacactgaataaagtattctttgttggaacaagtattctttg

SEQ ID NO: 1454 - DNA, 1338 bp, Homo sapiens
acaataaatcagcaagccattataatgaattcactagcaaaaaagccacagcgctatatgctataaggaagcctggagacatgacagtgttcccgctcccttatcgagttataattgaacaggaaattgaatttttatattttttaacagttaaataatattataagatgtttaaaaatcctgactctgaatgataaattgaagaaaagtgtaacagagatattaaatgctgtgatttcagaattggtacaaatccttatggggtggaatgtcctatgaaactccagagacatgatgagactataaagctagatcatcaaggctatgtggtatttaaaaatgagaagaagagacagaatattccagatggaatatgtaatatgagcaacagcagccagaggtaaggatgtgcacggtgccctacagagacagtgaaagaagggccattttgactgcagccaaacattcatacaaacattcatacaagtagtaagtggtaggatagaaagttcatgcaagtccatattgcagaatatcttagaagttaaaatacagaattttgactctattctacctacattgtggaacaactgaaggcttttgacaagaaagaacattataggtggatttaacagataatactctgaaggatgaactgttatttgaatcagaataaatatttaccaatatgaaaggcacagtatagtgttgagaaagatgccttttggtgtgcaataaagaaggttgatgtgcaataaagaagtacctctgccatttggtgtttatgtgatgttgcaaagatagctaagctttgtaagcctcacttttctcatccacaaaatggagacaatagtaccatctatcttgttggctttaatgttaaacaaaaaagatagattttataatcttaaaaaaawtctgaacagagtaagttctcaataattattgcccattatcatcaccgccatcatcattattattaacatcattttaaggagttaaggtagagttaggctttaaagaagtagagagctaatgaattagacattgggcaggcaaaattcagttttctatatggtagaattcagatgttaataagctaaatagaaatgaaaagatgactccaacacccaattttacactttattttttaaatgtcagacagaacttagtttaagttctgactctgcctcctttcagctttgtggccctgattcacacaggtcatctatctcacttacttcagtcaggtgttattctgttctttcttggttcacttgtgcaaatatagcccaccacactgaataaagtattctttgttggaacaagtattctttg

SEQ ID NO: 1455 - DNA, 578 bp, Homo sapiens
tgggtcgaaattctactctccatccaatgtctgagtttggaggagggggcttaaatctcattgtctgccaatttgtggactgaatattctgtgatacaaaagcagagaagaaaaccaacttttcacacatccaggaaaatattaagwtgatctggtatttaattaaggaagaagactgctcactgtccataccaaatttcaattgacaaagacaaaaaggtacaattgaagattttcttcgagtgtgctcttttaggaaaacaaaacagccaagtgtttaacaaaagctatgaggccctatcactgcaagcttaatctcacccagctcctactccctatctcccagctacagagcagcatctgaagagccacggggcccccaccttcatccctgagaattttaggagccagcctgcctttccaggtgacactggacactttcatctgagaaccctgtcacatgacagttgtttcctttcttcctcctctcctgggaatgctgctgcttcgatgacccaagagcctaagaagggtagctgtttctcaatacactgagagagagttctttctccgtcctg

SEQ ID NO: 1456 - DNA, 627 bp, Homo sapiens
cccagcgcatgttaacatagtaggtgcaagcttgcaaagcctcatttttactggtatagcagctgtgtgtcagtgtaaattcctcctatgtcccttgtacatctccaagctctgaacaggaaaatgttacagaccattttgcccctttggctkctggcattatatgacttaatcctccatgttttccctctccatctcccaatcacctgcaataaaccatagcctttaagattttgtttcttcagttttgatcatctgaggtttgattggtccagttctaacaggtttggtggctatggatggtgcagtgggtggcttttcttctacttttccgtgacagacaccaggagggttggccagtgtttcaggagttttacttgaatcacaccagtttttagctgatgttcatgaagaacagtgactacctagaactgtgcccctaattaaaggaaatcctaagaaggtgcatttctttacagagctgtgtcatgccgtcctttgggcccccttctggaaaagtagaatcaactctcgaataatgcctttttaattgtatcctctagtattatagatataggacagtactgtatcatacctctgtgaatgtaaaatatcttgtacttgctt

SEQ ID NO: 1457 - DNA, 627 bp, Homo sapiens
cccagcgcatgttaacatagtaggtgcaagcttgcaaagcctcatttttactggtatagcagctgtgtgtcagtgtaaattcctcctatgtcccttgtacatctccaagctctgaacaggaaaatgttacagaccattttgcccctttggcttctggcattatatgacttaatyctccatgttttccctctccatctcccaatcacctgcaataaaccatagcctttaagattttgtttcttcagttttgatcatctgaggtttgattggtccagttctaacaggtttggtggctatggatggtgcagtgggtggcttttcttctacttttccgtgacagacaccaggagggttggccagtgtttcaggagttttacttgaatcacaccagtttttagctgatgttcatgaagaacagtgactacctagaactgtgcccctaattaaaggaaatcctaagaaggtgcatttctttacagagctgtgtcatgccgtcctttgggcccccttctggaaaagtagaatcaactctcgaataatgcctttttaattgtatcctctagtattatagatataggacagtactgtatcatacctctgtgaatgtaaaatatcttgtacttgctt

SEQ ID NO: 1458 - DNA, 627 bp, Homo sapiens
cccagcgcatgttaacatagtaggtgcaagcttgcaaagcctcatttttactggtatagcagctgtgtgtcagtgtaaattcctcctatgtcccttgtacatctccaagctctgaacaggaaaatgttacagaccattttgcccctttggcttctggcattatatgacttaatcctccatgttttccctctccatctcccaatcacctgcaataaaccatagcctttaagattttgtttcttcagttttgatcrtctgaggtttgattggtccagttctaacaggtttggtggctatggatggtgcagtgggtggcttttcttctacttttccgtgacagacaccaggagggttggccagtgtttcaggagttttacttgaatcacaccagtttttagctgatgttcatgaagaacagtgactacctagaactgtgcccctaattaaaggaaatcctaagaaggtgcatttctttacagagctgtgtcatgccgtcctttgggcccccttctggaaaagtagaatcaactctcgaataatgcctttttaattgtatcctctagtattatagatataggacagtactgtatcatacctctgtgaatgtaaaatatcttgtacttgctt

SEQ ID NO: 1459 - DNA, 627 bp, Homo sapiens
cccagcgcatgttaacatagtaggtgcaagcttgcaaagcctcatttttactggtatagcagctgtgtgtcagtgtaaattcctcctatgtcccttgtacatctccaagctctgaacaggaaaatgttacagaccattttgcccctttggcttctggcattatatgacttaatcctccatgttttccctctccatctcccaatcacctgcaataaaccatagcctttaagattttgtttcttcagttttgatcatctgaggtttgattggtccagttctaacaggtttggtggctatggatggtgcagkgggtggcttttcttctacttttccgtgacagacaccaggagggttggccagtgtttcaggagttttacttgaatcacaccagtttttagctgatgttcatgaagaacagtgactacctagaactgtgcccctaattaaaggaaatcctaagaaggtgcatttctttacagagctgtgtcatgccgtcctttgggcccccttctggaaaagtagaatcaactctcgaataatgcctttttaattgtatcctctagtattatagatataggacagtactgtatcatacctctgtgaatgtaaaatatcttgtacttgctt

SEQ ID NO: 1460 - DNA, 627 bp, Homo sapiens
cccagcgcatgttaacatagtaggtgcaagcttgcaaagcctcatttttactggtatagcagctgtgtgtcagtgtaaattcctcctatgtcccttgtacatctccaagctctgaacaggaaaatgttacagaccattttgcccctttggcttctggcattatatgacttaatcctccatgttttccctctccatctcccaatcacctgcaataaaccatagcctttaagattttgtttcttcagttttgatcatctgaggtttgattggtccagttctaacaggtttggtggctatggatggtgcagtgggtgrcttttcttctacttttccgtgacagacaccaggagggttggccagtgtttcaggagttttacttgaatcacaccagtttttagctgatgttcatgaagaacagtgactacctagaactgtgcccctaattaaaggaaatcctaagaaggtgcatttctttacagagctgtgtcatgccgtcctttgggcccccttctggaaaagtagaatcaactctcgaataatgcctttttaattgtatcctctagtattatagatataggacagtactgtatcatacctctgtgaatgtaaaatatcttgtacttgctt

SEQ ID NO: 1461 - DNA, 1284 bp, Homo sapiens
tgcatgtgggttttactgaataatgacattttttaaaatttaaagaaaaaaaggttgaaattacttagtagaagggacatataggaagtaggttaacattaaattttttttctttccattgggcttcctcaagctagtaagatgtgtttgtgagatccaaacatctttggtcctgaggtcaaatctctcaaaatctgattttcgaaaaagattttgaacaatgtttctttattcttttacagctccctaaaattatagtaaatgctctgcatattaagattcttttatcagcataatgagtttcccttttaatttagggtcccagtaatttctctagctatattaaatttgtgaacaacaacaaaaagggaacctaaaaaattaaggtcttagtggctgagtgtggctcataactgtaatcccagcacgcaggaggccmaggtgggaggatcactgcagcccacgagtgcaagactagcctaggcaacacagtgagactccatctctacaaaaaattaaaaaaaaaaaaaaaaatcagccaggtgtgatggcgtgcacctgtagtcccagctactcaggagactgaggcaggaagattgcttgaacctaggtggttgaggctgtggtgagttgtgatcatgccactacactccagcctgggtgacagagcgggatcccatctcaaaaatatataaataaataaataaataaataaataaataaaggtcttaattaaatagtctaaatgaatgaattgaaattaaaaaaatacttaaaattatttaaggatcctgagaaaggatctatgttgaaaggaaagggctaccaataaaattttaggcatgattagtctacacatctttcccaaaaaccatcattcgatgactatgggaatgcgctgtaaggcaaatgctaacaagccacagccaggtttgagaagggacacacacacttaccagtctcacttgcctttgctccaccactgctgccttttccccagctgcctagctgtgctttaggtaccagctgaattttttcatcaattgtaggctgtaacataagggaccacaagtcaattataggaaatattctagaagaatagtttttcttttatttttttcttcttcagtgaagtagaaccaattttagcaacaaaaatttgtttggaatgccaatttaatagaaacagaaattggagctgttctcattaaactgggatccatgtggcccctgaagcacttccctggactccagtttccacaaaaaactgtttggtctagagaa

SEQ ID NO: 1462 - DNA, 1284 bp, Homo sapiens
tgcatgtgggttttactgaataatgacattttttaaaatttaaagaaaaaaaggttgaaattacttagtagaagggacatataggaagtaggttaacattaaattttttttctttccattgggcttcctcaagctagtaagatgtgtttgtgagatccaaacatctttggtcctgaggtcaaatctctcaaaatctgattttcgaaaaagattttgaacaatgtttctttattcttttacagctccctaaaattatagtaaatgctctgcatattaagattcttttatcagcataatgagtttcccttttaatttagggtcccagtaatttctctagctatattaaatttgtgaacaacaacaaaaagggaacctaaaaaattaaggtcttagtggctgagtgtggctcataactgtaatcccagcacgcaggaggccaaggtgggaggatcactgcagcccacgagtgcaagactagcctaggcaacacagtgagactccatctctacaaaaaattaaaaaaaaaaaaaaaaatcagccaggtgtgatggcgtgcacctgtagtcccagctactcaggagactgaggcaggaagattgcttgaacctaggtggttgaggctgtggtgagttgtgatcatgccactacactccagcctgggtgacagagcgggatcccatctcaaaaatatataaataaataaataaataaataaataaataaaggtcttaattaaatagtctaaatgaatgaattgaaattaaaaaaatacttaaaattatttaaggatcctgagaaaggatctatgttgaaaggaaagggctaccaataaaattttaggcatgattagtctacacatctttcccaaaaaccatcattcgatgactatgggaatgcgctgtaaggcaaatgctaacaagccacagccaggtttgagaagggacacacacacttaccagtctcacttgcctttgctccaccactgctgccttttccccagctgcctagctgtgctttaggtaccagctgaattttttcatcaattgtaggctgtaacataagggaccacaagtcaattatrggaaatattctagaagaatagtttttcttttatttttttcttcttcagtgaagtagaaccaattttagcaacaaaaatttgtttggaatgccaatttaatagaaacagaaattggagctgttctcattaaactgggatccatgtggcccctgaagcacttccctggactccagtttccacaaaaaactgtttggtctagagaa

SEQ ID NO: 1463 - DNA, 1646 bp, Homo sapiens
gacaactaaatgcaatgtgggattctggagtgaatcttagactggaaaatcaagacaaaacaaaagtagtgggataattggtgaaatctgaataagttctgaatattaatagtattataccaatgctgatgtcctggtttaggtattattaggtattattattaggtatctataatatatatattatttggtattattattatttaggtataattattaggtattattattctcacataagatgttaacaacagggaaaggtggcatacaaggaatcagtatatgattttgcaactattttgtagtttttaaagtattttaaatagaaagtaaatataaagttgatacattaaaaaattgatacgaaggaggaatggtggattaagcatgacttcaaagttgcttcattatattcttgaagaacagacatttaaatgcttatttttgaatacttttaaaaaataatggaaagcttttatgtatgtaatgcttcgataaaatggtctaaaaataagaaaaagtagctacataactccagttagacaaacactgtttgtggtattctcttcaagaacacaatttcataatttaattgcctgtcctgtgttctagctcattgcagctcctcatggtcttagcacagggagcaagaccatgaaaagaactgctgttattgcaactgatctgctgagttttgcacatgtcttgattttggtttgatatgaaacccatccagaaggtggaggatggaatagaaggttatttaagttctttaacaccatctctgtaaattatcttctgatgcaaagggaagatctttggctgccacactgatactgcaaaatctcgttcactgttcacaatatattgcatgaggagttgaagggataaaaactcaacttacgtgagctcaggtggagtaaagacagatgccatcattcagtttcagaagataataggttgtggaggaagcaggtaacttactggtttttcctgcatcagcactttttattgcagctttggaaggcagttaattatttaacagacataaatacaaaattataaatagtcctaaaatatgtaaagtcaccttgaatatttttgatgatctaatcctcataattaactgtttctctgacacyttagtactgttaattgtggacttccctcttctgtctctggaaaacaacacttaatcaatgacctcatatttctctaattagtaagaagctgctttctttgaaaattaaggttattaaataatattcattgatggtttactaatggaatagcttgctatcagaaagaatacccaagaaaattaagaaaatatacaaacaaataaatcagtagaaaaaataagctgctataaactaaaaaagaaaaaaaaagaaaagcaaacatttcaaacttgatagggcaatattcttcaattacaacctaagaaactttcctcctgaatgtgtggcagctagaattctaatcaccattctctgtgcaggtaaaatcacttaaaatcaataatcttcgaaaccagcatctgatctatttactcaaagtgcgccgaagggcaataactacaactcaaaatcaccttactaccccctctgtccttaagctggttccaatctgtctaactactgcaa

SEQ ID NO: 1464 - DNA, 1646 bp, Homo sapiens
gacaactaaatgcaatgtgggattctggagtgaatcttagactggaaaatcaagacaaaacaaaagtagtgggataattggtgaaatctgaataagttctgaatattaatagtattataccaatgctgatgtcctggtttaggtattattaggtattattattaggtatctataatatatatattatttggtattattattatttaggtataattattaggtattattattctcacataagatgttaacaacagggaaaggtggcatacaaggaatcagtatatgattttgcaactattttgtagtttttaaagtattttaaatagaaagtaaatataaagttgatacattaaaaaattgatacgaaggaggaatggtggattaagcatgacttcaaagttgcttcattatattcttgaagaacagacatttaaatgcttatttttgaatacttttaaaaaataatggaaagcttttatgtatgtaatgcttcgataaaatggtctaaaaataagaaaaagtagctacataactccagttagacaaacactgtttgtggtattctcttcaagaacacaatttcataatttaattgcctgtcctgtgttctagctcattgcagctcctcatggtcttagcacagggagcaagaccatgaaaagaactgctgttattgcaactgatctgctgagttttgcacatgtcttgattttggtttgatatgaaacccatccagaaggtggaggatggaatagaaggttatttaagttctttaacaccatctctgtaaattatcttctgatgcaaagggaagatctttggctgccacactgatactgcaaaatctcgttcactgttcacaatatattgcatgaggagttgaagggataaaaactcaacttacgtgagctcaggtggagtaaagacagatgccatcattcagtttcagaagataataggttgtggaggaagcaggtaacttactggtttttcctgcatcagcactttttattgcagctttggaaggcagttaattatttaacagacataaatacaaaattataaatagtcctaaaatatgtaaagtcaccttgaatatttttgatgatctaatcctcataattaactgtttctctgacacttyagtactgttaattgtggacttccctcttctgtctctggaaaacaacacttaatcaatgacctcatatttctctaattagtaagaagctgctttctttgaaaattaaggttattaaataatattcattgatggtttactaatggaatagcttgctatcagaaagaatacccaagaaaattaagaaaatatacaaacaaataaatcagtagaaaaaataagctgctataaactaaaaaagaaaaaaaaagaaaagcaaacatttcaaacttgatagggcaatattcttcaattacaacctaagaaactttcctcctgaatgtgtggcagctagaattctaatcaccattctctgtgcaggtaaaatcacttaaaatcaataatcttcgaaaccagcatctgatctatttactcaaagtgcgccgaagggcaataactacaactcaaaatcaccttactaccccctctgtccttaagctggttccaatctgtctaactactgcaa

SEQ ID NO: 1465 - DNA, 1646 bp, Homo sapiens
gacaactaaatgcaatgtgggattctggagtgaatcttagactggaaaatcaagacaaaacaaaagtagtgggataattggtgaaatctgaataagttctgaatattaatagtattataccaatgctgatgtcctggtttaggtattattaggtattattattaggtatctataatatatatattatttggtattattattatttaggtataattattaggtattattattctcacataagatgttaacaacagggaaaggtggcatacaaggaatcagtatatgattttgcaactattttgtagtttttaaagtattttaaatagaaagtaaatataaagttgatacattaaaaaattgatacgaaggaggaatggtggattaagcatgacttcaaagttgcttcattatattcttgaagaacagacatttaaatgcttatttttgaatacttttaaaaaataatggaaagcttttatgtatgtaatgcttcgataaaatggtctaaaaataagaaaaagtagctacataactccagttagacaaacactgtttgtggtattctcttcaagaacacaatttcataatttaattgcctgtcctgtgttctagctcattgcagctcctcatggtcttagcacagggagcaagaccatgaaaagaactgctgttattgcaactgatctgctgagttttgcacatgtcttgattttggtttgatatgaaacccatccagaaggtggaggatggaatagaaggttatttaagttctttaacaccatctctgtaaattatcttctgatgcaaagggaagatctttggctgccacactgatactgcaaaatctcgttcactgttcacaatatattgcatgaggagttgaagggataaaaactcaacttacgtgagctcaggtggagtaaagacagatgccatcattcagtttcagaagataataggttgtggaggaagcaggtaacttactggtttttcctgcatcagcactttttattgcagctttggaaggcagttaattatttaacagacataaatacaaaattataaatagtcctaaaatatgtaaagtcaccttgaatatttttgatgatctaatcctcataattaactgtttctctgacactttwgtactgttaattgtggacttccctcttctgtctctggaaaacaacacttaatcaatgacctcatatttctctaattagtaagaagctgctttctttgaaaattaaggttattaaataatattcattgatggtttactaatggaatagcttgctatcagaaagaatacccaagaaaattaagaaaatatacaaacaaataaatcagtagaaaaaataagctgctataaactaaaaaagaaaaaaaaagaaaagcaaacatttcaaacttgatagggcaatattcttcaattacaacctaagaaactttcctcctgaatgtgtggcagctagaattctaatcaccattctctgtgcaggtaaaatcacttaaaatcaataatcttcgaaaccagcatctgatctatttactcaaagtgcgccgaagggcaataactacaactcaaaatcaccttactaccccctctgtccttaagctggttccaatctgtctaactactgcaa

SEQ ID NO: 1466 - DNA, 1646 bp, Homo sapiens
gacaactaaatgcaatgtgggattctggagtgaatcttagactggaaaatcaagacaaaacaaaagtagtgggataattggtgaaatctgaataagttctgaatattaatagtattataccaatgctgatgtcctggtttaggtattattaggtattattattaggtatctataatatatatattatttggtattattattatttaggtataattattaggtattattattctcacataagatgttaacaacagggaaaggtggcatacaaggaatcagtatatgattttgcaactattttgtagtttttaaagtattttaaatagaaagtaaatataaagttgatacattaaaaaattgatacgaaggaggaatggtggattaagcatgacttcaaagttgcttcattatattcttgaagaacagacatttaaatgcttatttttgaatacttttaaaaaataatggaaagcttttatgtatgtaatgcttcgataaaatggtctaaaaataagaaaaagtagctacataactccagttagacaaacactgtttgtggtattctcttcaagaacacaatttcataatttaattgcctgtcctgtgttctagctcattgcagctcctcatggtcttagcacagggagcaagaccatgaaaagaactgctgttattgcaactgatctgctgagttttgcacatgtcttgattttggtttgatatgaaacccatccagaaggtggaggatggaatagaaggttatttaagttctttaacaccatctctgtaaattatcttctgatgcaaagggaagatctttggctgccacactgatactgcaaaatctcgttcactgttcacaatatattgcatgaggagttgaagggataaaaactcaacttacgtgagctcaggtggagtaaagacagatgccatcattcagtttcagaagataataggttgtggaggaagcaggtaacttactggtttttcctgcatcagcactttttattgcagctttggaaggcagttaattatttaacagacataaatacaaaattataaatagtcctaaaatatgtaaagtcaccttgaatatttttgatgatctaatcctcataattaactgtttctctgacactttagtmctgttaattgtggacttccctcttctgtctctggaaaacaacacttaatcaatgacctcatatttctctaattagtaagaagctgctttctttgaaaattaaggttattaaataatattcattgatggtttactaatggaatagcttgctatcagaaagaatacccaagaaaattaagaaaatatacaaacaaataaatcagtagaaaaaataagctgctataaactaaaaaagaaaaaaaaagaaaagcaaacatttcaaacttgatagggcaatattcttcaattacaacctaagaaactttcctcctgaatgtgtggcagctagaattctaatcaccattctctgtgcaggtaaaatcacttaaaatcaataatcttcgaaaccagcatctgatctatttactcaaagtgcgccgaagggcaataactacaactcaaaatcaccttactaccccctctgtccttaagctggttccaatctgtctaactactgcaa

SEQ ID NO: 1467 - DNA, 1646 bp, Homo sapiens
gacaactaaatgcaatgtgggattctggagtgaatcttagactggaaaatcaagacaaaacaaaagtagtgggataattggtgaaatctgaataagttctgaatattaatagtattataccaatgctgatgtcctggtttaggtattattaggtattattattaggtatctataatatatatattatttggtattattattatttaggtataattattaggtattattattctcacataagatgttaacaacagggaaaggtggcatacaaggaatcagtatatgattttgcaactattttgtagtttttaaagtattttaaatagaaagtaaatataaagttgatacattaaaaaattgatacgaaggaggaatggtggattaagcatgacttcaaagttgcttcattatattcttgaagaacagacatttaaatgcttatttttgaatacttttaaaaaataatggaaagcttttatgtatgtaatgcttcgataaaatggtctaaaaataagaaaaagtagctacataactccagttagacaaacactgtttgtggtattctcttcaagaacacaatttcataatttaattgcctgtcctgtgttctagctcattgcagctcctcatggtcttagcacagggagcaagaccatgaaaagaactgctgttattgcaactgatctgctgagttttgcacatgtcttgattttggtttgatatgaaacccatccagaaggtggaggatggaatagaaggttatttaagttctttaacaccatctctgtaaattatcttctgatgcaaagggaagatctttggctgccacactgatactgcaaaatctcgttcactgttcacaatatattgcatgaggagttgaagggataaaaactcaacttacgtgagctcaggtggagtaaagacagatgccatcattcagtttcagaagataataggttgtggaggaagcaggtaacttactggtttttcctgcatcagcactttttattgcagctttggaaggcagttaattatttaacagacataaatacaaaattataaatagtcctaaaatatgtaaagtcaccttgaatatttttgatgatctaatcctcataattaactgtttctctgacactttagtamtgttaattgtggacttccctcttctgtctctggaaaacaacacttaatcaatgacctcatatttctctaattagtaagaagctgctttctttgaaaattaaggttattaaataatattcattgatggtttactaatggaatagcttgctatcagaaagaatacccaagaaaattaagaaaatatacaaacaaataaatcagtagaaaaaataagctgctataaactaaaaaagaaaaaaaaagaaaagcaaacatttcaaacttgatagggcaatattcttcaattacaacctaagaaactttcctcctgaatgtgtggcagctagaattctaatcaccattctctgtgcaggtaaaatcacttaaaatcaataatcttcgaaaccagcatctgatctatttactcaaagtgcgccgaagggcaataactacaactcaaaatcaccttactaccccctctgtccttaagctggttccaatctgtctaactactgcaa

SEQ ID NO: 1468 - DNA, 1646 bp, Homo sapiens
gacaactaaatgcaatgtgggattctggagtgaatcttagactggaaaatcaagacaaaacaaaagtagtgggataattggtgaaatctgaataagttctgaatattaatagtattataccaatgctgatgtcctggtttaggtattattaggtattattattaggtatctataatatatatattatttggtattattattatttaggtataattattaggtattattattctcacataagatgttaacaacagggaaaggtggcatacaaggaatcagtatatgattttgcaactattttgtagtttttaaagtattttaaatagaaagtaaatataaagttgatacattaaaaaattgatacgaaggaggaatggtggattaagcatgacttcaaagttgcttcattatattcttgaagaacagacatttaaatgcttatttttgaatacttttaaaaaataatggaaagcttttatgtatgtaatgcttcgataaaatggtctaaaaataagaaaaagtagctacataactccagttagacaaacactgtttgtggtattctcttcaagaacacaatttcataatttaattgcctgtcctgtgttctagctcattgcagctcctcatggtcttagcacagggagcaagaccatgaaaagaactgctgttattgcaactgatctgctgagttttgcacatgtcttgattttggtttgatatgaaacccatccagaaggtggaggatggaatagaaggttatttaagttctttaacaccatctctgtaaattatcttctgatgcaaagggaagatctttggctgccacactgatactgcaaaatctcgttcactgttcacaatatattgcatgaggagttgaagggataaaaactcaacttacgtgagctcaggtggagtaaagacagatgccatcattcagtttcagaagataataggttgtggaggaagcaggtaacttactggtttttcctgcatcagcactttttattgcagctttggaaggcagttaattatttaacagacataaatacaaaattataaatagtcctaaaatatgtaaagtcaccttgaatatttttgatgatctaatcctcataattaactgtttctctgacactttagtactgttaattgtggacttccctcttctgtctctggaaaacaacacttaatcaatgacctcatatttctctaattagtaagaagctgctttctttgaaaattaaggttattaaataatattcattgatggtttactaatggaatagcttgctatcagaaagaatacccaagaaaattaagaaaatatacaaacaaataaatcagtagaaaaaataagctgctataaactaaaaaagaaaaaaaaagaaaagcaaacatttcaaacttgatagggcaatattcttcaattacaacctaagaaactttcctcctgaatgtgtggcagctagaattctaatcaccattctctgtgcaggtaaaatcacttaaaatcaataatcttcgaaaccagcatctgatctatttactcaaagtgcrccgaagggcaataactacaactcaaaatcaccttactaccccctctgtccttaagctggttccaatctgtctaactactgcaa

SEQ ID NO: 1469 - DNA, 1257 bp, Homo sapiens
gaattcttttgttattattttgattaaatcagtcagctgctggttctttgacaagacagcagaatcccccaatgtttaaaaacttgggcttcacaaatggtgcaaacggtgttcaacatagctaaccttatttctctctggaaattaaatttttattgttgtcattggaggtatttgaggatttaattggtttcattattaatccaaaccctgcgtcgacagcaaccaaaataacttccagtaatttattgtacttcctgctcctcagcatctaatctctagagatgatataaaactaagaaagggaaactataagagtaagatgataacacaaaaaggacgaaactacttttaaaaaatcacttaggctcctcctagatgtcattttttttttttttttgcttgtttagatggcacttacagaagtagacctatacagtcagtatttttaaaggaatttctgctgtctgtaaataaacatttttctccttattaatttttagggaccagttaaaatttttattttttttcaagcacaagcatagtctattcagatcatttccattgcaaatatattttatgttttgaattttatttttccataagttattggggtacaggtggtatttggttacacaaattctttagcggagatgtgtgataacctggtacacccatcacctgagcagtgtacactgcaccatatttgttgtcttttatccctcacccccctcccactgttcccaccaagtccccaaagttcattgtatcattcttatgcctttgcatcctcatagcttagttcccacatatcagtgagagcatatgatgtttggttttccattcctgagttacttcactcagaataatggcctctaatctcatccaggtcactgcaaatgctgttaattcattcctttttatggttgagtaatattccatcatatatattatatatacactatatacgatcatatatatgatcatatatagtatgtgtgtgtatatatagtatctgtgtatatatatagtgtgtgtatataaatatatagtatgtgtgtatatatatattgtgtgtgtatatacatatatgtgtgtgtgtgtgtgtgtgtgtgtgtgtgtgtrtatatatatatatatatatatatatatatatatatatatatatctcagagtttctttatccactcattgattgatgggcatttgggtgggttccacgattttcctattgtgacttgtgctgctataaacatg

SEQ ID NO: 1470 - DNA, 1257 bp, Homo sapiens
gaattcttttgttattattttgattaaatcagtcagctgctggttctttgacaagacagcagaatcccccaatgtttaaaaacttgggcttcacaaatggtgcaaacggtgttcaacatagctaaccttatttctctctggaaattaaatttttattgttgtcattggaggtatttgaggatttaattggtttcattattaatccaaaccctgcgtcgacagcaaccaaaataacttccagtaatttattgtacttcctgctcctcagcatctaatctctagagatgatataaaactaagaaagggaaactataagagtaagatgataacacaaaaaggacgaaactacttttaaaaaatcacttaggctcctcctagatgtcattttttttttttttttgcttgtttagatggcacttacagaagtagacctatacagtcagtatttttaaaggaatttctgctgtctgtaaataaacatttttctccttattaatttttagggaccagttaaaatttttattttttttcaagcacaagcatagtctattcagatcatttccattgcaaatatattttatgttttgaattttatttttccataagttattggggtacaggtggtatttggttacacaaattctttagcggagatgtgtgataacctggtacacccatcacctgagcagtgtacactgcaccatatttgttgtcttttatccctcacccccctcccactgttcccaccaagtccccaaagttcattgtatcattcttatgcctttgcatcctcatagcttagttcccacatatcagtgagagcatatgatgtttggttttccattcctgagttacttcactcagaataatggcctctaatctcatccaggtcactgcaaatgctgttaattcattcctttttatggttgagtaatattccatcatatatattatatatacactatatacgatcatatatatgatcatatatagtatgtgtgtgtatatatagtatctgtgtatatatatagtgtgtgtatataaatatatagtatgtgtgtatatatatattgtgtgtgtatatacatatatgtgtgtgtgtgtgtgtgtgtgtgtgtgtgtgtatrtatatatatatatatatatatatatatatatatatatatatctcagagtttctttatccactcattgattgatgggcatttgggtgggttccacgattttcctattgtgacttgtgctgctataaacatg

SEQ ID NO: 1471 - DNA, 1257 bp, Homo sapiens
gaattcttttgttattattttgattaaatcagtcagctgctggttctttgacaagacagcagaatcccccaatgtttaaaaacttgggcttcacaaatggtgcaaacggtgttcaacatagctaaccttatttctctctggaaattaaatttttattgttgtcattggaggtatttgaggatttaattggtttcattattaatccaaaccctgcgtcgacagcaaccaaaataacttccagtaatttattgtacttcctgctcctcagcatctaatctctagagatgatataaaactaagaaagggaaactataagagtaagatgataacacaaaaaggacgaaactacttttaaaaaatcacttaggctcctcctagatgtcattttttttttttttttgcttgtttagatggcacttacagaagtagacctatacagtcagtatttttaaaggaatttctgctgtctgtaaataaacatttttctccttattaatttttagggaccagttaaaatttttattttttttcaagcacaagcatagtctattcagatcatttccattgcaaatatattttatgttttgaattttatttttccataagttattggggtacaggtggtatttggttacacaaattctttagcggagatgtgtgataacctggtacacccatcacctgagcagtgtacactgcaccatatttgttgtcttttatccctcacccccctcccactgttcccaccaagtccccaaagttcattgtatcattcttatgcctttgcatcctcatagcttagttcccacatatcagtgagagcatatgatgtttggttttccattcctgagttacttcactcagaataatggcctctaatctcatccaggtcactgcaaatgctgttaattcattcctttttatggttgagtaatattccatcatatatattatatatacactatatacgatcatatatatgatcatatatagtatgtgtgtgtatatatagtatctgtgtatatatatagtgtgtgtatataaatatatagtatgtgtgtatatatatattgtgtgtgtatatacatatatgtgtgtgtgtgtgtgtgtgtgtgtgtgtgtgtatatatatatatatatmtatatatatatatatatatatatatatctcagagtttctttatccactcattgattgatgggcatttgggtgggttccacgattttcctattgtgacttgtgctgctataaacatg

SEQ ID NO: 1472 - DNA, 591 bp, Homo sapiens
tctaccatttttaagaataaatgtgtggtatttgtacactgtagcatgttctcagcctacatatggaaatgtgctctcttctaaaacaaataaacatgtcttttagtgcagacattctcaactgaaagtaattgcactcctttaagcagaattttaaaacaagaagtagggccatggttgttaaaatgactgagtggcagtatctggggacaaagtctaaacatcctgcattggcacagaacggtcatgcacagcaagagtcatcctgccccaaacaccaataatgcctatgttgaaaaaccctgttcaggctaatactttaattactgaaacaattmtcctctcagacattacaaatgatacaacagaaacacaaatgataataagcaattactataaacaattatatgtcaacaaactataacctagaaaaaaagaatagattctcagacacatatcactcactaagactgaatcatgaagaaacagaaaatttgaacagactaataaggactaaggagattcagtcagtaataaaaagtctcccatcacagaaaagccaaggacctgatgtcttcacagctgaatcct

SEQ ID NO: 1473 - DNA, 1319 bp, Homo sapiens
atcaggcatttcagaaaagccataaacacaaaaaatagaccaataaaactgcctatatattttataaccagccatgactctagctaatgactcattaatgagaaaacaaaaggtggaattattagatctaggaaaatttttagtaatccagaggaattgygttaacagcaaagttgaatcaagttacaggctgatttagaatccactaaacatgattaccaagtgtttacagctgtgaaaaatgacactgcattgtcttactcagagataggaccaaaactaacaggtccatcaaagtgaattggtaaggtaaagtcatatttcagaatacttaagttagaagaatctctcaaaatgaaagagctttttctctgattaaattatccagtatgacttgatcatttatttcaatttattgtttgtataaatgtttgggagctgcctgatggcagagaccaaaatgagtttaactttgtccatcacattgcaagagacctctactaagaagagagggagttaaccacttagatgctttcattggttccctggcgatcgttagtcaaggagaatggggacagggttatcagtatgttttttccagcaaacttacagagaaaatgttaaataaattaactggaattctctagctgtagcaaacatcttctaaatattttatgccactctcaaacattaaaccattttctacttttttcaaattaacttgaatttcacagttgttctgggagttgtttccgttgtctcaggatttactttcatgacaaaagagtgaagaaaacaaaggctttattttatttaatattctaaaagattacaaatacaaaagtgtgagtgacttttaacaaaacagcagataagcatttaatatcttaatgtctcttgttggaacagggaaaagcagaaagaaggagaaatgccaggattctgacctttaccctctagtggagacagaactatgtccttgtgatgaatttatatcccaaccttatggaaactggtcagattgcattcttccagaaggcagaagggagcctcaccgaggactgcgggtacaagcagacagcaaagaatgtggagaaggcctgcgctttcgagcagtagcctgttctgataaaaatggaagacctgttgacccctccttctgcagcagctctggtaaggagatggatggagagtaacagatgagaacactcacacacagctcgggaggtttgtctcaggtctagaattaatagctctgctctataataattgttttaattttcctttgtcaataacacattgtctctcataaaatatgg

SEQ ID NO: 1474 - DNA, 1319 bp, Homo sapiens
atcaggcatttcagaaaagccataaacacaaaaaatagaccaataaaactgcctatatattttataaccagccatgactctagctaatgactcattaatgagaaaacaaaaggtggaattattagatctaggaaaatttttagtaatccagaggaattgtgttaacagcaaagttgaatcaagttacaggctgatttagaatccactaaacatgattaccaagtgtttacagctgtgaaaaatgacactgcattgtcttactcagagataggaccaaaactaacaggtccatcaaagtgaattggtaaggtaaagtcatatttcagaatacttaagttagaagaatctctcaaaatgaaagagctttttctctgattaaattatccagtatgacttgatcatttatttcaatttattgtttgtataaatgtttgggagctgcctratggcagagaccaaaatgagtttaactttgtccatcacattgcaagagacctctactaagaagagagggagttaaccacttagatgctttcattggttccctggcgatcgttagtcaaggagaatggggacagggttatcagtatgttttttccagcaaacttacagagaaaatgttaaataaattaactggaattctctagctgtagcaaacatcttctaaatattttatgccactctcaaacattaaaccattttctacttttttcaaattaacttgaatttcacagttgttctgggagttgtttccgttgtctcaggatttactttcatgacaaaagagtgaagaaaacaaaggctttattttatttaatattctaaaagattacaaatacaaaagtgtgagtgacttttaacaaaacagcagataagcatttaatatcttaatgtctcttgttggaacagggaaaagcagaaagaaggagaaatgccaggattctgacctttaccctctagtggagacagaactatgtccttgtgatgaatttatatcccaaccttatggaaactggtcagattgcattcttccagaaggcagaagggagcctcaccgaggactgcgggtacaagcagacagcaaagaatgtggagaaggcctgcgctttcgagcagtagcctgttctgataaaaatggaagacctgttgacccctccttctgcagcagctctggtaaggagatggatggagagtaacagatgagaacactcacacacagctcgggaggtttgtctcaggtctagaattaatagctctgctctataataattgttttaattttcctttgtcaataacacattgtctctcataaaatatgg

SEQ ID NO: 1475 - DNA, 1319 bp, Homo sapiens
atcaggcatttcagaaaagccataaacacaaaaaatagaccaataaaactgcctatatattttataaccagccatgactctagctaatgactcattaatgagaaaacaaaaggtggaattattagatctaggaaaatttttagtaatccagaggaattgtgttaacagcaaagttgaatcaagttacaggctgatttagaatccactaaacatgattaccaagtgtttacagctgtgaaaaatgacactgcattgtcttactcagagataggaccaaaactaacaggtccatcaaagtgaattggtaaggtaaagtcatatttcagaatacttaagttagaagaatctctcaaaatgaaagagctttttctctgattaaattatccagtatgacttgatcatttatttcaatttattgtttgtataaatgtttgggagctgcctgatggcagagaccaaaatgagtttaactttgtccatcacattgcaagagacctctactaagaagagagggagttaaccacttagatgctttcattggttccctggcgatcgttagtcaaggagaatggggacagggttatcagtatgttttttccagcaaacttacagagaaaatgttaaataaattaactggaattctctagctgtagcaaacatcttctaaatattttatgccactctcaaacattaaaccattttctacttttttcaaattaacttgaatttcacagttgttctgggagttgtttccgttgtctcaggatttactttcatgacaaaagagtgaagaaaacaaaggctttattttatttaatattctaaaagattacaaatacaaaagtgtgagtgacttttaacaaaacagcagataagcatttaatatctyaatgtctcttgttggaacagggaaaagcagaaagaaggagaaatgccaggattctgacctttaccctctagtggagacagaactatgtccttgtgatgaatttatatcccaaccttatggaaactggtcagattgcattcttccagaaggcagaagggagcctcaccgaggactgcgggtacaagcagacagcaaagaatgtggagaaggcctgcgctttcgagcagtagcctgttctgataaaaatggaagacctgttgacccctccttctgcagcagctctggtaaggagatggatggagagtaacagatgagaacactcacacacagctcgggaggtttgtctcaggtctagaattaatagctctgctctataataattgttttaattttcctttgtcaataacacattgtctctcataaaatatgg

SEQ ID NO: 1476 - DNA, 604 bp, Homo sapiens
ggaagatacttctttgtccctggaattcccacagttgtgaaggaaacagatgactgacaggcttgtcttaaacacagatgccaaggtctgtgtgtgccttcctagaagacacactgttaagggacattaaagtatgcrggtggtaccctgcattgtataaaaatcatgtttgcagaccacgcgcggtggctcacacctgtaatcccagcacttcaggaggccgaggagggcagatcacttgaggtcaggagttcgagaccagcctgggcaacatggtgaaaccatgtctctactaaagatacaaaaattagccaggcgtggtggtgcacgcctgcagtcctagctacctgggaggctgaggcaggagaatcacttgaaccaggcaggggaggttgcagtgagccgaggttgcaccactgcactccagcccgggcgacagagtgagactctatctcaaatgaaaaaaataaataaatatcatgtttgcttgcttttttgttctgtatttgaagagagagagagagatgctcactggtgtccccaaataaagtagcagacgtgagatcagctgtcaccattggctcacaacttctgccaaaggaaa

SEQ ID NO: 1477 - DNA, 652 bp, Homo sapiens
caccgcgcctggccagttttaggttttaataaaccactagggagctctgcatgggcatactactatgaaaatgaggctggccattcagatcagttcctcagcaaatcagaatttctgaattttttcaatttctwttctttttctttttttttttttttttttttttttgagatggagtctggctctgtcgcccaggctggagtgcagtggcgcgatctcggctcactgcaagctccgcctcccgggttcacgccattctcctgcctcagcctcccgagtagctgggactacaggcgcctgccacctcgcccggctaattttttgcatttttagtagagacggcctttcactgagttagccaggatggtctcgatctcctgacctcgtgatccatccgcctcggcctcccaaagtgctgggattacaggcgtgagccaccgcgcccagctgctgaatttttccaatttctatagtttttctggggctactaaaaagagcacagtttaaaaaattatgctaactacaagcgtgtcttttttactgtgttctttcagaccaaatcacaccttccttcccatacttaaagaggtgcctttctttacaccaggattaaattcctctttcttccctgcaacaggcctttcctgccgcc

SEQ ID NO: 1478 - DNA, 652 bp, Homo sapiens
caccgcgcctggccagttttaggttttaataaaccactagggagctctgcatgggcatactactatgaaaatgaggctggccattcagatcagttcctcagcaaatcagaatttctgaattttttcaatttcttttctttttctttttttttttttttttttttttttgagatggrgtctggctctgtcgcccaggctggagtgcagtggcgcgatctcggctcactgcaagctccgcctcccgggttcacgccattctcctgcctcagcctcccgagtagctgggactacaggcgcctgccacctcgcccggctaattttttgcatttttagtagagacggcctttcactgagttagccaggatggtctcgatctcctgacctcgtgatccatccgcctcggcctcccaaagtgctgggattacaggcgtgagccaccgcgcccagctgctgaatttttccaatttctatagtttttctggggctactaaaaagagcacagtttaaaaaattatgctaactacaagcgtgtcttttttactgtgttctttcagaccaaatcacaccttccttcccatacttaaagaggtgcctttctttacaccaggattaaattcctctttcttccctgcaacaggcctttcctgccgcc

SEQ ID NO: 1479 - DNA, 564 bp, Homo sapiens
gcctcggcctcccaaagtgctgggattacaggcgtgagccactgcacccagccccttcagataatttcttattgctccttaacatcattttctttcaaagtgaagaactccctttagcatttcttgtaggagaagtctggtgttgatgaaatccctcaacttttgtttggttgggaatctttatttctccttcatctttgaaggatattttccctggatatattattctaggataaaagtttttttttttcttcagcactttaaatatgtcatgccactctcgcctggcctgtaagctttccactgagaagtctgctgccagacatgttttttatttttatttttgtagagacagtgtctcactatgttgcctagkctggtcttgaactcctgaactcaagcaatccttctgcctggccttccaaaatgctgggattacaggtgtgagccatggttcgcagccagagtttaaaattggatatgacagttggactggtgggttagaattccagtttctccccactgaggccagggtccataatctgagcatatctagttcatctt

SEQ ID NO: 1480 - DNA, 564 bp, Homo sapiens
gcctcggcctcccaaagtgctgggattacaggcgtgagccactgcacccagccccttcagataatttcttattgctccttaacatcattttctttcaaagtgaagaactccctttagcatttcttgtaggagaagtctggtgttgatgaaatccctcaacttttgtttggttgggaatctttatttctccttcatctttgaaggatattttccctggatatattattctaggataaaagtttttttttttcttcagcactttaaatatgtcatgccactctcgcctggcctgtaagctttccactgagaagtctgctgccagacatgttttttatttttatttttgtagagacagtgtctcactatgttgcctaggctggtcttgaactcctgaactcaagcaatccttctgcctggccttccaaaatgctgggattacaggtgtgagccatggttcscagccagagtttaaaattggatatgacagttggactggtgggttagaattccagtttctccccactgaggccagggtccataatctgagcatatctagttcatctt

SEQ ID NO: 1481 - DNA, 1283 bp, Homo sapiens
aatgctgaaaataagtcatccaatgttgactttaactgatcagaatgaaatggtaaataaaatacaaagataagaaaatagtaaaatagttaataaaataatgtggtagaaagaaacataaaataaaaagtctcaaaaaggtacagcattgattttcaaaaaaattaaaatttcacaaggcttagcaatatccattttgaaaaaaaataaagtgatttcaaaatacaaattataaccttaattttttttattatactttaagttttagggtacatgtgcacaacrtgccggtttgttacatatgtatacatgtgccatgttggtgtgctgcacccattaactcgtcatttaacattaggtatatctcctaatgctatccctcccccttccccccaccccacaacaggccccggtgtgtgatgttccccttcctgtgtccatgtggtctcattgttcaattcccacctatgagtgagaacatgcggtgaccttgatgttatgaataattttatttaaacaaatttgctacttgacatcaatttttaaattcctaggaaaacacttttaccaacaaactataagaataagtataaaatctgcacagtgcctatgtttctaagatgccacagcaaatatcatactttgaaaagattttaaaatatattccccatggatgagagataaaatagacatatcaattattaccacttttatttctagttgtattggtggtcttagtccttttaaaaagcacaataataaatacatcaaaaagtaagagatatgaaacaacaagggctgcagttgtctcatggctccactgtagacatgcacttccaagtcagtcacacagccactgaaaggcctcagacccatctggttgttggcttgtggtatataggttttttttttttttttttttttgtcttatggttatctccaggaagcagctaacagttagttcttctcagagtaagagcctgagagagctaataaaaacacactcaattcacttttctctaatgaccagtgatgatgaaaagaaaatgtagcacatatataccacagaatactatgcagccataaaaaaagaatgagttcatgtcctttgcagggacatggatgaagctggaaaccatcattctcaggaaactaacacagggaaaaccaaagaccgcatgttctcattcataagtgggagttgaacaatgagaacacatggacacagagaaggtaacatcacataccggggcctgtcttagggaggcctcccctcctgggag

SEQ ID NO: 1482 - DNA, 1283 bp, Homo sapiens
aatgctgaaaataagtcatccaatgttgactttaactgatcagaatgaaatggtaaataaaatacaaagataagaaaatagtaaaatagttaataaaataatgtggtagaaagaaacataaaataaaaagtctcaaaaaggtacagcattgattttcaaaaaaattaaaatttcacaaggcttagcaatatccattttgaaaaaaaataaagtgatttcaaaatacaaattataaccttaattttttttattatactttaagttttagggtacatgtgcacaacatgccrgtttgttacatatgtatacatgtgccatgttggtgtgctgcacccattaactcgtcatttaacattaggtatatctcctaatgctatccctcccccttccccccaccccacaacaggccccggtgtgtgatgttccccttcctgtgtccatgtggtctcattgttcaattcccacctatgagtgagaacatgcggtgaccttgatgttatgaataattttatttaaacaaatttgctacttgacatcaatttttaaattcctaggaaaacacttttaccaacaaactataagaataagtataaaatctgcacagtgcctatgtttctaagatgccacagcaaatatcatactttgaaaagattttaaaatatattccccatggatgagagataaaatagacatatcaattattaccacttttatttctagttgtattggtggtcttagtccttttaaaaagcacaataataaatacatcaaaaagtaagagatatgaaacaacaagggctgcagttgtctcatggctccactgtagacatgcacttccaagtcagtcacacagccactgaaaggcctcagacccatctggttgttggcttgtggtatataggttttttttttttttttttttttgtcttatggttatctccaggaagcagctaacagttagttcttctcagagtaagagcctgagagagctaataaaaacacactcaattcacttttctctaatgaccagtgatgatgaaaagaaaatgtagcacatatataccacagaatactatgcagccataaaaaaagaatgagttcatgtcctttgcagggacatggatgaagctggaaaccatcattctcaggaaactaacacagggaaaaccaaagaccgcatgttctcattcataagtgggagttgaacaatgagaacacatggacacagagaaggtaacatcacataccggggcctgtcttagggaggcctcccctcctgggag

SEQ ID NO: 1483 - DNA, 1205 bp, Homo sapiens
tgcatagtaagatatatccaattttataggaaacattagaaataatcaagaaaagtcactaacttttcatcctttacattcttttattgtaaaagaaatcaaagctccctgaagaaatgattttgaactcagaggtatacaaatagagatataacaaaaatatcttgaaaacttagttagcacaatagctcatgttcaagaaatgtagctgatytgactttcacgtatacataatgctcaaatggcacttgctgatttagcctgtatttaatgagcatctaattattatgttgtctaattcatatcaggagctcaataaaagaaggttgaatcaaggaacattggcttgtaggatgagcatgactgacatctagtggtaaaaataaatacttttttgtaaaatttatttatttattttgtaatttcaactcttagatttaggggctacatgtgtgggtttgtgacatgggtagattgtgtgattctgaagtttggggtatgaatgatcccatcacccactgatatggttaggctctgtgttcccacccaaatctcatcttgaattgtccgcataatccccacattagggttgggacctgttgggaggtgattggattgcagggttggtttcccccatgctgttctcatgatagtgagttatcatgagatctgatgtttttttaagtgtttgacagctccccctgcacgggcattctctttctctctcacctgctgccctgtaagatgtgcctcttccccttccgccatgactgttaagtttactgaggccttcccagccatgtggaactgtaagtcaattaaatctcttttctttataaatgacccagcctcagatatttacttatagcaacgtgaaaatgaactaatatacgcaggtggtaagcatattaccctataagtagtttttcaacccttgtcctcggcctctctcccacctttagtagtccccagtgtctgctgttcccatctttatgtccatgtgtaccaataaatacatttcctgaacaaataaatgacagtcatttaaatgaacaatctaatgaactaaaaaggtaaataactttttctactgaatatttatttatgttattgaacaccaaaaattctacttcaaataaggaatagaaataatgtccatttaataatatttagatatattgtcaaacactctgctgttctagtca

SEQ ID NO: 1484 - DNA, 1205 bp, Homo sapiens
tgcatagtaagatatatccaattttataggaaacattagaaataatcaagaaaagtcactaacttttcatcctttacattcttttattgtaaaagaaatcaaagctccctgaagaaatgattttgaactcagaggtatacaaatagagatataacaaaaatatcttgaaaacttagttagcacaatagctcatgttcaagaaatgtagctgatttgactttcacgtatacataatgctcaaatggcacttgctgatttagcctgtatttaatgagcatctaattattatgttgtctaattcatatcaggagctcaataaaagaaggttgaatcaaggaacattggcttgtaggatgagcatgactgacatctagtggtaaaaataaatacttttttgtaaaatttatttatttattttgtaatttcaactcttagatttaggggctacatgtgtgggtttgtgacatgggtagattgtgtgattctgaagtttggggtatgaatgatcccatcacccactgatatggttaggctctgtgttcccacccaaatctcatcttgaattgtccgcataatccccacattagggttgggacctgttgggaggtgattggattgcagggttggtttcccccatgctgttctcatgatagtgagttatcatgagatctgatgkttttttaagtgtttgacagctccccctgcacgggcattctctttctctctcacctgctgccctgtaagatgtgcctcttccccttccgccatgactgttaagtttactgaggccttcccagccatgtggaactgtaagtcaattaaatctcttttctttataaatgacccagcctcagatatttacttatagcaacgtgaaaatgaactaatatacgcaggtggtaagcatattaccctataagtagtttttcaacccttgtcctcggcctctctcccacctttagtagtccccagtgtctgctgttcccatctttatgtccatgtgtaccaataaatacatttcctgaacaaataaatgacagtcatttaaatgaacaatctaatgaactaaaaaggtaaataactttttctactgaatatttatttatgttattgaacaccaaaaattctacttcaaataaggaatagaaataatgtccatttaataatatttagatatattgtcaaacactctgctgttctagtca

SEQ ID NO: 1485 - DNA, 1233 bp, Homo sapiens
ttgtacatattaaatatatgcaattttcatttgtcaatcatacctcaataaacctggagcaaaagaaaattaaactaactgttggtatgtcacttctgagattagattatagtagatactctatatttcacctctctctttctctctttcttccctctttcctccagccccactgtggttcactcacttttggagaagctgtgttatgtccagatctaatgagaggctcaccagataatgaagtgaagcttcctcccaagagccatctgaatgagctttgaggaacaccccccggccctgatcaagtcttcagacacttcaggcaggtccaacaactagttgtaacttctcaagaaaacctgagctacacctccctagttaaacctttactggattcctgactctcagaaaatgtgtgagatgataacatctcttgttttaaattgattaattctgcggtgattgttatwcaataaaagataaccaatacattgttttcaattctttaactacattttaactatttttaaaaagataatatctccactaattttgaaaaaaaacaacataagcccagaggagtttataaagtctttatcactgacttttgttccccagattctcttttttttttttgaccttacccccccatctttttttaaattatactttaagttctagggcacatgtgcacaatgtgcaggtttgttacataggtaggtatacatgtgtcatgttggttgctgcacccaccaactcatcatttacatgaggtatttctcctaatgctatccctcccccagccccccatgccacgactggccccagtgtgtgatgttcccctccctgtgtccatgtgttctcattgttcaattcccacctatgagtgagaacatgcggtgtttggttttctgtccttgtgatagtttgctgagaatgatggtttccagcttcatccatgtccctacaaaggacatgaactcatccctttttatggctgcatagtattccatggtgtatatgtgccacattttcttaatccagtctatcattgatggacatttgggatttgggttggttccaagtctatgctattgtgcatggtgggagtataaattagttcaagcattgtggaagacagtgtgacgattcctcaaggatctagaactagaaataccatttgacccagcgatcccattactaggtatatacccaaaggattataaatcatgc

SEQ ID NO: 1486 - DNA, 592 bp, Homo sapiens
acacaaaaagtctcaaaagtccttgccacactacagaaggaaacttaaagctgtaacttgacacaatcttagggctcctataattgttttaagtctttcagggattactgtccgtccttgattgatgtacagtgtcttgcaaaccattggtccatataatttttattgttccgtataatttccattgttccatataagctgtccagttttttacatttgttgaggcatgtccaaaccatatttgtttttccacagcgttttgattcataccttccacaattacacaatgattactgcattcccagctgtttgcttctagctcgcaatacaaaggaaaaatgtgtgtgaaactcacagagaaaaatcgataattaaactccrtttgtaacactaaagggaagatcataattgacctatacacagtatcagtaggagtctccatggaagtcagccactgtgtgtcaatgaatcaaatatttcacatggaactataagaaaggatatctctgtcaattaactacagtcaagcattagaacggggatgtgttctaagaaatgtgtcatttgtcgagttggtcattttattgtcaat

SEQ ID NO: 1487 - DNA, 592 bp, Homo sapiens
acacaaaaagtctcaaaagtccttgccacactacagaaggaaacttaaagctgtaacttgacacaatcttagggctcctataattgttttaagtctttcagggattactgtccgtccttgattgatgtacagtgtcttgcaaaccattggtccatataatttttattgttccgtataatttccattgttccatataagctgtccagttttttacatttgttgaggcatgtccaaaccatatttgtttttccacagcgttttgattcataccttccacaattacacaatgattactgcattcccagctgtttgcttctagctcgcaatacaaaggaaaaatgtgtgtgaaactcacagagaaaaatcgataattaaactccgtttgtaacactaaagggaagatcataattgacctatacacagtatcagtaggagtctccatggaagtcagccactgtgtgtcaatgaatcaaatatttcacatggaactataagaaaggatatctytgtcaattaactacagtcaagcattagaacggggatgtgttctaagaaatgtgtcatttgtcgagttggtcattttattgtcaat

SEQ ID NO: 1488 - DNA, 592 bp, Homo sapiens
acacaaaaagtctcaaaagtccttgccacactacagaaggaaacttaaagctgtaacttgacacaatcttagggctcctataattgttttaagtctttcagggattactgtccgtccttgattgatgtacagtgtcttgcaaaccattggtccatataatttttattgttccgtataatttccattgttccatataagctgtccagttttttacatttgttgaggcatgtccaaaccatatttgtttttccacagcgttttgattcataccttccacaattacacaatgattactgcattcccagctgtttgcttctagctcgcaatacaaaggaaaaatgtgtgtgaaactcacagagaaaaatcgataattaaactccgtttgtaacactaaagggaagatcataattgacctatacacagtatcagtaggagtctccatggaagtcagccactgtgtgtcaatgaatcaaatatttcacatggaactataagaaaggatatctctgtcaattaactacagtcaagcattagaayggggatgtgttctaagaaatgtgtcatttgtcgagttggtcattttattgtcaat

SEQ ID NO: 1489 - DNA, 656 bp, Homo sapiens
gggtgggaacacagatgcaaaccatatcgccaggcctgttgagtcaactcctttccgtacacacatgcaaaatttcaaattggtcagtaaagcctcacccatcacccacttccaccaatcccacctccagtcatggccaaagaaggcacaagaccccagttcaaatcactgtcttgtgaggctgttctttctactaggacctcagttgtgtctaccaatgatgacttcaattgtgtacgatggatcactaccaatttggaagttgccctcccagctctggtttccccagctgtaaaatggataaggttgtgctagataattcccaaggctctatccatctttgatatcctctgactgaatacagatattctacagaaggactggagttgggctgtgtcccagaacaaagtgttacacttaggtgctcttatctgtgttcctgcccttgagaaaaaaagtgtcttcatcctgcctaatttatcagcttgtcctgcattccagaaaatcacagctatttggcaaatrcaaatagagtctcatcagaataagactcttaaaacagttttctgggttttgtttgtacgtttttcttccttaagacataccttgactcgggaggacattttctagatcatttaagtaatggggtcttccaa

SEQ ID NO: 1490 - DNA, 639 bp, Homo sapiens
cttcccagcaaagcagctagaattaatatttttcttgtacaaatgctgtaatctatgtggccctttcaccaaacatgttattgggttcccttgtttgcaagcaagaaaggaaaaccctggtctttttttttttttttcaatcctgccatttttacttttattagtatcaagctggagcatccaagatgctatttacctcggcagcccgctgggtttttccattgcaactgtgggttttctatttgcaaaacagccacggaggcttagtacatattttccgtattttgyccttgtagcaaaggcaaacatacgggaatagaaacatactgaggcagaaatttaaaataatcataataaggactggacgcggtggctcacgcctgtagtcccagcactttgggaggccgaagcgggcggatcacgaggtcaggacatcgagaccatcctggctaacacggtgaaaccccatctctactaaaaacacaaaaaattagccaggcgtggtggcgggcgcccgtagtcccagctgctggggaggctgaggcaggagaatggcgtgaacccgggaggtggagcttgcagtgagccaagatcgcgccactgtactccagcctgggcgacagagcgagactctgcctc

SEQ ID NO: 1491 - DNA, 1174 bp, Homo sapiens
cttccctcttccagcttctgccggtcaccagcaatcctcggtgttcttggcttgtagccacatcactccaatttctgcctacaatgttacatggacttcttcccagtgtgtctggctgtctccaatctctctctccttataaggacaacagtcattggattagggtccactctaatccattatgatctcatcttaaattgaccttataactgcaaagactctgttctaaataaggttacattcacaaatactgcagatcagaggtacaacataatttggggggaacacaattcaacccacagaaaaggagatagaaaaaaggaagatgggcaggatatggagggagacttaaaatactgctaaggaatggtcatagaaccattaaaatatggatttttgttgcatttagagtttttgtttgttttttgtttgtttgtttttgcatttagagatgttttgcattgtttttatgcaaacccctctcctactttatccttctaacattcaggtgtgcctacaactcctgtagaggttttgtgtgaagatgattttttagattttcaaaatggggctaaaatttatatctgagtcaatatattaatagtatgtgaaagagtaacccatatatgaatgtagtaatataatccattcactgagtagagcagaagcaggagttagaaaccagagccatatgatcatctgtgtctcacatacataccaatctaattatttaycccaaaaatgaagtactttggcagggcgcggtggctcatgcctgtaattccagcactttgggaggctgaggcgggcagatcacctgaggtcaggagctcaagaccagcctgggcaacatggcaaaaatccatctctactaaaaatacaaaaattagctggccttggtgacagcatctgtaatcccagctactcaggaggctgaggcaggagaatcacttaaacccaggaggtggaggttgcagtgagctgagatcatgccacttcactccagcctgggtgacagtgatagagtgagactctgcctcaaaataaaataaaataaaacaaaataagataaagcaaagcaaagaaatatttacgtcaaggagatagtgatcgcaacaaaatgacaactgtgtaagtttaggtacctgacgccactagccaaatccccaatgca

SEQ ID NO: 1492 - DNA, 613 bp, Homo sapiens
agatttccttgtgttcaagtttactccctggcactgctgactgatttgggaccccaggcagagtaattaaagcaagttctggatctctgtgtaggaacaacgagattgcttctccaactctgatggctatcaagagggagaggaaaacacaaagagaggaaattaatttacacactaatgaattttttaattagtattttaaaatccaaacttcagcagatttccctatagggaatggtatagaatgatccaggtaattagcaggagtgaaggtattaaaacaaacttatggatataatgagatagaaggtgtttgcaggtcagtagcggcaatcaaactcaggatatgacgctttgaggaggaaacacaggttgctgttttcctcacagaagaaatagggaccatcactaaatttaaaataataaattacataataaggtatgtacctgaaagcatattaaaatgttctttgagtataaattggcctttattaatatttttaattcgctrtaggttacaaaccatagttttagggtataatttcccagtaaaaatgaaaagtgaagctaatgtttcaaggataattattacagttttctctaggtgtgatga

SEQ ID NO: 1493 - DNA, 777 bp, Homo sapiens
accagagactataatctcagggcagctaaagacgaaatcctttaggggtagcatagaatgccaagaaaattgctggagttacgttttaggctcaggaacacattttcaataaattgagtggctccactgaaactgttacagtgggtagctagtcaggtatgagcagggcaggagagggctcctcctgcccgacacataccaggagtatccagggtccatcaggtgatgggcaggtggttgttaactgtctctctaaagtaatgactggtcacagctggcaycagagaaagccagtctcctaatagatagaaaacacctgaaactggtgatcagcagcttcccaaggagttgggcaagtcaggagaagcagcgcaagaccctggaagtgagccagcctacaaaaccccaagtcaaaaggtcaaaccatgcacttggctttcaagatgcccgcttggccctcttccaagtgtacttttcttccttttgttcctgttctaaagctttttaataaactttcactcctgctctaaagcctgccttggtttctccttctgccttatgcactcaaattctttcttctgaggaggcaggaattcaggttgctacagaaccgtaaggatatagattcgccaccagtaacagaactgtcccctgggaggctggagagccccaggactacacatatcagcagttgatgtaaatccagggtacaaattaccttgagagttactctatatttacagtgtcatccaggccacaaagagtgcgatctacgca

SEQ ID NO: 1494 - DNA, 777 bp, Homo sapiens
accagagactataatctcagggcagctaaagacgaaatcctttaggggtagcatagaatgccaagaaaattgctggagttacgttttaggctcaggaacacattttcaataaattgagtggctccactgaaactgttacagtgggtagctagtcaggtatgagcagggcaggagagggctcctcctgcccgacacataccaggagtatccagggtccatcaggtgatgggcaggtggttgttaactgtctctctaaagtaatgactggtcacagctggcatcagagaaagccagtctcctaatagatagaaaacacctgaaactggtgatcagcagcttcccaaggagttgggcaagtcaggagaagcagcgcaagaccctggaagtgagccagcctacaaaaccccaagtcaaaaggtcaaaccatgcacttggctttcaagatgcccgcttggccctcttccaagtgtacttttcttccttttgttcctgttctaaagctttttaataaactttcactcctgctctaaagcctgccttggtttctccttctgccttatgcactcaaattctttcttctgaggagrcaggaattcaggttgctacagaaccgtaaggatatagattcgccaccagtaacagaactgtcccctgggaggctggagagccccaggactacacatatcagcagttgatgtaaatccagggtacaaattaccttgagagttactctatatttacagtgtcatccaggccacaaagagtgcgatctacgca

SEQ ID NO: 1495 - DNA, 574 bp, Homo sapiens
tatctgctttcccaggactctcttcaatcattggccctcagtatggtaataacaaacccacgatttccttgtttctaaagtgttctaatgtyttcacatcttggaggggacttggatctacctctctctagcactcattttcttgtttggctgtccaactcaaccacagattccacagcaagaggaaccacagattactcatcacaacatcctcagcccatagaatattcttagcaaacattttcttaaatgactaaatgagtgaatgtgatgagaatttcaaaatgtgtagaactgaccagagccaggaatcctggaaagtccagtatctttctctttctacaaagaaatggtgtggggaagtggggcaaatatttaataaaattctgtcattaactgatatagccacaaaagcatttactgaaaacttagggctatctgatgattcctagtatatttcactgggcttaacaaaaactgtgtggagccttgaccatctgggatgtcattacataaaggtaaataattaaatatataactttgtaaagacttcttcaagaatgtaatccctttt

SEQ ID NO: 1496 - DNA, 574 bp, Homo sapiens
tatctgctttcccaggactctcttcaatcattggccctcagtatggtaataacaaacccacgatttccttgtttctaaagtgttctaatgttttcacatcttggaggggacttggatctacctctctctagcactcattttcttgtttggctgtccaactcaaccacagattccacagcaagaggaaccacagattactcatcayaacatcctcagcccatagaatattcttagcaaacattttcttaaatgactaaatgagtgaatgtgatgagaatttcaaaatgtgtagaactgaccagagccaggaatcctggaaagtccagtatctttctctttctacaaagaaatggtgtggggaagtggggcaaatatttaataaaattctgtcattaactgatatagccacaaaagcatttactgaaaacttagggctatctgatgattcctagtatatttcactgggcttaacaaaaactgtgtggagccttgaccatctgggatgtcattacataaaggtaaataattaaatatataactttgtaaagacttcttcaagaatgtaatccctttt

SEQ ID NO: 1497 - DNA, 623 bp, Homo sapiens
ttataaaataaaggaaggaggaggatcagacccagacgtttaaagaagctatgctgctggctttgaagatggaacaagggaccatgagctaagaaagacagcctccagaaactagaaaaggcaagaaaaccaattctctctgaacctctaggagaaacactgcctgctggcatcttaattttagcccagagaaacccattttgggctcctgttctccagaactctagtataatagagttgtcttgttttaagccactaagcttaaaacagcaatagcaaactaatacacagaatggtcactataatcctgctgcttcttaaagcaagagacttatgcctgctccagtccccccaaccaacacacacttgttatctttaaagaaaaatctaaacttaacatatcaccctccccacttttartttacaactttgtgtaacgtgacttctaaccccagccctctgaaactgatccctaagaggccatcaaaggacttcttggtggagaaatcatgtctctacttctcattttttttacatatgcatacacagacacttcatttatcaattttttcttgaaaatctctcctctacatttttgagttactggtctctcttaattctcc

SEQ ID NO: 1498 - DNA, 706 bp, Homo sapiens
tgccaaagttacatccctaaacaggtgaggggagacagaggagccaagcaaaaacatttcattataatgtaccgattaagaatgggtacatgaattcartctgaccattcaagcaaagacatggaataaacctaggcacccattaacagtggatggtataaagaaaatgtggcacatatacactatggaatactaccttttaaaagttagcattccccaggtttttacttttgattgtctcatcttcctcattgtaaaacaccacctcatttatctctgttacatcctatggtttcatttttcaccttcttactggtttacacaactgtttatcttcagagctttcaaataactgaccaaaagacagaccgacttaaagaaagaattaaattacgttctttgcagcaatgtggatgcagctggaagccattatcctaagtaaattaatgcaggaacagaaaaccaaatacctcatgttttcacttataagtgggagctcaacattgggtacacgtggatataaacatgagaacagtagacactgaggactcctagagggggaaggaaaggaggcgggggcaagggctgaaaaactacctattgggtacaatattcattacctgagtaatgggacttgtaccccaaacctcagcatcacacaatatttctaggtagcaaacctgcagatgtaccccctcaatctaaa

SEQ ID NO: 1499 - DNA, 658 bp, Homo sapiens
agccttcagtaggagacaggaaagattattttacagtaataatccactatgatccaggaattatgtgtgttacttagcccttattatttcttctactatcttgttgataaaccagtgtacaggctgattcaattaaaaatagtaacttcaaggccattcctttttttagccatatagtacacacgttggcatactgcaaagtgagagtacctgattcaattgccaccagtactacttactatttgtatgaccttttctgtacttgaatttcytcatcattaaaatgattataacattaaaacatctacctcataggtctgttgtgaaaattacaagtttgatctttgtaaatctcagaataataccttggcaagtagaagtgctgagtattagctaatatcattcaaaactaattacgggatgaattattctgtcttctggatacagtttttgttatagttgcttctagaacttcagtcatggagtcatcatcataggcccaccaaaggaaatgaaatgataatctgagctcacctaaacatcaagtcctgaatagatttattacattggtactttagagacagatggatcactaggggttaaccaaatgatattataaacaaattttaaatggctttacttaataaacaatcaaaca

SEQ ID NO: 1500 - DNA, 619 bp, Homo sapiens
aattggaatacaatatattattcaaaccaaacaccatctatttktctacaaagagtatggatacagaagtaaaagttcgcatagatattgactttagacagtttcatgatcacagcccccaagcaaattacttaatttcttgaagcttaatttttcttatcttccaaatctctgagatctcttctcatctatagcataatgagactaatatttgccccaaaggacaaataatatattaatagtaaaatgctggcatagtgattggcacacattaagtaatgactacatagtagctattattaggagatcaaggtgttgaaaaaacaaaagaatttgaaaaacatgtatgagagaaaaatgcttgtcttatgaagtataaggaatgcaagacaggacagcatcaacaatgacttgatatcaaaggtgcagtgtaacaccagaaaaatagtgactttgccaaccaaggtgatgaggaaaggaagaagttcttgtaaaagatgacgatatttagtttgaggtggatataattcgtggtgtttaaaaagaatgcaattggcaatgcccattagaccgttggatgtatatgtgcagtgtgagaaagagttcaaacctaaagatg

SEQ ID NO: 1501 - DNA, 663 bp, Homo sapiens
  misc_feature (1)...(663): n = A,T,C or G
ttgagctatgtgtccgcctaatttaaacaaagaatcagtgccctttttgcagagagcttttatccactggttcttttatgaaaggccaaggtatggaaatctagcctctacaccagggttttgccatcccatggtctggtgaagatgcttggtcccattccaagctggcctaaatgtgctggtttatgacttctgtgtttcctaaactgattgccaagcagccctgctctgctgattctcaaaaacagcccgtcgtctgcagcactttttctcatgtgggctcccagggagtgggaatcggctctcagcggctcatgaatcatggtctccaggattcttctcagaggcagaaagatttctgggtagatgagaaaattttacaaaatctcttctccctcctaatccttagcrccaccaccgctatcatttccataatcatctttataattatttgaagtggaaagggggcagggtacctgcttaatgaaaagtagatgggaaaaaatagaaactgtggagataggtgattgaatagcctctctcagaaatgcacatcatgtgnnnnnnnnnnnnnnnnnnnnnnnnnnnnnnnnnnnnnnnnnnnnnnnnnnnnnnnnnnnnnnnnnnnnnnnnnnnnnnnnnnnnnnnnnnnnnnnnnnnntg

SEQ ID NO: 1502 - DNA, 591 bp, Homo sapiens
tacataaaatgtaaaaaaagattagattgaaacactgaacatgaaaaaaaatctcacaaccacatttgggtgaaagaattcagacagagaagagcatatacttactattccatttatgtgaaattcaaaataagccaaaagtctatggctatggaagtcatagagtagttacctttgggtaattactgacttgtgatggcagtgggagggaaaacaagatgaaacattttggagtgttagaaatattatatatggcaacctggatagtggttatatagatgtatacaagtgttaaaatttaccaaaccctgcacttaagtttgtgtgtgtgtgtgtgtttgcgtgtgtatactttactgtgtactttattgcacactttccccctcaagaaaacaataaaaagagaggaagcataaatgcctaagtaactcaacatcagaacataccataaaaaaagaggaaaatgattgcaacatgtatgaaaagaaaatggttcagaatcttaattcacaaagagcatgtaaaactataagaaaaagcaagtaatgtaaaataaaccgttgtcactgaatatgaataaattaacsttaa

SEQ ID NO: 1503 - DNA, 2218 bp, Homo sapiens
ttagagaaaaaaagcagtgctagagatacaaaaaactttactaagattatgagcatttattaaagaatgtataacagttatctaaaagtaaaagacgccaggcgtggttgctcatgcctgtaatcccagcactttgggaggctgaggtgagagaattgcttacgcccaggagtttgagaccagcctagataaaatagtgaatctccatatctacaaaaaataaaaataaaaaagttagccagatgtggcctatagtctcagctactcaggaggctgagttgggaggattgcttgagcctaggaggtcaaggctgtaatgagccatgatcatgccattgtgctccagcctgggtgatggaaccagagcttgtcttaaaataaataaataaaaagtaaaaataaataaatttaaaaagaccgatttgatgatgaataatttgcaatgctttactgaatatttaaaagttaggtttaaatgttgggtactatattaaacaataaaaattactgtaataaagtaaccttactgagaacctagtagtagtgtttatttataacaaattatatgttgtgtaattacagagctgtgtggagttactggtttatgcacaattaattaagtactggttgcttcataaaataaatatccaattcaaaaatgaccaaaacaggtaataatgataaacatataatatgtaaatctctccaaatcaacagaaaattttatgcagcttgtgcaagacttaatattttcctggagtatttagagaaaaatrtaatatagattagtaatgcctttcaaactctgtgtcacataaaatgaatatttataattaggacacagagaaatccaaggttaaaatgtgcttcaaaaaagttaaaaaatcaatttttaatgttttgttggtaggcaacatacaaagcatagatatagaaatacgagacttttcgttcagcttatgttgtaaaatgtcttaaatgcattaaatgtagcacacatgcacaagcaaataataatgttacaattaaataaaacaaattatatcaagagaagaatatgtgacatgtgtccaacaaattattataaaaacagattactgaattgaaatttacatattattaaatgaaaaagcattgtgctgcaattctgcaaatatagagagtgaaatgtaatcatcagagagtaactgagtagtatagtctcatttttattgttgtctttttgaaataggaatagtattgtctaaggaacactggcccccataagtagtaaagcccaacatttcagtgattcagcacaatagatttagcacatttctcgcacatgtaactgcacaatgtgggtgttcctagtcagtgtcagtttccatcttatgatctgcccacccgctaggcctccgggtcctctgaaggtgaaaagtaaagggaagaacatatagtgggaagccatgcctgcttcttaattcactcagcctacaaacaatatataactcactttctctcgcatgactttggtgaggatttgaaactgtacccctaggattggcagctgcttcccaacgagtactcagtaatgccggatatttgtttccccacaaaattcatgtattgagatctaatacccagttgatgctattagtaggtgtggcctttgggaggtgggtaggtcatgagggtagagcccttataaatacgatttgtgcctttataaaaggggcaccagagagctgccttaccgcttccatcctgtgagaacacagtgagaaggcaccatctgtaaaacaggaaactggccctcacaacgcgacagtgaatccacaggtgccttgatcttgatcttccagtcttcggaacttgagaaataattttctgttgtttataaactactcagttaatggtgctttgtactagcagcccaaaaagatcaaggcactgatctatggcaggggaagtacaagttttggtggatagttggtcatctctgccactagaatgaaatacagctatgtttattttctatttggaggtaattaggattaaaatttcaaaccaggtttttaaggaaaagctagaggtagttattcattcattcaacacacacacacatgcacacattttacacacaaacacacacagatatccgattatgtgcctctggtgttagggttggaattcaggcctggaattagccagaactgatccattgaaatgagaaatg

SEQ ID NO: 1504 - DNA, 1266 bp, Homo sapiens
aggtatcctcagttacatattaaattaaattggaaaattttttcttataataaagatgagtgaaacatattgttagatacgaattgaaaagctctttttttcagggcctttcatgttcaacacatacttttagtagaagtatgttattttgcgtgtaaaataattaaattccccaaatttgaaacaataaagatatcataaacaacattttaagaaaaatgatctactcatcattaattatttatccagcccaaaggtgayacaagtatgttcaaattgacaaggtgaaaagtatgtctcttttgaaactaataaggtagaagaggaaaataatactaattaacacctatctcctaattttgcagtgcaagcccacagattttgtaccataaattataacatttgtttacatttatatacaacatacataggtatataatattagatattatctctttatatgatataaatactgttatattttcttattttacttgttctcagatctgccatatattttcatatgtaaaacatattacttataattcaaaactttgttaaataatctttctgaaaagtagagtccagcttattagaggcaaattactagcaataatttaaattgtgtaaatatgaaaccttaaggacaaaaatactccttcagatattttgctaatgtttttatatttctaactcaatgaataattatgtttttaattatttcatgaagtaaatacagttcagtctcccagggccagagagaacaatcagataaaaattcactaaatataacaaatgaggataaaaatttataagtataaaatcaaagttaagaatttacagttttcagaaatattgtatttagtattcatatttaaaagtggtttcctaattcctgatgctgcttatgccatagacatggttgtttataaactacattttaaatgaattgggtaataatgatttaaaaagagaaagaagtgcttagtttcttcacataaacaatgctattttaattagcattaaacatttatattttgtttagtaacatgtgaattcaatattttaaactcctgacatctgtgttttggagaaaaaaacaactcttatttgttgttaatgtaacatataatctttgagtgtatgtttgtccctggctatgtgtgtatacttttaaaacatccatttttcctaatccattttactgaagtataaaataaaattatggctttgaaattgtcaaggtatttgtgtttaatttatact

SEQ ID NO: 1505 - DNA, 1265 bp, Homo sapiens
tactgacacttggaaaactatgtaggcaaaaaattagctctctctcaccacccccccagaattaactgtttttgataattgacatgctttgttaatactgtaagctttcaacctatcatttaaaattctatcaaaacataacgtttggtggctgtaaaatagtctgctttgaagttaaacaattttccaactacttctctagggtcaggttatttccaatgttttgttataggcattgctgtgaacatttaatatagatacatattctggtcattattaggtgttgtcagaccttttaattttagttatgttctggtttgtgtagtaatagttgattgtggcttaaattacatttccttgataaataatctttggcaatttttcatgtgcttatttgccactcttatatcttcttttatgaatactgttaataattattgtatcctttcctcatatctttttaacagttgctttctgaaaaatttgattttgttgtatatgccattttgcgtatgctgactcactatagaactaataaatgtagctcatgggaaatagagaaaaatatgaagaaaacataatagtccctcataatcttaccactaagaggttaccactgccaaccctttagtttatttttttttcagtctttgccaaatgcaattttccataatcaatattatagattcatttagtgaactacttttgtttcaataccactgatgagcatttctgtgcattgttaaatactctttccatatcaccctttcttcttcctacaccatccacaggaaactaaagtttagattggggaaaatcaatacaarataataaataatacaatactatgatatataaggtagtaaatatataaatatataagtaaatatataaatttactgcagaactgtagtaaatttagagggcactatagaaggtcaattggagctagagttaagaaagagcaatgagaggaaaagacagcaggtgtgagccagtgacccatgtgagcagccgcaccaaggcagaagtgagcagggctatggtgggaccatttgggtttgcacgaatatttggcaaggagagcagtgtgtttggttcagattaaaagtgggagtcgacagatattagaggtccttaaaggttggcaaatgagctgctgctctctgcagaactgaaatatatttagaattacatagaacttaatggtgtacaggagaaacgcctgcttaactacaaaactcttatttatgatggaaaaataa

SEQ ID NO: 1506 - DNA, 1265 bp, Homo sapiens
tactgacacttggaaaactatgtaggcaaaaaattagctctctctcaccacccccccagaattaactgtttttgataattgacatgctttgttaatactgtaagctttcaacctatcatttaaaattctatcaaaacataacgtttggtggctgtaaaatagtctgctttgaagttaaacaattttccaactacttctctagggtcaggttatttccaatgttttgttataggcattgctgtgaacatttaatatagatacatattctggtcattattaggtgttgtcagaccttttaattttagttatgttctggtttgtgtagtaatagttgattgtggcttaaattacatttccttgataaataatctttggcaatttttcatgtgcttatttgccactcttatatcttcttttatgaatactgttaataattattgtatcctttcctcatatctttttaacagttgctttctgaaaaatttgattttgttgtatatgccattttgcgtatgctgactcactatagaactaataaatgtagctcatgggaaatagagaaaaatatgaagaaaacataatagtccctcataatcttaccactaagaggttaccactgccaaccctttagtttatttttttttcagtctttgccaaatgcaattttccataatcaatattatagattcatttagtgaactacttttgtttcaataccactgatgagcatttctgtgcattgttaaatactctttccatatcaccctttcttcttcctacaccatccacaggaaactaaagtttagattggggaaaatcaatacaagataataaataatacartactatgatatataaggtagtaaatatataaatatataagtaaatatataaatttactgcagaactgtagtaaatttagagggcactatagaaggtcaattggagctagagttaagaaagagcaatgagaggaaaagacagcaggtgtgagccagtgacccatgtgagcagccgcaccaaggcagaagtgagcagggctatggtgggaccatttgggtttgcacgaatatttggcaaggagagcagtgtgtttggttcagattaaaagtgggagtcgacagatattagaggtccttaaaggttggcaaatgagctgctgctctctgcagaactgaaatatatttagaattacatagaacttaatggtgtacaggagaaacgcctgcttaactacaaaactcttatttatgatggaaaaataa

SEQ ID NO: 1507 - DNA, 1265 bp, Homo sapiens
tactgacacttggaaaactatgtaggcaaaaaattagctctctctcaccacccccccagaattaactgtttttgataattgacatgctttgttaatactgtaagctttcaacctatcatttaaaattctatcaaaacataacgtttggtggctgtaaaatagtctgctttgaagttaaacaattttccaactacttctctagggtcaggttatttccaatgttttgttataggcattgctgtgaacatttaatatagatacatattctggtcattattaggtgttgtcagaccttttaattttagttatgttctggtttgtgtagtaatagttgattgtggcttaaattacatttccttgataaataatctttggcaatttttcatgtgcttatttgccactcttatatcttcttttatgaatactgttaataattattgtatcctttcctcatatctttttaacagttgctttctgaaaaatttgattttgttgtatatgccattttgcgtatgctgactcactatagaactaataaatgtagctcatgggaaatagagaaaaatatgaagaaaacataatagtccctcataatcttaccactaagaggttaccactgccaaccctttagtttatttttttttcagtctttgccaaatgcaattttccataatcaatattatagattcatttagtgaactacttttgtttcaataccactgatgagcatttctgtgcattgttaaatactctttccatatcaccctttcttcttcctacaccatccacaggaaactaaagtttagattggggaaaatcaatacaagataataaataatacaatactatgatatataaggtagtaaatatataaatatataagtaaatatataaatttactgsagaactgtagtaaatttagagggcactatagaaggtcaattggagctagagttaagaaagagcaatgagaggaaaagacagcaggtgtgagccagtgacccatgtgagcagccgcaccaaggcagaagtgagcagggctatggtgggaccatttgggtttgcacgaatatttggcaaggagagcagtgtgtttggttcagattaaaagtgggagtcgacagatattagaggtccttaaaggttggcaaatgagctgctgctctctgcagaactgaaatatatttagaattacatagaacttaatggtgtacaggagaaacgcctgcttaactacaaaactcttatttatgatggaaaaataa

SEQ ID NO: 1508 - DNA, 1265 bp, Homo sapiens
tactgacacttggaaaactatgtaggcaaaaaattagctctctctcaccacccccccagaattaactgtttttgataattgacatgctttgttaatactgtaagctttcaacctatcatttaaaattctatcaaaacataacgtttggtggctgtaaaatagtctgctttgaagttaaacaattttccaactacttctctagggtcaggttatttccaatgttttgttataggcattgctgtgaacatttaatatagatacatattctggtcattattaggtgttgtcagaccttttaattttagttatgttctggtttgtgtagtaatagttgattgtggcttaaattacatttccttgataaataatctttggcaatttttcatgtgcttatttgccactcttatatcttcttttatgaatactgttaataattattgtatcctttcctcatatctttttaacagttgctttctgaaaaatttgattttgttgtatatgccattttgcgtatgctgactcactatagaactaataaatgtagctcatgggaaatagagaaaaatatgaagaaaacataatagtccctcataatcttaccactaagaggttaccactgccaaccctttagtttatttttttttcagtctttgccaaatgcaattttccataatcaatattatagattcatttagtgaactacttttgtttcaataccactgatgagcatttctgtgcattgttaaatactctttccatatcaccctttcttcttcctacaccatccacaggaaactaaagtttagattggggaaaatcaatacaagataataaataatacaatactatgatatataaggtagtaaatatataaatatataagtaaatatataaatttactgcagaactgtagtaaatttagagggcactatagaaggtcarttggagctagagttaagaaagagcaatgagaggaaaagacagcaggtgtgagccagtgacccatgtgagcagccgcaccaaggcagaagtgagcagggctatggtgggaccatttgggtttgcacgaatatttggcaaggagagcagtgtgtttggttcagattaaaagtgggagtcgacagatattagaggtccttaaaggttggcaaatgagctgctgctctctgcagaactgaaatatatttagaattacatagaacttaatggtgtacaggagaaacgcctgcttaactacaaaactcttatttatgatggaaaaataa

SEQ ID NO: 1509 - DNA, 1265 bp, Homo sapiens
tactgacacttggaaaactatgtaggcaaaaaattagctctctctcaccacccccccagaattaactgtttttgataattgacatgctttgttaatactgtaagctttcaacctatcatttaaaattctatcaaaacataacgtttggtggctgtaaaatagtctgctttgaagttaaacaattttccaactacttctctagggtcaggttatttccaatgttttgttataggcattgctgtgaacatttaatatagatacatattctggtcattattaggtgttgtcagaccttttaattttagttatgttctggtttgtgtagtaatagttgattgtggcttaaattacatttccttgataaataatctttggcaatttttcatgtgcttatttgccactcttatatcttcttttatgaatactgttaataattattgtatcctttcctcatatctttttaacagttgctttctgaaaaatttgattttgttgtatatgccattttgcgtatgctgactcactatagaactaataaatgtagctcatgggaaatagagaaaaatatgaagaaaacataatagtccctcataatcttaccactaagaggttaccactgccaaccctttagtttatttttttttcagtctttgccaaatgcaattttccataatcaatattatagattcatttagtgaactacttttgtttcaataccactgatgagcatttctgtgcattgttaaatactctttccatatcaccctttcttcttcctacaccatccacaggaaactaaagtttagattggggaaaatcaatacaagataataaataatacaatactatgatatataaggtagtaaatatataaatatataagtaaatatataaatttactgcagaactgtagtaaatttagagggcactatagaaggtcaattggagctagagttaagaaagagcaatgagaggaaaagacagcaggtgtgagccagtgacccatgtgagcagccgcaccaaggcagaagtgagcagggctatggtgggaccatttgggtttgcaygaatatttggcaaggagagcagtgtgtttggttcagattaaaagtgggagtcgacagatattagaggtccttaaaggttggcaaatgagctgctgctctctgcagaactgaaatatatttagaattacatagaacttaatggtgtacaggagaaacgcctgcttaactacaaaactcttatttatgatggaaaaataa

SEQ ID NO: 1510 - DNA, 640 bp, Homo sapiens
tttaaaattgtatggatttaccatgtaaaacatcgtgaaggaattgcttatctttgttctcttgatatttagtttattccctagtaaagcacttgcctcaagtatttagttacacttttgagcactaactttcccagcagactttacactttttacaggaccatgtcccgttcacctgagcatcatggatactcagcacaatgcatggcatatagtagatgctcaattatggtttttcttttaatgagctacaagaaataaatgagtgaaaacatgagtgctaatataaagtaactctccctaagccagtcctataatacatgtctagccctacagtttctagaccagcaaaaccaattgttttgttaccaagaaggtaggactggatgtgagggcgatctggctgcaacatctgtcaccccattgattgccagggttgattcagctgatctggctggctaggcgggtgtccccttcctccctcaccactccatgtgcrtccctcccaaagctgcaagctcagtagaagaggacaaccatccccaatagaggaagaccggtccttagtcaagggtatatgactagctatgctcccctgctacaacctccagacaagctctcaagaagccaggactataac

SEQ ID NO: 1511 - DNA, 968 bp, Homo sapiens
aatggttgggatgcaccatgactatataacagagaaactaattggcccaagtggaaagcaaacccattagtattgttcaggtttagcacagatggtctgcctctagggaggagatggttcagagatgggcttgactattcttgaaccttataaaattggatgcaaaaatgttctgaatatgtgtctttttttctgaggaggatttcatcaactcctcaaggaaaacagcatgaattctggagttagtctcagctttactaccaactagctgcatgacctagggcaactttctcaaccccccaggccccagttgcctcatttgtacaatggaaatgtgttgattcaaaatatggaacactacacaagaattttgtttgtttgttttttgagacagactctcgctccgtcgctcaggctggagtgcagtgacgccatcttggctcactgcaagctccgcctcccgggttcacgccattctcctgcctcagcctcccaagtagctgggactacacacacccaccaccacgcctggctaattttttgtattgttagtagagacagggtttcaccgtgttggccaggatggtctcaatctcctgacctcgtgattcgcaccccctccgcctcccaaagtgctgggcatgagccaccacgcccggccggaacactacgcaagaatttttaaaaatgaaatagatggctgggcgcggtggctcacgcctgtaatccgagcactttgggaggcygaggcaggcctcagtcgggagttcaagaccagcctgaccaacatggagaaacctcgtctctactaaaaatacaaaattagccgggtgtggtggcgcatgcctgtaatcccagctgctcgagaggctgaggcaggagaatcgcttgaacctgggaggcggaggttgctgtgggctgagatcgcgccattgcactccagcctgggcaacaagagcgaaactcca

SEQ ID NO: 1512 - DNA, 1324 bp, Homo sapiens
ctttgctaaaagctctgtctcaaagccccaaatataaaatttacataaaacttgaaccactgaagcagggatttcttctaaatctctcatcacccacattaytatgatgctttcttccatttcccaacttcctatcccttccaaacccctcaatctgtgtgctcaatccaccctgaactctctctctcccagttctagtcaaatctggcatccatgttttgtctgctcagcaggagagtaatgtcaacaatcttctgctctttacaagatcagtttattcctcccaatataataattagtttcagatgaacctggttgctggcacacggcttggttccattctggtactagcaaggagagcagatacttcctgttgcactattttttagagcaaagaatctgggcactatgttagacccagaacaaaacttttgcaatttacttctttaaaatatagctgagtttcaataatctagattctcaaaagagatcaactgaaattatgattatgggaatcttttcagtttacttttaaaatggttcaggtaaattatcatcaagaacacaaatcttatgaaaataaccagtgctgtattcttgcaaacatacagaggttgtaagtaggaagccaagagcattatcttaacatcttacaacttaattagcttttaggagataataaatactggtaggtaagtaaatatactgccttggaaataaggatattaggggaagaattctagaagatctgttcacagtgatacagaaaaatcaagcaagacattctttttttcttttttagacggagtcttactcttgtcgcccaggctggagtgcaatggtgccatctcggctcacggcagcctctgcctcctgggttacagtggttctcctgcctcagcctcccaagtagctgggatcacagacacccaccaccacacctggctaatttttgtatattcagtagagatgaggtttcaccatgttggccaggcttggtcttcaactcctgatctcaagtgatccacctgcctgggcctccaaaagtgctggtgtgagccaccgcacccagccgcaagacattttttacacacagaatgatcaagacgatctacatgaagcacaatcaaaagaagcagagtcccaggggaaagggaagttgccacagttttcctttaggtctcctacatgtctcctatcagtccttgcacatttccactcattaattcagtaccagtcgtggagccatctgtgagtgtttttatcatcataaccttaggttatcctcttcgtaaatcccagcaacccctgagctatgctttca

SEQ ID NO: 1513 - DNA, 2902 bp, Homo sapiens
gttctaggccatgaaattaattgggaatgagtgtagctagaagagagataaatcccgggccctccaacatttagaagtgaggaaatgggtaagaaccagcaaaggagattgaggaaaaagtggcaagtgaagaaggagaaaacccagaatccaagagaagaaagtgtttcaaggaggagggagtgatggattgtgtcaaatgttattgctaggtaacagaagaaccaaaagttaaccatgggatttttagcaagctggaagtagttggtgacctcaacaagctcagtcttggtagaaagatgacagtgattcactgttcctgcccttaaaaccttttactctacttctaggaaaaatatatattttcgcactaccccaggtggtggtacgaaatagtaccatgttgtgctctcgtaatgttcaaccttcttattgctttgaagacagataaaggccttgcaaaaaaaaatttaaactaaacctaaccctaacatatgctcagctttctaatgtatataattatttataaacactttaaataatgctcttttccctcacattcattatttgtcttagattttggaaaataaatgagaatcaaattgctttaaagtagcatgaacagagccgggcatggtggctcacgcctgtaatcccagcactttgggaggccgaggcgggtgaatcacttgaggtcaggagttcgagaccagcctggccaacatggtaaaaccccatctctactaaaaatacaaaaattagccggccgtggtggcaggcgcctgtaatcccagctactggggaggctgaggcaggagaatcgcttgaacctgggtggcaatagttgcagtgagtcaagatcacgccactgtactccggcctgggtgatagagcaaaactcagtctcaaaaaaaaaaaccaaaaaccagcatgaacagagcaacatgcttccattatgctgaggcaaacatctaggttatgaagtgttttttcttgtagaaattcatattcccaggattctcttatgatcttttttgaattgagttttttatttaatgtcactgatcaaatatgcttctcctcgcttcattatctccatttcctacaaagcaaagaaagaaaggttaatggaaaaactgattgtcagtcgggtgcggtggctcacacctgtaatcccagcactttgggaggccgaggcgggtggatcacaaggtcaagggatcgagaccgtcttggccaacatggtgaaaccccgtctctactaaaaatacaaaaatcagttgggcgtggtggtgggcgcctgtagtcccagctacttgggaggctgaggcaggagaattgcttgaacccgggaggcggaggttgcagtgagccgagatacaccgctgcactccagcctggcaacagagcgagactccatctcaaaaacaaaacaaaacataactgattgtctactttacacccattaaaatagttgtagagctgtcagagtaaatgtggaacaatcggagttctcatatgtttcctgtgggaatgtaattgctacagccacttcagataacagttkttcaaaacttaaatataacctaattccatgacccatgcatcgttttcctgggtatttactcaaaaaaggtaaaatcatatgttcacacaaagacttatgattttagaaatatttatagaaaccttattcacaatggcccagatggaaacaacccaaaatgcttatcaaaaggtgaatgagtaaacaaattatggtgcattcatccaatggaattctacccagcaataaagcacagagaactactgatacacacagcaacttgggtgaatctcaaaactattatgccgagaggaagaagccccaaagcacaaaaggagtgagagggaatgtattggggatggaaatgcctgttccttgactgggatggtggtcacaaggatgtgtatacatttgtcaaaactcattgagctgactcttaagtagatcaatttattttatgtacattatacttcagtaaagctagaaaaacacattaaagaaaaagttgagaacctgccttagttgagacaaattcacatcacctgtgttttatgttttagggtcagtacccggaagcattttaattctgggtgaacagtcattataataacgtggttttatttgatagaaagaagtgataaggcactctcttatttctcttttgtttgccctgtgaatagtacagaagcctgttaattggttgattggattctaggagaaaaatgaaattcggtatcaccgtacttgaaccagacagccgggcgtattagacagatggcaacagtctccatattcacttcttcctggaatctctcatattttggcagcaattacaattatttgcaagaaatgccataaaatgccaagttctgagaaaacaaagaaggttttgtttcttagctttcttcgttgctaataacttaaatcctcacattcacaacagaagagggctcatggagtacattaggaataatgtgctttgactaggggtaaacatggtaatcagcagcccttgagaaagatctgctcgcattcatgcggtgaaggggagccattaattgtctttcattctcacagtcaaaactcgttattggttatgtataccacttttagttgcgcatttgctatgaatttttttaaacatttttaaacattttttaaaatccaggctacctcaaacctgtttgttacagctgctgaataagtgacttaaactaggtttttgatcttgctgttctccttctgttcaaaagtccctcttcttccgactcccccatattctaccctactgtgaaatttactataagtaaatttacagatatgcttctgttacacaaaagttttattttaaacttt

SEQ ID NO: 1514 - DNA, 2902 bp, Homo sapiens
gttctaggccatgaaattaattgggaatgagtgtagctagaagagagataaatcccgggccctccaacatttagaagtgaggaaatgggtaagaaccagcaaaggagattgaggaaaaagtggcaagtgaagaaggagaaaacccagaatccaagagaagaaagtgtttcaaggaggagggagtgatggattgtgtcaaatgttattgctaggtaacagaagaaccaaaagttaaccatgggatttttagcaagctggaagtagttggtgacctcaacaagctcagtcttggtagaaagatgacagtgattcactgttcctgcccttaaaaccttttactctacttctaggaaaaatatatattttcgcactaccccaggtggtggtacgaaatagtaccatgttgtgctctcgtaatgttcaaccttcttattgctttgaagacagataaaggccttgcaaaaaaaaatttaaactaaacctaaccctaacatatgctcagctttctaatgtatataattatttataaacactttaaataatgctcttttccctcacattcattatttgtcttagattttggaaaataaatgagaatcaaattgctttaaagtagcatgaacagagccgggcatggtggctcacgcctgtaatcccagcactttgggaggccgaggcgggtgaatcacttgaggtcaggagttcgagaccagcctggccaacatggtaaaaccccatctctactaaaaatacaaaaattagccggccgtggtggcaggcgcctgtaatcccagctactggggaggctgaggcaggagaatcgcttgaacctgggtggcaatagttgcagtgagtcaagatcacgccactgtactccggcctgggtgatagagcaaaactcagtctcaaaaaaaaaaaccaaaaaccagcatgaacagagcaacatgcttccattatgctgaggcaaacatctaggttatgaagtgttttttcttgtagaaattcatattcccaggattctcttatgatcttttttgaattgagttttttatttaatgtcactgatcaaatatgcttctcctcgcttcattatctccatttcctacaaagcaaagaaagaaaggttaatggaaaaactgattgtcagtcgggtgcggtggctcacacctgtaatcccagcactttgggaggccgaggcgggtggatcacaaggtcaagggatcgagaccgtcttggccaacatggtgaaaccccgtctctactaaaaatacaaaaatcagttgggcgtggtggtgggcgcctgtagtcccagctacttgggaggctgaggcaggagaattgcttgaacccgggaggcggaggttgcagtgagccgagatacaccgctgcactccagcctggcaacagagcgagactccatctcaaaaacaaaacaaaacataactgattgtctactttacacccattaaaatagttgtagagctgtcagagtaaatgtggaacaatcggagttctcatatgtttcctgtgggaatgtaattgctacagccacttcagataacagtttttcaaaacttaaatataacctaattccatgacccatgcatcgttttcctgggtatttactcaaaaaaggtaaaatcatatgttcacacaaagacttatgattttagaaatatttatagaaaccttattcacaatggcccagatggaaacaacccaaaatgcttatcaaaaggtgaatgagtaaacaaattatggtgcattcatccaatggaattctacccagcaataaagcmcagagaactactgatacacacagcaacttgggtgaatctcaaaactattatgccgagaggaagaagccccaaagcacaaaaggagtgagagggaatgtattggggatggaaatgcctgttccttgactgggatggtggtcacaaggatgtgtatacatttgtcaaaactcattgagctgactcttaagtagatcaatttattttatgtacattatacttcagtaaagctagaaaaacacattaaagaaaaagttgagaacctgccttagttgagacaaattcacatcacctgtgttttatgttttagggtcagtacccggaagcattttaattctgggtgaacagtcattataataacgtggttttatttgatagaaagaagtgataaggcactctcttatttctcttttgtttgccctgtgaatagtacagaagcctgttaattggttgattggattctaggagaaaaatgaaattcggtatcaccgtacttgaaccagacagccgggcgtattagacagatggcaacagtctccatattcacttcttcctggaatctctcatattttggcagcaattacaattatttgcaagaaatgccataaaatgccaagttctgagaaaacaaagaaggttttgtttcttagctttcttcgttgctaataacttaaatcctcacattcacaacagaagagggctcatggagtacattaggaataatgtgctttgactaggggtaaacatggtaatcagcagcccttgagaaagatctgctcgcattcatgcggtgaaggggagccattaattgtctttcattctcacagtcaaaactcgttattggttatgtataccacttttagttgcgcatttgctatgaatttttttaaacatttttaaacattttttaaaatccaggctacctcaaacctgtttgttacagctgctgaataagtgacttaaactaggtttttgatcttgctgttctccttctgttcaaaagtccctcttcttccgactcccccatattctaccctactgtgaaatttactataagtaaatttacagatatgcttctgttacacaaaagttttattttaaacttt

SEQ ID NO: 1515 - DNA, 2902 bp, Homo sapiens
gttctaggccatgaaattaattgggaatgagtgtagctagaagagagataaatcccgggccctccaacatttagaagtgaggaaatgggtaagaaccagcaaaggagattgaggaaaaagtggcaagtgaagaaggagaaaacccagaatccaagagaagaaagtgtttcaaggaggagggagtgatggattgtgtcaaatgttattgctaggtaacagaagaaccaaaagttaaccatgggatttttagcaagctggaagtagttggtgacctcaacaagctcagtcttggtagaaagatgacagtgattcactgttcctgcccttaaaaccttttactctacttctaggaaaaatatatattttcgcactaccccaggtggtggtacgaaatagtaccatgttgtgctctcgtaatgttcaaccttcttattgctttgaagacagataaaggccttgcaaaaaaaaatttaaactaaacctaaccctaacatatgctcagctttctaatgtatataattatttataaacactttaaataatgctcttttccctcacattcattatttgtcttagattttggaaaataaatgagaatcaaattgctttaaagtagcatgaacagagccgggcatggtggctcacgcctgtaatcccagcactttgggaggccgaggcgggtgaatcacttgaggtcaggagttcgagaccagcctggccaacatggtaaaaccccatctctactaaaaatacaaaaattagccggccgtggtggcaggcgcctgtaatcccagctactggggaggctgaggcaggagaatcgcttgaacctgggtggcaatagttgcagtgagtcaagatcacgccactgtactccggcctgggtgatagagcaaaactcagtctcaaaaaaaaaaaccaaaaaccagcatgaacagagcaacatgcttccattatgctgaggcaaacatctaggttatgaagtgttttttcttgtagaaattcatattcccaggattctcttatgatcttttttgaattgagttttttatttaatgtcactgatcaaatatgcttctcctcgcttcattatctccatttcctacaaagcaaagaaagaaaggttaatggaaaaactgattgtcagtcgggtgcggtggctcacacctgtaatcccagcactttgggaggccgaggcgggtggatcacaaggtcaagggatcgagaccgtcttggccaacatggtgaaaccccgtctctactaaaaatacaaaaatcagttgggcgtggtggtgggcgcctgtagtcccagctacttgggaggctgaggcaggagaattgcttgaacccgggaggcggaggttgcagtgagccgagatacaccgctgcactccagcctggcaacagagcgagactccatctcaaaaacaaaacaaaacataactgattgtctactttacacccattaaaatagttgtagagctgtcagagtaaatgtggaacaatcggagttctcatatgtttcctgtgggaatgtaattgctacagccacttcagataacagtttttcaaaacttaaatataacctaattccatgacccatgcatcgttttcctgggtatttactcaaaaaaggtaaaatcatatgttcacacaaagacttatgattttagaaatatttatagaaaccttattcacaatggcccagatggaaacaacccaaaatgcttatcaaaaggtgaatgagtaaacaaattatggtgcattcatccaatggaattctacccagcaataaagcacagagaactactgatacacacagcaacttgggtgaatctcaaaactattatgccgagaggaagaagccccaaagcacaaaaggagtgagagggaatgtattggggatggaaatgcctgttccttgactgggatggtggtcacaaggatgtgtatacatttgtcaaaactcattgagctgactcttaagtagatcaatttattttatgtacattatacttcagtaaagctagaaaaacacattaaagaaaaagttgagaacctgccttagttgagacaaattcacatcacctrtgttttatgttttagggtcagtacccggaagcattttaattctgggtgaacagtcattataataacgtggttttatttgatagaaagaagtgataaggcactctcttatttctcttttgtttgccctgtgaatagtacagaagcctgttaattggttgattggattctaggagaaaaatgaaattcggtatcaccgtacttgaaccagacagccgggcgtattagacagatggcaacagtctccatattcacttcttcctggaatctctcatattttggcagcaattacaattatttgcaagaaatgccataaaatgccaagttctgagaaaacaaagaaggttttgtttcttagctttcttcgttgctaataacttaaatcctcacattcacaacagaagagggctcatggagtacattaggaataatgtgctttgactaggggtaaacatggtaatcagcagcccttgagaaagatctgctcgcattcatgcggtgaaggggagccattaattgtctttcattctcacagtcaaaactcgttattggttatgtataccacttttagttgcgcatttgctatgaatttttttaaacatttttaaacattttttaaaatccaggctacctcaaacctgtttgttacagctgctgaataagtgacttaaactaggtttttgatcttgctgttctccttctgttcaaaagtccctcttcttccgactcccccatattctaccctactgtgaaatttactataagtaaatttacagatatgcttctgttacacaaaagttttattttaaacttt

SEQ ID NO: 1516 - DNA, 670 bp, Homo sapiens
gtgtgctggcagcaatgggatagtgttgcagcagggtctgcctscatgctggtggcagcagagtagtggtgtctgcacatgtgcttgtgcagcagcaacatagtggcagggtcttcatatactctcaataccttccttgtaaagatcttctcagagtgtgctggttttcctcatggtctggtctctcctgatgggagaagctcttcctggctgcttctagttggccatcttggcctaatacttctgcctatttttattgcttttttttgtaaattaatgttatatattctgaacataaaaaatgatggtttgaatatttttggtggcaataatatattatttagccatattggaattttaaaacatttaaaatgtatggtacgcatataaaaatatgaatactcacaattgcaaacataaacaaaaaataatataaaataatactctcattattctgtaacatgtaaatcaaaagtttaatacaaacagaagctttggagattccttctggtgattgtgtcagtccattttgtattgctgtaaagtaatacctgagatgtagtaatttctaagtaaaagaggtctatttgtctcacagttctgcaggctgtacacaaagcacagtttcagaatctgcttctggtgagggtcttgggaggcttacagtcat

SEQ ID NO: 1517 - DNA, 670 bp, Homo sapiens
gtgtgctggcagcaatgggatagtgttgcagcagggtctgcctccatgctggtggcagcagagtagtggtgtctgcacatgtgcttgtgcagcagcaacatagtggcagggtcttcatatactctcaataccttccttgtaaagatcttctcagagtgtgctggttttcctcatggtctggtctctcctgatgggagaagctcttcctggctgcttctagttggccatcttggcctaatacttctgcctatttttattgcttttttttgtwaattaatgttatatattctgaacataaaaaatgatggtttgaatatttttggtggcaataatatattatttagccatattggaattttaaaacatttaaaatgtatggtacgcatataaaaatatgaatactcacaattgcaaacataaacaaaaaataatataaaataatactctcattattctgtaacatgtaaatcaaaagtttaatacaaacagaagctttggagattccttctggtgattgtgtcagtccattttgtattgctgtaaagtaatacctgagatgtagtaatttctaagtaaaagaggtctatttgtctcacagttctgcaggctgtacacaaagcacagtttcagaatctgcttctggtgagggtcttgggaggcttacagtcat

SEQ ID NO: 1518 - DNA, 670 bp, Homo sapiens
gtgtgctggcagcaatgggatagtgttgcagcagggtctgcctccatgctggtggcagcagagtagtggtgtctgcacatgtgcttgtgcagcagcaacatagtggcagggtcttcatatactctcaataccttccttgtaaagatcttctcagagtgtgctggttttcctcatggtctggtctctcctgatgggagaagctcttcctggctgcttctagttggccatcttggcctaatacttctgcctatttttattgcttttttttgtaaattaatgttatatattctgaacataaaaaatgatggtttgaatatttttggtggcaataatatattatttagccatattggaattttaaaacatttaaaatgtatggtacgcatataaaaatatgaatamtcacaattgcaaacataaacaaaaaataatataaaataatactctcattattctgtaacatgtaaatcaaaagtttaatacaaacagaagctttggagattccttctggtgattgtgtcagtccattttgtattgctgtaaagtaatacctgagatgtagtaatttctaagtaaaagaggtctatttgtctcacagttctgcaggctgtacacaaagcacagtttcagaatctgcttctggtgagggtcttgggaggcttacagtcat

SEQ ID NO: 1519 - DNA, 670 bp, Homo sapiens
gtgtgctggcagcaatgggatagtgttgcagcagggtctgcctccatgctggtggcagcagagtagtggtgtctgcacatgtgcttgtgcagcagcaacatagtggcagggtcttcatatactctcaataccttccttgtaaagatcttctcagagtgtgctggttttcctcatggtctggtctctcctgatgggagaagctcttcctggctgcttctagttggccatcttggcctaatacttctgcctatttttattgcttttttttgtaaattaatgttatatattctgaacataaaaaatgatggtttgaatatttttggtggcaataatatattatttagccatattggaattttaaaacatttaaaatgtatggtacgcatataaaaatatgaatactcacaattgcaaacataaacaaaaaakaatataaaataatactctcattattctgtaacatgtaaatcaaaagtttaatacaaacagaagctttggagattccttctggtgattgtgtcagtccattttgtattgctgtaaagtaatacctgagatgtagtaatttctaagtaaaagaggtctatttgtctcacagttctgcaggctgtacacaaagcacagtttcagaatctgcttctggtgagggtcttgggaggcttacagtcat

SEQ ID NO: 1520 - DNA, 670 bp, Homo sapiens
gtgtgctggcagcaatgggatagtgttgcagcagggtctgcctccatgctggtggcagcagagtagtggtgtctgcacatgtgcttgtgcagcagcaacatagtggcagggtcttcatatactctcaataccttccttgtaaagatcttctcagagtgtgctggttttcctcatggtctggtctctcctgatgggagaagctcttcctggctgcttctagttggccatcttggcctaatacttctgcctatttttattgcttttttttgtaaattaatgttatatattctgaacataaaaaatgatggtttgaatatttttggtggcaataatatattatttagccatattggaattttaaaacatttaaaatgtatggtacgcatataaaaatatgaatactcacaattgcaaacataaacaaaaaataatataaaataatactctcattattctgtracatgtaaatcaaaagtttaatacaaacagaagctttggagattccttctggtgattgtgtcagtccattttgtattgctgtaaagtaatacctgagatgtagtaatttctaagtaaaagaggtctatttgtctcacagttctgcaggctgtacacaaagcacagtttcagaatctgcttctggtgagggtcttgggaggcttacagtcat

SEQ ID NO: 1521 - DNA, 670 bp, Homo sapiens
gtgtgctggcagcaatgggatagtgttgcagcagggtctgcctccatgctggtggcagcagagtagtggtgtctgcacatgtgcttgtgcagcagcaacatagtggcagggtcttcatatactctcaataccttccttgtaaagatcttctcagagtgtgctggttttcctcatggtctggtctctcctgatgggagaagctcttcctggctgcttctagttggccatcttggcctaatacttctgcctatttttattgcttttttttgtaaattaatgttatatattctgaacataaaaaatgatggtttgaatatttttggtggcaataatatattatttagccatattggaattttaaaacatttaaaatgtatggtacgcatataaaaatatgaatactcacaattgcaaacataaacaaaaaataatataaaataatactctcattattctgtaacatgtaaatcaaaagtttaatacaaacagaagctttggagattccttctggtgattgtgtcagtccattttgtattkctgtaaagtaatacctgagatgtagtaatttctaagtaaaagaggtctatttgtctcacagttctgcaggctgtacacaaagcacagtttcagaatctgcttctggtgagggtcttgggaggcttacagtcat

SEQ ID NO: 1522 - DNA, 689 bp, Homo sapiens
agccatggattatggcttatgaataacagtaggtggattatttgaatggcattgcaaagagagtcatttataatgtacacttgaaagcagagtcagaaatacatttagaatttsttaaggtattttgcttactgatgtataacattatacagatactgtatttcagcatgaatcactataattttcttctctaccaacattttattgctgatgaacttggacattgtccaagaaaaggtcgagaatagacattccaaagccagtgcaattctgtattttatttcctcactgcatactgacataaattatcattgcaatgtataggcaaatcagtccatgaataataaatgcacaattctgaaataataatctttggaatagctttcatcaccttctctcataaataacaacaaatgtcagaaaaaaaggcagaactagtcaagacatatgaataaaattattaaagttggacactagtgctagccttgttataaaaacataaattatgacttataaccttttctataggcatcacctcagactttcaaattccttttcatatcacaagcagatttatcacaatggccacctgcatgctttccccataggaattaattgcctttatcttgcaggggtcaatatttccagattacgttttatttcacattgaatctgacttgtataattat

SEQ ID NO: 1523 - DNA, 1257 bp, Homo sapiens
aatgcatttgttggaaagtaagtgtagcagttcttcctctggcttgttgaatttgttttatcaaaacaagaagtcaagttactagcattctaaatgaagttaataaagrcaaagtttacaaactatgaaaacattcttacatactgacaaaggttggtgtataaagacatataaaaacctagtataaccagtgcaaaatcgaaaacatagaaacatcagcataaaatatcaacagacaattacagaaaagaacgacaaaaggcaaagggaatctgaaagataaattgaatttattgctgaaatgagataaaattttataatcaatatattgacaaaattaatttttcttaccaaatattgtagaacttgcgggaaatcagtggttttcatacactgatggagagtatgttatttaactgaatttaaacagccatttgaaacttagtcttgtgaacacacatttcactcctagttaaagaaattgttttttaaatcatagaattatacatacactgtatatatttatatatgtagtcaaagcataaaaacatcaagggagaggatacataccaacttagggttaaatctggggagggaccagctgagcgtggtggctcacgcctgtaacccagcactttgcaagacctaggcagaaggatcacttgaggtcaggagtagagaccagcctggccaacatggtgaaactcgtctctactaaaagtacaaaaattagctgggtatggtagcatgcacctgtaatcccagatacttgggagactgagtcaggagaatcgcttgaacccctgtggaagttgcagtgagccaagaccgcatgccactgcagtctagcctgggtgacacagccagaacttgtctcaaaaaaaaaaaaaaaaaaagcaaagttaaatctggggacaggaataattttgggtgaagcttcaattgtgtctttaaggtgcactatcttttttataatagttacctaaaatttaccatgacaaactgaatctgggtgaagtatttacagacatatcttacatttttcactatacttgtctgcatatctgaaataatgtttaaaaatatataaaatatccttagaagagtggttctatgtgaaaaatatgaccaagtcaaaacatttccttttcccccctcagttttccttagagttgccttcagctctctctagaaaattaatatttaaaaacaaaaatatcaacaataaaaatgggtgggattttgcaatgtataccc

SEQ ID NO: 1524 - DNA, 1257 bp, Homo sapiens
aatgcatttgttggaaagtaagtgtagcagttcttcctctggcttgttgaatttgttttatcaaaacaagaagtcaagttactagcattctaaatgaagttaataaagacaaagtttacaaactatgaaaacattcttacatactgacaaaggttggtgtataaagacatataaaaacctagtataaccagtgcaaaatcgaaaacatagaaacatcagcataaaatatcaacagacaattacagaaaagaamgacaaaaggcaaagggaatctgaaagataaattgaatttattgctgaaatgagataaaattttataatcaatatattgacaaaattaatttttcttaccaaatattgtagaacttgcgggaaatcagtggttttcatacactgatggagagtatgttatttaactgaatttaaacagccatttgaaacttagtcttgtgaacacacatttcactcctagttaaagaaattgttttttaaatcatagaattatacatacactgtatatatttatatatgtagtcaaagcataaaaacatcaagggagaggatacataccaacttagggttaaatctggggagggaccagctgagcgtggtggctcacgcctgtaacccagcactttgcaagacctaggcagaaggatcacttgaggtcaggagtagagaccagcctggccaacatggtgaaactcgtctctactaaaagtacaaaaattagctgggtatggtagcatgcacctgtaatcccagatacttgggagactgagtcaggagaatcgcttgaacccctgtggaagttgcagtgagccaagaccgcatgccactgcagtctagcctgggtgacacagccagaacttgtctcaaaaaaaaaaaaaaaaaaagcaaagttaaatctggggacaggaataattttgggtgaagcttcaattgtgtctttaaggtgcactatcttttttataatagttacctaaaatttaccatgacaaactgaatctgggtgaagtatttacagacatatcttacatttttcactatacttgtctgcatatctgaaataatgtttaaaaatatataaaatatccttagaagagtggttctatgtgaaaaatatgaccaagtcaaaacatttccttttcccccctcagttttccttagagttgccttcagctctctctagaaaattaatatttaaaaacaaaaatatcaacaataaaaatgggtgggattttgcaatgtataccc

SEQ ID NO: 1525 - DNA, 1069 bp, Homo sapiens
acaaaaattagcttggcgtggtggtgggagcctgtaatcccagctgctcgggaggctgaggtaggagaatcgcttgaactagggaggcgaaggttgcagtgagccaasatggtgccactgcactccagcctgggtgacagatggtgactccgtctcaaaacaaacaaataaacaaacaaacaaacaaacaaaaactactacatgggctctcaagtagttgttaaatcgatcagtggatctatttaaaaatgcaaattgttacacactacagtcctgattatgtgctggtgtgggtgcatggaaagctgataaattgaaacataattcattatacaaataataatccattctacaaaaatgctgattgtgtgatcttatccccttcaattacgcaatagccaaatgagtggaaatggtacttcattaatagtaagaaagatgcatcatattgcaaggtaaaactttaacaaaagatgagttcttaaagatactttactaaaagacaaattggaatattctataaagctaaatcttgggactcatgttcagggatactagtgggatatcagaagcaacacctgctccatgcagcaactctccattgccggaagagtaaaatcttaaccctggaactgccaggagcagacactgataattatgttttcactagattgacttaaagaaaaaggaaaaaaagaaaaatcttactccacgagcacggaatatcttcagtgccttttagggaaagtcaaattctcagtgcctgattggttgaaatagcagcaatgcccattgaaaggagatggtaaaagagtgaagagtctgcatttctcccctcatccctcagcccccacttcccagtagggaagatgatagaaatttaagcagaaattttctctttcttggtggaaatatgaggtaaaggcagagaatatttgttttcctataataaagtactaatattccccagcattgtgatccaaggaagtaagagcaacacatcttaacaatgtctttatagacacaagttatctaaacctgaaatgctctaagaagtaaataaagcaaa

SEQ ID NO: 1526 - DNA, 567 bp, Homo sapiens
atgtttaatctcttgtttttcctacacactgtactctcatcaaataaattcctcttccatgctatattaacctactataggaaaccaaagaaatttcaccaaaaatagacttatttgacatatttcaagactgctattgagagggcttacaggcaggaattgcacagaaaagctgccttttgtggaggagactttcatctgcggggaaaaaaaaaagtacattagtgaaataagcaaccaggtgttccttgagcccyggctcccccttttcaagatctaggaaagattaactccaccacaaactaccaccagttctttctgagggcagctccaagattatctgatatattttcatctgtataacaagggagtgtttgcttgacatgctttcttcccttcactctctgataacctgtgatgctacctcccaccgagcccagagacacttggtcccaggccatggttctgtgtgctcactcattttatctgaaaattgcttattgcccctcaaaagaattgtctatattccccatctttgccctacactatgaagaagggtaaagaagc

SEQ ID NO: 1527 - DNA, 2289 bp, Homo sapiens
attaataagtaattgcggcatatgcttaaaacatttactaatgtgaagaggcagtaaaacactttggagattattgcttcaaaccactatgcaaactgtctttttgcctcgtcccattctcagttgtaagctgcattcacttcatatagtcgtgctatgttttaaatgcaatgctagttctaatttagttaaatagaaactttttacttcataggttcttttcatcctacttcttagtattttctgaaatttatgaagacctttgggccttttagtgctttgtgatagtgaaaggaacagaggccttagaccagacagacttgagttcaaacattaacttttactttactgaccatgtgatctcagacaagtacttaatttctcagagcctcagctcatctatgaaatggagataacatttaccttgcagattgttgtaaaatttagcaatatctttttttttttttttttttgagatggagtcttgctctgtcacccaggctggagtgcaatggcacaatctcagctcactgcaacctccacctcccaggttcaagcaattctcttgccttagactcctgagtagctgggattacaggtgcgtgccaccacctgtagagacggtttcaccatgttggtcaggctggtattgaacttctgacctcatgattctcccgcctcagcctcccaaagtgctgaaattacaggtgtgagccaccacgcccagccagcaatatcttaaggaaacagcattgggcctggcatacagtagataatttttaaatggcaccaaatagtaataataacaatagtacttgtttgctgtagagaacatctgtggcccagtagttcctcccatctaaaatcaagttgcatatataatatttttagcaaagtttggctgagactgttcttaattcaacttggaaacttatttgagcatatataaaaagtgttggctactgcatatggccacatgagttagagaatgctatttacatggactacagtgggaatggctgctcctggccttgggtagagcagcagccctggaaatacactgtcaaaaacatagagggccaaatatatggcagcctccacagaacaaaaggaaatgaatgcagctgcccacacatgcattagttggtatgttgaatgcctctctatttgttgatgctctccacagatctgtacccccgatttggtggtattcctggcttgtgctaatcagagactcaaagaaagattactgaagcgtgcagaacagcagggccgaccagacgacaatgtaaaagctacccaaaggagactaatgaacttcaagcagaatgctgctccattggttaaatacttccaggaaaaggggctcatcatgacagtaagttagctcgacttttacaagtccaatacaagagcgctctttcagatttctcattagcccatgttctcatgtagaaatcctctttaccttaaaaagtggcttttggggggtacagaaccaatggaaaaaaatgtatcattttgacctgatttgcctttttaagccatcatgtttttttaaaaaaactttctttttaatttaattgatttttatgaaagaagataaattttaaccttggccaaaattctgtagtcctcaagtaaaaaagtgttttaaagtaactgtctgggtgattgtaagcaatatttgtccagtctctccactcttttgtctgtctttggaagcctaacaaaattgatagacttataaccacacagttgatgtggggttataatagatttaagcgttgtttgtcatgatctactacataaagaaatgaggttctgacttcacagaaaaagtttcctaagggtttgacttgtcataaagaagtgataatgtatcaaaatgggaggtagtcacccttctgctcctttgatacaatgcaaatattaatgttttcctaaatttttagtttgttttatggctaatgatattcaatgtgccaatgaaagatgacactgaatcattagtttgtacagtttttagaatctagaacattagaggtgaaggttcagctaaatttatgataatcacarcatcagattccagcattaaagcgtagaggagacaaagaggataatgggtcatctgaagaaagcactttatgcaagaggacactaaaaccacagcagctgcttgacagctagatggtggcagaccttggcagaatcctcctctcagccctcggcccgggccagtggaccaaagagttttgtgtagttgggttacaagcctctgtagagaat

SEQ ID NO: 1528 - DNA, 1874 bp, Homo sapiens
gcttatgtggctttttaaagaaactaaacataactgattttacctgggtaggaatgtcagaaatgaacagaatgaatttcttaatattctgcaggtctcttactgaatggctaattatccttcataactggtgatccttcaccaaatcacagaattacagggttaaaatagaccttgaatgtccagctgagaccctcttctcactcctgaatttggacagaccaaaggcttgaagtctgcctgccatgaaattatactctttttttaaaaaagattttttttttctttttgagacagagtctcattctgttgcccaacttggagtgcagtggtgagatcatggctcactgcagcctccacctcttgggctcaagtgaacctcccaccttagcctcccaagtatctggaactacaggcattcaccaccacatccagctgattcttgtattttttgtagagatggggtttcaccatgttgcccagactggtcttgaactcctgggctcaagcaatctgtctgtctcagcgtcccaaagtactgagattacaggcatgagccatcgtgcccagccttaaaaaacaaattttagagacactgtggtgtcatattatgcataaaataatttgcaattatttaacctcccaaattttcacaaatttcctattaatcacactatcagtttctatgaaaagctaaaattgtattcatttcctccatcttccttttttctgcagtcatcttctcctcctcactacatccttctgtcacttttctgtatttaacttatgtaatccagcatttctcctgtttcaggcagcctcagtggcccagataatgatacttccttcttccctattagcaaggcacagaaactattcttgcagtagccattgattcatccactttctttcctggcgtttgggacaagaatttgcaaacatcttaactacacgtttgaaaatggaatgtttctattccctcatttccaccattttcttttctcaggcagatgtggtcttggcttttaccaatagtgtatcacatcaaagtaattctacagtctctctctggagacatcagaaaggcagccttgggatatccactttcatacctcacagggtcccacagtacagtcccctccaattcaggctgctctctagtcaaagaagtcagttactattctcaacgttgtaagcttcactgatccttaattatgctgcttgactatcagtaagccttcttttttccagacaaggtagttctcatttcggagctagctctgcttccatccagtctcctggttcttctcttctactttcctccacttccctgatattctgaatttgcttccttcatttgcggtctgtgattcagactgtccattgcaacagcagcccttccagtcaccacgtcaaaagagctttcacacttcacattctcttattctccttttggccaagtggagaaagttcaaggctgtaattaatcttttttttttttttccatagagcttatgcttcccacattgttttcagtagagcataatagttttcttaaatgtcaggctttatgtagctgataacattwtaaaggtatttctcccacgtttttcattctgaattatcatagtttcccatacatgaggaatgcttaatgcaaaaacaacaacaacaacaacaacaaaacaaccaaaagaacgaccaggttcttttacatggctttgggtttctcagatgttaaagatttagtggcaaagactacctgaatgctgaaaataacttactgacagaggacagtgcttggggtgatgataattcagagataatacacctattaatttgttctctaaatgtagcatttaacattgaatgca

SEQ ID NO: 1529 - DNA, 1874 bp, Homo sapiens
gcttatgtggctttttaaagaaactaaacataactgattttacctgggtaggaatgtcagaaatgaacagaatgaatttcttaatattctgcaggtctcttactgaatggctaattatccttcataactggtgatccttcaccaaatcacagaattacagggttaaaatagaccttgaatgtccagctgagaccctcttctcactcctgaatttggacagaccaaaggcttgaagtctgcctgccatgaaattatactctttttttaaaaaagattttttttttctttttgagacagagtctcattctgttgcccaacttggagtgcagtggtgagatcatggctcactgcagcctccacctcttgggctcaagtgaacctcccaccttagcctcccaagtatctggaactacaggcattcaccaccacatccagctgattcttgtattttttgtagagatggggtttcaccatgttgcccagactggtcttgaactcctgggctcaagcaatctgtctgtctcagcgtcccaaagtactgagattacaggcatgagccatcgtgcccagccttaaaaaacaaattttagagacactgtggtgtcatattatgcataaaataatttgcaattatttaacctcccaaattttcacaaatttcctattaatcacactatcagtttctatgaaaagctaaaattgtattcatttcctccatcttccttttttctgcagtcatcttctcctcctcactacatccttctgtcacttttctgtatttaacttatgtaatccagcatttctcctgtttcaggcagcctcagtggcccagataatgatacttccttcttccctattagcaaggcacagaaactattcttgcagtagccattgattcatccactttctttcctggcgtttgggacaagaatttgcaaacatcttaactacacgtttgaaaatggaatgtttctattccctcatttccaccattttcttttctcaggcagatgtggtcttggcttttaccaatagtgtatcacatcaaagtaattctacagtctctctctggagacatcagaaaggcagccttgggatatccactttcatacctcacagggtcccacagtacagtcccctccaattcaggctgctctctagtcaaagaagtcagttactattctcaacgttgtaagcttcactgatccttaattatgctgcttgactatcagtaagccttcttttttccagacaaggtagttctcatttcggagctagctctgcttccatccagtctcctggttcttctcttctactttcctccacttccctgatattctgaatttgcttccttcatttgcggtctgtgattcagactgtccattgcaacagcagcccttccagtcaccacgtcaaaagagctttcacacttcacattctcttattctccttttggccaagtggagaaagttcaaggctgtaattaatcttttttttttttttccatagagcttatgcttcccacattgttttcagtagagcataatagttttcttaaatgtcaggctttatgtagctgataacattttaaaggtatttctcccacgtttttcattctgaattatcatagtttcccatacatgaggaatgcttaatgcaaaaacaacaacaacaacaacaacaaaacaaccaaaagaaygaccaggttcttttacatggctttgggtttctcagatgttaaagatttagtggcaaagactacctgaatgctgaaaataacttactgacagaggacagtgcttggggtgatgataattcagagataatacacctattaatttgttctctaaatgtagcatttaacattgaatgca

SEQ ID NO: 1530 - DNA, 584 bp, Homo sapiens
ttcttcaaaccttcctagtccttcaaatttaaactaagaggttgaggttcctcctttctccattggagtatatccacactacattgtttaattgccttgatttgcttgtttatagccctcacaaaattataatctcttcaatggcagaagctgtgtttttttgttttgttttaaccgtcacatccctgcctttagacatctaatatatccttggctgactgactattatagagtgaattatagaatgatcacatgttctatcccaatttgtctaatatggaactggctgttttgccaatgaaaccagtaatagctcactcccaaaagtatcacargttggattaatatatatggttgcctttatgagcaatacattggaagaagaatatattccatattcagagaatctgcatttgaatctgagctctagtatgtctttgtagtatgaccttgagcaagttacttcccttctttaatcccagtttcatcatctataaaacaaggttgaagacagtatttacctaaagggttattcttagaaacattggaaaatgacacagtggaaattactttgagaacaggca

SEQ ID NO: 1531 - DNA, 919 bp, Homo sapiens
ttctaaatttactgagcaggtaactcactctctcatctcaggatagaagaaattaaaggagtaggtgtggagaggccaggaatggagtggagctacctccatctagaagaaaaaatcagaagttagtatcagcatcrttctctaatacacaaaaccttaagcaggaagaaataaataatatctgctttgaaaaggtgaagaaaagttactattaggttactaaattattggctgataaaatatatcaaaacaaaaatgaatttattttaaaagtaagtatttgttcaggaagaaaaaagtatctttaaataataaattacagtatatattttcatagccaataattagtctctataaaatatttgagttgattaattgcagcggcaaagcaattactttgttccttgtgaaacaagagcttaaagtggtagatgtccttgggtttgtcctttagagccactcctgctaagaatcactctgcagatacttggctttttttttctttctttctttctttttttctttttttaacattttctcttactgcagaattttacctataaattgtagtgtacttttcaagctccagctaactttaatttttagcaatctttagttttcttttgattttcctgccaaataactccaaacactcatactgtctgcttaaaaagagcctcttttaaattctgaatacagttttattgttatattttgactaggcattgaagtgataaaaaacatcttccaatatagcattgccatgaagattatcacggataggttttgcacgcaacaaataagacctacgtatacagaatacacagcaaattagtgaatataattctgcttttgtggaatgaaagacaggatttaccaatatattttgttctctgtgcttgaagggaaacccagtttt

SEQ ID NO: 1532 - DNA, 618 bp, Homo sapiens
acacgtgcaggatgtgtgggtttgtcatacaggtaaacatgtttcatgggggtttgttgtacagatgatttcatcacccaggtattaagcttggtatccattagttatttttcctgatcctctccttcctcccaccctccactctccaacagacactggtgtgtgttgtttccctctatgtgtccatgtgttctcagcattcagctcccagttataagtgagaacatgaggaaataccctgacttgatcaccgcacattctatgcacttagcaaaatatcacatgtattccataaaaatgtacaaatattatgtatcaataagaattgttaaaaattaaatttaatgttttctgcacacataataagcttgataaaatgagaatatggggaaacctgcacccaacaatttgaggaattttttaagcacaattttttaggaaaattgtttagatgctaggccctaraagaaatctcaactctaccaaagaatcattatcatacagaatatcatctctcaccaaaattcaataattaacacaaagcatcaaagaatacaaaaaagtctcatgtgtttagaaattttagaaattgccttaactttacaattggatccatgc

SEQ ID NO: 1533 - DNA, 1331 bp, Homo sapiens
tacggctgttcacttgtaaagtcccagcatgttagatactgcatctcagctggctgtttgcttggtaaataatttaggtaaaatacattttgattcctttagactatggttgttgctgcctcctaggtaagattcacgttaaccacccaggctctttatggggatctccgataattggattaaattctatcagtgctggctggacacttagctgctatggaaagaagggcaaaaagctgtgtcgttggctaagagtgtgggactgcattgcggcttgtggagtgaactctttagatgttacttcttacctgggttgtttggacaaaagtaagcacttcttttcctaaaattgtagtygatcctgtacctcacaaaagcagttggtagaagtgacatagaagtcttttagataggtagatttctagagacatttccatttcccaccatggttatccatttctgttggtgattctcaaataaggaattactagggagtttgttgaagtgctgcttcctcggtcccaagttctacagagccttccttagtagttctcaggtgcagcctaagggactgtgtttttaataagtgcttcacgtgattttaatgcaggtggggccaagaaccacattctgacccaaacacagactttgcatttgtttttaagagagaatacttttttatgggtcactgttcttggtatgccttcaggccagcggcccctaggttgacttctggaagtattagaattgaggttagaggatagaattgtattttgtgatggttcttcagtattttcagttgtgggtaataaaattaagtacaaggcaaaacacgttaataaacaagtggttttcctaatagaaacctagagccatagaattttgagagacagagcaagggagcaaacgagcaagcgaacacgcatgtgtgggtaggcatgaatgcacagcagcccaggcacacgtccactttgtgggtattttagagtctttgaatcaatctcttctgcccgttcctaaatgaaacaaaatataagttaaagcttaattatatccattagtgttttgtggaagcagaagtggggggtcattgttcaagcccccttcttgtgcagatatagaagctgagaccccagtaggacaaatgtttacacacataacacatacagggatgggctgcagtccctctgagctttagagcctccacttatgaaatagaaagagaaatagctatcccctcttggttgttatgaggattaaataacatagcttgtcttacgatgtttggaaactgaagagaattatatagatgtaattcctaattaccatgc

SEQ ID NO: 1534 - DNA, 1153 bp, Homo sapiens
taccaattcaacagaggacaggcaaggttttgataggtgataataaatccaagtagacacagaatcatgtacaatagcatgcaggcagggacaagaatagctaatgtgtgcaatgttaaagcctggctagagcagatgttgcattaatggcagtgcttggaagggaccggatactcatgtttatcaatgtggctttgccctactggcatatgtctgttaggattatgtgtaaatactctccagtgctgtatattattattttttgagacggagtctcactctgtcgcccaggctggagtgcagtggcacaatctcggctcactgcaagctccgcctcccgggttcacaccattctcctgcctcagcctcccgagtagctgggactacagragcccaccaccacacccggctaagtttctgtattttcagtagagatggggtttcaccgtgttagccaggatggtctcgatctcctgatgtcatgatccacccacctcggcctcccaaagtgctgggattacaggcgtgagccaccgcacccggcctccagtgctgtatatttctaaataagcaaaatctaggatagggagaatagaaaatattccttctccccacacccaaaagaaacagattttgaagaaaagggaagaaagtcaacccactaatcacagaatctttataagggttcttcactttcaaaacagcaataaatttatactcaggcttccctcctactttcttaaagaatcaaccaggctatagctcatatattgaaagcaaacacatctgccaaggcaaactcttgactgtttaaatctgtttgatgaagtaagtaatctagagatccaccatcttagaaacacaggtctggttcttgactcttttcagtaatttttgcctggcagggcagatccaaatcccagatagatgccttgtaaatgtgtctgccattatataccttgataagtagactggacatgagtgaaggggacatggcaacagtagatggataaatgaaatggatcccctttatttctacatctcaacaagaaactcaataaatcttaatatcaaatacgttaaggtttgattaaaaactactacataccaaacaaaaaaacagaacaaaacaaaatactactatatacctata

SEQ ID NO: 1535 - DNA, 1153 bp, Homo sapiens
taccaattcaacagaggacaggcaaggttttgataggtgataataaatccaagtagacacagaatcatgtacaatagcatgcaggcagggacaagaatagctaatgtgtgcaatgttaaagcctggctagagcagatgttgcattaatggcagtgcttggaagggaccggatactcatgtttatcaatgtggctttgccctactggcatatgtctgttaggattatgtgtaaatactctccagtgctgtatattattattttttgagacggagtctcactctgtcgcccaggctggagtgcagtggcacaatctcggctcactgcaagctccgcctcccgggttcacaccattctcctgcctcagcctcccgagtagctgggactacagaagcccaccaccacacccggctaagtttctgtattttcagtagagatggggtttcaccgtgttagccaggatggtctcgatctcctgatgtcatgatccacccacctcggcctcccaaagtgctgggattacaggcgtgagccaccgcacccggcctccagtgctgtatatttctaaataagcaaaatctaggatagggagaatagaaaatattccttctccccacacccaaaagaaacagattttgaagaaaagggaagaaagtcaacccactaatcacagaatctttataagggttcttcactttcaaaacagcaataaatttatactcaggcttccctcctactttcttaaagaatcaaccaggctatagctcatatattgaaagcaaacacatctgccaaggcaaactcttgactgtttaaatctgtttgatgaagtaagtaatctagagatccaccatcttagaaacacaggtctggttcttgactcttttcagtaatttttgcctggcagggcagatccaaatcccagatagatgccttgtaaatgtgtctgccattatataccttgataagtagwctggacatgagtgaaggggacatggcaacagtagatggataaatgaaatggatcccctttatttctacatctcaacaagaaactcaataaatcttaatatcaaatacgttaaggtttgattaaaaactactacataccaaacaaaaaaacagaacaaaacaaaatactactatatacctata

SEQ ID NO: 1536 - DNA, 717 bp, Homo sapiens
cagacacacagacccacagctacatccctgtgcaaatgccataatcccagcttggctgcacgaacatgcgcacctctcccatccatggcagcgggcccaaagggcaggcaacaggcagaaagcagctggacactaggggtaagctgaggaagaccagccctcggccccttcctctctacacagagtggtggggagacaaggaggagcgaggggtactgacccgggcctgaggaacacctgacccagcagcacagaacagagatgagaaatgggccccatttccatcccccaaatccttcaagatgaccactgaagctgcaaaaaatcaattttctgcagcttcttcggaagccaggatttattttctgtgtgtgcagagctattggctcagctgtttcccatcagcttcctgcatgcttccaggcagagcacagcccactgcctccctctccttcttcctcccgcaatgctcaaacccacacccaaggyagacccctaggaaaagcagagggtcttgacttgggaaaatcaagccacgtgtcaggagttcacccctggatatcaccacctcatgtttccagagtccccagtcacttgcaaaggacctcacacatgccccggctaggagacaaggctaaagcctgcggagtcagaggacgagagagagagagagagagagagagaaggggcaggacagaagagccgctggaccccaga

SEQ ID NO: 1537 - DNA, 680 bp, Homo sapiens
attttttaaaaaagtgatcatgctggctgctgcatgagaatagacagtcaggctagagggagtatgggcagagagcagtcagcaggctgcagcagttacccagggcagagacggcagcgacttggacgcagtggcagcagtggggaatgagacagatttggaatgatagtcttctctagagcatcttctcttgggatgasagccctcataaatctcctctctcccctttacagtattgcaccatgggacccattgcactaattctacaaacactatcgacagccatccatgccaagtacctgatcattttcctcttctcaggattctgtttatatatattgggatcctgcctgtgttccaaaccagactctatcccttattagtgcacaatcttgggcaagtttagtaactttccagagcctcagtactatttttatgtaaatggggataatacttaacatttatcctgaggacttattacaaggattcgacgtagataaaataatgcttattcttaggtttaaatcaataatggcaaagtggctagtccactatctggcacacagtgtgtagtgaagaagggatacacccttcccttcttccccagtctccctaactaggttggtgcttctattcttgtcttccagaccacatagtgagccacaatgataggtgtgctg

SEQ ID NO: 1538 - DNA, 782 bp, Homo sapiens
gtccggcagatgattcttgtcatctcagtgcccttaaagtagtccaaaatcctaaaattcaaagccagaaattccacacccatttagtaagcacctatatatacaccatatattctactacacacagattatatatctaaaatggaaggaaatctttcctcttgtgggaaagaggaagtggaaaggaggtgtacatcccaatacatctacctacaactgagagaaattaactactattaccacctcccacaccatcatctttcctctctctttgcgtagcctgagctttcagaagcacaactgcaaacatctctaactggttcacaggaatctattccttggtcatgtcaaacaagatgttatttataacccayacctccaaccctacctaactttgagtggatggggcaacaattacgacagactctgctaagtttccacaaatcattggtttattagaaagttcctttccctcattttacagcatatatatctctatcatatgtgataaagttaaatacaatctgttatgcttgtaagtaaggtttatttttatttttacttttaaaatcactattctggaagttaaagaaaatgcccctaggaaggcaaagaggcagccagagtatggctcaatctacaagctaatgggaagcagcacgaaaatgttaatactgtattatttatttacatgggctgaaagcaaagaaaaatgagtcccttcacttacacagatgatttcatttttccagtgctagttatccaagaagtgatgcttctga

SEQ ID NO: 1539 - DNA, 674 bp, Homo sapiens
agacagagtcaatgaagagtttggctcaagggcacaggagtgggggctgtgtagggctgtgactcacatccaggaatttggagagaggtaccgaggcaggcttgtccccaggggatggggccccaacttggggagctctgctggttttccccatcccctcagtaggttcagggtcctgcgtccagggtggacttgacgaagagggatcctgtagggtatgaagatgatgagaattaggaagccgcccttcctggagaccctctaaaatagacttacccaaatggaatatgatgacaaattcaacatttccaaggcgctacaataggagtcattaccagaaaccctacaataacaacctccgggaaaccctagcacagaaaccatgatgacagatatccccaaagactttacaggaacaaaccatcccaaacagaacttcccaatggtatccaagtccttaaaataagccattcccagggaattgacattctcaaagttttcccaagaccctaacatgaaatctgacctttgcagaagccctcggatggtggcccttgcatgcttcagttcatgatgttggagactatttccccacccttgcggaaaaacgtaagcatcaaatcttaatttcactcytttttttttcctgcaacctctgcctcctgggttccagt

SEQ ID NO: 1540 - DNA, 594 bp, Homo sapiens
gaggaaaaggatattctgcctgcagactgccttctgacttgagttgaaacatcacctcttcccttattctttagcctgccagcccactctgcagatttcacttttaaccagcccccacaatcactagagccaattaaagaatacacttcttcttaaagaaaagtttacttggccaggcacaatggcttacccctgtaatcccagaacattgggaggccaagatggaaggactgcttgaggccaggagttaaagaccagtctggtcaacaaagcgagatccccatctctattaaaaaaaaaaaaagagagagagagaaatttactggatgttccagtatatagaaaaacagaagatgcaagctacataaacctctttttgactttgggtacattactggtaacrttggttcaatgagcctacatcaaacaaaaggaagatccacaagccttatttttagaaatctgaaaacaataaatactggtactaaggttataacatatgatgattcttttccacttttacatgattctgttgtcctctaactgaagaattgttttccagaaatctcagactctacttttattaatccacac

SEQ ID NO: 1541 - DNA, 594 bp, Homo sapiens
gaggaaaaggatattctgcctgcagactgccttctgacttgagttgaaacatcacctcttcccttattctttagcctgccagcccactctgcagatttcacttttaaccagcccccacaatcactagagccaattaaagaatacacttcttcttaaagaaaagtttacttggccaggcacaatggcttacccctgtaatcccagaacattgggaggccaagatggaaggactgcttgaggccaggagttaaagaccagtctggtcaacaaagcgagatccccatctctattaaaaaaaaaaaaagagagagagagaaatttactggatgttccagtatatagaaaaacagaagatgcaagctacataaacctctttttgactttgggtacattactggtaacattggttcaatgagcctacatcaaacaaaaggaagatccacaarccttatttttagaaatctgaaaacaataaatactggtactaaggttataacatatgatgattcttttccacttttacatgattctgttgtcctctaactgaagaattgttttccagaaatctcagactctacttttattaatccacac

SEQ ID NO: 1542 - DNA, 594 bp, Homo sapiens
gaggaaaaggatattctgcctgcagactgccttctgacttgagttgaaacatcacctcttcccttattctttagcctgccagcccactctgcagatttcacttttaaccagcccccacaatcactagagccaattaaagaatacacttcttcttaaagaaaagtttacttggccaggcacaatggcttacccctgtaatcccagaacattgggaggccaagatggaaggactgcttgaggccaggagttaaagaccagtctggtcaacaaagcgagatccccatctctattaaaaaaaaaaaaagagagagagagaaatttactggatgttccagtatatagaaaaacagaagatgcaagctacataaacctctttttgactttgggtacattactggtaacattggttcaatgagcctacatcaaacaaaaggaagatccacaagccttatttttagaaatctgaaaacrataaatactggtactaaggttataacatatgatgattcttttccacttttacatgattctgttgtcctctaactgaagaattgttttccagaaatctcagactctacttttattaatccacac

SEQ ID NO: 1543 - DNA, 1254 bp, Homo sapiens
ggagtgctctcgacattttggttttcatacctgaatgatcattgcattttctgtattttctaaaatggctccaattttgtgttttaagcttcagcttaagaggaagtttatgttctaattcttgactgagaatacagtattgagattctctgttttacagataacaactggtttttattactcattaagttcatttgcatcccgtagccctctgtaaatgtttcccctagttgtatgtacgtaaatgcacgcttatccagtgtatattagacatttttgtgctaaaatatattaagtgggatttttgtagcaaagcattctatttttctgttcttacagtgtgtgtgtgtgtgtgtgtgtgtgtgtgtatgcgtttttttaaccttaacttcagtttaaacactggtgtatttatttttttaagcaacttgactcttagaagccttagactgattttttcaataaatattcaaccaaaaattataaatttattaagatgtggccttacatatggcattccttgtgttcgtaatgtgagatttttgatttagataaatcaagattcaggattaaagtttcattgtaagttgaaatagaaaatgtattaaaatgtctaggcttctgggaggaagttcttatactcttctttcttggcattagaaagaagcaatatgaatttttgtgaatattctaaatattcaggcaacactgttcagattgatttaggtttgtcttaaccaatgttctttttttagaatttcaggtwgtggcattcactgagtatgcagctactatggtttttgtatgggacgtataaatacttgattatatacgacagattttaatgtctttaaagacttcctgctgtattaacatattgtaatggagtcttttaaatactaggttgaatttaattgaagtcacacacatcttgaagtggtaactgcatagtaaatactaccaagagtttttttcacgtgggagtatcctaaaactctgccatgggtgtaaatgttttacattaatttcataattggacagaccctgcatttagcgaaaacattttgttttgaaagtgtgttctttttgtcgcactgttactgcgtaacacttctcaacattctgtaagttaaattattttaaaataactatggtgaattcatgtttatttttttactttgaaaattgtagtactcaggtggtatttaatgggaaaggatcctttgggtataaatcataatgtattttaaggaa

SEQ ID NO: 1544 - DNA, 591 bp, Homo sapiens
agggccatataatagcctcagcttgtttagcatgggctggagagaaaaaaattgaaaatgtgaacctcccttcactcccactccaaattttaaaaatgtgatacaaataatgaaaggtctggccttatacagagttgtataaaaaattagaagttacttttccttggaagagtttgtaaaaaagctaagtgtatgcctgttaaaataagtctattatgtccctgtaggacacttaagttaattgcaataacaagctatatatgattttatattagaaaaaaatccttggcttcttgtgagacaaaaagacaaaaggtaaaggaaagctttttgtcatacagattttctattaaatctctctctctctccctttttctcatactttttctattataaattagaaataaagtttaaatcacttagaagattattttttatacctaagaagccagacaggagtataatctattctgaaattcatgagaaaatcctttaaaatgtcagacaacagttaaaacaytctatgattagggcatattttaattttcttaatgtcaaaactctgctgtgggaaaagcttatgcacactca

SEQ ID NO: 1545 - DNA, 1185 bp, Homo sapiens
tgagtttgagatagaaaacaagatatgagatatgaggggtaacatggaaccagactcatattgcttttaagactttcagaagcagtaagaatgtttaagaagggggaaaaactatttatcttatattttagcaattacttttgctattgtgttgagagtgaactcctcagggataaatatatttctagaaatctgtaagtacatctgaaaatatatagaaaaacacattatcaatgttagattctcactcagaggaaagacttccaatataaagcaaaaaacccacatactattgcaataaaattgacattatttgattacataatcaaaagataaacakaaaattacttctgctataaaaatgattacagaacaattatgaaaattgaggaaattttgcaatataaataataaattgttgatatttgatttatgatttaatacaaaataatagtaacagaatagaaaagttggacaaatgatacattagatagtcaaaaatgtgaaaaaaaagatcattatatactagatgataatttagtactatcattcaaagtatgaaatctgtttatatacttaatgagaaatggcatcaccaagaatgtatcattaagaaacacacaatacgttaaaataatgcattgttttaaaaaataatttgtaacatagcaaaacaaaagtgtaagcaattaaaatgttcattaagaggcagagaaagatggtggagtaggaagctccaccaactgtcccctgcacaaggacaccaagttaaccactatctacacaaaaaaaaaaacaccttcataataaccaaaaatcaggtgaatgctcacagtacccggttttcactttatgtagctgaaagaggcactgaagagacagaaaaaacaggccttaagtgctgatgtcacacatcctccgccccttggcagtggctgcaaggtgcagagagcatctctcggcactgtaggagggagagtacagcaacggtgaggcattgaactttgtgctgccctgttaagagtagaaaggaaaaccagaccaaactcagctgaaggcttcccatgaagagagcatttaaaccagccctagccagaggggactagccgatcctagcagtccaaagttgagtacctgcaaacctctccacgaagggctctgtgtcttcaagtaaacttgaaaggt

SEQ ID NO: 1546 - DNA, 1185 bp, Homo sapiens
tgagtttgagatagaaaacaagatatgagatatgaggggtaacatggaaccagactcatattgcttttaagactttcagaagcagtaagaatgtttaagaagggggaaaaactatttatcttatattttagcaattacttttgctattgtgttgagagtgaactcctcagggataaatatatttctagaaatctgtaagtacatctgaaaatatatagaaaaacacattatcaatgttagattctcactcagaggaaagacttccaatataaagcaaaaaacccacatactattgcaataaaattgacattatttgattacataatcaaaagataaacagaaaattacttctgctataaaaatgattacagaacaattatgaaaattgaggaaattttgcaatataaataataaattgttgatatttgatttatgatttaatacaaaataatagtaacagaatagaaaagttggacaaatgatacattagatagtcaaaaatgtgaaaaaaaagatcattatatactagatgataatttagtactatcattcaaagtatgaaatctgtttatatacttaatgagaaatggcatcaccaagaatgtatcattaagaaacacacaatacgttaaaataatgcattgttttaaaaaataatttgtaacatagcaaaacaaaagtgtaagcaattaaaatgttcattaagaggcagagaaagatggtggagtaggaagctccaccaactgtcccctgcacaaggacaccaagttaaccactatctacacamaaaaaaaaacaccttcataataaccaaaaatcaggtgaatgctcacagtacccggttttcactttatgtagctgaaagaggcactgaagagacagaaaaaacaggccttaagtgctgatgtcacacatcctccgccccttggcagtggctgcaaggtgcagagagcatctctcggcactgtaggagggagagtacagcaacggtgaggcattgaactttgtgctgccctgttaagagtagaaaggaaaaccagaccaaactcagctgaaggcttcccatgaagagagcatttaaaccagccctagccagaggggactagccgatcctagcagtccaaagttgagtacctgcaaacctctccacgaagggctctgtgtcttcaagtaaacttgaaaggt

SEQ ID NO: 1547 - DNA, 1185 bp, Homo sapiens
tgagtttgagatagaaaacaagatatgagatatgaggggtaacatggaaccagactcatattgcttttaagactttcagaagcagtaagaatgtttaagaagggggaaaaactatttatcttatattttagcaattacttttgctattgtgttgagagtgaactcctcagggataaatatatttctagaaatctgtaagtacatctgaaaatatatagaaaaacacattatcaatgttagattctcactcagaggaaagacttccaatataaagcaaaaaacccacatactattgcaataaaattgacattatttgattacataatcaaaagataaacagaaaattacttctgctataaaaatgattacagaacaattatgaaaattgaggaaattttgcaatataaataataaattgttgatatttgatttatgatttaatacaaaataatagtaacagaatagaaaagttggacaaatgatacattagatagtcaaaaatgtgaaaaaaaagatcattatatactagatgataatttagtactatcattcaaagtatgaaatctgtttatatacttaatgagaaatggcatcaccaagaatgtatcattaagaaacacacaatacgttaaaataatgcattgttttaaaaaataatttgtaacatagcaaaacaaaagtgtaagcaattaaaatgttcattaagaggcagagaaagatggtggagtaggaagctccaccaactgtcccctgcacaaggacaccaagttaaccactatctacacaaaaaaaaaaacaccttcataataaccaaaaatcaggtgaatgctcacagtacccggttttcactttatgtagctgaaagaggcactgaagagacagaaaaaacaggcctkaagtgctgatgtcacacatcctccgccccttggcagtggctgcaaggtgcagagagcatctctcggcactgtaggagggagagtacagcaacggtgaggcattgaactttgtgctgccctgttaagagtagaaaggaaaaccagaccaaactcagctgaaggcttcccatgaagagagcatttaaaccagccctagccagaggggactagccgatcctagcagtccaaagttgagtacctgcaaacctctccacgaagggctctgtgtcttcaagtaaacttgaaaggt

SEQ ID NO: 1548 - DNA, 1281 bp, Homo sapiens
tatatcttttaatcatcacaatattggtataagttgattattttcctcatttttatattgagaacttggactccgataatttaatggaactgctcaacgttgtcagtgagtgttgaaacaagaattcaacaaatgctggggttcctcagacatctgctcttagctttctgtgtaaacataacattttatccaaaggaagatatcaaacaaacatcgttacaaatagatcagtataatccttaaaattgacaatatacccatattttaaagcacaatattttctcttttaccatatcttaataattatatttttattatttaccaaatatactatgatttaaaacatcaaacagtatttatggggattcttctgtgttgtcaatttctactcttcatttccactccacagagggaaagacttttaacagtgttagctcttttgtacggttatataaataatatgcttcaatattttctcacattatcttcccaatgtggatatgtcataatatttaattatgtaaatatttcatttttacttaattatgcctatgtacatatttttcagtgttgtgccaagtagtgtactatgacaccattttctttctgcacacttgtttccctatttacttcaagtttttatttctctggtgtttcatattgctatttataattcttccaaatttcctatcagaatgcaatttcccacatagtgaagcacatcaggtgatatatcaattccaatttattttctttcctgcagtcattcctcttggcaccctctcttcttctgcccctatttgtactctagttccctgggccagcagcacagctggctcttctttctgatcttctttggatcatttttctccttcattttgctagaatgtggcttccagaaaagtactggtaatgatttgcatagatggcacatttttgtaagcttgaaaatgcttttattttaccttcatttttatttgaggtttgaactgaataaagaattccaattgaaaattatttttctttataattttgaaacattgtacttttgacttctaacttgtggtgttgctgttcagaaattcaatgccatatcaacaattattgttcaaaatatatttgtcattttttcttcttattagcatccttattttatattcactcttcagggagctcatgaaacacgttttgagataccatgcttcaaaaatatttttacatttgtcatgatcaggasctagtgagcaaagtttacgacaagcagaattaaagatatgcttc

SEQ ID NO: 1549 - DNA, 1481 bp, Homo sapiens
taaattaaaccaataattatgtattgaatacattaactggcaatttttttctaagctgttacattttcaaatatgatgtaatatgttctctaaaagttatgtatatttttgggtggtttgttgctgtgatcttcaacattaacacttccttgacatagttattttcctagtcacttctaactcactttctgcttggaaactctgtcaaaacatctttctaaaatgcttcacatccccctttaccttttgctgatgggtgacctwatctcctaagttacagaaaaagtaaatgcctcttagcacctataacttcagtccactaacctatagctgcagagatcttcctgaatggaaaaattcttcatgttaggacctttcagttatgtcgcattgtgtttatagaaagcttttttgcatgtgctatagatcgtgctatggatgggattatgaaatacttcttcaaactaccttcttcctttctcaattgtattacaaagactgcatcattaaacattaagaatcctacctcccttgcagctatatatcaacataatattggccatgcaaattattggggaagaataagacttttttcttcccaaataatgatatagatacttaggtagaggaggttgctcttggcataactcctaatgatacaaggcaaagtataatatttataacattaatacatattagacacaaaggattaaaatttccctagtactctgttaatgtatgtatatgccatatctccctactattagaaaaatcatagaaggtagaattattatttcagttttatacatccaaaaacatatatttgaaaagaagtttagtgcctggcccaagcgcacatatctaataagtaacaaacttggacacatactaagaacaatatgagccccaaatccatatgtttggatactatcaagcttcactatgctttacaagaccctttattaatagcccacttctaacctactcggttttcatctcactcctgtttctattacttttctattttaaggtaatatggcacatctctctatcactttaagacactatactctttgatttatttgggctttggctgataatctctgttcttcttcacgtctttcatttctatcttgtgaatgtcctgctaagtttcaaatggccttaccacttagtttgcttagttttcattattttgtactcccacatactctagttcttctatcagggtgtttattattaaaaatgtattttatgtcaaagcataagaggctatctcttgacacccaatatgtgctctgtctcgtgtatgtttctataaaaacgtctagcccacatgagcagaggatgataggctggctcgaaggaaagaaaagtgagcctgtagacttgggatttaatctccaactaagatagtaacaatgtttcagtttattttttatgcagaaattaaatatattgcacaaaaactctatttagtt

SEQ ID NO: 1550 - DNA, 1481 bp, Homo sapiens
taaattaaaccaataattatgtattgaatacattaactggcaatttttttctaagctgttacattttcaaatatgatgtaatatgttctctaaaagttatgtatatttttgggtggtttgttgctgtgatcttcaacattaacacttccttgacatagttattttcctagtcacttctaactcactttctgcttggaaactctgtcaaaacatctttctaaaatgcttcacatccccctttaccttttgctgatgggtgacctamtctcctaagttacagaaaaagtaaatgcctcttagcacctataacttcagtccactaacctatagctgcagagatcttcctgaatggaaaaattcttcatgttaggacctttcagttatgtcgcattgtgtttatagaaagcttttttgcatgtgctatagatcgtgctatggatgggattatgaaatacttcttcaaactaccttcttcctttctcaattgtattacaaagactgcatcattaaacattaagaatcctacctcccttgcagctatatatcaacataatattggccatgcaaattattggggaagaataagacttttttcttcccaaataatgatatagatacttaggtagaggaggttgctcttggcataactcctaatgatacaaggcaaagtataatatttataacattaatacatattagacacaaaggattaaaatttccctagtactctgttaatgtatgtatatgccatatctccctactattagaaaaatcatagaaggtagaattattatttcagttttatacatccaaaaacatatatttgaaaagaagtttagtgcctggcccaagcgcacatatctaataagtaacaaacttggacacatactaagaacaatatgagccccaaatccatatgtttggatactatcaagcttcactatgctttacaagaccctttattaatagcccacttctaacctactcggttttcatctcactcctgtttctattacttttctattttaaggtaatatggcacatctctctatcactttaagacactatactctttgatttatttgggctttggctgataatctctgttcttcttcacgtctttcatttctatcttgtgaatgtcctgctaagtttcaaatggccttaccacttagtttgcttagttttcattattttgtactcccacatactctagttcttctatcagggtgtttattattaaaaatgtattttatgtcaaagcataagaggctatctcttgacacccaatatgtgctctgtctcgtgtatgtttctataaaaacgtctagcccacatgagcagaggatgataggctggctcgaaggaaagaaaagtgagcctgtagacttgggatttaatctccaactaagatagtaacaatgtttcagtttattttttatgcagaaattaaatatattgcacaaaaactctatttagtt

SEQ ID NO: 1551 - DNA, 1481 bp, Homo sapiens
taaattaaaccaataattatgtattgaatacattaactggcaatttttttctaagctgttacattttcaaatatgatgtaatatgttctctaaaagttatgtatatttttgggtggtttgttgctgtgatcttcaacattaacacttccttgacatagttattttcctagtcacttctaactcactttctgcttggaaactctgtcaaaacatctttctaaaatgcttcacatccccctttaccttttgctgatgggtgacctaatctcctaagttacagaaaaagtaaatgcctcttagcacctataacttcagtccactaacctatagctgcagagatcttcctgaatggaaaaattcttcatgttaggacctttcagttatgtcgcattgtgtttatagaaagcttttttgcatgtgctatagatcgtgctatggatgggattatgaaatacttcttcaaactaccttcttcctttctcaattgtattacaaagactgcatcattaaacattaagaatcctacctcccttgcagctatatatcaacataatattggccatgcaaattattggggaagaataagacttttttcttcccaaataatgatatagatacttaggtagaggaggttgctcttggcataactcctaatgatacaaggcaaagtataatatttataacattaatacatattagacacaaaggattaaaatttccctagtactctgttaatgtatgtatatgccatatctccctactattagaaaaatcatagaaggtagaattattatttcagttttatacatccaaaaacatatatttgaaaagaagtttagtgcctggcccaagcgcacatatctaataagtaacaaacttggacacatactaagaacaatatgagccccaaatccatatgtttggatactatcaagcttcactatgctttacaagaccctttattaatagcccacttctaacctactcggttttcatctcactcctgtttctattacttttctattttaaggtaatatggcacatctctctatcactttaagacactatactctttgatttatttgggctttggctgataatctctgttcttcttcacgtctttcatttctatcttgtgaatgtcctgctaagtttcaaatggccttaccacttagtttgcttagttttcattattttgtactcccacatactctagttcttctatcagggtgtttattattaaaaatgtattttatgtcaaagcataagaggctatctctygacacccaatatgtgctctgtctcgtgtatgtttctataaaaacgtctagcccacatgagcagaggatgataggctggctcgaaggaaagaaaagtgagcctgtagacttgggatttaatctccaactaagatagtaacaatgtttcagtttattttttatgcagaaattaaatatattgcacaaaaactctatttagtt

SEQ ID NO: 1552 - DNA, 1481 bp, Homo sapiens
taaattaaaccaataattatgtattgaatacattaactggcaatttttttctaagctgttacattttcaaatatgatgtaatatgttctctaaaagttatgtatatttttgggtggtttgttgctgtgatcttcaacattaacacttccttgacatagttattttcctagtcacttctaactcactttctgcttggaaactctgtcaaaacatctttctaaaatgcttcacatccccctttaccttttgctgatgggtgacctaatctcctaagttacagaaaaagtaaatgcctcttagcacctataacttcagtccactaacctatagctgcagagatcttcctgaatggaaaaattcttcatgttaggacctttcagttatgtcgcattgtgtttatagaaagcttttttgcatgtgctatagatcgtgctatggatgggattatgaaatacttcttcaaactaccttcttcctttctcaattgtattacaaagactgcatcattaaacattaagaatcctacctcccttgcagctatatatcaacataatattggccatgcaaattattggggaagaataagacttttttcttcccaaataatgatatagatacttaggtagaggaggttgctcttggcataactcctaatgatacaaggcaaagtataatatttataacattaatacatattagacacaaaggattaaaatttccctagtactctgttaatgtatgtatatgccatatctccctactattagaaaaatcatagaaggtagaattattatttcagttttatacatccaaaaacatatatttgaaaagaagtttagtgcctggcccaagcgcacatatctaataagtaacaaacttggacacatactaagaacaatatgagccccaaatccatatgtttggatactatcaagcttcactatgctttacaagaccctttattaatagcccacttctaacctactcggttttcatctcactcctgtttctattacttttctattttaaggtaatatggcacatctctctatcactttaagacactatactctttgatttatttgggctttggctgataatctctgttcttcttcacgtctttcatttctatcttgtgaatgtcctgctaagtttcaaatggccttaccacttagtttgcttagttttcattattttgtactcccacatactctagttcttctatcagggtgtttattattaaaaatgtattttatgtcaaagcataagaggctatctcttgacacccaatatgtgctctgtctcgtgtatgtttctataaaaacgtctagcccacatgagcagaggatgataggctggctygaaggaaagaaaagtgagcctgtagacttgggatttaatctccaactaagatagtaacaatgtttcagtttattttttatgcagaaattaaatatattgcacaaaaactctatttagtt

SEQ ID NO: 1553 - DNA, 1998 bp, Homo sapiens
cagtctaaattacaattatttcatgtggcatgattgctaagttggatggcctgagctaaaccatgggaaaatgattcaaaattataagaacatttctttctttaaaaaatgtaatattcaaaaattaataattttattacatacacaaaagatwtttattctagaaatatgtgaggaaatcccatttataacattaacaatactaacaagtactaaaatatctctaggatgtatacatagaaacacacacacaaatctactcagtgacattaaaattaataaaagaatattccctaagtcacatggaaagttactaatataaagatgccaattccctccaccactcaaattattataatgtttaataatgttaatgatgataacgataagaatatattacacacttactgagcttccactaagtacctatggctgaaactgataaattgtctcatcacatctattcttgcaactttacctctatgctaaaaatgaacacatttctgtctacctggaatgtcgtcatagcatttctttaacctagaatgaaagcataagtaatgtgctaaacttcaaggtcattttataaaacagaaaacattgtacccaggctgcaaaatggcaacaactgcagagaggaaagacatgcattatggacagtggagccaagtgctcctggaatagagtcatccaccagataattttcaactgttacatgtgaaagaggaagtttactatcctatgtaaaccaattaattcctaaggcagcatatcttgactctcaattttaattatgttttgagggagaagaatgagagttggtttatgtcagaaaataattcgagcaatcaagacacatgtcataagacatgtggtggactcttacatacactcctacactcacatacctataagtgttttgtcttgatatcatgggaagtgaacttgcagattcaacttctccaaagtagaataattgtttccaattttctatataactgacagagttttcacatttcagtagggcttatttcagattgacacaacttattaatcactcaaaatttaacaaaagatctaaaaatgtaaggatatttccaggtaactgatgggttaatggttacaaaagccgtcttctcagagtactcatggcacaaaaaacaccagttgaacacttgctatccttctcccaaaatgagataatcaccaatgttaaaaaatattctccaaggaagttgcaagaaaaaaaaatgccaagcaagataaatgctgatgaagatcacccaagtggaagaaatgttgacttatttgctattccactgatagttaaaaacgaacagcatgacctattttgtatctgataattccagaagtggaagaagaagtgaagtagtcacgatctgccccctcatccctagtgtggaaaataaaatatcatttgtctttctattttctatagcaacgaaatcctcccaaatgtatcatggtaatagaacaagtccttaaaataaaggttaaaaatgttccaaatgtatctgtattttatccacataagaattattataacaactagtaacaggaaatgtgtaccaatactaattattggagcaataaaatattactggttatatgtaatcatactcagtcatgtttcactaataagaaaaacaaaaataatatacagttaaaaatattatcttgtctttcaactgaccaggaaaactcaggctctagctctgcttaaaatccctgttggagaaggtaatcgtcatcccacaactcttagcctttgttgtaaatgcagaaatttttaaaatttattttataagaaaattagtagaaaatatgtatcctgttctttttctagtgcaacacacaatatatatctaataacccttagatgcatacagcatgactttcaagaccatgttcaatatagaaaccaagcagtagtatttcaattgaaattcacagaaaaatttttttgttacagtaaaa

SEQ ID NO: 1554 - DNA, 603 bp, Homo sapiens
ctccccccttcacacccccgcctccctgagagaacagggagagctactcttccctggagctgcagaggacaacttgttccacccacgctgccctgccccgatctcacagagttatgaccgcctcgttgcagtccgttcctaagttagcttctcctttgctggggtctgaagcccaggtaagaacgcagaagcaccctgtggcccatgggccatcttccctattagcacctcctcctcgctacccctcttcaatggcagagacgacgagtgaaaatttgggacttttattgtaaatggaaatggaaagactcataagaaaatgaatagcaaaacaaaaaactttcctagggttttagcaaacttgactrctgagcatgctttggtcaaacgcttcctggtaacttttagaaaaaggagcgatagagaaaatgaaggtggattgttactgcattcaggtaatgaaccttgaaaagggaaagaggagtacaagggtttgggaaaggggtgcacctacagtgcctgagctagaaagaatcttcaatgaccacctattcagtcctcttacattacagatgaagcaacaagcccagagagtattcaata

SEQ ID NO: 1555 - DNA, 664 bp, Homo sapiens
actaaataaccaacactttcattcatttattcagcttacattaattgaacagtacctattgccaagccctgtgtcrggcattgggacagtattggtgaacgcacaacaaacgtccttacctgcatgcttataatcttgttgataattgtaacaatttaaccctgcttcctcttgtttcatggtagtgacaaaaacttttttattaatattccgtgtatactaactatttctaaatcaaagagggatcacatctttcctcaatattcttctctttggactctctgggttattctgttacatttacttttcaaagtattaatttctgttattcactgttacatcaatcattatctcttccaccatttgaagataaagaagcctagaagatatatattatggtgaatgatgactattagaaatggttacataatatcttcttattaacatagtctagtcactgaaatttcaaatggcagcattataatgttgactcacaaggacacagtgagtatactccaaacaatttggggcctatatttgttcctggtcagtccttctcccttgctattgtttgcttttcattcttaaatgccctctgcagatctatctatgaatttcttatctctgcttatctggttattaacatgttaagtctactttgagg

SEQ ID NO: 1556 - DNA, 633 bp, Homo sapiens
tttagttctctctttttctttctttttaggttgctaaaatgctaagaaaaagttcttttattagcaagacccccacagacacacccaggatcaatactttgcttccttcaatccaatcaaattgacgctcagtattaactatcacactgaatattaaaamtatttagttctctctttttctttttaggttgctaaaatgctaagaaaaagttcttttattagatacattctaattcaacacactagaatgttagggagaactttacttaatctcatgggtaatgttctgtaggttgaagttgaactgaaagatttttagctaaagcaacagctgctttgttctccaagtaggtctttgaaatttaacaatttgaaaagagaaaacaacaagttgtttgaaatgcaagctagaaaatagctcttaattttcttttaaaaaggtatagtcagtttaaaaaaaataaaagctttataatgtacagattttggaggtttttaaaattcaaaaatacaagattgtttgattgtaaccattgaatatatctaattccagatcatctgaatattccatttattctacattacaaacaattccctaaaatgtaactaaaaatttgtacgaaggagcatgca

SEQ ID NO: 1557 - DNA, 1197 bp, Homo sapiens
ggtatatctcctgattaatgtaggctgcctcattttacttctcaatgttgaaatttatccatgtgaagtatctctcatggtcaatttattttgtgatggagttggaataatgataatgagaagactttctcagaggtagtgaaagaaagtaccaacagcacaacctgaatatggcaggtacacacatagcaacgttccactcacgacctatycttgcaatgcttgaggggttaccagagatgacatgcagtggctgctttgaacattcctgttgaccattaagtccctcagatacttgaatagaattgtaacctctcactcccactctccttgacccaccaccacaccttgccccagggataaataacccttgagtttagagaaggaatgttaggaagggcgagacatgtgttaattctataattaagagacagtatttcccttctgacctttccccaaaagcgtgttaccagctaagtctttaaaataaaaacccattaacatgggtaaaattgtttctgacttacttgtttcacctaccattggaaatgtccaagtcctattacttgatttttgtaaacaaatttcactttggacagtcacatgtgcatatgatctgaaagcctcagcacagtagccttttgcagaggagcatgtataacttaaatcaattgccacgatggtcaaaaagacaagactgaggaaagtgtaactattttagagaggaaatgaaggcctccatgctattttgcagaagtgcagagagattttcattaaaattttccttcctttttgcctactttttaatcctaataaaattactcccgtctttcaaatttcccctccccctaaatcaaaatgctgccacactctcaaaagctccctgcagtttatagagatgatgtcatctgctttaaaacatctgaataacttgtcctgttgctgaataaatttgttcaacatctaggttccatggctctatacaacctgattcatactgcttactttgtcagtaatctttattaatatttcatcatcgcttttctttccaaagggctgaggtttgcacttctcctgcaatgctgggagggagtgatagaggcagaaagccttactgatttacataaagattgcaaactattattctctgagtaattttaaagtgcacacattgcataccactttccgatgtaatca

SEQ ID NO: 1558 - DNA, 1197 bp, Homo sapiens
ggtatatctcctgattaatgtaggctgcctcattttacttctcaatgttgaaatttatccatgtgaagtatctctcatggtcaatttattttgtgatggagttggaataatgataatgagaagactttctcagaggtagtgaaagaaagtaccaacagcacaacctgaatatggcaggtacacacatagcaacgttccactcacgacctattcttgcaatgcttgaggggttaccagagatgacatgcagtggctgctttgaacattcctgttgaccattaagtccctcagatacttgaatagaattgtaacctctcactcccactctccttgmcccaccaccacaccttgccccagggataaataacccttgagtttagagaaggaatgttaggaagggcgagacatgtgttaattctataattaagagacagtatttcccttctgacctttccccaaaagcgtgttaccagctaagtctttaaaataaaaacccattaacatgggtaaaattgtttctgacttacttgtttcacctaccattggaaatgtccaagtcctattacttgatttttgtaaacaaatttcactttggacagtcacatgtgcatatgatctgaaagcctcagcacagtagccttttgcagaggagcatgtataacttaaatcaattgccacgatggtcaaaaagacaagactgaggaaagtgtaactattttagagaggaaatgaaggcctccatgctattttgcagaagtgcagagagattttcattaaaattttccttcctttttgcctactttttaatcctaataaaattactcccgtctttcaaatttcccctccccctaaatcaaaatgctgccacactctcaaaagctccctgcagtttatagagatgatgtcatctgctttaaaacatctgaataacttgtcctgttgctgaataaatttgttcaacatctaggttccatggctctatacaacctgattcatactgcttactttgtcagtaatctttattaatatttcatcatcgcttttctttccaaagggctgaggtttgcacttctcctgcaatgctgggagggagtgatagaggcagaaagccttactgatttacataaagattgcaaactattattctctgagtaattttaaagtgcacacattgcataccactttccgatgtaatca

SEQ ID NO: 1559 - DNA, 1197 bp, Homo sapiens
ggtatatctcctgattaatgtaggctgcctcattttacttctcaatgttgaaatttatccatgtgaagtatctctcatggtcaatttattttgtgatggagttggaataatgataatgagaagactttctcagaggtagtgaaagaaagtaccaacagcacaacctgaatatggcaggtacacacatagcaacgttccactcacgacctattcttgcaatgcttgaggggttaccagagatgacatgcagtggctgctttgaacattcctgttgaccattaagtccctcagatacttgaatagaattgtaacctctcactcccactctccttgacccaccaccacaccttgccccagggataaataacccttgagtttagrgaaggaatgttaggaagggcgagacatgtgttaattctataattaagagacagtatttcccttctgacctttccccaaaagcgtgttaccagctaagtctttaaaataaaaacccattaacatgggtaaaattgtttctgacttacttgtttcacctaccattggaaatgtccaagtcctattacttgatttttgtaaacaaatttcactttggacagtcacatgtgcatatgatctgaaagcctcagcacagtagccttttgcagaggagcatgtataacttaaatcaattgccacgatggtcaaaaagacaagactgaggaaagtgtaactattttagagaggaaatgaaggcctccatgctattttgcagaagtgcagagagattttcattaaaattttccttcctttttgcctactttttaatcctaataaaattactcccgtctttcaaatttcccctccccctaaatcaaaatgctgccacactctcaaaagctccctgcagtttatagagatgatgtcatctgctttaaaacatctgaataacttgtcctgttgctgaataaatttgttcaacatctaggttccatggctctatacaacctgattcatactgcttactttgtcagtaatctttattaatatttcatcatcgcttttctttccaaagggctgaggtttgcacttctcctgcaatgctgggagggagtgatagaggcagaaagccttactgatttacataaagattgcaaactattattctctgagtaattttaaagtgcacacattgcataccactttccgatgtaatca

SEQ ID NO: 1560 - DNA, 1396 bp, Homo sapiens
aatatttaactgtattttaattttggtgagattctcactgtcttagttcatttagtatgttcttttaaagaaatacctraagctgggtaatttataaagaaaagaggtttatttggctcatggttctgcaggcagagcaagaagcatggcacaagcatctgcttctggcgagggcttcaggctccttccacttatggcggagggtgacgggcaatacacagagatcccaagcaagagaggaagcaagagagagagtggggaggtgtccggttctttttaacaatcagttcttgcaggagctaatagacagaactcactcacccctacccttagagagggtattaatattcatgagggatccacctccatgccccaaacacctctcatttgatctcctatattggggatcaaatttcaacatgagatttggaggggaagacacacctgaactatagcactcatggatttttattaattgggcaattcggaattattttctgtaggtttttgaggggaggctttcattttcttcataggcatttactgtatgttacatactttttatactatggctcttccaaaacaaagatggcttgcaaaatagtaacaaaatagtaatagtaacaaaataatattatggggttaataaaatggaaactgaaaatttaagtgtggaaaggagtcaagtatgtttcacatattttctgtgattgagccttaatattgtttttgcagctttctaatatccagagcaaaaagggaaatattaatttcaactggtgtttctagataaatgctctaatttgaaggtgttggtaagcagctagacttcttagggaactttcaaacagtgtgagggacatatcaaaagatctcacacatgggaaattatgatcgatcctagaagcagaaagtgggacagaaaaaaatatttggtgacataatggatgaatagctcccaaattttatggaggacatgtttacagattcaagaagcgcagaaaaccctaagcagtgtgaatttaagataaccgcatctaggcataccatattcaaaccacagaaccaaaaagtaaagagaaaatcttgaaaacagccaggaaaagaacagcatatttgaacaattatttgaacaaatttgaacaatgattcaatattttttaagaatgaaaataaagacatgtccagataaaaataaaactagcagggttcatcaccagcagctctgcaataaaactaatgttaaagaagctctttcgtgagactccgtctcaaaaaaaaaaaaaaaaaaaaaaaaaaaaaagaagctcttttggctgaagaaaaatcatacctgataaaaatcatgagaatctataaacatctaggtcaatataagagaatattgttttctcct

SEQ ID NO: 1561 - DNA, 588 bp, Homo sapiens
ctattcgggtggctgaggtgggaagactgcatagctcagtcggtctaggctgcagtgagccatgttcgcaccattgcacttcagcttgggtgacggtatgcgatcctgtctcaaaaaatctaaacaaaacaaaaaaagaagatgcactttaaatataaagatgctgatagattgaaattaaatagctgggagaaaaatgccatgcaaactataggcatgagaaaggctagagtgtttatattagtatgagataaggtagacttcaagacaaagagtattactggaataaagagggacatttcataatgctaaaagaaccaataaatcaggaagatataacaatmataaatatgtatgtacctaatacagactttaaaatatataaagaaaaaaatgagaattactggagcaatagacaattccaggatcatacttggagattttaacactcctttcttagcaattgatgggccaatgattcaaaaaatttaggggaaaacaatgatacgatttctgcaaaaacagataatccctgatgtagacaataaaaagatagttataccaatattgttgctaatatcaaactgt

SEQ ID NO: 1562 - DNA, 575 bp, Homo sapiens
taacacagtgtaagtggtcaacattttaacttatgcaaccagattaacctttttttgtaaacacagatcttgaataagcatctttccagctttgtttaaatgaagagtgagatttcaaaatctgttgaggctaatattacgacagctgtcacttaaaayttttgtgttcatatttggttgtattgttgattgattctataataaatatattatttgaatgtactgagtagttttaaaaatactgatcacttagcttgcttcttcaattacactctttcatgtctacagcttttctgtacccaaaagctattttttctatacatgaccagcagcagcctcgtttagaatttatatcaattcaggatttctcaggccttcaaaatctatgttaagttttgattatcaaatgtattttatacaacttccctaaggttttgatatatttctcataggggtgaatatataccttgcttaagactatatatcttttgtggctccccaccaaccaagaacatttggttcagctttatttttttgtagttattaaggaaagaatgaggaatggttttcccaaa

SEQ ID NO: 1563 - DNA, 757 bp, Homo sapiens
atggattattacttgttagaagttgagtgaactgtgattctggtgggatgacaacacagtgggctagaagctgtatcaattaagctctctgtaccttgtgtcttaatcattattgtgtttacagatcttctagcagagctcaacaaatacttttgagtgtgtttatgtgtgtgtgtgtgtgtgtgtgtgtgagagagagagagcgagagagagaactgggagagagaaaggaatctacttagcatagcactatcccttggtgactagtcaacaaatgaatgctacattttcctctttctcttatttctcttttcacttttttcatttcttgcttagtttatttccacattttagtatgcagtagcccactttaactcctcagtagctttcccatcatgctataaggcacttatgcaatcatcaagtgaatgcccttggagtatcatgttagagtgtaaattataacatcctgtttagcctccsagaggagcacactgctaaatgcccaaggatttgttttgaacaaagcatagcaattagagataaatgaaaggtatatattgtaaagttatttactcatctccatcttggcttgtaataatagccaaacacataattgcatgttattcagacaagtatttgatattgttttcaacacatagagattttccttcagtatacgaagtcaactcatatgtagtatttattgcattagaatttattatttcataagttagcaagtacttggttccctgaa

SEQ ID NO: 1564 - DNA, 1057 bp, Homo sapiens
gcatcacttacttcttctctctaacacccactctgttctatagcaatgctttgtgttctctcttttacaaggtaaatactgagaaaaagaagtgggaggcgattttcagcaaaagacagtattaaagcagttaaagctgcaggcacatgaaaagcattagaatctgtgggctgttttcatacctgactcagtcctaagaagttaattaaagcatggcaatcctaccgacttcacagaatagtggatgtcctaggagcataagttcttctagttgctagttaagatcaaggagaatactagtgtgtgcttttgtggttgcacacttgcgttggtgtttgtatgtgtgttttctttggatggtttactttattttttattgtaatggtgattacattcaaataaaaatttttcaaccctacttccatgataaaaatatatatattttataagcaatagtgagcattgaagtcagtgaagataataatagttgtcattctcagaaaagaaaaaamgagtatttaatctggatgaatctgggaatatgagagcagaggacttaggtgacctctatagattccactgagaagttttacatcccaattcctgtaaaaatataaagaatgattactgtgtgtctcaatactttaccctgtgagatgataaataagccttcaggagttccaggaaagtgatagagggtattaagtcagaggctcactaggagacacactgacacctaagatacaaagcaaatacaataaaacatacaaaaaaagtgctcagaaatgtttccttaatgtatcaattccctctaattcttctgtggctagtaacaattgtctccacaggttgaaaaagagaaaagtgagccaaccctattatgttaaaatatgaaaaataatctactataaacttttttaaatgcactttatctgttaaaaataaaaataactggctattcaagtgggtcaacatctgaataaaatataattattttaacaaaaaacatgttcatattcaaaagcaaatttttataaacattccacatgcatgttga

SEQ ID NO: 1565 - DNA, 1057 bp, Homo sapiens
gcatcacttacttcttctctctaacacccactctgttctatagcaatgctttgtgttctctcttttacaaggtaaatactgagaaaaagaagtgggaggcgattttcagcaaaagacagtattaaagcagttaaagctgcaggcacatgaaaagcattagaatctgtgggctgttttcatacctgactcagtcctaagaagttaattaaagcatggcaatcctaccgacttcacagaatagtggatgtcctaggagcataagttcttctagttgctagttaagatcaaggagaatactagtgtgtgcttttgtggttgcacacttgcgttggtgtttgtatgtgtgttttctttggatggtttactttattttttattgtaatggtgattacattcaaataaaaatttttcaaccctacttccatgataaaaatatatatattttataagcaatagtgagcattgaagtcagtgaagataataatagttgtcattctcagaaaagaaaaaacgagtatttaatctggatgaatctgggaatatgagagcagaggacttaggtgacctctatagattccactgagaagttttayatcccaattcctgtaaaaatataaagaatgattactgtgtgtctcaatactttaccctgtgagatgataaataagccttcaggagttccaggaaagtgatagagggtattaagtcagaggctcactaggagacacactgacacctaagatacaaagcaaatacaataaaacatacaaaaaaagtgctcagaaatgtttccttaatgtatcaattccctctaattcttctgtggctagtaacaattgtctccacaggttgaaaaagagaaaagtgagccaaccctattatgttaaaatatgaaaaataatctactataaacttttttaaatgcactttatctgttaaaaataaaaataactggctattcaagtgggtcaacatctgaataaaatataattattttaacaaaaaacatgttcatattcaaaagcaaatttttataaacattccacatgcatgttga

SEQ ID NO: 1566 - DNA, 581 bp, Homo sapiens
acatactgaaccttaatatgttttcactgcagattctatgtattgtatttgtcagtgtttacaattcacttaacrttttctttggctacttaaattttcttaacacaaacctaacactgtatcattaagaagaacccagtaacttcaagtcttctctctattcattagaagattgagtatggtatattttccactgtagtctaagttatcattgtggagtctcattactgtgttacattcctatttattaaatatacctaaattgtgaaagtgtatgcaattgaacataaattggcacacatgtacacaaatttataattatttaagctgaaatacaagttaaaattaatttttgaataatatagaatattagaaagagaaaaaattaacttcaggttctcaccacaaagacaatattatattggaatctttgtttagatcaagagtattttattttacatgatcatactgcattgacaattttataaattgttttttcatcaggtttcccttattggtgttgttttttcatatactgtatttgagttaagttgaaattggtatatttaagtgctcacatt

SEQ ID NO: 1567 - DNA, 1252 bp, Homo sapiens
gcattcaatataagggtatttttcttgtatttccaggaataaaagcaagtttcatataaccttcaacaaaacactgtttatgtaagtgtaaagcttagaatcctattcaaagcaaaaaaagtaaactgaaaaataattatcaatacctattataatgtttttattataattggtgatttttattattgtcagccatgtaattaatgtagttttaaagtgacgttaattccaattctaatgccatattaatcagaagttactaaattgctgaaggcacaaacagatctatttggctccagattcatgggaagtatatatcttttcctgtataaataatgtcataatggatagaacatattctaatcaaagctttgtgcattaacttgtgttcgtaaaataaatctctgctatatgagtcattagtatgtttcttttgaggaagaatgactgattttaaaaaaaaawttctaaatagatcatgaaaaaatttagttacataatctatgactaagatttttaagactaactattgtcttatttccatactattcgtgctttccctgtgtcttgacatataaatctttttttttttcttaagatgtagacttgctctgtcacccagactggagtgcaattgtgccatctccgctcactgcaatcccgcaacttctgccacccaggttcaagcaattcttctgcttcagcctcccaagtagctgggactacaggcgcccaccaccacacacagctaacttttgtatttttagtagagacggggtttcaccatgttggccaggctggtctcaaacttctgaccttaagagatctgctggccttgtcctcacaatgtgttgggattacaggcatgagccaccgtgcccggctttgacatataaatcttcttctacagatttggaataataatgaaatgtgactagtcctttctatgtattaaaaatatttagtatgataaatggtagtcatttgtcaagggcttagtggatataactaattgccttaggaactcaaaaaaaatagatactatgaaggagaaagaagagagaataaaggggagggaactggaagggagtggaggcacgagatgggtaaattaaccaacccaaagttgcatagatattaagcagccagctgaaaggtatgtcgattggtggtggtttggctatgatcctgatatagggtgatctaatcaggaatgactagcctgtaccattatactgtggcatcatctgtc

SEQ ID NO: 1568 - DNA, 1252 bp, Homo sapiens
gcattcaatataagggtatttttcttgtatttccaggaataaaagcaagtttcatataaccttcaacaaaacactgtttatgtaagtgtaaagcttagaatcctattcaaagcaaaaaaagtaaactgaaaaataattatcaatacctattataatgtttttattataattggtgatttttattattgtcagccatgtaattaatgtagttttaaagtgacgttaattccaattctaatgccatattaatcagaagttactaaattgctgaaggcacaaacagatctatttggctccagattcatgggaagtatatatcttttcctgtataaataatgtcataatggatagaacatattctaatcaaagctttgtgcattaacttgtgttcgtaaaataaatctctgctatatgagtcattagtatgtttcttttgaggaagaatgactgattttaaaaaaaaaattctaaatagatcatgaaaaaatttagttacataatctatgactaagatttttaagactaactattgtcttatttccatactattcgtgctttccctgtgtcttgacatataaatctttttttttttcttaagatgtagacttgctctgtcacccagactggagtgcaattgtgccatctccgctcactgcaatcccgcaacttctgccacccaggttcaagcaattcttctgcttcagcctcccaagtagctgggactacaggcgcccaccaccacacacagctaayttttgtatttttagtagagacggggtttcaccatgttggccaggctggtctcaaacttctgaccttaagagatctgctggccttgtcctcacaatgtgttgggattacaggcatgagccaccgtgcccggctttgacatataaatcttcttctacagatttggaataataatgaaatgtgactagtcctttctatgtattaaaaatatttagtatgataaatggtagtcatttgtcaagggcttagtggatataactaattgccttaggaactcaaaaaaaatagatactatgaaggagaaagaagagagaataaaggggagggaactggaagggagtggaggcacgagatgggtaaattaaccaacccaaagttgcatagatattaagcagccagctgaaaggtatgtcgattggtggtggtttggctatgatcctgatatagggtgatctaatcaggaatgactagcctgtaccattatactgtggcatcatctgtc

SEQ ID NO: 1569 - DNA, 1252 bp, Homo sapiens
gcattcaatataagggtatttttcttgtatttccaggaataaaagcaagtttcatataaccttcaacaaaacactgtttatgtaagtgtaaagcttagaatcctattcaaagcaaaaaaagtaaactgaaaaataattatcaatacctattataatgtttttattataattggtgatttttattattgtcagccatgtaattaatgtagttttaaagtgacgttaattccaattctaatgccatattaatcagaagttactaaattgctgaaggcacaaacagatctatttggctccagattcatgggaagtatatatcttttcctgtataaataatgtcataatggatagaacatattctaatcaaagctttgtgcattaacttgtgttcgtaaaataaatctctgctatatgagtcattagtatgtttcttttgaggaagaatgactgattttaaaaaaaaaattctaaatagatcatgaaaaaatttagttacataatctatgactaagatttttaagactaactattgtcttatttccatactattcgtgctttccctgtgtcttgacatataaatctttttttttttcttaagatgtagacttgctctgtcacccagactggagtgcaattgtgccatctccgctcactgcaatcccgcaacttctgccacccaggttcaagcaattcttctgcttcagcctcccaagtagctgggactacaggcgcccaccaccacacacagctaacttttgtatttttagtagagacggggtttcaccatgttggccaggctggtctcaaacttctgaccttaagagatctgcyggccttgtcctcacaatgtgttgggattacaggcatgagccaccgtgcccggctttgacatataaatcttcttctacagatttggaataataatgaaatgtgactagtcctttctatgtattaaaaatatttagtatgataaatggtagtcatttgtcaagggcttagtggatataactaattgccttaggaactcaaaaaaaatagatactatgaaggagaaagaagagagaataaaggggagggaactggaagggagtggaggcacgagatgggtaaattaaccaacccaaagttgcatagatattaagcagccagctgaaaggtatgtcgattggtggtggtttggctatgatcctgatatagggtgatctaatcaggaatgactagcctgtaccattatactgtggcatcatctgtc

SEQ ID NO: 1570 - DNA, 960 bp, Homo sapiens
aaatctaaaaataatatttttcatgggttagtgaggttattttgaaaattacaagtgtagccttttgttaaaaaaaattgtcaagataagtgtctctgaggcttacattgtctatgatgattctttgttgacagaaaaaaagtctgcatcattcttctcaaaaatgaaataaaatttcaagaaagcatatcctaataacagggatagaggtgtgatggtatcataatttcatggagcactaatacaaattcaggcaaaattgatctcccgtgttttatctattaagcaacatttgggaatgtggtttctttcagttgaaattctgagtaaaaagttcatcagagttggtttgaccagatctatatagtgtgcgtgctttgaactgtctgctatcatgccagtgctccatctttaattgagaagacacttcaatggcaaaagcttgcagctacttcttcacgtgtgtaattttctctggcactggagactgtctatgmctctagtttgtcagaggagctcttaaaaatgggaaagttttaacaaattaacattatttatactcactgacaagtatccaatgtaccttagctggttcactaaaggtgttaccaaaaaggggtccctatccagaccccaagagaaggttttcattcaaaaagaattcgaggcagtgaccataaagtgaaagcaagtttattagagaaataaaggaataaagaatgactactccataggcagagcagcagcttgggctgctcgactgataatacttaatagttatttattgattatatgctaaacaatgggtggattattcaggagttttccaagaaagaggtggacaattcccaaaactgagggttcctcccctttgtagactatgcagcgtaactttctgacatttccgtggcatttgcaaactatcatggcactcgtgggagtgtcttttaggcatgctaa

SEQ ID NO: 1571 - DNA, 1647 bp, Homo sapiens
ctgtgtataatccacaactgttcaaccacaacaccggtaccctctccgagccttgacctaggacctatatatcctccatattccacaccctttctacatttctctaggaacaagcaaatgctgctatgccccataattttggggatcttttcctctaccttattatttttaatccaaaacttgacttaccctctgaggataccaccttcctatagccctcttcttccaagttatgcctggttttctcatatccacatatctgagggccaagactctcattgccactgtcaggtcagtattcctacatgctctttaaataaaaagcctccttggatgtttgtgcattatactacagttggataawcacaagggctctgaaatctgactctctagactcatatccaagctctctgcctcttattagccctgaaaccttcatcaagttattggaccaccctatgccttcatgtcttcattttataatgtgaaaaataatattacctaattcataggatttttgagaatattaatgaaataatacatgggaagcatttaaagttgtgtttcacatattatgttatacccaacatgttagatattattattagtattaattagctataaaattgttttcccttacttatttaccaacaaacaggaaattcgctgattcatgggatacactgtcatctgaaccacagtctttcatcatgctagctgacatcagtacccatatgaccaaccagtccagaatcaaactcacactctgctcccatagtgatatctttgaccatgtcattaatataaaattcattttccaaaatcactaattcaaacctccaattctctgactgtagcctccatccaactttttgctcaatttttcttgctctgttttctgaccacagaaggaaaccctagccagtgactcctaaactgtttcctaagcaaacagctctcccctctcttcacttccatatcatattaggctgagattttagactttgctattccacaaaccttcttgcttttatgctaagttcccttgaccatctttctttttggcacagggctcagaaaaaaaagtggtcttatatcaacgcaataatatcctttttctgtgctaggcaaaaccacaggaaccagtaaaaatgattctgctaaaattcatgaacaacaaaatcaaacagatcagcaatgaacccagtttttcacattattccaaactagttctgactgattcctttcactcagacttactttcagtaatctgcagtctgttagatttgttgtacaagaaaatgagggagtttttatcatcaggcttatattctcagacctacatttcactgatattctaagtggacagatacattcgtacaagagcttataagctaaaaatatctccagacatgttagtaatgccatttttatcatgactacttttcctggtttgcagattgaatggatgttagggctgaggcagagaatcctgaacaagactgagtttaggagtggaggcaggaagccataatccctgaataaactctacaaccatattacagttctactcttactatttagtaattttcatctctagaattcatttagctagctaacaaaataccaacgactattttgacagat

SEQ ID NO: 1572 - DNA, 1647 bp, Homo sapiens
ctgtgtataatccacaactgttcaaccacaacaccggtaccctctccgagccttgacctaggacctatatatcctccatattccacaccctttctacatttctctaggaacaagcaaatgctgctatgccccataattttggggatcttttcctctaccttattatttttaatccaaaacttgacttaccctctgaggataccaccttcctatagccctcttcttccaagttatgcctggttttctcatatccacatatctgagggccaagactctcattgccactgtcaggtcagtattcctacatgctctttaaataaaaagcctccttggatgtttgtgcattatactacagttggataatcacaagggctctgaaatctgactctctagactcatatccaagctctctgcctcttattagccctgaaaccttcatcaagttattggaccaccctatgccttcatgtcttcattttataatgtgaaaaataatattacctaattcataggatttttgagaatattaatgaaataatacatgggaagcatttaaagttgtgtttcacatattatgttatacccaacatgttagatattattattagtattaattagctataaaattgttttcccttacttatttaccaacaaacaggaaattcgctgattcatgggatacactgtcatctgaaccacagtctttcatcatgctagctgacatcagtacccatatgaccaaccagtccagaatcaaactcacactctgctcccatagtgatatctttgaccatgtcattaatataaaattcattttccaaaatcactaattcaaacctccaattctctgactgtagcctccatccaactttttgctcaatttttcttgctctgttttctgaccacagaaggaaaccctagccagtgactcctaaactgtttcctaagcaaacagctctcccctctcttcacttccatatcatattaggctgagattttagactttgctattccacaaaccttcttgcttttatgctaagttcccttgaccatctttctttttggcacagggctcagaaaaaaaagtggtcttatatcaacgcaataatatcctttttctgtgctaggcaaaaccacaggaaccagtaaaaatgattctgctaaaattcatgaacaacaaaatcaaacagatcagcaatgaacccagtttttcacattattccaaactagttctgactgattcctttcactcagmcttactttcagtaatctgcagtctgttagatttgttgtacaagaaaatgagggagtttttatcatcaggcttatattctcagacctacatttcactgatattctaagtggacagatacattcgtacaagagcttataagctaaaaatatctccagacatgttagtaatgccatttttatcatgactacttttcctggtttgcagattgaatggatgttagggctgaggcagagaatcctgaacaagactgagtttaggagtggaggcaggaagccataatccctgaataaactctacaaccatattacagttctactcttactatttagtaattttcatctctagaattcatttagctagctaacaaaataccaacgactattttgacagat

SEQ ID NO: 1573 - DNA, 1647 bp, Homo sapiens
ctgtgtataatccacaactgttcaaccacaacaccggtaccctctccgagccttgacctaggacctatatatcctccatattccacaccctttctacatttctctaggaacaagcaaatgctgctatgccccataattttggggatcttttcctctaccttattatttttaatccaaaacttgacttaccctctgaggataccaccttcctatagccctcttcttccaagttatgcctggttttctcatatccacatatctgagggccaagactctcattgccactgtcaggtcagtattcctacatgctctttaaataaaaagcctccttggatgtttgtgcattatactacagttggataatcacaagggctctgaaatctgactctctagactcatatccaagctctctgcctcttattagccctgaaaccttcatcaagttattggaccaccctatgccttcatgtcttcattttataatgtgaaaaataatattacctaattcataggatttttgagaatattaatgaaataatacatgggaagcatttaaagttgtgtttcacatattatgttatacccaacatgttagatattattattagtattaattagctataaaattgttttcccttacttatttaccaacaaacaggaaattcgctgattcatgggatacactgtcatctgaaccacagtctttcatcatgctagctgacatcagtacccatatgaccaaccagtccagaatcaaactcacactctgctcccatagtgatatctttgaccatgtcattaatataaaattcattttccaaaatcactaattcaaacctccaattctctgactgtagcctccatccaactttttgctcaatttttcttgctctgttttctgaccacagaaggaaaccctagccagtgactcctaaactgtttcctaagcaaacagctctcccctctcttcacttccatatcatattaggctgagattttagactttgctattccacaaaccttcttgcttttatgctaagttcccttgaccatctttctttttggcacagggctcagaaaaaaaagtggtcttatatcaacgcaataatatcctttttctgtgctaggcaaaaccacaggaaccagtaaaaatgattctgctaaaattcatgaacaacaaaatcaaacagatcagcaatgaacccagtttttcacattattccaaactagttctgactgattcctttcactcagacttactttyagtaatctgcagtctgttagatttgttgtacaagaaaatgagggagtttttatcatcaggcttatattctcagacctacatttcactgatattctaagtggacagatacattcgtacaagagcttataagctaaaaatatctccagacatgttagtaatgccatttttatcatgactacttttcctggtttgcagattgaatggatgttagggctgaggcagagaatcctgaacaagactgagtttaggagtggaggcaggaagccataatccctgaataaactctacaaccatattacagttctactcttactatttagtaattttcatctctagaattcatttagctagctaacaaaataccaacgactattttgacagat

SEQ ID NO: 1574 - DNA, 1310 bp, Homo sapiens
tacacaatcacacactcacacatgacagctgatttgcagtttatgcctgacattagatcctctttctataggttcgcatggcagcctatactttgctttctaygatattcattatcaatattgccaatatttgtttaccatttctcttcccgccaaaaactataattaactccgtatggataaaactgtaactactttatttactttgtattcctagccccaagcccagtgcttggaacatggtattcctgagtggaatacaacagaatggagtgtcctgatatgagcctaacttgtgcttacttgagagttctgataggtcttgcctttgttgaaatactgcctggcatcaaattgcctaaactggaaaagaggctcaaggacagtgggccatgctggagggaagggctacttctgtatatagcaccactgatgatgactagcttggtcatcagtatcatcaccaacactactatcctcaatgctattagccccatctttatggatttatgcttaatcttggaagaggaatctagaatcctagccattttactaaaatccctctgggagattcagagtgcaaatcagcatgagtggattcagcaaagttgatgccagaaactttgacagcaatagcaggaagcattgtcagctatacagtgatgctgtatttttctgcttcggctattggcaggcttgaaacaggctcaatggcaatagtgtcaatgtgagaggggaatggtgcatttctaaagcagccatctcacagaccaggaactgttgggtctatggaatccctcctggttacccaaatttggggcttgagaatatttgtaagacctcttcaatggtttcaaagataagttgagaaggctttggtaatgtaaattgggctgaaattctagaatatatggatgagggcacagcagaaaaaatacagtttggagacattgagatccaagttttagtctcagattggagaaacataaaaatgattataatggttggtctgtggaaattatgggtaattcttttatgttaccttttctgaaatgtttataatgcaatttgttatttccaaaatgaaaaaagaatattttaaaagaatgctaataacaataatagtctaattacaaaaaataattcgtgtatgttaataaatttgctgtgatatgtggaacgtgtgtgtgtgtgtgtgtacaaacctgtaacagagttcaggatatgtaagttagccaaaagaattgctaaactcaattcataaaagagaaacctgaaacttgtgacttgtccagatttttccataaaaa

SEQ ID NO: 1575 - DNA, 1310 bp, Homo sapiens
tacacaatcacacactcacacatgacagctgatttgcagtttatgcctgacattagatcctctttctataggttcgcatggcagcctatactttgctttctatgatattcattatcaatattgccaatatttgtttaccatttctcttccygccaaaaactataattaactccgtatggataaaactgtaactactttatttactttgtattcctagccccaagcccagtgcttggaacatggtattcctgagtggaatacaacagaatggagtgtcctgatatgagcctaacttgtgcttacttgagagttctgataggtcttgcctttgttgaaatactgcctggcatcaaattgcctaaactggaaaagaggctcaaggacagtgggccatgctggagggaagggctacttctgtatatagcaccactgatgatgactagcttggtcatcagtatcatcaccaacactactatcctcaatgctattagccccatctttatggatttatgcttaatcttggaagaggaatctagaatcctagccattttactaaaatccctctgggagattcagagtgcaaatcagcatgagtggattcagcaaagttgatgccagaaactttgacagcaatagcaggaagcattgtcagctatacagtgatgctgtatttttctgcttcggctattggcaggcttgaaacaggctcaatggcaatagtgtcaatgtgagaggggaatggtgcatttctaaagcagccatctcacagaccaggaactgttgggtctatggaatccctcctggttacccaaatttggggcttgagaatatttgtaagacctcttcaatggtttcaaagataagttgagaaggctttggtaatgtaaattgggctgaaattctagaatatatggatgagggcacagcagaaaaaatacagtttggagacattgagatccaagttttagtctcagattggagaaacataaaaatgattataatggttggtctgtggaaattatgggtaattcttttatgttaccttttctgaaatgtttataatgcaatttgttatttccaaaatgaaaaaagaatattttaaaagaatgctaataacaataatagtctaattacaaaaaataattcgtgtatgttaataaatttgctgtgatatgtggaacgtgtgtgtgtgtgtgtgtacaaacctgtaacagagttcaggatatgtaagttagccaaaagaattgctaaactcaattcataaaagagaaacctgaaacttgtgacttgtccagatttttccataaaaa

SEQ ID NO: 1576 - DNA, 1310 bp, Homo sapiens
tacacaatcacacactcacacatgacagctgatttgcagtttatgcctgacattagatcctctttctataggttcgcatggcagcctatactttgctttctatgatattcattatcaatattgccaatatttgtttaccatttctcttcccgccaaaaactataattaactccrtatggataaaactgtaactactttatttactttgtattcctagccccaagcccagtgcttggaacatggtattcctgagtggaatacaacagaatggagtgtcctgatatgagcctaacttgtgcttacttgagagttctgataggtcttgcctttgttgaaatactgcctggcatcaaattgcctaaactggaaaagaggctcaaggacagtgggccatgctggagggaagggctacttctgtatatagcaccactgatgatgactagcttggtcatcagtatcatcaccaacactactatcctcaatgctattagccccatctttatggatttatgcttaatcttggaagaggaatctagaatcctagccattttactaaaatccctctgggagattcagagtgcaaatcagcatgagtggattcagcaaagttgatgccagaaactttgacagcaatagcaggaagcattgtcagctatacagtgatgctgtatttttctgcttcggctattggcaggcttgaaacaggctcaatggcaatagtgtcaatgtgagaggggaatggtgcatttctaaagcagccatctcacagaccaggaactgttgggtctatggaatccctcctggttacccaaatttggggcttgagaatatttgtaagacctcttcaatggtttcaaagataagttgagaaggctttggtaatgtaaattgggctgaaattctagaatatatggatgagggcacagcagaaaaaatacagtttggagacattgagatccaagttttagtctcagattggagaaacataaaaatgattataatggttggtctgtggaaattatgggtaattcttttatgttaccttttctgaaatgtttataatgcaatttgttatttccaaaatgaaaaaagaatattttaaaagaatgctaataacaataatagtctaattacaaaaaataattcgtgtatgttaataaatttgctgtgatatgtggaacgtgtgtgtgtgtgtgtgtacaaacctgtaacagagttcaggatatgtaagttagccaaaagaattgctaaactcaattcataaaagagaaacctgaaacttgtgacttgtccagatttttccataaaaa

SEQ ID NO: 1577 - DNA, 1310 bp, Homo sapiens
tacacaatcacacactcacacatgacagctgatttgcagtttatgcctgacattagatcctctttctataggttcgcatggcagcctatactttgctttctatgatattcattatcaatattgccaatatttgtttaccatttctcttcccgccaaaaactataattaactccgtatggataaaactgtaactactttatttactttgtattcctagccccaagcccagtgcttggaacatggtattcctgagtggaatacaacagaatggagtgtcctgatatgagcctaacttgtgcttacttgagagttctgataggtcttgcctttgttgaaatactgcctggcatcaaattgcctaaactggaaaagaggctcaaggacagtgggccatgctggagggaagggctacttctgtatatagcaccactgatgatgactagcttggtcatcagtatcatcaccaacactactatcctcaatgctattagccccatctttatggatttatgcttaatcttggaagaggaatctagaatcctagccattttactaaaatccctctgggagattcagagtgcaaatcagcatgagtggattcagcaaagttgatgccagaaactttgacagcaatagcaggaagcattgtcagctatacagtgatgctgtatttttctgcttcggctattggcaggcttgaaacaggctcaatggcaatagtgtcaatgtgagaggggaatggtgcatttctaaagcagccatctcacagaccaggaactgttgggtctatggaatccctcctggttacccaaatttggggcttgagaatatttgtaagacctcttcaatggtttcaaagataagttgagaaggctttggtaatgtaaattgggstgaaattctagaatatatggatgagggcacagcagaaaaaatacagtttggagacattgagatccaagttttagtctcagattggagaaacataaaaatgattataatggttggtctgtggaaattatgggtaattcttttatgttaccttttctgaaatgtttataatgcaatttgttatttccaaaatgaaaaaagaatattttaaaagaatgctaataacaataatagtctaattacaaaaaataattcgtgtatgttaataaatttgctgtgatatgtggaacgtgtgtgtgtgtgtgtgtacaaacctgtaacagagttcaggatatgtaagttagccaaaagaattgctaaactcaattcataaaagagaaacctgaaacttgtgacttgtccagatttttccataaaaa

SEQ ID NO: 1578 - DNA, 1075 bp, Homo sapiens
cctaattttctttcttaaaaaaattaaccttttagacttctggtccagataatcttgtgagtttacacagaaacattctcctgccaacatcaaaattatagcagagatagataaaatattttagaatgtgcgaatcatgtaatcaaactcraaaacaaatttagactgggcatggtggctcacagctgtaatctcagtacttgggaggctgaggctagaggattgcttgaggccaggagtctgagaccagcctgggcaacatagtgagaccccatctctacacaaaactagaaaaacacaacaacaacatacataacttcaaggaccagcagtaagcgagggctgaagtgacatatttccagggctttggaatcagaccaggtgcctggaggtgattggaagttcaactcttgccgactaatgggggcactggtgtatggttggggactggagccaggctcaccatgtgagaactgatttgggcgagccttctctgtgagtgaaagcttacagtcagtttttggccaccaacattgagctaatgtctgtgttaataggaagggatggagacattgggccttgagaagacccaaaatctgggcttcagtaatggaaatgacagcataaactagtcatggaaaggtggccatcaggagaggaaaaaataagcaatcatgtaaaccataaaataaacactccctgctaagatgtacctgcaaactaacatgcaaaccatcatcaggaagcatagcaacagactcccaaagtgggagaatgtgacaaaatgtgaaccgagatacattttaaaacaattgcacttaaaatctttacggagataaaaatcacaaaacacaagtaagtagatttcaaactgacagaaatcgaaaaagtgaaagatgcagtcagtgaaaaatttgcctttgcttagttggtttaaaaagaaataattagtgaaaaagaagcttttcaaacagtgcaaaagaactatgtgatattctagaaagtggtgataaggtgaaagatcaaaacagatcatctgtaagatcccaccaagtagcattttaatacagattgt

SEQ ID NO: 1579 - DNA, 1075 bp, Homo sapiens
cctaattttctttcttaaaaaaattaaccttttagacttctggtccagataatcttgtgagtttacacagaaacattctcctgccaacatcaaaattatagcagagatagataaaatattttagaatgtgcgaatcatgtaatcaaactcaaaaacaaatttagactgggcatggtggctcacagctgtaatctcagtacttgggaggctgaggctagaggattgcttgaggccaggagtctgagaccagcctgggcaacatagtgagaccccatctctacacaaaactagaaaaacacaacaacaacatayataacttcaaggaccagcagtaagcgagggctgaagtgacatatttccagggctttggaatcagaccaggtgcctggaggtgattggaagttcaactcttgccgactaatgggggcactggtgtatggttggggactggagccaggctcaccatgtgagaactgatttgggcgagccttctctgtgagtgaaagcttacagtcagtttttggccaccaacattgagctaatgtctgtgttaataggaagggatggagacattgggccttgagaagacccaaaatctgggcttcagtaatggaaatgacagcataaactagtcatggaaaggtggccatcaggagaggaaaaaataagcaatcatgtaaaccataaaataaacactccctgctaagatgtacctgcaaactaacatgcaaaccatcatcaggaagcatagcaacagactcccaaagtgggagaatgtgacaaaatgtgaaccgagatacattttaaaacaattgcacttaaaatctttacggagataaaaatcacaaaacacaagtaagtagatttcaaactgacagaaatcgaaaaagtgaaagatgcagtcagtgaaaaatttgcctttgcttagttggtttaaaaagaaataattagtgaaaaagaagcttttcaaacagtgcaaaagaactatgtgatattctagaaagtggtgataaggtgaaagatcaaaacagatcatctgtaagatcccaccaagtagcattttaatacagattgt

SEQ ID NO: 1580 - DNA, 1075 bp, Homo sapiens
cctaattttctttcttaaaaaaattaaccttttagacttctggtccagataatcttgtgagtttacacagaaacattctcctgccaacatcaaaattatagcagagatagataaaatattttagaatgtgcgaatcatgtaatcaaactcaaaaacaaatttagactgggcatggtggctcacagctgtaatctcagtacttgggaggctgaggctagaggattgcttgaggccaggagtctgagaccagcctgggcaacatagtgagaccccatctctacacaaaactagaaaaacacaacaacaacatacataacttcaaggaccagcagtaagcgagggctgaagtgacatatttccagggctttggaatcagaccaggtgcctggaggtgattggaagttcaactcttgccgactaatgggggcactggtgtatggttggggactggagccaggctcaccatgtgaraactgatttgggcgagccttctctgtgagtgaaagcttacagtcagtttttggccaccaacattgagctaatgtctgtgttaataggaagggatggagacattgggccttgagaagacccaaaatctgggcttcagtaatggaaatgacagcataaactagtcatggaaaggtggccatcaggagaggaaaaaataagcaatcatgtaaaccataaaataaacactccctgctaagatgtacctgcaaactaacatgcaaaccatcatcaggaagcatagcaacagactcccaaagtgggagaatgtgacaaaatgtgaaccgagatacattttaaaacaattgcacttaaaatctttacggagataaaaatcacaaaacacaagtaagtagatttcaaactgacagaaatcgaaaaagtgaaagatgcagtcagtgaaaaatttgcctttgcttagttggtttaaaaagaaataattagtgaaaaagaagcttttcaaacagtgcaaaagaactatgtgatattctagaaagtggtgataaggtgaaagatcaaaacagatcatctgtaagatcccaccaagtagcattttaatacagattgt

SEQ ID NO: 1581 - DNA, 745 bp, Homo sapiens
ctgcctcagcctcccatgtggatgagactacaggcatgcaccaccacaccagctaattaattaattttttttttttgtagagacagggttttgctatattgcccaggctttcatcatcttttaacttcatccccatagcagtcccatgagtggtgctaataacttactcagtcatgcagccaggaagtgacagtagaattttaacctgggctctacagtgatgagtttcagagcagtgtggccctactgtcctttggctgtccttacactgttacaaccattgatgtcattcattggcattctgtctgactgtgagctccttaatggtgagggcagtcaagcactgatctttttcagtaactggtacgttgtatgaactcacaaatggtaatgatgatgaatgaatttaatgaggcacaaaataaaaagtgaataatacatggtcctttatttcaagaggctcactgtctttctttcccctctctccatccctcctgtgcccctccctccctcacttcctttttcctttctttccttttaatttttttccagataaaagcttttaataggaacgttacatgttaaaatggcattttaaaattttattttatttatttatttgtttttaattttactttaagttctgggatacatatgctgaacatgcagatttgttacataggtatacrtatgccacggtggtttgctgcatctatcaactcatcatctaggttttaagctccat

SEQ ID NO: 1582 - DNA, 555 bp, Homo sapiens
catttacaatctattctctgaagcttgctacctggaggcttcccctacatgataaaaccgtggtctccacaaccccttatcttaacccagacattcctttctatcgattccaagtctttagacagtaacttaacaaatctttcgrcaaattgctaatgagaaaatgtttgaacctacctgtgatgtggaagcccctctgcttctagttgccctgcctttcctgaacaaaccaacgtatatcttacttgtattgattgatgtcatttgcctccctaaaatgtatcaagccaaattgtagcctgatcaccttgagcacatgttctcaggagctgctgaggggtgtgtcacaggtcactcacatttggctcagtataaatctcttcaaatattttacagagtttgacatttttcatcaacaaactctatgaacttaatatgcatgtagaatacacactaggctgtttccaagaagacagcacatcaagcctctttaaaatttaaaaatgaacttgcagtaattacttgtaattagtgtaattatcttttataagtgtg

SEQ ID NO: 1583 - DNA, 555 bp, Homo sapiens
catttacaatctattctctgaagcttgctacctggaggcttcccctacatgataaaaccgtggtctccacaaccccttatcttaacccagacattcctttctatcgattccaagtctttagacagtaacttaacaaatctttcggcaaattgctaatgagaaaatgtttgaacctacctgtgatgtggaagcccctctgcttctagttgccctgcctttcctgaacaaaccaacgtatatcttacttgtattgattgatgtcatttgcctccctaaaatgtatcaagccaaaytgtagcctgatcaccttgagcacatgttctcaggagctgctgaggggtgtgtcacaggtcactcacatttggctcagtataaatctcttcaaatattttacagagtttgacatttttcatcaacaaactctatgaacttaatatgcatgtagaatacacactaggctgtttccaagaagacagcacatcaagcctctttaaaatttaaaaatgaacttgcagtaattacttgtaattagtgtaattatcttttataagtgtg

SEQ ID NO: 1584 - DNA, 572 bp, Homo sapiens
gcaacctctatctcctggctcaagtgatctcacctcagcctcctaagtagctgaaaccacaggtgcacaatatcatacccagctaatgttttaaattttttgtaaagacaaggtctctctatgttgcccaggcyggtcttaaactcctgggctcaagcaatcctcctgacttggcctcccaaagtgtagggattacaggcatgagccactgtgcctggccccaaacccttcctatgaccttctcatcattctcattatattgacatttgctttcttttcagtcagtttgcatatatccagcagtcaaggaccgtacattacatattactgtgtctcctcccatgtctaacagagtggtctgcacacaacagctgcttgataaatacttgagggatgagcaaggaggaaacggagctaggaaagcctggagagttttattttaggttagagaatactgtgggcaagatgtttcgacactgttaagggatttttctttgaaaagattgagttagtatgttcaacagcaatttttcatacatatattgaaagagccaatcttttcaggggcccac

SEQ ID NO: 1585 - DNA, 1231 bp, Homo sapiens
tgcatgctctgctacaccagccccactgtggggtgcctgatgggtccgacacctccatctcgccaggaagatgcaagtggaataagcacactctaacttacaggtgcttgttactaaggcctagaggataatgtgtggggtgatgacctcaaagggctttctaccaggtctctcctggaggtacctctactctcttctgctttcattggcagcccgctcaaagcccaaaatctccctcagagaaggtaatactaccagatccttttctagcttcctctaaccatctctttagaaagtagagagcataaccactatcctttccctttgttaaatcttttctttttaattttaatgcgtgagtgtgtggatggttctaaggtacaattttgaaaacttaatttctgcctaggttactctttctgttggggattctaaatatacttgagatatctaaagcaagcagtactaaattatgtagaatgctatacattttaatttaygtagaatgctgtatatttaatttaatttaattttgttcacattgttttatttacttatttttccccaaccaccagataggactgtcattcttagactttagctgacctaagaataatttgggatattgttaaaattcttagaaatctatatttgcatgtttaattccttaagtttctgatttaattagtctgaaattagctcaactttataaataaccaaaatgagtcctaaaactattaaatgattctccccaaagtagaattattcatgtttagagctaggataattcccattcctctgaactatttcatttagagattgctttcctcaggattatcaattacccacatgatatgaagccatccgcagtgaaagacagtatatataatgcagtttccatctggagcaatgtgacccctttgatattccagcaagtgcagaatggagatgcagacatcaaggtttctttctggcagtggggtaagaaattgacatgggaagaaggatatgtatatgccctgtgtaaaggacaaagggtttccatccttaaacaaaaacctagcccccctattaaagtttctgagaaaaaaagtctgacaaaaccctactgcaaagcaaatcctgtaatagggaagacatttttagtaaaatgaagcaataaataaagaagaggtgttggctgcagtgtgaatatggtgggggtactgcacattttccttccaaaaagacg

SEQ ID NO: 1586 - DNA, 2123 bp, Homo sapiens
tatgagcagtgcacactgagaactgggccatgtggctgacctgcaccaggcagcgaaaaaaagttatatattaacatgtaatgtataaaattataatatatgaacatattatgtatgcattaaataatagatgcccaaaatatgtayaaattatgttttaaattttaaaaattatgtgtgaaatctctcatgaatatccaagttaaaatgtcatcctaccaattgcgttaggttaaatcagtttctatggtagtaggaagacataagggtagtggagacctacttttgagagtgggcacctagatttaatccttaagtctatagcctgggtgctgtcattatctttctgctgagcaattatattttaattgtccagaatatcaatgtttttatacaatacaataagagtcagtgtactttgcagcacttgttctctctctgttggaataatctcaaaaggatgaagagtttactcttcaattccgtgctgaaacacagagctagaaattgatgctagcaactgcttcatctgatctttctctttctctctctttcccctttgtttctgccccagaagaaggagcttcacctcaaaaaagttatttttgacttgatatatttactgtattaaaaaatgataattaaaaaatgattagaaagtgaaactatgccaaagatgaaagtacggatcttttaactttattttgaattacaactgctgtaccaaggaccccagggcaagcctccttagctcattttgagtgatttggtttatttgcagcattttaaaggtattacttaagtatttttcttcattccttttagactattgcaaaagttgatcgtttttcagttgacacaatgctatccaagagaactacaaaaaaaaaaaaaaacttctctatcacaaatactatctgagattgtccgtgttgtcttctacccacatatctagtgtcttgaagtggtagaaggagtgacaaataagtattggctccatagtagaggaaaaattaacaaaggtaaaattaacaggtgctctaagaatacctggtgtggggtagataataaacagagtgtgaaaatggcattacacagccttcttatccttttccacttgaaaatcctaagcctggaggtcataaacaattgctatttctacttctggccaggcatcacaggaaccagtacttttctgagaaatcgatgtttcttatagtctgcttcagtatctgagaggctactgggcttgggtcagagtttttacatatgtatctcaaggccagtcaattaaagaatttaggtttttattgcaaaagtgcctatgtacatgaggtcttatgatttacattcttatgaatcacctaatgacactttgagggtctgtgtgttgtattcacatggccccatgtgctgtcttgatatttccaatgttactcaacagagggtgaattcccagagtaaaataatgtattacttgctttcaaagtgagtggaaagtattaattattagaaatactcaataaggttgttgcaaatctctatatatagaattagaacccaatcaacaggcagaatgaaaattctgaatttcaccatgccctggtctgtataaatggctaaggcaatgactcagtacaggagtttctgaacccgcctgcttgcatagtaaatgtgaattcaattccgtgctgaaacacagggctagaaattgatgctagcaactgctgtgctagcagctgctatgctagctgctatgctatgctagcaactgcttcatctgatctttctctttctctctctctttcccccaaaagaagaaggagcttcacctcttcagaacaatgcagtgcaggatggcataccatggcaacaggggcacttttcacccagccacattttttctcattggaatcccaggtctggaagacgtccatatgtgaatctccctgcacttctgctctgtttaccttttggctttgctgggaaatgctaccattctgctagtcatcaaggcagaacagaccctccgggagcccatgttctactttctggccatcctttccacaattgatttggccctttctacaacctctgtgcctcgtacgctgggtatcttctgg

SEQ ID NO: 1587 - DNA, 2123 bp, Homo sapiens
tatgagcagtgcacactgagaactgggccatgtggctgacctgcaccaggcagcgaaaaaaagttatatattaacatgtaatgtataaaattataatatatgaacatattatgtatgcattaaataatagatgcccaaaatatgtacaaattatgttttaaattttaaaaattatgtgtgaaatctctcatgaatatccaagttaaaatgtcatcctaccaattgcgttaggttaaatcagtttctatggtagtaggaagamataagggtagtggagacctacttttgagagtgggcacctagatttaatccttaagtctatagcctgggtgctgtcattatctttctgctgagcaattatattttaattgtccagaatatcaatgtttttatacaatacaataagagtcagtgtactttgcagcacttgttctctctctgttggaataatctcaaaaggatgaagagtttactcttcaattccgtgctgaaacacagagctagaaattgatgctagcaactgcttcatctgatctttctctttctctctctttcccctttgtttctgccccagaagaaggagcttcacctcaaaaaagttatttttgacttgatatatttactgtattaaaaaatgataattaaaaaatgattagaaagtgaaactatgccaaagatgaaagtacggatcttttaactttattttgaattacaactgctgtaccaaggaccccagggcaagcctccttagctcattttgagtgatttggtttatttgcagcattttaaaggtattacttaagtatttttcttcattccttttagactattgcaaaagttgatcgtttttcagttgacacaatgctatccaagagaactacaaaaaaaaaaaaaaacttctctatcacaaatactatctgagattgtccgtgttgtcttctacccacatatctagtgtcttgaagtggtagaaggagtgacaaataagtattggctccatagtagaggaaaaattaacaaaggtaaaattaacaggtgctctaagaatacctggtgtggggtagataataaacagagtgtgaaaatggcattacacagccttcttatccttttccacttgaaaatcctaagcctggaggtcataaacaattgctatttctacttctggccaggcatcacaggaaccagtacttttctgagaaatcgatgtttcttatagtctgcttcagtatctgagaggctactgggcttgggtcagagtttttacatatgtatctcaaggccagtcaattaaagaatttaggtttttattgcaaaagtgcctatgtacatgaggtcttatgatttacattcttatgaatcacctaatgacactttgagggtctgtgtgttgtattcacatggccccatgtgctgtcttgatatttccaatgttactcaacagagggtgaattcccagagtaaaataatgtattacttgctttcaaagtgagtggaaagtattaattattagaaatactcaataaggttgttgcaaatctctatatatagaattagaacccaatcaacaggcagaatgaaaattctgaatttcaccatgccctggtctgtataaatggctaaggcaatgactcagtacaggagtttctgaacccgcctgcttgcatagtaaatgtgaattcaattccgtgctgaaacacagggctagaaattgatgctagcaactgctgtgctagcagctgctatgctagctgctatgctatgctagcaactgcttcatctgatctttctctttctctctctctttcccccaaaagaagaaggagcttcacctcttcagaacaatgcagtgcaggatggcataccatggcaacaggggcacttttcacccagccacattttttctcattggaatcccaggtctggaagacgtccatatgtgaatctccctgcacttctgctctgtttaccttttggctttgctgggaaatgctaccattctgctagtcatcaaggcagaacagaccctccgggagcccatgttctactttctggccatcctttccacaattgatttggccctttctacaacctctgtgcctcgtacgctgggtatcttctgg

SEQ ID NO: 1588 - DNA, 2123 bp, Homo sapiens
tatgagcagtgcacactgagaactgggccatgtggctgacctgcaccaggcagcgaaaaaaagttatatattaacatgtaatgtataaaattataatatatgaacatattatgtatgcattaaataatagatgcccaaaatatgtacaaattatgttttaaattttaaaaattatgtgtgaaatctctcatgaatatccaagttaaaatgtcatcctaccaattgcgttaggttaaatcagtttctatggtagtaggaagacataagggtagtggagacctacttttgagagtgggcacctagatttaatccttaagtctatagcctgggtgctgtcattatctttctgctgagcaattatattttaattgtccagaatatcaatgtttttatacaatacaataagagtcagtgtactttgcagcacttgttctctctctgttggaataatctcaaaaggatgaagagtttactcttcaattccgtgctgaaacacagagctagaaattgatgctagcaactgcttcatctgatctttctctttctctctctttcccctttgtttctgccccagaagaaggagcttcacctcaaaaaagttatttttgacttgatatatttactgtattaaaaaatgataattaaaaaatgattagaaagtgaaactatgccaaagatgaaagtacggatcttttaactttattttgaattacaactgctgtaccaaggaccccagggcaagcctccttagctcattttgagtgatttggtttatttgcagcattttaaaggtattacttaagtatttttcttcattccttttagactattgcaaaagttgatcgtttttcagttgacacaatgctatccaagagaactacaaaaaaaaaaaaaaacttctctatcacaaatactatctgagattgtccgtgttgtcttctacccacatatctagtgtcttgaagtggtagaaggagtgacaaataagtattggctccatagtagaggaaaaattaacaaaggtaaaattaacaggtgctctaagaatacctggtgtggggtagataataaacagagtgtgaaaatggcattacacagccttcttatccttttccacttgaaaatcctaagcctggaggtcataaacaattgctatttctacttctggccaggcatcacaggaaccagtacttttctgagaaatcgatgtttcttatagtctgcttcagtatctgagaggctactgggcttgggtcagagtttttacatatgtatctcaaggccagtcaattaaagaatttaggtttttattgcaaaagtgcctatgtacatgaggtcttatgatttacattcttatgaatcacctaatgacactttgagggtctgtgtgttgtattcacatggccccatgtgctgtcttgatatttccaatgttactcaacagagggtgaattcccagagtaaaataatgtattacttgctttcaaagtgagtggaaagtattaattattagaaatactcaataaggttgttgcaaatctctatatatagaattagaacccaatcaacaggcagaatgaaaattctgaatttcaccatgccctggtctgtataaatggctaaggcaatgactcagtacaggagtttctgaacccgcctgcttgcatagtaaatgtgaattcaattccgtgctgaaacacagggctagaaattgatgctagcaactgctgtgctagcagctgctatgctagctgctatgctatgctagcaactgcttcatctgatctttctctttctctctctctttcccccaaaagaagaaggagcttcacctcttcagaacaatgcagtgcaggatggcataccatggcaacaggggcacttytcacccagccacattttttctcattggaatcccaggtctggaagacgtccatatgtgaatctccctgcacttctgctctgtttaccttttggctttgctgggaaatgctaccattctgctagtcatcaaggcagaacagaccctccgggagcccatgttctactttctggccatcctttccacaattgatttggccctttctacaacctctgtgcctcgtacgctgggtatcttctgg

SEQ ID NO: 1589 - DNA, 2123 bp, Homo sapiens
tatgagcagtgcacactgagaactgggccatgtggctgacctgcaccaggcagcgaaaaaaagttatatattaacatgtaatgtataaaattataatatatgaacatattatgtatgcattaaataatagatgcccaaaatatgtacaaattatgttttaaattttaaaaattatgtgtgaaatctctcatgaatatccaagttaaaatgtcatcctaccaattgcgttaggttaaatcagtttctatggtagtaggaagacataagggtagtggagacctacttttgagagtgggcacctagatttaatccttaagtctatagcctgggtgctgtcattatctttctgctgagcaattatattttaattgtccagaatatcaatgtttttatacaatacaataagagtcagtgtactttgcagcacttgttctctctctgttggaataatctcaaaaggatgaagagtttactcttcaattccgtgctgaaacacagagctagaaattgatgctagcaactgcttcatctgatctttctctttctctctctttcccctttgtttctgccccagaagaaggagcttcacctcaaaaaagttatttttgacttgatatatttactgtattaaaaaatgataattaaaaaatgattagaaagtgaaactatgccaaagatgaaagtacggatcttttaactttattttgaattacaactgctgtaccaaggaccccagggcaagcctccttagctcattttgagtgatttggtttatttgcagcattttaaaggtattacttaagtatttttcttcattccttttagactattgcaaaagttgatcgtttttcagttgacacaatgctatccaagagaactacaaaaaaaaaaaaaaacttctctatcacaaatactatctgagattgtccgtgttgtcttctacccacatatctagtgtcttgaagtggtagaaggagtgacaaataagtattggctccatagtagaggaaaaattaacaaaggtaaaattaacaggtgctctaagaatacctggtgtggggtagataataaacagagtgtgaaaatggcattacacagccttcttatccttttccacttgaaaatcctaagcctggaggtcataaacaattgctatttctacttctggccaggcatcacaggaaccagtacttttctgagaaatcgatgtttcttatagtctgcttcagtatctgagaggctactgggcttgggtcagagtttttacatatgtatctcaaggccagtcaattaaagaatttaggtttttattgcaaaagtgcctatgtacatgaggtcttatgatttacattcttatgaatcacctaatgacactttgagggtctgtgtgttgtattcacatggccccatgtgctgtcttgatatttccaatgttactcaacagagggtgaattcccagagtaaaataatgtattacttgctttcaaagtgagtggaaagtattaattattagaaatactcaataaggttgttgcaaatctctatatatagaattagaacccaatcaacaggcagaatgaaaattctgaatttcaccatgccctggtctgtataaatggctaaggcaatgactcagtacaggagtttctgaacccgcctgcttgcatagtaaatgtgaattcaattccgtgctgaaacacagggctagaaattgatgctagcaactgctgtgctagcagctgctatgctagctgctatgctatgctagcaactgcttcatctgatctttctctttctctctctctttcccccaaaagaagaaggagcttcacctcttcagaacaatgcagtgcaggatggcataccatggcaacaggggcacttttcacccagccacattttttctcattggaatcccaggtctggaagacgtccatatgtgaatctccctgcayttctgctctgtttaccttttggctttgctgggaaatgctaccattctgctagtcatcaaggcagaacagaccctccgggagcccatgttctactttctggccatcctttccacaattgatttggccctttctacaacctctgtgcctcgtacgctgggtatcttctgg

SEQ ID NO: 1590 - DNA, 2123 bp, Homo sapiens
tatgagcagtgcacactgagaactgggccatgtggctgacctgcaccaggcagcgaaaaaaagttatatattaacatgtaatgtataaaattataatatatgaacatattatgtatgcattaaataatagatgcccaaaatatgtacaaattatgttttaaattttaaaaattatgtgtgaaatctctcatgaatatccaagttaaaatgtcatcctaccaattgcgttaggttaaatcagtttctatggtagtaggaagacataagggtagtggagacctacttttgagagtgggcacctagatttaatccttaagtctatagcctgggtgctgtcattatctttctgctgagcaattatattttaattgtccagaatatcaatgtttttatacaatacaataagagtcagtgtactttgcagcacttgttctctctctgttggaataatctcaaaaggatgaagagtttactcttcaattccgtgctgaaacacagagctagaaattgatgctagcaactgcttcatctgatctttctctttctctctctttcccctttgtttctgccccagaagaaggagcttcacctcaaaaaagttatttttgacttgatatatttactgtattaaaaaatgataattaaaaaatgattagaaagtgaaactatgccaaagatgaaagtacggatcttttaactttattttgaattacaactgctgtaccaaggaccccagggcaagcctccttagctcattttgagtgatttggtttatttgcagcattttaaaggtattacttaagtatttttcttcattccttttagactattgcaaaagttgatcgtttttcagttgacacaatgctatccaagagaactacaaaaaaaaaaaaaaacttctctatcacaaatactatctgagattgtccgtgttgtcttctacccacatatctagtgtcttgaagtggtagaaggagtgacaaataagtattggctccatagtagaggaaaaattaacaaaggtaaaattaacaggtgctctaagaatacctggtgtggggtagataataaacagagtgtgaaaatggcattacacagccttcttatccttttccacttgaaaatcctaagcctggaggtcataaacaattgctatttctacttctggccaggcatcacaggaaccagtacttttctgagaaatcgatgtttcttatagtctgcttcagtatctgagaggctactgggcttgggtcagagtttttacatatgtatctcaaggccagtcaattaaagaatttaggtttttattgcaaaagtgcctatgtacatgaggtcttatgatttacattcttatgaatcacctaatgacactttgagggtctgtgtgttgtattcacatggccccatgtgctgtcttgatatttccaatgttactcaacagagggtgaattcccagagtaaaataatgtattacttgctttcaaagtgagtggaaagtattaattattagaaatactcaataaggttgttgcaaatctctatatatagaattagaacccaatcaacaggcagaatgaaaattctgaatttcaccatgccctggtctgtataaatggctaaggcaatgactcagtacaggagtttctgaacccgcctgcttgcatagtaaatgtgaattcaattccgtgctgaaacacagggctagaaattgatgctagcaactgctgtgctagcagctgctatgctagctgctatgctatgctagcaactgcttcatctgatctttctctttctctctctctttcccccaaaagaagaaggagcttcacctcttcagaacaatgcagtgcaggatggcataccatggcaacaggggcacttttcacccagccacattttttctcattggaatcccaggtctggaagacgtccatatgtgaatctccctgcacttctgctctgtttaccttttggctttgctgggaaatgctaccattctgytagtcatcaaggcagaacagaccctccgggagcccatgttctactttctggccatcctttccacaattgatttggccctttctacaacctctgtgcctcgtacgctgggtatcttctgg

SEQ ID NO: 1591 - DNA, 988 bp, Homo sapiens
  misc_feature (1)...(988): n = A,T,C or G
tgcatcacatttcatttatctcatctgcagttgatgaacccctgggttgattctgtatctttgctgttgtgaatagtgctgcaataaacatacaagtgcaggcgtctttttggtgaacaattattttcctttgagtataggacacatctaatattcccatccctagccatgatgccagacacaacaggcccccacattttagccaattacctcctgttctggtaataactgattataattttatgtctaaatgtgyctcacttacttttataatttaataacaggacaaaggtttatagaactttggaacaaagttttattactatccactttctaaattaattgttcaactttttttttctagcaagtagttctgtaatgaaaaaatataattccaaacatttttcatgcttttgaaatattttttctctgttctttggaaaacattttgatgttataatatttcattttattgagtgtagctttgtaatttttttaataaataatgtttggtattctgtaggtccttatattctgaaactctatcttccatgatgtgattatcacacattgaatgcctgtatcaaaacatctcatgtaccccataaacatatacacttactatacatagccacaaaattttccaaaaaaaaggaaacaattaaaaatattaaaattaatcaagcacttttacttcctaagcataaaaaaatcagagtacctggaatagctggaataattttcaaaataaacataataaagtgaaactatcagtttttctgttttaatacttttttattgttataattatcaagtctatgtggtagtggcaggaggatagagacacagataaattgaaagtactagaaaaaccagaaataagcctgtaaaatatgaccatttgatttttaatacaacttgattgagataaaattaacacatcctttattttancctattaaatatacaattaaatgaactttagtat

SEQ ID NO: 1592 - DNA, 988 bp, Homo sapiens
  misc_feature (1)...(988): n = A,T,C or G
tgcatcacatttcatttatctcatctgcagttgatgaacccctgggttgattctgtatctttgctgttgtgaatagtgctgcaataaacatacaagtgcaggcgtctttttggtgaacaattattttcctttgagtataggacacatctaatattcccatccctagccatgatgccagacacaacaggcccccacattttagccaattacctcctgttctggtaataactgattataattttatgtctaaatgtgtctcacttacttttataatttaataacaggacaaaggtttatagaactttggaacaaagttttattactatccactttctaaattaattgttcaactttttttttctagcaagtagttctgtaatgaaaaaatataattccaaacatttttcatgcttttgaaatattttttctctgttctttggaaaacattttgatgttataatatttcattttattgagtgtagctttgtaatttttttaataaataatgtttggtattctgtaggtccttatattctgaaactctatcttccatgatgtgattatcacacattgaatgcctgtatcaaaacatctcatgtaccccataaacatatacacytactatacatagccacaaaattttccaaaaaaaaggaaacaattaaaaatattaaaattaatcaagcacttttacttcctaagcataaaaaaatcagagtacctggaatagctggaataattttcaaaataaacataataaagtgaaactatcagtttttctgttttaatacttttttattgttataattatcaagtctatgtggtagtggcaggaggatagagacacagataaattgaaagtactagaaaaaccagaaataagcctgtaaaatatgaccatttgatttttaatacaacttgattgagataaaattaacacatcctttattttancctattaaatatacaattaaatgaactttagtat

SEQ ID NO: 1593 - DNA, 688 bp, Homo sapiens
ttacaggctcacgggtggaaggatcctgccttgcctcagatgagactttggacttgaaattttgggttaatgctggaatgaactaagactttgtgggactgttgggaaggcatgattggttttaaaatgtgaataggacatgagatttggaagggaccaagggcagaattatattgttaggctttatgtcccacccaaatctcatcttgaattgtaatccccataatccccacatctctagggagagaacaggtgaaggtaattgaatcatgagtgcagtttgccacaggtagttctcatgatagtgaatgagttctcgtaagatctgatggttatataaggggctctttctcctttgctcagcacttcttctttctgccaccttgtgaagaaggtaccttgcttccccttagcmtcctgccatgattaaactgtgagtcaattgaaactctttcctttataaattacccagtctagggtagttctttataacagtaagaaaatgaactaatgcagtatttgtgtttctatattaagttttatataaggtattaaatttctacaaaattctaaactcaatttgtaacctgatttaatgtgattagccactcttactatatgaagtcttctaatctgtgaacagagtacatcccttgattgaaaaaaagtgtcttaaatttctctcaat

SEQ ID NO: 1594 - DNA, 1336 bp, Homo sapiens
tgcatcaagtgatttagcttctcaaaatttcttcatggttaattgtaatttactcattcaatatgtaattataaagagtatattcagtgagaaatatcttttctgaagatacaaatgttaaaagataagtatggaaactcttacacaaataataaacgttcagaaatttggccaggtgcggtggctcacgcctgtaatcccagcacttttagaggccgaggctgatggatcatctgaggtcgggagtttgagaccagcctgaccaacatggagaaaacccgtctcgactaaaaatacaaaattagccaggtgtggtggcacctgcctgtaatcccagctactcaggaggctgaggcaggagaatcacttgaaaccgggaggcggacgttgttgtgagctgagatcgtgccattgcactccagcctgggcaacaagagygaaactacaactcaaacaaaacaaaacaaaaataaaacttccagagatttacatataattatatctatgtaatcataggtatcatatacatattacaacttgcaattttaaaatgttgagaaaatgtacaatattgtggaataattaaatgagcatatattacatattaagatgatacactgataaaatctgagaaaaagtttcactattttatattgagtgaaaaataagagaaattaaaaaaattgacattcttttaaaggcataaatgtgtacaaagataaagagaaaatattttagtgttagtgattagtgatttttataaatatatttgtgtgcattttattttattatatattttttttcaaattgactaaaataataggtgttattatataataaaattatataaataagaaataaatataagtataaaagtgaagttggttgcctagagcaggggtccccaacccctgtgctgtagactcgtaacagtccatggcctgttaggaaccatccgcacacctggagatactgtggtatactgtagtctaaaatgtaactaatctttttcctccataaatagtccccctttctttgtagtgacgtagtcaatttgcgtcaataattaatcattttgtcaacaaattttttatgggacaacattgcacacatcacaatattaggtaccacagtacctatctatgttctatgtaatggtacacaatgatctatgtaatgatttcaggattttgctccttagtagatgaggtatttcagtattatattgtataatgttccaaataaaaataatgtgtgttataaatgtgtaagaaagaggggaggaagcagaaaatggtggtgggaggcatgaataaggtgatcaggaaggaatgca

SEQ ID NO: 1595 - DNA, 1336 bp, Homo sapiens
tgcatcaagtgatttagcttctcaaaatttcttcatggttaattgtaatttactcattcaatatgtaattataaagagtatattcagtgagaaatatcttttctgaagatacaaatgttaaaagataagtatggaaactcttacacaaataataaacgttcagaaatttggccaggtgcggtggctcacgcctgtaatcccagcacttttagaggccgaggctgatggatcatctgaggtcgggagtttgagaccagcctgaccaacatggagaaaacccgtctcgactaaaaatacaaaattagccaggtgtggtggcacctgcctgtaatcccagctactcaggaggctgaggcaggagaatcacttgaaaccgggaggcggacgttgttgtgagctgagatcgtgccattgcactccagcctgggcaacaagagtgaaactacaactcaaacaaaacaaaacaaaaataaaacttccagagatttacatataattatatctatgtaatcataggtatcatatacatattacaacttgcaattttaaaatgttgagaaaatgtacaatattgtggaataattaaatgagcatatattacatattaagatgatacactgataaaatctgagaaaaagtttcactattttatattgagtgaaaaataagagaaattaaaaaaattgacattcttttaaaggcataaatgtgtacaaagataaagrgaaaatattttagtgttagtgattagtgatttttataaatatatttgtgtgcattttattttattatatattttttttcaaattgactaaaataataggtgttattatataataaaattatataaataagaaataaatataagtataaaagtgaagttggttgcctagagcaggggtccccaacccctgtgctgtagactcgtaacagtccatggcctgttaggaaccatccgcacacctggagatactgtggtatactgtagtctaaaatgtaactaatctttttcctccataaatagtccccctttctttgtagtgacgtagtcaatttgcgtcaataattaatcattttgtcaacaaattttttatgggacaacattgcacacatcacaatattaggtaccacagtacctatctatgttctatgtaatggtacacaatgatctatgtaatgatttcaggattttgctccttagtagatgaggtatttcagtattatattgtataatgttccaaataaaaataatgtgtgttataaatgtgtaagaaagaggggaggaagcagaaaatggtggtgggaggcatgaataaggtgatcaggaaggaatgca

SEQ ID NO: 1596 - DNA, 1336 bp, Homo sapiens
tgcatcaagtgatttagcttctcaaaatttcttcatggttaattgtaatttactcattcaatatgtaattataaagagtatattcagtgagaaatatcttttctgaagatacaaatgttaaaagataagtatggaaactcttacacaaataataaacgttcagaaatttggccaggtgcggtggctcacgcctgtaatcccagcacttttagaggccgaggctgatggatcatctgaggtcgggagtttgagaccagcctgaccaacatggagaaaacccgtctcgactaaaaatacaaaattagccaggtgtggtggcacctgcctgtaatcccagctactcaggaggctgaggcaggagaatcacttgaaaccgggaggcggacgttgttgtgagctgagatcgtgccattgcactccagcctgggcaacaagagtgaaactacaactcaaacaaaacaaaacaaaaataaaacttccagagatttacatataattatatctatgtaatcataggtatcatatacatattacaacttgcaattttaaaatgttgagaaaatgtacaatattgtggaataattaaatgagcatatattacatattaagatgatacactgataaaatctgagaaaaagtttcactattttatattgagtgaaaaataagagaaattaaaaaaattgacattcttttaaaggcataaatgtgtacaaagataaagagaaaatattttagtgttagtgattagtgatttttataaatatatttgtgtgcattttattttattatatattttttttcaaattgactaaaataataggtgttattatataataaaattatataaataagaaataaatataagtataaaagtgaagttggttgcctagagcaggggtccccaacccctgtgctgtagactcgtaacagtccatggcctgttaggaaccatccgcacacctggagatactgtggtatactgtagtctaaaatgtaactaatctttttcctccataaatagtccccctttctttgtagtgacgtagtcaatttgcgtcaataattaatcattttgtcaacaaattttttatgrgacaacattgcacacatcacaatattaggtaccacagtacctatctatgttctatgtaatggtacacaatgatctatgtaatgatttcaggattttgctccttagtagatgaggtatttcagtattatattgtataatgttccaaataaaaataatgtgtgttataaatgtgtaagaaagaggggaggaagcagaaaatggtggtgggaggcatgaataaggtgatcaggaaggaatgca

SEQ ID NO: 1597 - DNA, 1336 bp, Homo sapiens
tgcatcaagtgatttagcttctcaaaatttcttcatggttaattgtaatttactcattcaatatgtaattataaagagtatattcagtgagaaatatcttttctgaagatacaaatgttaaaagataagtatggaaactcttacacaaataataaacgttcagaaatttggccaggtgcggtggctcacgcctgtaatcccagcacttttagaggccgaggctgatggatcatctgaggtcgggagtttgagaccagcctgaccaacatggagaaaacccgtctcgactaaaaatacaaaattagccaggtgtggtggcacctgcctgtaatcccagctactcaggaggctgaggcaggagaatcacttgaaaccgggaggcggacgttgttgtgagctgagatcgtgccattgcactccagcctgggcaacaagagtgaaactacaactcaaacaaaacaaaacaaaaataaaacttccagagatttacatataattatatctatgtaatcataggtatcatatacatattacaacttgcaattttaaaatgttgagaaaatgtacaatattgtggaataattaaatgagcatatattacatattaagatgatacactgataaaatctgagaaaaagtttcactattttatattgagtgaaaaataagagaaattaaaaaaattgacattcttttaaaggcataaatgtgtacaaagataaagagaaaatattttagtgttagtgattagtgatttttataaatatatttgtgtgcattttattttattatatattttttttcaaattgactaaaataataggtgttattatataataaaattatataaataagaaataaatataagtataaaagtgaagttggttgcctagagcaggggtccccaacccctgtgctgtagactcgtaacagtccatggcctgttaggaaccatccgcacacctggagatactgtggtatactgtagtctaaaatgtaactaatctttttcctccataaatagtccccctttctttgtagtgacgtagtcaatttgcgtcaataattaatcattttgtcaacaaattttttatgggacaacattgcacacatcacaatattaggtaccacagtacctatctatgttctatgtaatggtacacartgatctatgtaatgatttcaggattttgctccttagtagatgaggtatttcagtattatattgtataatgttccaaataaaaataatgtgtgttataaatgtgtaagaaagaggggaggaagcagaaaatggtggtgggaggcatgaataaggtgatcaggaaggaatgca

SEQ ID NO: 1598 - DNA, 1336 bp, Homo sapiens
tgcatcaagtgatttagcttctcaaaatttcttcatggttaattgtaatttactcattcaatatgtaattataaagagtatattcagtgagaaatatcttttctgaagatacaaatgttaaaagataagtatggaaactcttacacaaataataaacgttcagaaatttggccaggtgcggtggctcacgcctgtaatcccagcacttttagaggccgaggctgatggatcatctgaggtcgggagtttgagaccagcctgaccaacatggagaaaacccgtctcgactaaaaatacaaaattagccaggtgtggtggcacctgcctgtaatcccagctactcaggaggctgaggcaggagaatcacttgaaaccgggaggcggacgttgttgtgagctgagatcgtgccattgcactccagcctgggcaacaagagtgaaactacaactcaaacaaaacaaaacaaaaataaaacttccagagatttacatataattatatctatgtaatcataggtatcatatacatattacaacttgcaattttaaaatgttgagaaaatgtacaatattgtggaataattaaatgagcatatattacatattaagatgatacactgataaaatctgagaaaaagtttcactattttatattgagtgaaaaataagagaaattaaaaaaattgacattcttttaaaggcataaatgtgtacaaagataaagagaaaatattttagtgttagtgattagtgatttttataaatatatttgtgtgcattttattttattatatattttttttcaaattgactaaaataataggtgttattatataataaaattatataaataagaaataaatataagtataaaagtgaagttggttgcctagagcaggggtccccaacccctgtgctgtagactcgtaacagtccatggcctgttaggaaccatccgcacacctggagatactgtggtatactgtagtctaaaatgtaactaatctttttcctccataaatagtccccctttctttgtagtgacgtagtcaatttgcgtcaataattaatcattttgtcaacaaattttttatgggacaacattgcacacatcacaatattaggtaccacagtacctatctatgttctatgtaatggtacacaatgatctatgtaatgatttcaggattttgctccttagtagatgasgtatttcagtattatattgtataatgttccaaataaaaataatgtgtgttataaatgtgtaagaaagaggggaggaagcagaaaatggtggtgggaggcatgaataaggtgatcaggaaggaatgca

SEQ ID NO: 1599 - DNA, 1336 bp, Homo sapiens
tgcatcaagtgatttagcttctcaaaatttcttcatggttaattgtaatttactcattcaatatgtaattataaagagtatattcagtgagaaatatcttttctgaagatacaaatgttaaaagataagtatggaaactcttacacaaataataaacgttcagaaatttggccaggtgcggtggctcacgcctgtaatcccagcacttttagaggccgaggctgatggatcatctgaggtcgggagtttgagaccagcctgaccaacatggagaaaacccgtctcgactaaaaatacaaaattagccaggtgtggtggcacctgcctgtaatcccagctactcaggaggctgaggcaggagaatcacttgaaaccgggaggcggacgttgttgtgagctgagatcgtgccattgcactccagcctgggcaacaagagtgaaactacaactcaaacaaaacaaaacaaaaataaaacttccagagatttacatataattatatctatgtaatcataggtatcatatacatattacaacttgcaattttaaaatgttgagaaaatgtacaatattgtggaataattaaatgagcatatattacatattaagatgatacactgataaaatctgagaaaaagtttcactattttatattgagtgaaaaataagagaaattaaaaaaattgacattcttttaaaggcataaatgtgtacaaagataaagagaaaatattttagtgttagtgattagtgatttttataaatatatttgtgtgcattttattttattatatattttttttcaaattgactaaaataataggtgttattatataataaaattatataaataagaaataaatataagtataaaagtgaagttggttgcctagagcaggggtccccaacccctgtgctgtagactcgtaacagtccatggcctgttaggaaccatccgcacacctggagatactgtggtatactgtagtctaaaatgtaactaatctttttcctccataaatagtccccctttctttgtagtgacgtagtcaatttgcgtcaataattaatcattttgtcaacaaattttttatgggacaacattgcacacatcacaatattaggtaccacagtacctatctatgttctatgtaatggtacacaatgatctatgtaatgatttcaggattttgctccttagtagatgaggtatttcagyattatattgtataatgttccaaataaaaataatgtgtgttataaatgtgtaagaaagaggggaggaagcagaaaatggtggtgggaggcatgaataaggtgatcaggaaggaatgca

SEQ ID NO: 1600 - DNA, 680 bp, Homo sapiens
tccccattgttgagcacacatgattgtaatataaaatattataaagtcattttatactgataacattttttttttatttctacagccacttatctttaagagcagcattggcaaactatagaccaccacctccttttgtgagtagttttattgaaacagagatatgctcacttacttttacattatatatgcctctctttgcatttcagtgatagagttaaataaaaccatatggccatagaattgcaatagaaaccatatgaccttgaaaactccacaataattaatctygccctttatagtatgtatactgaactccatttcagctacattcaaaataagaaagtaattagttttaagttcaatcatttcatcactgcacatgaagttctagagtctgtatcttcttgaatagagggacctagtctggcaaagcagctgcaattatagctaccatctgtttaattttattaattgtgttgtgattatctaacaaatactatgaaaaaaataattgtgtgtatgattactttcaccatgttgctagtctccaactcctgagctcaagggatctgcctgccttgacctcccaaagtgctgggattacaggtgtgagccactgcaccacctggcctggttttttgtttgtttgtttgtttgtttgtttttttgagatggag

SEQ ID NO: 1601 - DNA, 570 bp, Homo sapiens
taaatcgctgtgtctcttaagggaagataaacataaattataatgatatggaacaattaaaacaaaaagtatggacatttcaaagttgaagttgctcattaattttagactctataaattccacaaagtaagggaaggtgacatagtcaaaattttatctccagcatcctacagttataaaagttgacactcagaaaattattataattgtattgtaagaagcagctccatgaaacatcaattacccggcaaaaaatgggtgcattcatatctgatataaacacttcaaccagctattccaaataatagagaaaaataacattacctgcttaaatgaaattataagagtattgaatagagagaacaaraatgcagcaatatggtaaaaccccatctctactaaaaaacaaaaattagccaggccatggtggtgcatgcccgtagtctcagctacttggcaggctgaggcaggagaatcacttgaaccccggggacacaggttacagtgagctgagatcatgccactgctctccagcctgggcaacagagcaagactctgtctcaaaaaaa

SEQ ID NO: 1602 - DNA, 644 bp, Homo sapiens
taagtccacagtctacagaaatgtatgctcacccaatctgcatgtaaccacacaggyttctgcagttcggagacaaaaatttaatataagaaacatacatttgtgcacatgattttttgcaggaaattctatcactttgaaacatactgtatacagagcactttaggtaagtaacaaacatctcagggataaattcttagatgaatttatacagtaaattaaaataaaatgttctacgtgatactttcaactttgctagcattctactctacctaaaccctatcaatataacctcactgccaatattatgctaagatttgcctgaatactttttactttagctattctctctcattattaccatcatcaccaaagaacccctttgaattttgaacaaggtagggttttcctagcccttaaatgtagtggtggaaattaattccagttgattgaatgataacacatatggattaacacagagggtgggtacactctattcaataaacacacagactgatcaaaatttatgccaaaatatactaaaagtcacttaaaggtttaaaactgtccatttaaaaatatttactcattattactgtaaaataaaatacagagtaacagtgaaaacagtcgcatcaactacc

SEQ ID NO: 1603 - DNA, 644 bp, Homo sapiens
taagtccacagtctacagaaatgtatgctcacccaatctgcatgtaaccacacaggcttctgcagttcggagacaaaaatttaatataagaaacatacatttgtgcacatgattttttgcaggaaattctatcactttgaaacatactgtatacagagcactttaggtaagtaacaaacatctcagggataaattcttagatgaatttatacagtaaattaaaataaaatgttctacgtgatactttcaactttgctagcattctactctacctaaaccctatcaatataacctcactgccaatattatgctaagatttgcctgaatactttttactttagctattctctctcattattaccatcatcaccaaagaacccctttgaattttgaacaaggtagggttttcctagcccttaaatgtagtggtggaaattaattccagttgattgaatgataacacatatggattaacacagagggtgggtacactctattcaataaacacacagactgatcaaaatttatgccaaaatatactaaaartcacttaaaggtttaaaactgtccatttaaaaatatttactcattattactgtaaaataaaatacagagtaacagtgaaaacagtcgcatcaactacc

SEQ ID NO: 1604 - DNA, 1708 bp, Homo sapiens
ttaatgatggggatacggtgtaagaaatgtgtggtgaggcaattttgttgttgtgagaacatcatagggtgtacttacacaaacctagatggtatagcctactatgcacctagctacatggtatatagcctactactcctagrctacaaccctgtacagcatgtgactgtactgaacactgcaggcaatcagaacacaatggtaagtatttgtctatctaaacattgggaaggtacagtaaaaatatggttttacaatattatggggccactgtcatatatgtgggtccactggtgaccaaaatgttgctatgggatgcttgattgtatttcctttttataattgggtggggtggaggaacaatgttttgaagagactcatacacagagaaatccagcttattctttctgcactaaggtacaaaagtaacaaggaaatgattaagatttatctttgtaaatctaaaatatcatcagaaacgaaagctgggcatccactcaaatacgcttaaaatgttgtaggagcatgaacacataattcaatgatgtcagaggagaacttaaaagaatggacacttgtttttctccaagtattgccctgatgaagaaaataatgccaataacagtttaaacccaactttaagatgcaaaataaagatttttcctagagtatctctttaacctgcatatctctctttgacaggtttaataccattacttggtgagttcagaaaatagcgtggctttgactgttacagacgagcagttcatagaaatgcttagagttggcaagttgaagtagataagataaatttttcaaagtaaatcccatcctgctaattatgtacctaatacatcagtgtgggtttccccaaatatcatacaatatccacaaagaccaaaagcataaggactggatcccaactgagcccacccatcatgaggtcagtagaagccacatgaattctaaccacccccaaaacatccttctacggctctattagcaattacccccaacttttctacattgactttcagctatatagagctcagcacttctaccttctctgccaagtgcttggtgacccaggaaattagatatttatatcctttaggtcaaagatatcaaaggtcaaaagtagaattatcaactaccaagctaatttctaaattttctgaatgttctgtgacttctttataagcaagccaaactttatccttgttcttaatttttgtttttttagttttgagtcccttatcatctatagctcaagtcctctactttggaaggaagagggtggtggtgagagggtagggtattaatatctaaaccatgtgtgaaatactgctaagtgtttgaatgttttcatttattcttcatgggtaggtattatcccattttactgatgaggaaagtaaggctcagagaagttaaattatttacccaaggtcaactagcaagcatgtgatagagctggtcctggagcttaggtctccctgatcttaaagctctgccctttgcattcttccttgtttgctccctatttgttgtaattattagtggcagcaaggaagttagttaggcagggaagtagaaggagaactttaggattggtgtaaggtctttgtgattcagttcttaacattgggggcatcattattttattggaactgcatcacacacccatattcaaatataaatataaaaa

SEQ ID NO: 1605 - DNA, 646 bp, Homo sapiens
atggggtggattggatttcatccttgctgttctcatgatagtgagtgagttcccacgagatctcatcatttaaaagtatgtagcacctcccccttctctctctttcctgctgtcatgtaagatgtgctttgcttcycctttgccttccaccatgattgtaaatttcctaaggcctccccagccatgtgaaactgtgagtcagttaaacctattttctttataaattacccagtttcagatcgttctttatagcagtgtgaatatggactaatagttaaatttagcttataaataattagctttttgtttatcaggatagattcagggatatctatatgataaaacaactcaaactcacttgcacgctgacatgtttcttgcctgggagactgtgggcctgctgagaattatatctaaccttgtgctctcatgacccccacagcatagtgaaccaccctcactgatgtacctggatagttaaattactcatacacttatcaaatgttcctctatctgccaaaccaggaacaaagaaaactggcaggtactacttggggtcttttcaaaatctagcctttccttggaaacgcactctagttccctgccccgccctcgtgtgtgatggggtgggggtggttggctctga

SEQ ID NO: 1606 - DNA, 645 bp, Homo sapiens
attaagtgggtatccaatattctttttggagagatggaaaacaggacttttttgatttggaagcttctgatggcaggagaggggtcaagtgcaatgcttctttttgtttctggtgtgcctagcagatgctcagagggtgcctactggctgattgggtggtgcaggaacatgggtagctataggtttgctaaaggattatcctctaagcaggcctgaactggaggcctgaatattcttgttaaacttgaaagctcagatagatgggatcagaacaggctgcaaaaatctacaagttaggaaaactcacgcatagagcatgcaggtcggaacagacaaaaagatcccaatccaggggttcatgatgttgagaacagttycagaaggtggaagtacaaggcagatagtgggctacacagcttcccattgtgtgtgagtgactgtggggtcactttctgtcacccacaatcatgtgggaccaaagatgccagactactgaggtccatgtggaatcaaaagatgaagttgactgggtgctgagactatagcaaggcaaatcagctgttttcttttctctttgtgatggattctgactgtagcagccaaagtgatcatgtgtcagttgattttgatggctaagatggccaa

SEQ ID NO: 1607 - DNA, 645 bp, Homo sapiens
attaagtgggtatccaatattctttttggagagatggaaaacaggacttttttgatttggaagcttctgatggcaggagaggggtcaagtgcaatgcttctttttgtttctggtgtgcctagcagatgctcagagggtgcctactggctgattgggtggtgcaggaacatgggtagctataggtttgctaaaggattatcctctaagcaggcctgaactggaggcctgaatattcttgttaaacttgaaagctcagatagatgggatcagaacaggctgcaaaaatctacaagttaggaaaactcacgcatagagcatgcaggtcggaacagacaaaaagatcccaatccaggggttcatgatgttgagaacagttccagaaggtggaagtacarggcagatagtgggctacacagcttcccattgtgtgtgagtgactgtggggtcactttctgtcacccacaatcatgtgggaccaaagatgccagactactgaggtccatgtggaatcaaaagatgaagttgactgggtgctgagactatagcaaggcaaatcagctgttttcttttctctttgtgatggattctgactgtagcagccaaagtgatcatgtgtcagttgattttgatggctaagatggccaa

SEQ ID NO: 1608 - DNA, 634 bp, Homo sapiens
attgcacttgccttctcagacaaataaggcacagctaggaaggctttacatggtactactaccttttcattcctcgaaggtaaaatttgccatattaatgtttatccaaagaaaatctttcacatgtattgacattttgaacagtcgacactttccttgctagtcccttacccatcaattctactttgcatgcagtaagaaagcctcttgaaacccaaatgccggataatatctctgggatggagaaacttaacccatcactcagacagatcagctgaatctaacagaaaggtggtgctagcagggttttagtagctttgtctcagttgtggttctggattttctaaagtggctctaaacccaccagccaatgagagtatttgagattttattttaaggcttaatatctcaagctctgaacaaacaacaaaaccggaggtaacaaaagtcttccaatagaataggaaaaacaatcatatacctgcagtatatagaaatttacctcctccagagtgatgacygctggttaaaaatggcttttaaaacctgatattggtttctctgcaagggaagtatgaagaagaaagagagatggggtaggaaggggctcacagatgctgccaatgttattgat

SEQ ID NO: 1609 - DNA, 647 bp, Homo sapiens
ttcagaacgagcctgttctcagaccggcaaggtgggacccagtcccaactcaccattccactgtactggtgtagagaccaggagagacttaactaacgggaagtgacttggctaacatcatggggccagtgtgggcagacccagagctcatgcccaggccttctgatgacaaggccgggatgttacrtaggcgtcccttcaaagggaaccagtctcctccaacggtgcccatggtgaccgctccaggacaaacacactgtcagctgacccacatcctagatccttgacaactgagaaaaactaaagcagaacagagacaagccaggtgaaaagagcaacacaatgtgtgtgtgtgtgtgtgtgtgtgtgtgtgtgtgtgtgtgtgtgtgtgtgtattgcaattcattccaaagccaaacaaattattctggctcatctctggcctctagcctctatcagtttctgctcactcttctgtggacttaagtaaaatacgaaaggacagatggaaactggcattcttaactcgtggccctggctgtgtgatctgaagcaaccttcccaaagcaagcctcggtgttctctcctccaaacttatggcaacataatactgagaagtatgatgtctgcatcatcagtctaatgca

SEQ ID NO: 1610 - DNA, 647 bp, Homo sapiens
ttcagaacgagcctgttctcagaccggcaaggtgggacccagtcccaactcaccattccactgtactggtgtagagaccaggagagacttaactaacgggaagtgacttggctaacatcatggggccagtgtgggcagacccagagctcatgcccaggccttctgatgacaaggccgggatgttacgtaggcgtcccttcaaagggaaccagtctcctccaacggtgcccatggtgaccgctccaggacaaacacactgtcagctgacccacatcctagatccttgacaacygagaaaaactaaagcagaacagagacaagccaggtgaaaagagcaacacaatgtgtgtgtgtgtgtgtgtgtgtgtgtgtgtgtgtgtgtgtgtgtgtgtgtattgcaattcattccaaagccaaacaaattattctggctcatctctggcctctagcctctatcagtttctgctcactcttctgtggacttaagtaaaatacgaaaggacagatggaaactggcattcttaactcgtggccctggctgtgtgatctgaagcaaccttcccaaagcaagcctcggtgttctctcctccaaacttatggcaacataatactgagaagtatgatgtctgcatcatcagtctaatgca

SEQ ID NO: 1611 - DNA, 647 bp, Homo sapiens
ttcagaacgagcctgttctcagaccggcaaggtgggacccagtcccaactcaccattccactgtactggtgtagagaccaggagagacttaactaacgggaagtgacttggctaacatcatggggccagtgtgggcagacccagagctcatgcccaggccttctgatgacaaggccgggatgttacgtaggcgtcccttcaaagggaaccagtctcctccaacggtgcccatggtgaccgctccaggacaaacacactgtcagctgacccacatcctagatccttgacaactgagaaaaactaaagcagaacagagacaagccaggtgaaaagagcaacacaatgtrtgtgtgtgtgtgtgtgtgtgtgtgtgtgtgtgtgtgtgtgtgtgtgtattgcaattcattccaaagccaaacaaattattctggctcatctctggcctctagcctctatcagtttctgctcactcttctgtggacttaagtaaaatacgaaaggacagatggaaactggcattcttaactcgtggccctggctgtgtgatctgaagcaaccttcccaaagcaagcctcggtgttctctcctccaaacttatggcaacataatactgagaagtatgatgtctgcatcatcagtctaatgca

SEQ ID NO: 1612 - DNA, 647 bp, Homo sapiens
ttcagaacgagcctgttctcagaccggcaaggtgggacccagtcccaactcaccattccactgtactggtgtagagaccaggagagacttaactaacgggaagtgacttggctaacatcatggggccagtgtgggcagacccagagctcatgcccaggccttctgatgacaaggccgggatgttacgtaggcgtcccttcaaagggaaccagtctcctccaacggtgcccatggtgaccgctccaggacaaacacactgtcagctgacccacatcctagatccttgacaactgagaaaaactaaagcagaacagagacaagccaggtgaaaagagcaacacaatgtgtgtgtgtgtgtgtgtgtgtgtgtgtgtgtgtgtgtgtgtgtgtgtgtattgcaattcattccaaagccaaacaaattattcyggctcatctctggcctctagcctctatcagtttctgctcactcttctgtggacttaagtaaaatacgaaaggacagatggaaactggcattcttaactcgtggccctggctgtgtgatctgaagcaaccttcccaaagcaagcctcggtgttctctcctccaaacttatggcaacataatactgagaagtatgatgtctgcatcatcagtctaatgca

SEQ ID NO: 1613 - DNA, 1238 bp, Homo sapiens
atgcatgtcagccttcactgttggggccacttgaccttgcctgcagctgacccctccctccaggtcctgggacacacccctccctccaggtcctgttctaggtgctcaatcrtcacggaaccagtcctggtatcactctcaggatggcctcaggagcacatttctctggtaactgagctcttgcagaacctcttatgagtgactaacttaaaaagtatgccttcaagcaacttcttgggacccaggctggtccctgtcacagctgacaggaatcttcttcctggcctctgcccacagcacctctgcctgctttcctccgtgaagttgcgcccacggtggaggcagtggagggacctaggacttcccagcttcttctgaaagaggttcagggaccgtcccatcactgagaagcaaagtggacaccacagatgtgagaaagttctaaagatttatttcctactgcctttggagctgccaatcagaagttcttcaaatgtgtgcttttggtttttattctcgtaagacgttaagaactgttgcctactctgccccatttcctttttatgcctgtttttagacaaaggacttaatgaaccacttccttcaataaagctcctctttctatctagtgacttgggtgacattaagatgggataacaggcaccccctgggggttcaagcctctttccaaggagctccaaacgacgagatgctcatctctgtgggctcagtccctcacagcctttagggcttttccaccttgtgggagatacattgggtagccaacacataacccatgaccaggcccctttgcctttgccctgttccatgatggggtccactgtagaggcttccgttgcagctaagggtagcccagtgacacatttgggctgaagtcagatagggagcttctggaaaagcccttgcttttctgattaaaggaagataaaaagacatcactggtgctctcatatttcacccttccgttgcttcctgccttgaatacaggtgtaatgcctggtgcttgggcagccagattaaaaccatgaggcaacaagcctgcacgctaaggattgtttgggggcagggggacagcagtggagagagtgaaaagaaccagcagctaagagacacaaatcctaaagctcaaagcctgtcccagatacaatctttgcagtgattcacacaggaaatgttaccgaaagtattcctaactgataaatagctcgcgagatgca

SEQ ID NO: 1614 - DNA, 1238 bp, Homo sapiens
atgcatgtcagccttcactgttggggccacttgaccttgcctgcagctgacccctccctccaggtcctgggacacacccctccctccaggtcctgttctaggtgctcaatcgtcacggaaccagtcctggtatcactctcaggatggcctcaggagcacatttctctggtaactgagctcttgcagaacctcttatgagtgactaacttaaaaagtatgccttcaagcaacttcttgggacccaggctggtccctgtcacagctgacaggaatcttcttcctggcctctgcccacagcacctctgcctgctttcctccgtgaagttgcgcccacggtggaggcagtggagggacctaggacttcccagcttcttctgaaagaggttcagggaccgtcccatcactgagaagcaaagtggacaccacagatgtgagaaagttctaaagatttatttcctactgcctttggagctgccaatcagaagttcttcaaatgtgtgcttttggtttttattctcgtaagacgttaagaactgttgcctactctgccccatttcctttttatgcctgtttttagacaaaggacttaatgaaccacttccttcaataaagctcctctttctatctagtgacttgggtgacattaagatgggataacaggcaccccctgggggttcaagcctctttccaaggagctccaaacracgagatgctcatctctgtgggctcagtccctcacagcctttagggcttttccaccttgtgggagatacattgggtagccaacacataacccatgaccaggcccctttgcctttgccctgttccatgatggggtccactgtagaggcttccgttgcagctaagggtagcccagtgacacatttgggctgaagtcagatagggagcttctggaaaagcccttgcttttctgattaaaggaagataaaaagacatcactggtgctctcatatttcacccttccgttgcttcctgccttgaatacaggtgtaatgcctggtgcttgggcagccagattaaaaccatgaggcaacaagcctgcacgctaaggattgtttgggggcagggggacagcagtggagagagtgaaaagaaccagcagctaagagacacaaatcctaaagctcaaagcctgtcccagatacaatctttgcagtgattcacacaggaaatgttaccgaaagtattcctaactgataaatagctcgcgagatgca

SEQ ID NO: 1615 - DNA, 480 bp, Homo sapiens
aggtgcccgccaccatgcccagctgattttttgtatttttagtagagacgaggtttcaccatgttggccaggctagtctcaaattcctgacctcaggcgatccacctgcctcggcctcccaaaatgctgggattacaggcgtgagctactgcgtctggccgagaataaaaatattttaataaagatctgggtttttttagcctaatggccagtcagacactgacattgcwtgagaaacaacttttgattccttctctgacatgattctctatgcaaatcatgatgcctttgggcagcttgggacatggggcagacattcaagcataaagggacattttcatgaggctgctgtctgccacttgtgccaggtattttccagcagagtcaaagagatgctctcctggccacatggatacaggtggcatataagatcctgctttcatagccccacctgctccactccgtccctcagagccgcca

SEQ ID NO: 1616 - DNA, 480 bp, Homo sapiens
aggtgcccgccaccatgcccagctgattttttgtatttttagtagagacgaggtttcaccatgttggccaggctagtctcaaattcctgacctcaggcgatccacctgcctcggcctcccaaaatgctgggattacaggcgtgagctactgcgtctggccgagaataaaaatattttaataaagatctgggtttttttagcctaatggccagtcagacactgacattgcttgagaaacaacytttgattccttctctgacatgattctctatgcaaatcatgatgcctttgggcagcttgggacatggggcagacattcaagcataaagggacattttcatgaggctgctgtctgccacttgtgccaggtattttccagcagagtcaaagagatgctctcctggccacatggatacaggtggcatataagatcctgctttcatagccccacctgctccactccgtccctcagagccgcca

SEQ ID NO: 1617 - DNA, 540 bp, Homo sapiens
tgtgtgcaggctcaacctgtcctcttctgcaccagcaaagctggacttttttttttttttttttccaagcttgagaaaagtcattaggcattgacaaggctgtgtcaggcctgagtgccagccatggtttcctgcttccccatttagccaggtgagggtcaagagaatctgtttagggtatgagtcaagatagtgagccatagtcagctaggttcytctggttacttttattattaagtcattttgacagcagaattaaggaagatggaaaaaatactacccacggttgagtgcgagtctgtgaagtctttggccatttgtatgtatggtattgccatggttgcaatcatgagtatgtaatataggactcttacccctggcgtttgtgtgtttgtctgttgcatagtgctgcctcgctattttaatgcctcccctggcccatcatgtgaatgctggcctgcataactgtgccctacggtgttgggctcactgcatagttccacttctccctactgtgagaaacacagctctaaacacctc

SEQ ID NO: 1618 - DNA, 540 bp, Homo sapiens
tgtgtgcaggctcaacctgtcctcttctgcaccagcaaagctggacttttttttttttttttttccaagcttgagaaaagtcattaggcattgacaaggctgtgtcaggcctgagtgccagccatggtttcctgcttccccatttagccaggtgagggtcaagagaatctgtttagggtatgagtcaagatagtgagccatagtcagctaggttcctctggttacttttattattaagtcattttgacagcagaattaaggaagatggaaaaaatactacccacggttgagtgcgagtcygtgaagtctttggccatttgtatgtatggtattgccatggttgcaatcatgagtatgtaatataggactcttacccctggcgtttgtgtgtttgtctgttgcatagtgctgcctcgctattttaatgcctcccctggcccatcatgtgaatgctggcctgcataactgtgccctacggtgttgggctcactgcatagttccacttctccctactgtgagaaacacagctctaaacacctc

SEQ ID NO: 1619 - DNA, 635 bp, Homo sapiens
tgcctgtgtccttgttcttggaaatgtgctggagcataggcaggaaagtttcaaagtccatcatcttggtattgagctctgcagagaaatggtcccaggttccagggtctaaggctggggtgggcacacccctcccccatgcctgataatgaggagctatccccacctctcacacagttctacaacagtctacaccagttctcacagcagtctacaccagtttgccatttaaaagcaaactaccatcgcgaggcactttacagtctactgagcaatgcactgtttccatagccctttgctattcacaaagggagtttgctgccctgagccaccayggagggctctgtccagaaccccttgcctacttttgggaaacagtcctcccctcgtggcattttcttatagacctcaccctccaccacctgtgattgggtcaggagcagctaggccaatcagagaccttccctgggacttttgaacccttggtgggggcttgggcctcactcctttttttttttttagctttaaaattttattcatttatgtatttattcattcatttatttatttttagacacgaggtcttcttgttatgtcacacagactggagtacagtggtgtgattatagctcact

SEQ ID NO: 1620 - DNA, 2308 bp, Homo sapiens
ggctacaatcaagcttctgagttatttcagaatctgctatgggatcgatgttggcaagcctgactcagtgacaccaatgtgtgagacttccagcataaggacagagttactcccagacctcagctcagaggggccagagctgagattcaaggcctcttcaggaactgctctgggacaggctggcaagcctggccaggatagtagtccctgcataagaaaattaactctggggatgtggcagggtggctggggccaagagagggtcatttcrggatctactataggacagaggccagcaagcccgtcctggtgcatcaggtaggcaaatctccttcttggtctatgcgcaagcagtacaaagctgggaccacagctcaggagggctgtagcctatttacagggtaactttcaggtccactgcagagacagatgtcagcaagaagacaggcctgtctctcaaggaactagcgtgtgtgattcttcccagatcccttagcagatggttttggtagttgtctcaaggccaaatggggctgtagccaaactctttggaaaatgaggttgtttctgggtccaaaattgggagcataactggagggcctgccacctaggtgcagatctgcactctcaaaccaatcctcttagatctttggctcaaaagagaagttttacaaccccgtacatgaatcccaaatctcccacaaagagacttttgtttgtagatgggtgcagaattcatgttgccctggggggatacaagggggtaacctcctattccaccatcttgctgatatcactgatttattaataaaatgttaaacagctgaaaaaacttagacacagggagataaagtaacttgcctaaggtcacgcaactgataggtggaagtagtgggatctaaacctaggtggtcagactttcatatgcacactgttgatcattacattcgactgtttctcaggcttagtttttaggaatgagacttctaagactctaagacatgtaaatatatttttccacgttgtatgtaattatgaaaaagttgacgtttatagtttatgtaatagaggagaagtttctttcatttgtttatgtaactctgttgagccacatatgcatgcaatcatttactcacacaaaaattatttgttgagaatatatactaaatattggtaacaaaaatacaaaacacagttatttccttcaagttacagtctaatatgtgaggcaaaaattccaaataataaaatactctaagtgatattatagaataaaatgaaattctatgggagcacataagaaggatacctatggcagattggaaagacagagacttccagagagtagtagtgatgcctgagctctgtctttaaggatgggtaggagttgatgaagcaaataattgtgggaaaggcattccagctggagaaaagccattactggggaacttcaagtaaataaaacagtgcatctagagttcaatatttaataggggcagggggtagagatactgaaagatgaacatgaagaattaagtaggataaaatcaaagaggcttgtatgtgttatacaaagagcttgagtgttgatgtgaaggaaatgagaaatccctacagatttttagcaaaggaatgacctaatagaacttgtactaatgagttaaaacggaagttgagaatggatgaagaaagcagtaggtatagttcagatagaaaatgataaagcctaaagtaaaagaaatggtagttccagtggtaatgggtagagacttgattagatgaaattctcttcctatggaggaaagaaactttgattctccggctatggaaggttaatatgttagttccagatttctggtcatctgtgtcttcttacctgaaaagaagctagtctatggtagaagataatagccccaacatccagaaacaaactgaagacagagatgaacagaaaccttgtccaaatgttactagcaaattgctttctacataagcaaatttgtacttttttttctttttttacttgtagcccagagtccttgaataatacaagcagaaaaaaattcaacatctgctttcagaccaagaattatgataaaacctgatgctatggaaaccacaacttattattctttccccgccacttacctgataagtttcagttgtcaatatttccaaatagacaaagggtgtttcaccagagataatgtctttggtgtttgtgtctttttagcttgtcccattagctgccttttcccagtttttgtggtcaaataacatattcatttattcagcaattctttattaa

SEQ ID NO: 1621 - DNA, 2308 bp, Homo sapiens
ggctacaatcaagcttctgagttatttcagaatctgctatgggatcgatgttggcaagcctgactcagtgacaccaatgtgtgagacttccagcataaggacagagttactcccagacctcagctcagaggggccagagctgagattcaaggcctcttcaggaactgctctgggacaggctggcaagcctggccaggatagtagtccctgcataagaaaattaactctggggatgtggcagggtggctggggccaagagagggtcatttcaggatctactataggacagaggccagcaagcccgtcctggtgcatcaggtaggcaaatctccttcttggtctatgcgcaagcagtacaaagctgggaccacagctcaggagggctgtagcctatttacagggtaactttcaggtccactgcagagacagatgtcagcaagaagacaggcctgtctctcaaggaactagcgtgtgtgattcttcccagatcccttagcagatggttttggtagttgtctcaaggccaaatggggctgtagccaaactctttggaaaatgaggttgtttctgggtccaaaattgggagcataactggagggcctgccacctaggtgcagatctgcactctcaaaccaatcctcttagatctttggctcaaaagagaagttttacaaccccgtacatgaatcccaaatctcccacaaagagacttttgtttgtagatgggtgcagaattcatgttgccctggggggatacaagggggtaacctcctattccaccatcttgctgatatcactgatttattaataaaatgttaaacagctgaaaaaacttagacacagggagataaagtaacttgcctaaggtcacgcaactgataggtggaagtagtgggatctaaacctaggtggtcagactttcatatgcacactgttgatcattacattcgactgtttctcaggcttagtttttaggaatgagacttctaagactctaagacatgtaaatatatttttccacgttgtatgtaattatgaaaaagttgacgtttatagtttatgtaatagaggagaagtttctttcatttgtttatgtaactctgttgagccacatatgcatgcaatcatttactcacacaaaaattatttgttgagaatatatactaaatattggtaayaaaaatacaaaacacagttatttccttcaagttacagtctaatatgtgaggcaaaaattccaaataataaaatactctaagtgatattatagaataaaatgaaattctatgggagcacataagaaggatacctatggcagattggaaagacagagacttccagagagtagtagtgatgcctgagctctgtctttaaggatgggtaggagttgatgaagcaaataattgtgggaaaggcattccagctggagaaaagccattactggggaacttcaagtaaataaaacagtgcatctagagttcaatatttaataggggcagggggtagagatactgaaagatgaacatgaagaattaagtaggataaaatcaaagaggcttgtatgtgttatacaaagagcttgagtgttgatgtgaaggaaatgagaaatccctacagatttttagcaaaggaatgacctaatagaacttgtactaatgagttaaaacggaagttgagaatggatgaagaaagcagtaggtatagttcagatagaaaatgataaagcctaaagtaaaagaaatggtagttccagtggtaatgggtagagacttgattagatgaaattctcttcctatggaggaaagaaactttgattctccggctatggaaggttaatatgttagttccagatttctggtcatctgtgtcttcttacctgaaaagaagctagtctatggtagaagataatagccccaacatccagaaacaaactgaagacagagatgaacagaaaccttgtccaaatgttactagcaaattgctttctacataagcaaatttgtacttttttttctttttttacttgtagcccagagtccttgaataatacaagcagaaaaaaattcaacatctgctttcagaccaagaattatgataaaacctgatgctatggaaaccacaacttattattctttccccgccacttacctgataagtttcagttgtcaatatttccaaatagacaaagggtgtttcaccagagataatgtctttggtgtttgtgtctttttagcttgtcccattagctgccttttcccagtttttgtggtcaaataacatattcatttattcagcaattctttattaa

SEQ ID NO: 1622 - DNA, 2308 bp, Homo sapiens
ggctacaatcaagcttctgagttatttcagaatctgctatgggatcgatgttggcaagcctgactcagtgacaccaatgtgtgagacttccagcataaggacagagttactcccagacctcagctcagaggggccagagctgagattcaaggcctcttcaggaactgctctgggacaggctggcaagcctggccaggatagtagtccctgcataagaaaattaactctggggatgtggcagggtggctggggccaagagagggtcatttcaggatctactataggacagaggccagcaagcccgtcctggtgcatcaggtaggcaaatctccttcttggtctatgcgcaagcagtacaaagctgggaccacagctcaggagggctgtagcctatttacagggtaactttcaggtccactgcagagacagatgtcagcaagaagacaggcctgtctctcaaggaactagcgtgtgtgattcttcccagatcccttagcagatggttttggtagttgtctcaaggccaaatggggctgtagccaaactctttggaaaatgaggttgtttctgggtccaaaattgggagcataactggagggcctgccacctaggtgcagatctgcactctcaaaccaatcctcttagatctttggctcaaaagagaagttttacaaccccgtacatgaatcccaaatctcccacaaagagacttttgtttgtagatgggtgcagaattcatgttgccctggggggatacaagggggtaacctcctattccaccatcttgctgatatcactgatttattaataaaatgttaaacagctgaaaaaacttagacacagggagataaagtaacttgcctaaggtcacgcaactgataggtggaagtagtgggatctaaacctaggtggtcagactttcatatgcacactgttgatcattacattcgactgtttctcaggcttagtttttaggaatgagacttctaagactctaagacatgtaaatatatttttccacgttgtatgtaattatgaaaaagttgacgtttatagtttatgtaatagaggagaagtttctttcatttgtttatgtaactctgttgagccacatatgcatgcaatcatttactcacacaaaaattatttgttgagaatatatactaaatattggtaacaaaaatacaaaacacagttatttccttcaagttacagtctaatatgtgaggcaaaaattccaaataataaaatactctaagtgatattatagaataaaatgaaattctatgggagcacataagaaggatacctatggcagattggaaagacagagacttccagagagtagtagtgatgcctgagctctgtctttaaggatgggtaggagttgatgaagcaaataattgtgggaaaggcattccagctggagaaaagccattactggggaacttcaagtaaataaaacagtgcatctagagttcaatatttaataggggcagggggtagagatactgaaagatgaacatgaagaattaagtaggataaaatcaaagaggcttgtatgtgttatacaaagagcttgagtgttgatgtgaaggaaatgagaaatccctacagatttttagcaaaggaatgacctaatagaacttgtactaatgagttaaaacggaagttgagaatggatgaagaaagcagtaggtatagttcagatagaaaatgataaagcctaaagtaaaagaaatggtagttccagtggtaatgggtagagacttgattagatgaaattctcttcctatggaggaaagaaactttgattctccggctatggaaggttaatatgttagttccagatttctggtcatctgtgtcttcttacctgaaaagaagctagtctatggtagaagataatagccccaacatccagaaacaaactgaagacagagatgaacagaaaccttgtccaaatgttactagcaaattgctttctacataagcaaatttgtrcttttttttctttttttacttgtagcccagagtccttgaataatacaagcagaaaaaaattcaacatctgctttcagaccaagaattatgataaaacctgatgctatggaaaccacaacttattattctttccccgccacttacctgataagtttcagttgtcaatatttccaaatagacaaagggtgtttcaccagagataatgtctttggtgtttgtgtctttttagcttgtcccattagctgccttttcccagtttttgtggtcaaataacatattcatttattcagcaattctttattaa

SEQ ID NO: 1623 - DNA, 612 bp, Homo sapiens
tttggcaccgtctgatattatgtttagcgtttccctgtcttgtctatacattcagcacctgaccataaatatactactgtttgatagagtttggctgtgtccccatcctaatctcatcttgaactgtagttcccataatccccatgtgttataggcacctggtgggaggtaactgtatcatgggagcagttttttcccctgctgttctcattctggtgaataagtttcatgagatctgatggttttataaagggcagttccctcgcacacgctgtcttacctgctgccacgtaacatgtgcttttgctcttccttcacctttgccatgaytgtgagcctccccagccatgtggaactgtgagtccattaaacctctttttctttagaaattacccagtcttaggtaaggtctttgtagcagtatgaaaatggactaatacactattttttcaagaatcatttcaaacatcatctttgtaaagcatcatctggtagcaatatgtcctctcagtctgaaatataatctatgtctgcctcctgcaccacttgtatgtgacccttgggacccactcatgacatgtcctgtcttacaagtcaggccctcatctcttg

SEQ ID NO: 1624 - DNA, 612 bp, Homo sapiens
tttggcaccgtctgatattatgtttagcgtttccctgtcttgtctatacattcagcacctgaccataaatatactactgtttgatagagtttggctgtgtccccatcctaatctcatcttgaactgtagttcccataatccccatgtgttataggcacctggtgggaggtaactgtatcatgggagcagttttttcccctgctgttctcattctggtgaataagtttcatgagatctgatggttttataaagggcagttccctcgcacacgctgtcttacctgctgccacgtaacatgtgcttttgctcttccttcacctttgccatgactgtgagcctccccagccatgtggaactgtgagtccattaaacctctttttctttagaaattacccagtcttaggtaaggtctttgtagcagtatgaaaatggactaatacactattttttcaagaatcatttcaaacatcatctttgtaaagcatcatctggtagcaatatgtcctctcagtctgaaatataatctatgtctgcctcctgyaccacttgtatgtgacccttgggacccactcatgacatgtcctgtcttacaagtcaggccctcatctcttg

SEQ ID NO: 1625 - DNA, 896 bp, Homo sapiens
  misc_feature (1)...(896): n = A,T,C or G
catttttctaaggaaaagccaaacttcataattttttgaatggaattaataaaaaccaattaatcatggctatgyctacagtgccatgttcaacaacagatgcttcccatagtaattaggttggaataataacaggagaggaaacgcccagtcattcgtactgctaagagtgctgacaagactgtttcatcaataaaaccactgggagaggagttcttagcatccagggctggcaatgatttaccgtgtgcctttagtggagccattccaacttcctgcctcagtttcctcaacaaacaataaaggaatggcatagttccttcggtttgtttgtnttggttntttntnttttgagatggagtttcgctctttttgcccaggctggagtgggatggcacgatctcggctcaccgcaacctccgcctcccgggttcaagtgattctcctgcctcagcctccggagtagctgggattataggcatgcaccaccacgcccggctaattttgtatttttagtagagacggggtttctccactttggtcaggctgctctcggactccctacctcaggtgatccacctgcctcagcctcccaaagtgctaggattacaggcatgggccaccgcacccggcccatagtgccatttttaatttgaccacaaaacaactatttgggaaaaattggtctgcaaaagggtggagacaatgtgacagttcccttgtaaatggcctgcattttccttatttaactgttatcctttggatcctagatatacaaatccgtcccctgagcaacctcgggttatttatacacattttggctgctgtctgtagttcattgagctcctttgtgtttccatcttttatcacatagagacagtaataatgatacagag

SEQ ID NO: 1626 - DNA, 896 bp, Homo sapiens
  misc_feature (1)...(896): n = A,T,C or G
catttttctaaggaaaagccaaacttcataattttttgaatggaattaataaaaaccaattaatcatggctatgcctacagtgccatgttcaacaacagatgcttcccatagtaattaggttggaataataacaggagaggaaaygcccagtcattcgtactgctaagagtgctgacaagactgtttcatcaataaaaccactgggagaggagttcttagcatccagggctggcaatgatttaccgtgtgcctttagtggagccattccaacttcctgcctcagtttcctcaacaaacaataaaggaatggcatagttccttcggtttgtttgtnttggttntttntnttttgagatggagtttcgctctttttgcccaggctggagtgggatggcacgatctcggctcaccgcaacctccgcctcccgggttcaagtgattctcctgcctcagcctccggagtagctgggattataggcatgcaccaccacgcccggctaattttgtatttttagtagagacggggtttctccactttggtcaggctgctctcggactccctacctcaggtgatccacctgcctcagcctcccaaagtgctaggattacaggcatgggccaccgcacccggcccatagtgccatttttaatttgaccacaaaacaactatttgggaaaaattggtctgcaaaagggtggagacaatgtgacagttcccttgtaaatggcctgcattttccttatttaactgttatcctttggatcctagatatacaaatccgtcccctgagcaacctcgggttatttatacacattttggctgctgtctgtagttcattgagctcctttgtgtttccatcttttatcacatagagacagtaataatgatacagag

SEQ ID NO: 1627 - DNA, 488 bp, Homo sapiens
ctcaacaagaagtatatgttccataacccagttttttgatgtaggaaactcttgtttcttttctgacaatctgtcacctattaaaaaaaaaaaaaagagcaacaygcactgtttgcattgttaaacttaaaacaagtccagaggaaaatgtgccttggaaatccttcactgacttgtttttgtagaacagctggaggtgaggcccaccatactaatcacgtccagttgctgctggtcaagttgcacattcaggaaattcataattaggtggttatatcccctcagtttaccccaaagaactctttatgactctcgatttatctttttccttgttattcaaaagaaccaaaaaataaaggtgacatgagagggaaaaagacattaaaattgaattgtagtgttacctgtaaaagaaaccacattgtcttgactgccaccccctcttaaaaataaaaatagtcacagcatgtatatagcttagtatgtgt

SEQ ID NO: 1628 - DNA, 1168 bp, Homo sapiens
  misc_feature (1)...(1168): n = A,T,C or G
tgcatattttacctatttgaaattatattgaaatataatttctgactttcttccatgttaacatgacaacaaaagaatttcccatcttttaaaattcctcaacaaatagcattttgatggctrcatggtggtgtgtctagaagaactatcgttttcttaatattttctctattattgaacattaatggtgagacatcagatataaatattctgtggtcagctaacaattactgttggcactgtgtgtgtgtgtgtgtgtgtgtgtgtgtgtgtgtgtgtgttgtggcagttgttggtagaaggtttgagctgagggaaaatatgctatatctccccccatctcaatttaaataggttttaaattaatccttggctcattctgtgacctcaaccctgatactaagctaagagtgagggaggggatggagctaagaagagctagagcttgaggaaaaatgagatacaagaaaagtatatgagaggagagagatgcaccaggngaaagaataaagttgaatagagggaaagaaagaaagatggtagagaatacaaagaaatatttagccaattatttctctatgacttgccaaggtggccaggatggaattatgctttcagaatatggcattcagtttgctatccatatcatttccttatcccaaactcaactcaactgttttgcagaagcatgtgaaagtatgtgtgacatactccctcttctgatatgggtaattgtagcatttaagaagctggccttattgcaaaaaaataaaataaaataaaataaaataaaaaatctgtgttctgttgcaaaactctggaattagatttcctgctgccctttcaccttctcaattgcctggtataccacagccatctttgtgatggcaatcctgaatccttggccttaaaccagccatgctcccctggggctgcacacagcagtactctgaaattcctacttactagctccttcaacaggactgatgctgaaaggttttgcctctgctttcagcattcattacattccttataaatgaaacatgaatgtaattcatatttcttctagggagagaagttttagaggcttcatttattcattcaacaaatatttatagggtcccttctgcactaaaataccatggcaggcactgtgtgggatacagag

SEQ ID NO: 1629 - DNA, 1168 bp, Homo sapiens
  misc_feature (1)...(1168): n = A,T,C or G
tgcatattttacctatttgaaattatattgaaatataatttctgactttcttccatgttaacatgacaacaaaagaatttcccatcttttaaaattcctcaacaaatagcattttgatggctgcatggtggtgtgtctagaagaactatcgttttcttaatattttctctattattgaacattaatggtgagacatcagatataaatattctgtggtcagctaacaattactgttggcactgtgtgtgtgtgtgtgtgtgtgtgtgtgtgtgtgtgtgtgttgtggcagttgttggtagaaggtttgagctgagggaaaatatgctatatctccccccatctcaatttaaataggttttaaattaatccttggctcattctgtgacctcaaccctgatactaagctaagagkgagggaggggatggagctaagaagagctagagcttgaggaaaaatgagatacaagaaaagtatatgagaggagagagatgcaccaggngaaagaataaagttgaatagagggaaagaaagaaagatggtagagaatacaaagaaatatttagccaattatttctctatgacttgccaaggtggccaggatggaattatgctttcagaatatggcattcagtttgctatccatatcatttccttatcccaaactcaactcaactgttttgcagaagcatgtgaaagtatgtgtgacatactccctcttctgatatgggtaattgtagcatttaagaagctggccttattgcaaaaaaataaaataaaataaaataaaataaaaaatctgtgttctgttgcaaaactctggaattagatttcctgctgccctttcaccttctcaattgcctggtataccacagccatctttgtgatggcaatcctgaatccttggccttaaaccagccatgctcccctggggctgcacacagcagtactctgaaattcctacttactagctccttcaacaggactgatgctgaaaggttttgcctctgctttcagcattcattacattccttataaatgaaacatgaatgtaattcatatttcttctagggagagaagttttagaggcttcatttattcattcaacaaatatttatagggtcccttctgcactaaaataccatggcaggcactgtgtgggatacagag

SEQ ID NO: 1630 - DNA, 1168 bp, Homo sapiens
  misc_feature (1)...(1168): n = A,T,C or G
tgcatattttacctatttgaaattatattgaaatataatttctgactttcttccatgttaacatgacaacaaaagaatttcccatcttttaaaattcctcaacaaatagcattttgatggctgcatggtggtgtgtctagaagaactatcgttttcttaatattttctctattattgaacattaatggtgagacatcagatataaatattctgtggtcagctaacaattactgttggcactgtgtgtgtgtgtgtgtgtgtgtgtgtgtgtgtgtgtgtgttgtggcagttgttggtagaaggtttgagctgagggaaaatatgctatatctccccccatctcaatttaaataggttttaaattaatccttggctcattctgtgacctcaaccctgatactaagctaagagtgagggaggggatggagctaagaagagctagagcttgaggaaaaatgagatacaagaaaagtatatgagaggagagagatgcaccaggngaaagaatraagttgaatagagggaaagaaagaaagatggtagagaatacaaagaaatatttagccaattatttctctatgacttgccaaggtggccaggatggaattatgctttcagaatatggcattcagtttgctatccatatcatttccttatcccaaactcaactcaactgttttgcagaagcatgtgaaagtatgtgtgacatactccctcttctgatatgggtaattgtagcatttaagaagctggccttattgcaaaaaaataaaataaaataaaataaaataaaaaatctgtgttctgttgcaaaactctggaattagatttcctgctgccctttcaccttctcaattgcctggtataccacagccatctttgtgatggcaatcctgaatccttggccttaaaccagccatgctcccctggggctgcacacagcagtactctgaaattcctacttactagctccttcaacaggactgatgctgaaaggttttgcctctgctttcagcattcattacattccttataaatgaaacatgaatgtaattcatatttcttctagggagagaagttttagaggcttcatttattcattcaacaaatatttatagggtcccttctgcactaaaataccatggcaggcactgtgtgggatacagag

SEQ ID NO: 1631 - DNA, 1127 bp, Homo sapiens
actgcttcttttcattccatctgctgtgatgtttcatttaaaatgaaattattgttaagcattattctatctctatascttctgtttctaaaactatatgttctgtagagatagaaacaaggttttgaaaagaagggaattatacttcattctgaaatatctgagtctttaagtgtattctgaaattcacaaagtcatcagaaggaataggtgaaaattagacacataattacttatagtttggcttctacagtaaaatgtcattgaaaatgtagaattatgtaaataagtatattaggcatataatgtgtatatgtaaatgtatttataaattaataatgtgtctatctcatgattccatattagttttatatttatctttctaatatttattttccttaataaaaccatctagaaattaaaataaatcaccttttttatgagtatgattatccatacctaattttccatcatgggtcttgttgtatgtcagtgaaaagttgatatgtttactatatgaataggataaaacaggtaaagatgacaacgtttattttatcagccatacacaaaaaacagaaactagcttttctaagcactgaagcaatatacccccaggttttttatgcagaatgcaagttttcatagaatgttagctgatataacacactataaagcattctgtggtcaaatttggggaaggttagattaaacaaggttcaaacaggtttattacaggtcatatcagagcctgtgatatgctaattcacacataaagaaaaaatacagcttgtgcatttccaacacgtatgatcatggattcctttttttttttcacaattttcttacaaaactagtgtttgtgtaaattaatttaaaaatttttgatttccaggatagccacattagtgttttcaacatactaagtctaaaattataatttaaattttagctatgattccagttaagaagcacaaatgaaagcagagatagaatcattatacttttttctactgttattaaaaaatttccaagtaaattatagttaaatagttcacatcaaaaagccatttatatcatctttggttttggatattatggaactgtgctctcctagtttgcataat

SEQ ID NO: 1632 - DNA, 1127 bp, Homo sapiens
actgcttcttttcattccatctgctgtgatgtttcatttaaaatgaaattattgttaagcattattctatctctatagcttctgtttctaaaactatatgttctgtagagatagaaacaaggttttgaaaagaagggaattatacttcattctgaaatatctgagtctttaagtgtattctgaaattcacaaagtcatcagaaggaataggtgaaaattagacacataattacttatagtttggcttctacagtaaaatgtcattgaaaatgtagaattatgtaaataartatattaggcatataatgtgtatatgtaaatgtatttataaattaataatgtgtctatctcatgattccatattagttttatatttatctttctaatatttattttccttaataaaaccatctagaaattaaaataaatcaccttttttatgagtatgattatccatacctaattttccatcatgggtcttgttgtatgtcagtgaaaagttgatatgtttactatatgaataggataaaacaggtaaagatgacaacgtttattttatcagccatacacaaaaaacagaaactagcttttctaagcactgaagcaatatacccccaggttttttatgcagaatgcaagttttcatagaatgttagctgatataacacactataaagcattctgtggtcaaatttggggaaggttagattaaacaaggttcaaacaggtttattacaggtcatatcagagcctgtgatatgctaattcacacataaagaaaaaatacagcttgtgcatttccaacacgtatgatcatggattcctttttttttttcacaattttcttacaaaactagtgtttgtgtaaattaatttaaaaatttttgatttccaggatagccacattagtgttttcaacatactaagtctaaaattataatttaaattttagctatgattccagttaagaagcacaaatgaaagcagagatagaatcattatacttttttctactgttattaaaaaatttccaagtaaattatagttaaatagttcacatcaaaaagccatttatatcatctttggttttggatattatggaactgtgctctcctagtttgcataat

SEQ ID NO: 1633 - DNA, 1127 bp, Homo sapiens
actgcttcttttcattccatctgctgtgatgtttcatttaaaatgaaattattgttaagcattattctatctctatagcttctgtttctaaaactatatgttctgtagagatagaaacaaggttttgaaaagaagggaattatacttcattctgaaatatctgagtctttaagtgtattctgaaattcacaaagtcatcagaaggaataggtgaaaattagacacataattacttatagtttggcttctacagtaaaatgtcattgaaaatgtagaattatgtaaataagtatattaggcatataatgtgtatatgtaaatgtatttataaattaataatgtgtctatctcatgattccatattagttttatatttatctttctaatatttattttccttaataaaaccatctagaaattaaaataaatcaccttttttatgagtatgattatccatacctaattttccatcatgggtcttgttgtatgtcagtgaaaagttgatatgtttactatatgaataggataaaacaggtaaagatgacaacgtttattttatcagccatacacaaaaaacagaaactagcttttctaagcactgaagcaatatacccccaggttttttatgcagaatgcaagttttcatagaatgttagctgatataacacactataaagcattctgtggtcaaatttggggaaggttagattaaacaaggttcaaacaggtttattacaggtcatatcagagcctgtgatatgctaattcacacataaagaaaaaatacagcttgtgcatttccaacacgtatgatcatggattcctttttttttttcacaattttcttacaaaactagtgtttgtgtaaattaatttaaaaatttttgatttccaggatagccacattagtgttttcaacatactaaktctaaaattataatttaaattttagctatgattccagttaagaagcacaaatgaaagcagagatagaatcattatacttttttctactgttattaaaaaatttccaagtaaattatagttaaatagttcacatcaaaaagccatttatatcatctttggttttggatattatggaactgtgctctcctagtttgcataat

SEQ ID NO: 1634 - DNA, 513 bp, Homo sapiens
tttttttttkggctctactgagatggaccatatggttttggcagctattgagatgatcacagggcatttcttcattaatctgttaatatgcttaattacatgaatggattttccagtgttgagtcatccttgcgttcctgagaataaggtatgcctgttgcctgtgctggtcatgtggtcttgttcttttagaactgcactagattcaacttgttcccatattctttttttttttttctttttcagatggagtctcactttgtcacccaggttggagggcagttgcatgatctctgctcactgcaacctctgcctcccaagtttaagcaattctcctgcctcagcctctggagcagctgggattacaggctggtctcgagctcctgacctcaagtgatccccctgccttggcctcccaaagtgctgggatttcaggggtgagccactgtgcccagccgttactgtattctttctaagttttgtgtctgttttcaccagtgaactggtctaagg

SEQ ID NO: 1635 - DNA, 513 bp, Homo sapiens
tttttttttgggctctactgagatggaccatatggttttggcagctattgagatgatcacagggcatttcttcattaatctgttaatatgcttaattacrtgaatggattttccagtgttgagtcatccttgcgttcctgagaataaggtatgcctgttgcctgtgctggtcatgtggtcttgttcttttagaactgcactagattcaacttgttcccatattctttttttttttttctttttcagatggagtctcactttgtcacccaggttggagggcagttgcatgatctctgctcactgcaacctctgcctcccaagtttaagcaattctcctgcctcagcctctggagcagctgggattacaggctggtctcgagctcctgacctcaagtgatccccctgccttggcctcccaaagtgctgggatttcaggggtgagccactgtgcccagccgttactgtattctttctaagttttgtgtctgttttcaccagtgaactggtctaagg

SEQ ID NO: 1636 - DNA, 513 bp, Homo sapiens
tttttttttgggctctactgagatggaccatatggttttggcagctattgagatgatcacagggcatttcttcattaatctgttaatatgcttaattacatgaatggattttccagtgttgagtcatccttgcrttcctgagaataaggtatgcctgttgcctgtgctggtcatgtggtcttgttcttttagaactgcactagattcaacttgttcccatattctttttttttttttctttttcagatggagtctcactttgtcacccaggttggagggcagttgcatgatctctgctcactgcaacctctgcctcccaagtttaagcaattctcctgcctcagcctctggagcagctgggattacaggctggtctcgagctcctgacctcaagtgatccccctgccttggcctcccaaagtgctgggatttcaggggtgagccactgtgcccagccgttactgtattctttctaagttttgtgtctgttttcaccagtgaactggtctaagg

SEQ ID NO: 1637 - DNA, 612 bp, Homo sapiens
gagggacttgtgtgaatggagcagtcctcaaagatcccacggagggggtgagatgggarctaagccttcaagtagatacagtattggtagacttattaaatttagtgccttattaattcattgtctactatatgccaggtatggctaaaaggggagtgcaaaaaccaaatcaatcaccgacctaaaatgatcatgggaatttaacatgtgctctaaaactcagccctgtctgcccagtatttcctataattcaaaacatgtatagcaaaataaaaccagagtgaaataattaagaaatagtcactaatctgaaaacatatagtatagcggcaaaaaaaggagagcatccaatattctttttcttgcctgctatttcctttcatttctctctaaacatagttcaaaagtcctggcaaggagtgcaaattcagatggatagaaatgctgcccctttgtcactgcggaaggggtcccttcccctttgtctttcagcctggaggctgatggcacattaggcatggtcctctgtctcatgcaggcctcactgcttccctctcttccaaccactttctagcccccaccccaaagtcaacaagcagcaacacaggcatg

SEQ ID NO: 1638 - DNA, 716 bp, Homo sapiens
aagagtttgagactagcctggccaacatggtgaaacctcacctctatcaaaaatacaaaaattagccgggcatggtggtatgtgcctgtaatcccagctactcggaaggctgagacaggagaatcacttgaacccaggaggcagaggttgcagtgagctgagatcgcgccactgtactccagcctgggtgacagagtgagaccctgtcttggtgggaggtgggggagcggggggagggggaagaaaaaaagaaagatattttgaattctctcttatatgacttttgtgaatggccaaagtatcattctgtagtcaggaacaggctgactttttgagccagggcttcaagctgaacaggagaaagagacataagcatgaacaagacctatctctgcaagcagaggtcagccacttgacaaaggcagtgcaaaggggatggctttctccggaaatccctcgcttcagctactcatcctccacctcctgccaagtctaggttaggttyccctcagcagaatgtccttctctgttctagcactccccacactgtgttgtcattacctgtatatgtctgtgttcccaactagactttaagctctatgagggcaagggctgaatgtagcttgctcactattgaattacattgcctgacacattgctttgcacgcagtgagggtgaagtaaatatttgttcaatatataacggaatgattatg

SEQ ID NO: 1639 - DNA, 586 bp, Homo sapiens
ggtcaggcatggtggctcacacctgtacttccagcactgtgggaggccaaggtgcgtgaatcgtctgagctcaggagtttgagaccagcctgggcaatatggtgaaacctcatctcagtaaatacatacatacatacttacatacatacataaatgcaaaatccgattgaatggaatctgcatttttccagagtccccaggtgactcgtgtgcatgtgacagtttgaggaacgctggcctaagcctatttgatggctttctcttcagactgccctcccgtggccctcgttaaccgtctgagaactgactttatcagctgtacagagagcatggtcctcctatgattgttctgatgggttttgggattggacttgaccatctcatgttccgttctctggcagctgttccctaccagtcttgaaaacactcctctcctttgaatttcccacagcagcacatacaaattttactaaaggcttgggctggccgggcgcagtggcttacgcctgtaatcccagcactttgggaagctgaggcgggcagatcacaaggtcaggagttcgagactagcctggcyaacatggtg

SEQ ID NO: 1640 - DNA, 628 bp, Homo sapiens
gagtgtattaaatttgaagtcctgttttaaaatctgagattgtcatgattacattgttttggggttaaagtgtccaatcatctcccaccataaaatgatggtgacaataattcaggttgttttttaagtgtctgtgcttggcaaaatagaagtgagcagtcctatgttagtctctcaaaaggttttcaaaattttaatggtttgttaaattccaaagattgggaaccattcctccagacaccatccctttgaaaatactgaaatagaaactgcttctgctgtttattttatttgtgccagaaagaaaaaaaaaatggaaaggacctatacatttttctgtggttcataggacctggagcaacaaagggcagcattgaaactgacagcattgacatgtaatttgtcctgctgcctgttggaacgttctttttcagatgckggaggagcatgacagaggagaggtggaggtaggcgagagtaatataatttctccaggagaacatctgagaggggaagttgctttcctgccctggccctttcaccctcctgagtttgggggctgtggtggggcagggattgaccaacagccattcctaggggatggatgcctttgcattccagagggcag

SEQ ID NO: 1641 - DNA, 610 bp, Homo sapiens
gtaaataaccccaaagatatagagtaatacagggaaaatctatgatacccatgaaaacaaacaagcaaaaacactcaagaataacctaaagattatttactagagaaactccaaagaagtagagaaaaacatgttataatagggaagtaaaatggtatcttagagacaactggtgaagaccagacatgcctaacaattaagaaataattaactgatggtgtttgcttgcatttaatttgcttaggtttaccatttccaattgaaaagatcaaaggatgtcattaccttgaatatggtattattgttgaaaagtggatttgcctgttggatctgcccaacacagcaggaaagtgtacatccagaagagaacatgtgatttgcagctttccatgctcacttatggcaagggccttaccaaaggcagacaccacagtaagcaagcgytagaggtaccaagaaaaaaagccaggacaagatgtttgttaagaagcttcacgtggccagtcacggtggctcatacctgtaatcccaacactttgggaggtcaaggcaggaggattgcttgagcccaggagtttgagatcagcctgggcaacatagcaagatgtca

SEQ ID NO: 1642 - DNA, 1192 bp, Homo sapiens
gcatactatataatacataatacagaacaaaaaactaatacataatttcttaaatatgatatgtgcattgatttatctataatctatgtaaacacatcaaatttagtggattttctagagggaatatataagtttaatattataaatgaagaccaaacatgaattttgacccaatagcaatggggtcatggctacagcaatgtcttgaaatttctctaaattctagcatgaataccagactgaccaaaaaaaaaaatagaacaacaartaatttatgaacaaacaacatactccctgaaaccacataggagtttcttgaatgcttgtggaactcctgagggtgagtggcatggccagtgcccttcacggctttaaatccatgctggactagctattgtccaagggtaggtgacaagaaaaagggaaacagtgaagaagcagagaggttatggaattcaagagtaacaaataaaaacttgctctcaaaaggatgtagaacaacagtgtgtgaactaagtacaatactataagaaaatgtgcaggctccagaactttgtaagagaagactaaaggaaacacagtaggacaatgagaagatcaaaccatctgagcctaaattccaaggcatcagtgaaagtagcataatacagtttgtcataaagacaaagacctaccatagaggaaaacatttgacaatacaattcaagctgagaagatggtaacactgggaatcctatgaaagattgtcgaagtgctaggagtaaataaatccagaataagcaggtctcagaaaacaatatcaaaaaaatatatataacattgaaagtgagtcatcactttggaagacaaggcctgtagcatgcaggacaatacagagttagaaaggttgagtcttcttgcatcagacttatgtcattcacacacacacacacacacacacacacacacacacacactattggctcacatagttattgaggctgacaacccaaagatttgctgtcagcaagctggagacctaagaaagctaatggtgtagtcccagtacaagtctgaaaagaatgcacatgccatatcaatgtccacaccaggaacctggagttgttatctgctctaacaaagtctgaaggttaggaatcaggaaagtcaatggtgtaatttccagtgtaggccaggcacagtggcccatgca

SEQ ID NO: 1643 - DNA, 1192 bp, Homo sapiens
gcatactatataatacataatacagaacaaaaaactaatacataatttcttaaatatgatatgtgcattgatttatctataatctatgtaaacacatcaaatttagtggattttctagagggaatatataagtttaatattataaatgaagaccaaacatgaattttgacccaatagcaatggggtcatggctacagcaatgtcttgaaatttctctaaattctagcatgaataccagactgaccaaaaaaaaaaatagaacaacaaataatttatgaacaaacaacatactccctgaaaccacataggagtttcttgaatgcttgtggaactcctgagggtgagtggcatggccagtgcccttcacggctttaaatccatgctggactagctattgtccaagggtaggtgacaagaaaaagggaaacagtgaagaagcagagaggttatggaattcaagagtaacaaataaaaacttgctctcaaaaggatgtagaacaacagtgtgtgaactaagtacaatactataagaaaatgtgcaggctccagaactttgtaagagaagactaaaggaaacacagtaggacaatgagaagatcaaaccatctgagcctaaattccaaggcatcagtgaaagtagcataatacagtttgtcataaagacaaagacctaccatagaggaaaacatttgacaatacaattcaagctgagaagatggtaacactgggaatcctatgaaagattgtcgaagtgctaggagtaaataaatccagaataagcaggtctcagaaaacaatatcaaaaaaatatatataacattgaaagtgagtcatcactttggaagrcaaggcctgtagcatgcaggacaatacagagttagaaaggttgagtcttcttgcatcagacttatgtcattcacacacacacacacacacacacacacacacacacacactattggctcacatagttattgaggctgacaacccaaagatttgctgtcagcaagctggagacctaagaaagctaatggtgtagtcccagtacaagtctgaaaagaatgcacatgccatatcaatgtccacaccaggaacctggagttgttatctgctctaacaaagtctgaaggttaggaatcaggaaagtcaatggtgtaatttccagtgtaggccaggcacagtggcccatgca

SEQ ID NO: 1644 - DNA, 819 bp, Homo sapiens
  misc_feature (1)...(819): n = A,T,C or G
caatgagtttaacannnnnnnnnnnnnnnnnnnnnnnnnnnnnnnnnnnnnnnnnnnnnnnnnnnnnnnnnnnnnnnnnnnnnnnnnnnnnnnnnnnnnnnnnnnnnnnnnnnnagtagaaatctccctttgatcagtgtcagtggcagaggactgagcactggtctctgcattgggctgaatgggctggtggttgggtgatagtgtgaaacccaatttaactacttagcttttaaaaaataattaatagaaataagtaacctcgaagtgaccatagtgcaggccaaacattgaagctatcatcatacacataattcataaaggaagatattgagtatgagcatatctttaaagacaaaatttagagatactaaaaattcataattgtggcttttattccttgtctactgcctcctaataaataagccattactttagaaggttagatttcacagatttatttsgttagcctatgtagttaaatagaggttgctatgataagcttttttgcagtgccccacatcagactttatatctctaactgcctttcagtttatctggaactgatggctattaatataattattttataaatggatcaacaactgtttaacaatattaagtagttgcccaatatcatacagttaccaaatcaatgaagttgaaactcaacttacgattgtcgcaaaaatatcaatgtttccatttagtgaatgggccagtaaatcaaccatcagattctacttgaaagctactactgtaaggcagaaagatgtgcgtgataaataagattcatgagtcctctgcaaaggattcaaa

SEQ ID NO: 1645 - DNA, 1184 bp, Homo sapiens
cactctgctggggaccaccctcaggttttaaaaggtgcttaaatctcctggaggccacctgcagttctttagcatatggacctctttggttagactgcttacaatcaaggcaaaaaggtcaatatttcacctcagggaggctcctagtccctcttctaaaagcattctcctgattaagtcagtctatcacaaaataatctacatttaattacatctgcaaaacctcatcgcctttgtcatctcctgttagctagaagcaagttacagacccatctccactaaatggaagtgattataaaaggtgtgagtgccagggcatggggagcttgaggaaccctaagatgtgtctactacagcttgctgccatgattcaaactagcaatttattgaaattctgctatgtatattagatatagaaagcataactgaactttaaacttttcctgaataattcaagaatcctgcctgactctccacattctgtactttttctcaaagtttaaactaaatcaactttactatctcatctcttctttgtcttcagatttttagaaaatccattactcttttccttctctctctctctctctctctcatcactcccatcagcacccaaatatattctagataagctctgttcaatacaaatataatacaagcttcacaggcaagtcacatatgtaatcacattaaaggtaaaaaggaacatgtgatatcaatttgcagaatatattttaactcaacatataaaaatacaatcttgacatctactatatataawcaatttttagtacaccatttactttttttcttcttactaggtcctcaaaatctggtgtgcattttacacttacagcacatctcaatgtgtagtgctcaataggcgcatgtgaaacagcgcctacctgattgacaatgtagctctctcttattaaaaacattaaattataatagttacatcaggaagatggtgtaatagatggtgacctgcttatcaccctccacaacaacaagaattccacagtcactcacagacaaaagtctctctttgggagcctttggattcatgtaggagactgtaaaactctggtggagccaagacctggaaggttttttgagagtgtgcacagggacctgtgttgctgatctgctgaacctgctcccagatacaagcccagaaacaa

SEQ ID NO: 1646 - DNA, 1184 bp, Homo sapiens
cactctgctggggaccaccctcaggttttaaaaggtgcttaaatctcctggaggccacctgcagttctttagcatatggacctctttggttagactgcttacaatcaaggcaaaaaggtcaatatttcacctcagggaggctcctagtccctcttctaaaagcattctcctgattaagtcagtctatcacaaaataatctacatttaattacatctgcaaaacctcatcgcctttgtcatctcctgttagctagaagcaagttacagacccatctccactaaatggaagtgattataaaaggtgtgagtgccagggcatggggagcttgaggaaccctaagatgtgtctactacagcttgctgccatgattcaaactagcaatttattgaaattctgctatgtatattagatatagaaagcataactgaactttaaacttttcctgaataattcaagaatcctgcctgactctccacattctgtactttttctcaaagtttaaactaaatcaactttactatctcatctcttctttgtcttcagatttttagaaaatccattactcttttccttctctctctctctctctctctcatcactcccatcagcacccaaatatattctagataagctctgttcaatacaaatataatacaagcttcacaggcaagtcacatatgtaatcacattaaaggtaaaaaggaacatgtgatatcaatttgcagaatatattttaactcaacatataaaaatacaatcttgacatctactatatataaacaatttttagtacaccatttactttttttcttcttactaggtcytcaaaatctggtgtgcattttacacttacagcacatctcaatgtgtagtgctcaataggcgcatgtgaaacagcgcctacctgattgacaatgtagctctctcttattaaaaacattaaattataatagttacatcaggaagatggtgtaatagatggtgacctgcttatcaccctccacaacaacaagaattccacagtcactcacagacaaaagtctctctttgggagcctttggattcatgtaggagactgtaaaactctggtggagccaagacctggaaggttttttgagagtgtgcacagggacctgtgttgctgatctgctgaacctgctcccagatacaagcccagaaacaa

SEQ ID NO: 1647 - DNA, 697 bp, Homo sapiens
cctgttattgtttttaaatcatctatctaccttcagttttatgaatttctattttatgtactttgaggatctagtgatagatacatatttgtttttaatatttatatattttaatggatgtattattttattattacaaaatatctttataacaatttctgtactaaagtctattttgtctgaaattagccaatcttctggtaactattacatggtatattctttgccatccttttcattctacttacttgtatttttatcttttagagttaaaaaacttttagagtgtgtcttctgaaggcaaaatactgttggattttgtgttttcatccattctgaaagttaaaatgactgtaaattttaatccattaaatttaatgtaattactatgaggtagattttatgtctgctaattaattttctatgtacttttgttattytgtactttaattactacttttttgtgctaaataagtatttttcatgtgtaccactttcatttacttatttcactcacaatatttttgaaatatattctgactggttgtccttattcataaaattaatatcttataatttcttcatttaatatcaacctatctttgatagtatacaaaatgttgttcctcagtattttcattcccttcttgtcctttgtgctgttactgttatagaaattacatctttatacactgta

SEQ ID NO: 1648 - DNA, 1298 bp, Homo sapiens
tgaaatacattattctgaagtaagaactcgaacactgaataattttgccataatttttgaawattaagatgtgtataaaagaaaaaacatgcaaaggaaaacaatgagtaatcatgctggaagaaactaaattaatgtagaaaatgcttccagctgttttcacattaggctcagctttcaccctgagtccctatgctttaaatatctagaattttgaagcgattgagtgataagtagaacatttaattctaggtgttaaaatgtattaaattttacatacaacatgattcatttacattttagaagttgttaagcataaaataccaaataagccccaaataagcctatttttaactgacacatacatgaaaatatgagcctaagaattaatttggaatcaaatcaaatagtttactctccggagaacatttctctgtgaataaatgattgaatagatagttcagaattgccataatgtatcaatcaccatgcttttccagataatacccactaaagcattagaaatacaatattattaatctaaatttgtaggtaatgttactgaggtccagggactttattaaatactaaaatttcaacaggagaaatgtgacttcgtcctacaagttccaaattcagtgtttttgatcttttaaccaacctaatttacaatcctttaacaatatttttgttttctcaaatccacgtattttctctaaaattaaaataatatcttacatgtaaattgtattctcttcatgtagcgtaggggtatgaatttatgctattctgtgctcctgggtttggcagcgtaccaagacacctggcaaaagcaaacacaaataattactggagataaactattgattctccttagtatgttatccacgaaaataaaatgtagaactgaaattctaagtacatataatagatcaatcagatatgtttcattaatagatagtatttatagaatgtgtaaagggaagtaaaacaaaaaaaacacagaaggtaatttgccttctggggctgcaataacaaggtaccataaactgggtggcttaaactgcaggaatttattttctttcagttttggaggctgaaatctgaaatcaaggtattgaaaggattggttccttctgaggactgtgagagagattctgtcctatgcctttccttggcttctggtacctcaggcattcctggctttgtagaaagtattttcccttgtgacttcatattggcttaaatccctatgtatctgcttctgtgtccaaatttccacttttaataaggacatc

SEQ ID NO: 1649 - DNA, 1298 bp, Homo sapiens
tgaaatacattattctgaagtaagaactcgaacactgaataattttgccataatttttgaaaattaagatgtgtataaaagaaaaaacatgcaaaggaaaacaatgagtaatcatgctggaagaaactaaattaatgtagaaaatgcttccagctgttttcacattaggctcagctttcaccctgagtccctatgctttaaatatctagaattttgaagcgattgagtgataagtagaacatttaattctaggtgttaaaatgtattaaattttacatacaacatgattcatttacattttagaagttgttaagcataaaataccaaataagccccaaataagcctatttttaactgacacatacatgaaaatatgagyctaagaattaatttggaatcaaatcaaatagtttactctccggagaacatttctctgtgaataaatgattgaatagatagttcagaattgccataatgtatcaatcaccatgcttttccagataatacccactaaagcattagaaatacaatattattaatctaaatttgtaggtaatgttactgaggtccagggactttattaaatactaaaatttcaacaggagaaatgtgacttcgtcctacaagttccaaattcagtgtttttgatcttttaaccaacctaatttacaatcctttaacaatatttttgttttctcaaatccacgtattttctctaaaattaaaataatatcttacatgtaaattgtattctcttcatgtagcgtaggggtatgaatttatgctattctgtgctcctgggtttggcagcgtaccaagacacctggcaaaagcaaacacaaataattactggagataaactattgattctccttagtatgttatccacgaaaataaaatgtagaactgaaattctaagtacatataatagatcaatcagatatgtttcattaatagatagtatttatagaatgtgtaaagggaagtaaaacaaaaaaaacacagaaggtaatttgccttctggggctgcaataacaaggtaccataaactgggtggcttaaactgcaggaatttattttctttcagttttggaggctgaaatctgaaatcaaggtattgaaaggattggttccttctgaggactgtgagagagattctgtcctatgcctttccttggcttctggtacctcaggcattcctggctttgtagaaagtattttcccttgtgacttcatattggcttaaatccctatgtatctgcttctgtgtccaaatttccacttttaataaggacatc

SEQ ID NO: 1650 - DNA, 1298 bp, Homo sapiens
tgaaatacattattctgaagtaagaactcgaacactgaataattttgccataatttttgaaaattaagatgtgtataaaagaaaaaacatgcaaaggaaaacaatgagtaatcatgctggaagaaactaaattaatgtagaaaatgcttccagctgttttcacattaggctcagctttcaccctgagtccctatgctttaaatatctagaattttgaagcgattgagtgataagtagaacatttaattctaggtgttaaaatgtattaaattttacatacaacatgattcatttacattttagaagttgttaagcataaaataccaaataagccccaaataagcctatttttaactgacacatacatgaaaatatgagcctaagaattaatytggaatcaaatcaaatagtttactctccggagaacatttctctgtgaataaatgattgaatagatagttcagaattgccataatgtatcaatcaccatgcttttccagataatacccactaaagcattagaaatacaatattattaatctaaatttgtaggtaatgttactgaggtccagggactttattaaatactaaaatttcaacaggagaaatgtgacttcgtcctacaagttccaaattcagtgtttttgatcttttaaccaacctaatttacaatcctttaacaatatttttgttttctcaaatccacgtattttctctaaaattaaaataatatcttacatgtaaattgtattctcttcatgtagcgtaggggtatgaatttatgctattctgtgctcctgggtttggcagcgtaccaagacacctggcaaaagcaaacacaaataattactggagataaactattgattctccttagtatgttatccacgaaaataaaatgtagaactgaaattctaagtacatataatagatcaatcagatatgtttcattaatagatagtatttatagaatgtgtaaagggaagtaaaacaaaaaaaacacagaaggtaatttgccttctggggctgcaataacaaggtaccataaactgggtggcttaaactgcaggaatttattttctttcagttttggaggctgaaatctgaaatcaaggtattgaaaggattggttccttctgaggactgtgagagagattctgtcctatgcctttccttggcttctggtacctcaggcattcctggctttgtagaaagtattttcccttgtgacttcatattggcttaaatccctatgtatctgcttctgtgtccaaatttccacttttaataaggacatc

SEQ ID NO: 1651 - DNA, 1298 bp, Homo sapiens
tgaaatacattattctgaagtaagaactcgaacactgaataattttgccataatttttgaaaattaagatgtgtataaaagaaaaaacatgcaaaggaaaacaatgagtaatcatgctggaagaaactaaattaatgtagaaaatgcttccagctgttttcacattaggctcagctttcaccctgagtccctatgctttaaatatctagaattttgaagcgattgagtgataagtagaacatttaattctaggtgttaaaatgtattaaattttacatacaacatgattcatttacattttagaagttgttaagcataaaataccaaataagccccaaataagcctatttttaactgacacatacatgaaaatatgagcctaagaattaatttggaatcaaatcaaatagtttactctccggagaacatttctctgtgaataaatgattgaatagatagttcagaattgccataatgtatcaatcaccatgcttttccagataatacccactaaagcattagaaatacaatattattaatctaaatttgtaggtaatgttactgaggtccagggactttattaaatactaaaatttcaacaggagaaatgtgacttcgtcctacaagttccaaattcagtgtttttgatcttttaaccaacctaatttacaatcctttaacaatatttttgttttctcaaatccacgtattttctctaaaattaaaataatatcttacatgtaaattgtattctcttcatgtagcgtaggggtatgaatttatgctattctgtgctcctgggtttggcagcgtaccaagacacctggcaaaagcaaacacaaataattactggagataaactattgattctccttagtatgttatccacgaaaataaaatgtagaactgaaattctaagtacatataatagatcaatcagatatgtttcattaatagatagtatttatagaatgtgtaaagggaagtaaaacaaaaaaaacacagaaggtaatttgccttctggggctgcaataacaaggkaccataaactgggtggcttaaactgcaggaatttattttctttcagttttggaggctgaaatctgaaatcaaggtattgaaaggattggttccttctgaggactgtgagagagattctgtcctatgcctttccttggcttctggtacctcaggcattcctggctttgtagaaagtattttcccttgtgacttcatattggcttaaatccctatgtatctgcttctgtgtccaaatttccacttttaataaggacatc

SEQ ID NO: 1652 - DNA, 1298 bp, Homo sapiens
tgaaatacattattctgaagtaagaactcgaacactgaataattttgccataatttttgaaaattaagatgtgtataaaagaaaaaacatgcaaaggaaaacaatgagtaatcatgctggaagaaactaaattaatgtagaaaatgcttccagctgttttcacattaggctcagctttcaccctgagtccctatgctttaaatatctagaattttgaagcgattgagtgataagtagaacatttaattctaggtgttaaaatgtattaaattttacatacaacatgattcatttacattttagaagttgttaagcataaaataccaaataagccccaaataagcctatttttaactgacacatacatgaaaatatgagcctaagaattaatttggaatcaaatcaaatagtttactctccggagaacatttctctgtgaataaatgattgaatagatagttcagaattgccataatgtatcaatcaccatgcttttccagataatacccactaaagcattagaaatacaatattattaatctaaatttgtaggtaatgttactgaggtccagggactttattaaatactaaaatttcaacaggagaaatgtgacttcgtcctacaagttccaaattcagtgtttttgatcttttaaccaacctaatttacaatcctttaacaatatttttgttttctcaaatccacgtattttctctaaaattaaaataatatcttacatgtaaattgtattctcttcatgtagcgtaggggtatgaatttatgctattctgtgctcctgggtttggcagcgtaccaagacacctggcaaaagcaaacacaaataattactggagataaactattgattctccttagtatgttatccacgaaaataaaatgtagaactgaaattctaagtacatataatagatcaatcagatatgtttcattaatagatagtatttatagaatgtgtaaagggaagtaaaacaaaaaaaacacagaaggtaatttgccttctggggctgcaataacaaggtaccataaactgggtggcttaaactgcaggaatttattttctttcagttttggaggctgaaatctgaaatcaaggtattgaaaggattggttccttctgaggactgtgagagagattctgtcctatgcctttccttggcttctggtacctcaggcattcctggctttgtagaaagtattttcccttgtgacttyatattggcttaaatccctatgtatctgcttctgtgtccaaatttccacttttaataaggacatc

SEQ ID NO: 1653 - DNA, 642 bp, Homo sapiens
accttctttgagaaatagaaattctgtcatctacacttctccctatttaacctatctctggcaattcctccttgcctcaattctctcccttcctatctttccctaaaccttagccctccttctaatccgcctggcccttcacagatgggctctttccccaggctcccacacactgagtaacattccttgaccctgttgtcctctctagttatgatcctaattcccatctacctttaccgtccaagtcttatttggggccacatctgttrccactcctcactccatgctcactattcaaagtcttttgaaccagatttttctttcttaccaatcctgaaactatttttgaaaggcaaaagtgacacacctgacaaaccaaagacatctttaaaccaaatgagagaggtccagccactcttccctggccaacaaatggagtgttcttttgtacttgtggtaagtttgacaggaggaattgtcagatcagaggagcagaccacgtaagtaaaaacagatggaagaaagaatcaatgaacagtgtttactaggagattttacctgctaaaagaaaaatcaataattttctcttttctcttgcgttttattaacccttttggtagtattaatgctaacctttcagta

SEQ ID NO: 1654 - DNA, 642 bp, Homo sapiens
accttctttgagaaatagaaattctgtcatctacacttctccctatttaacctatctctggcaattcctccttgcctcaattctctcccttcctatctttccctaaaccttagccctccttctaatccgcctggcccttcacagatgggctctttccccaggctcccacacactgagtaacattccttgaccctgttgtcctctctagttatgatcctaattcccatctacctttaccgtccaagtcttatttggggccacatctgttgccactcctcactccatgctcactattcaaagtcttttgaaccagatttttctttcttaccaatcctgaaactatttttgaaaggcaaaagtgacacacctgacaaaccaaagacatctttaaaccaaatgagagaggtccagccactcttccctggccaacaaatggagtgttcttttgtacttgtggtaagtttgacaggaggaattgtcagatcagaggagcagaycacgtaagtaaaaacagatggaagaaagaatcaatgaacagtgtttactaggagattttacctgctaaaagaaaaatcaataattttctcttttctcttgcgttttattaacccttttggtagtattaatgctaacctttcagta

SEQ ID NO: 1655 - DNA, 1251 bp, Homo sapiens
attcttagtggagagctcactgtaacctcctgggctgactgtaacagaaatgtaaatgaatgagacagttcttttcaaagttaaattggaatccttaacatccaggcatttatactcaatgcaggtagtgggtcagtgaatgatgtcttgaaaagtatgtcttgaaaaataaatgtgataccagaaaatggttacaactctttgcagtggtagaattgtctgstccgacaggccattgcctggaattgtggtgaagaaaggggagatgaagtcactggatattaaggatgcaggtcatgagttgtcacagtcttctctcatttcctatacttttcctgaaagaggctagaagcaagaaaaatagactctaaatgtctgttgttcaagtcagaataaccatttatatcttaaatatttattgatagtagtgttttggggtgggcggcaaaaagctttagtctattgcttgcatctgaaattaaagatccatgagaccattataaaataagtctgagtcttatcagttaattttaatctccctactagctgtttcatggtttttaacagtggaaaaaacaagtttaccacactcctggcccttatttatactctgattaatggaacacataaatactaaaaggaatgcagtaaaaaggaagtatacaatcaaactataatttgcaagtgaattatagttgtgtttctttccacttgtatacaatcccatgtttcatgcttctatcataagaataagtacattggctcaccctcatatgcacaatgccattggagatcttctctacaaataacaataggagacaagaagaacaaccatgtatttaagcaagtagagcctgtttaattatagacattgggaaaagcctaattatatttttcgtgctatattatcctgcaacccctgctgctgtttttttctgtataaaagtcttgcttgatgatatgtgaatcagtcagaacttcaattacccttttaaagaagcatttttatactgtatatggtttgataaaggaaataatgccttaccacattttcttcgccattatcgggtgcactgggacagcgctcaccaggagggacacaacatctttctacaggaaaaaaaaagagaacttaaaaataatttctttgcaaacaccaaaattctcccttagtcctatctcaatataatcatgttattagaatcatctgagttactctccctgcatatctttaacaaacaacatgaaaaa

SEQ ID NO: 1656 - DNA, 1251 bp, Homo sapiens
attcttagtggagagctcactgtaacctcctgggctgactgtaacagaaatgtaaatgaatgagacagttcttttcaaagttaaattggaatccttaacatccaggcatttatactcaatgcaggtagtgggtcagtgaatgatgtcttgaaaagtatgtcttgaaaaataaatgtgataccagaaaatggttacaactctttgcagtggtagaattgtctgctccgacaggccattgcctggaattgtggtgaagaaaggggagatgaagtcactggatattaaggatgcaggtcatgagttgtcacagtcttctctcatttcctatacttttcctgaaagaggctagaascaagaaaaatagactctaaatgtctgttgttcaagtcagaataaccatttatatcttaaatatttattgatagtagtgttttggggtgggcggcaaaaagctttagtctattgcttgcatctgaaattaaagatccatgagaccattataaaataagtctgagtcttatcagttaattttaatctccctactagctgtttcatggtttttaacagtggaaaaaacaagtttaccacactcctggcccttatttatactctgattaatggaacacataaatactaaaaggaatgcagtaaaaaggaagtatacaatcaaactataatttgcaagtgaattatagttgtgtttctttccacttgtatacaatcccatgtttcatgcttctatcataagaataagtacattggctcaccctcatatgcacaatgccattggagatcttctctacaaataacaataggagacaagaagaacaaccatgtatttaagcaagtagagcctgtttaattatagacattgggaaaagcctaattatatttttcgtgctatattatcctgcaacccctgctgctgtttttttctgtataaaagtcttgcttgatgatatgtgaatcagtcagaacttcaattacccttttaaagaagcatttttatactgtatatggtttgataaaggaaataatgccttaccacattttcttcgccattatcgggtgcactgggacagcgctcaccaggagggacacaacatctttctacaggaaaaaaaaagagaacttaaaaataatttctttgcaaacaccaaaattctcccttagtcctatctcaatataatcatgttattagaatcatctgagttactctccctgcatatctttaacaaacaacatgaaaaa

SEQ ID NO: 1657 - DNA, 1251 bp, Homo sapiens
attcttagtggagagctcactgtaacctcctgggctgactgtaacagaaatgtaaatgaatgagacagttcttttcaaagttaaattggaatccttaacatccaggcatttatactcaatgcaggtagtgggtcagtgaatgatgtcttgaaaagtatgtcttgaaaaataaatgtgataccagaaaatggttacaactctttgcagtggtagaattgtctgctccgacaggccattgcctggaattgtggtgaagaaaggggagatgaagtcactggatattaaggatgcaggtcatgagttgtcacagtcttctctcatttcctatacttttcctgaaagaggctagaagcaagaaaaatagactctaaatgtctgttgttcaagtcagaataaccatttatatcttaaatatttattgatagtagtgttttggggtgggcggcaaaaagctttagtctattgcttgcatctgaaattaaagatccatgagaccattataaaataagtctgagtcttatcagttaattttaatctccctactagctgtttcatggtttttaacagtggaaaaaacaagtttaccacactcctggcccttatttatactctgattaatggaacacataaatactaaaaggaatgcagtaaaaaggaagtatacaatcaaactataatttgcaagtgaattatagttgtgtttctttccacttrtatacaatcccatgtttcatgcttctatcataagaataagtacattggctcaccctcatatgcacaatgccattggagatcttctctacaaataacaataggagacaagaagaacaaccatgtatttaagcaagtagagcctgtttaattatagacattgggaaaagcctaattatatttttcgtgctatattatcctgcaacccctgctgctgtttttttctgtataaaagtcttgcttgatgatatgtgaatcagtcagaacttcaattacccttttaaagaagcatttttatactgtatatggtttgataaaggaaataatgccttaccacattttcttcgccattatcgggtgcactgggacagcgctcaccaggagggacacaacatctttctacaggaaaaaaaaagagaacttaaaaataatttctttgcaaacaccaaaattctcccttagtcctatctcaatataatcatgttattagaatcatctgagttactctccctgcatatctttaacaaacaacatgaaaaa

SEQ ID NO: 1658 - DNA, 478 bp, Homo sapiens
catacggcatttcttcctaaaacttcaaaaatcttcaaaaaatatgtaattcttctattttcaaattccgtgagagtctgctytcctcatgtgtatgctttaggagctctgctatttccctaaactaatattacagtggtgtgatgtaccattaactacatggccatggagattcagaggtgaaagcagggattgcctgcatcttttaagtcccagtttgattttgatttcatttcataatagatcttattaatgataaaagttggcggccgggcgcggtggctcacacctgtaatcccagcactttgggaggccgaggcgggcggatcacgaggttaggagattgagaccatcctggctaaaccaggaaccccagcaaaaccctatctctactaaaaatacaaaaaaattagccaggcgtggtggcgggcgcctttggcacagcacacaaatccccagatcattaaccacagggccc

SEQ ID NO: 1659 - DNA, 478 bp, Homo sapiens
catacggcatttcttcctaaaacttcaaaaatcttcaaaaaatatgtaattcttctattttcaaattccgtgagagtctgctctcctcatgtgtatgctttaggagctctgctatttccctaaactaatattacagtggtgtgatgtaccattaactacatggccatggagattcagaggtgaaagcagggattgcctgcatcttttaagtcccagttygattttgatttcatttcataatagatcttattaatgataaaagttggcggccgggcgcggtggctcacacctgtaatcccagcactttgggaggccgaggcgggcggatcacgaggttaggagattgagaccatcctggctaaaccaggaaccccagcaaaaccctatctctactaaaaatacaaaaaaattagccaggcgtggtggcgggcgcctttggcacagcacacaaatccccagatcattaaccacagggccc

SEQ ID NO: 1660 - DNA, 478 bp, Homo sapiens
catacggcatttcttcctaaaacttcaaaaatcttcaaaaaatatgtaattcttctattttcaaattccgtgagagtctgctctcctcatgtgtatgctttaggagctctgctatttccctaaactaatattacagtggtgtgatgtaccattaactacatggccatggagattcagaggtgaaagcagggattgcctgcatcttttaagtcccagtttgattttgatttcatttcataatagatcttattaatgataaaagttggcggccgggcgcggtggctcacacctgtaatcccagcactttgggaggccgaggcgggcgratcacgaggttaggagattgagaccatcctggctaaaccaggaaccccagcaaaaccctatctctactaaaaatacaaaaaaattagccaggcgtggtggcgggcgcctttggcacagcacacaaatccccagatcattaaccacagggccc

SEQ ID NO: 1661 - DNA, 640 bp, Homo sapiens
tgaaagcactgcaaacactatgtgtgaaaaaatccagatggtataaatagcttttcacttctaattgcaacttgcccctcacattttgtttcctgagagctctgaaaagagaccgatccaaaccactaatagcacaggagctctgggagggtgagtcagtgtctactgctgaaggagaayaaagatgaagagagaacggcaggagtcccagaaggccatttcaggcttgaaggagtacttttctgcagggtagtgcccagccagacaaacagggaatggtttcctggagtacctgataggtcagctctttgatgcatcgctcaagtctgcgggctcccctctgggcctctgcactgcgacggatttcaccctccagttcaccttccagttcacgaacctgcaaccaaaacgtgacctcagaccagacgctgccaccaagtctggcattctatttgctgattggcacaatcatttgaaagacagcaaagtgtcaagggaacatgcacacactgtttttggtgcttaaacaggacagtgtctctgggaaaactctctcgccaaaagtaagatcttttatggattcataaaagaactatttagactgaaatatgtgaaaggctaattcacacagatatgagaa

SEQ ID NO: 1662 - DNA, 740 bp, Homo sapiens
gtttgcaatagggtttgcgctgctatgagaatctaatgccaccactggtctgatgggaggtgcagctcaggcagtaatgctcactcacctgctgctcacctcctgctgtgtggcctgattcacagcaggaggtgagcagcaggtgagtaaaatggcaggagaaatgataatgtatgttcaatagttcaaggagtgaaatggtgaaagtcagtatggtatgacccacaaatcgtaggcttgttctaggttggggacccctgccctagaagaaataataaagtgcgtggaaattcccaaggatggagcagatctaaatagtctttggactrgaatctaagacgacacagaatatactggctagagaacagaccactgggcactgaacaccaggtgtgagcatctgagaccttaagggtgatcctgaggagggatacagcacactggtgagcagcagggcagagaatagcacctcctgtctcttacccccgcatgttactaaacttcaccctgaactacaggacactacaggaatcccaaattagtccaaccatcagacaaacaagtacttcggtaaagactgggcatattcctgacctctcacatatataagaatatatgttatcttcacccaagaatagcaactcaacctgatggaatttttgccaatctcagcatttagtactcaaagaggaaatctaatgtcaacccaatttttatgtcttagtagttaaccagtttta

SEQ ID NO: 1663 - DNA, 1304 bp, Homo sapiens
ttattcagcaaacctatctcatgcttttcttatttcagccatactgttccttctatctagaatgctttctcttatcatgatttatcaaagtcttgtttctcctgtaagatgcagtttaactgacatttttgtctctgaaggcttctttagtccttgaagccaaaaatgttcttctgtccccactttcattatatctgtatcttatatcactttcacataacactatagttgtttgggtatcttctctctgctactggattgagagttccttaatagagggaatatgtcttgttcattaaaaaaattcaaatatcgtgttgctctacatttcaaataagaaaatattgcccactaaggctacagataaaagcccatgcaaaatcactcatttgcaatgtatcctaagagatggtttataaacgtgctgacataaggctagagcatcttgcaagtctctattaaagtaaaaggggtggggtgcggtgagtcatgtttgtaattccagcactttgggaggctgaggcaggcagatcacttgagtccaggagttcaagaccagcctgggtaaaacagttaaacccaatttcaactaaaaataaaaaaaatttagccaagcaaggtggcgcatgcctgtagtcccagctaccagctcatcaggaggctgaggtggtaggataacttgagaccaagaggtccaggctgcaatgagccaagatcatgccactgtggtccagcctgggcaatagagtgagaccctctctcaaaaaaaaaaaaaaaaaaagaaaaaaaagaaaagaaacaaaaggatatatctgaaatatttttgaagaaatataaactaccattattataacagatccaagataatggaagagtgtagacaaagaagaaatgagaaagccctaccaggcaataagaattcttakggcacctgcaaatatatgcctaggtgtcttcataaacgctgtcacctttgttatgatggtcattctgcatcagatcttaatgtgactttccaaatacagtttcctattgtgaaagaatgatctgatctgttaatatattctcctagcaacataagtattatgtatatttatattgtgtgtgtgtgcgtgtgtgtgtgtgtgtctcactgtaaataagcaagttagttgacattctggctaattagtgaggatcacttaacaaaagtctgtcttccacagacttattagttttattacacatgagtgaatgaacgaaataaatttcttttacatgcaaaactgatgaccagatgctagcatgtgctgtaccaaaatgca

SEQ ID NO: 1664 - DNA, 1175 bp, Homo sapiens
taaaagacactcccaccagtgccatgacagtttacagatgccatggcaacatccagaagttaccctatatggtctaaaaaggggaggaaccctcagctccaggaattacccaccccttttctagaaaactcatgaataatccaccccttgttyagcatataatcaagaaataaccataaaaacaggcaaccagcagcccttggggctgatctgcctatggaatagctattcttttattcctttactctcttaacaaacttgcttcaccttaaaaaatatatatatgttaagataaacagctggtatttatgactcctgcttcaaaagatttgattgtggaatgtagtagaggaattaccttccagttcttgaccttcatactcctgcccagtatcatgatacctttcctctaaattgcacaaaatgtatcattcatattaaccatataaactacagattatggcagatttttatctatagtacttacatttgccaatctttccttatcctaaaatattctatgtaaactttttttttttttttttttgagatggagtcttgctctgtcgcccaggctggagtgcagtggcacgatctcggcccactgcaagctccgtttcctgggttcgcgccgttctcctgcctcagcctcccgagtagctgggactacaggtgcccgccaccacacccggctaattttttgtacatttagtagagacggggtttcaccgtgttagccaggatagtctggatctcctgacctcgtgatccgcccgccttggcctcccaaagtgctgggattgcaggtgtgagccaccgtgcccagcctataaacttttaatggtaatataaaaaaaatccctaaaagctatattacattaaagagaaaaaactagacaacaaaattaaaaattaaaagtatttccaaactgcaatacaagccaggtctagttaagtgtatatagtcccatggacacaaaagtgtaacaaatgaaactatgcgtaaactctgaacaactatatgctaaactgtagaaccaaagaaatgagagccatagccatcagcaattagtgcataaggttgaagactaattcaaggcatctaaagggatatttggagtagatagttattgtgaaatatcatgtaaaatagaattgccaatatatatgtacat

SEQ ID NO: 1665 - DNA, 1175 bp, Homo sapiens
taaaagacactcccaccagtgccatgacagtttacagatgccatggcaacatccagaagttaccctatatggtctaaaaaggggaggaaccctcagctccaggaattacccaccccttttctagaaaactcatgaataatccaccccttgtttagcatataatcaagaaataaccataaaaacaggcaaccagcagcccttggggctgatctgcctatggaatagctattcttttattcctttactctcttaacaaacttgcttcaccttaaaaaatatatatatgttaagataaacagctggtatttatgactcctgcttcaaaagatttgattgtggaatgtagtagaggaattaccttccagttcttgaccttcatactcctgcccagtatcatgatacctttcctctaaattgcacaaaatgtatcattcatattaaccatataaactacagattatggcagatttttatctatagtacttacatttgccaatctttccttatcctaaaatattctatgtaaactttttttttttttttttttgagatggagtcttgctctgtcgcccaggctggagtgcagtggcacgatctcggcccactgcaagctccgtttcctgggttcgcgccgttctcctgcctcagcctcccgagtagctgggactacaggtgcccrccaccacacccggctaattttttgtacatttagtagagacggggtttcaccgtgttagccaggatagtctggatctcctgacctcgtgatccgcccgccttggcctcccaaagtgctgggattgcaggtgtgagccaccgtgcccagcctataaacttttaatggtaatataaaaaaaatccctaaaagctatattacattaaagagaaaaaactagacaacaaaattaaaaattaaaagtatttccaaactgcaatacaagccaggtctagttaagtgtatatagtcccatggacacaaaagtgtaacaaatgaaactatgcgtaaactctgaacaactatatgctaaactgtagaaccaaagaaatgagagccatagccatcagcaattagtgcataaggttgaagactaattcaaggcatctaaagggatatttggagtagatagttattgtgaaatatcatgtaaaatagaattgccaatatatatgtacat

SEQ ID NO: 1666 - DNA, 621 bp, Homo sapiens
ctgtctagattattgtgtctgaaaatgcttgtgctatttaacttaatttaatttgtcattcttgggaaaaagggtttactagatttagagggcaaaatgaggtccaaatctattcaaatagcacacagtcattgctgtggcaccctggccctttggaatgcagtgatgaactcaattgaagaattgtttgctgagtctctgctgggcaccaggcactatctgtgcttggtaactcgataaagacaagaaggaggcaattgggctctgccttcaaggaactgatggctgggcagaggatgctggcagcaaataactgcatgttctcacttggtccccttgcctctactgacgtgaaactgcatcccctcagagcctggaacgctggcacaatggcgcagagaggtacatgcwgtcatcgaaggccacaaagcacattagtggctctgctaatagcagattctagtgctcttacagtattgccacctcttggctaaagaaagaacagctgagaaagtctacaaactgtacaaaccatcctcatttgagaagtagaaagattgattggtttctatcgattgcatatctgtagtaaaaaaaattcacagtcaacttctgcttttt

SEQ ID NO: 1667 - DNA, 1875 bp, Homo sapiens
gcagttttatgtatgccggttatacctcagtaaagtagttttaaaaataaataaatattaataagtcttttccgtgagtgcatgtataatctcttcagttacagcctccaggcaaagcatcaaacggatcttctgtttcgtctctttccatccctcactgccatattctcccttctcagcactgagttcaacacacagagcatttaatcgttctttttaattcatccaatgatatgatcactggggagtgggatgacccctgttctgtgtgtgatttagggaaagtgaattttcttctctgggtttcagtttccttgtcagttaaatcaagagaggcattcaactcaatctaatatattatgcaatgtaatgttgtcttacaatttacttagttgtgggggtgaatttgggggaggcaagcaccatataatagtaaggtgtagactttggagtcagactgtcttatgtccaaatctcagccctaccactttctagctttgtgaagttaggttaagacccttctttttgctaagcctctgttttcacttttcacatctttaaaatatgaataatgacactgtatggaatatttgtgaggtttaaatgcatcagtttttctctctctcccattaatatcttagtgttaagtttgtccccagtgtcccctccttggtagccttcacacaggctggactctctggttatattgagcacaaccctttctgtgccactattcttttggtgaagggaggcataacactctaaacatggggcttagtttttccacatgtaaaacttgcaagaaggctcaaatgaaactttctaacgacacttatggctatgatattttctgcatctgtgagcctttacccatctctcactctttctccccattcaaactcttatatttaagcctgtcaacttcccctcatccctagaaacagaactgaaaagtgaggttgagtccaatggctccagaggaagggaaggaggggaagaagtagatgaagttggaacactttggagttcaatcttaattcacatgttttggcctccctgtaggcacttcactgcagaacacgtgctccttctaaaggttcttacttattaaattccaactgctgctctgctggttttcaatcagtttccatatatttctatcttttaactgtaggacttcgaaccattactctgagcccacatttttattttctccaagttcttataatctccagactctaaattccaggggaaaaaaaaacacaatgtagcagagttaatagcatggatgggggttgtagaaggagagctagagccagacttcaatagttttggtactaacctttgcatgcacacagtgtacataacattatgctgaggaatttgcttcttcagccagggcagtgttccagtgctcagcccctgctcagtctagcttctaccatcgaactctttccgtagaggagactatggccacccataatgctagactgagtcatctactgctttcyaaatgaacagagtcagaaaaacttgtatgacctctgctaatgtgagataaaatttgaaggctctgacaagaatctggtttgaccctgagttcataaaataggttaggactgtgtcatttgatgggtgacactagacaagtgccttaccctctctgagccccagacaccttatctgtaataccagggaaaggatgtggatgggctagaagggcctttctggatggtacatatataaaaaagaagacacgtagggctgtccaacttaaaaacaggaggtaaagtgagatcttcgtggattaaatgataataatagtattaatgaataatataatgaacaaaggtgtacttatttattcaaccaata

SEQ ID NO: 1668 - DNA, 1216 bp, Homo sapiens
tgcattttttagacaatgctattgcatacttgataggctatagtatagtgtaaacataacatttttatgyactgggaaacaaaaaaaactcatgtgacttgctttattgcagttgtctgacacaaaatcacactatctcacatgcctttattgtaaatctcattatacagaacagaaaatttagacttagattgggaaaataattctctcattgtcttataagtgataaatataccaatgttcaaactcataagtccaagctccaggcccagcgtccttggcatgaaaccatgctgtccactggatcaaatttataaactaaccaaatgaggaaaataaaagaaagaaaaaagttcattttgtttctgacggcttgtgagtggaatgttggcactcaatgggtaggcttactagaagccaagcattgctctcagtgtcttacaaacaataattcatttaattcatttaaatttctccccaaaaaagttctagaaaatggtatttttaatcctcattttacagatgagaaaacagaagcacagggaggttaagtaacttgcctaaaatcatacagctgttaagcagcagagatgagcgatcatccctggcaatctagctacagcgtctgtattcttaactccatcactatcaatgaaaggagtcctatggttataaaacatgggtacacagcttctctaaagccagtggaagcatagcataaagttaagaacaccagatcaatctcagggatcttgttctctgctactaactcatggctgtgaggtcttagacaaatccctttccctctctaagctttaacttattcattgaggaaaaaaatgtaaaatccaagttctactttcctcctactagacagatattagaaaaaatgaaattaaataacagatttaaaggtgctttgtgaggtgtcatacactatattcatatgatggatggcagaggctacactgtccagctcacccagaaagagtagaaaacgaattttttctattcgttctggaccagaaaacctgccaaacagccttagctcctaaaggtggagggaatgtgcaggaggagagtatgcagagggccttggtgctgcccacttctgaggcatgtactgctccctaggctgtcgttctgttttcatttggctgcctactttttactctgtcatcagagctatttttaggcaccttacctggcagaggaa

SEQ ID NO: 1669 - DNA, 1216 bp, Homo sapiens
tgcattttttagacaatgctattgcatacttgataggctatagtatagtgtaaacataacatttttatgcactgggaaacaaaaaaaactcatgtgacttgctttattgcagttgtctgacacaaaatcacactatctcacatgcctttattgtaaatctcattatacagaacagaaaatttagacttagattgggaaaataattctctcattgtcttataagtgataaatataccaatgttcaaactcataagtccaagctccaggcccagcgtccttggcatgaaaccatgctgtccactggatcaaatttataaactaaccaaatgaggaaaataaaagaaagaaaaaagttcattttgtttctgacggcttgtgagtggaatgttggcactcaatgggtaggcttactagaagccaagcattgctctcagtgtcttacaaacaataattcatttaattcatttaaatttctccccaaaaaagttctagaaaatggtatttttaatcctcattttacagatgagaaaacagaagcacagggaggttaagtaacttgcctaaaatcatacagctgttaagcagcagagatgagcgatcatccctggcaatctagctacagcgtctgtattcttaactccatcactatcaatgaaaggagtcctatggttataaaacatgggtacacagcttctctaaagccagtggaagcatagcataaagttaagaacaccagatcaatctcagggatcttgttctctgctactaactcatggctgtgaggtcttagacaaatccctttccctctctaagctttaacttattcattgaggaaaaaaatgtaaaatccaagttctactttcctcctactagacagatattagaaaaaatgaaattaaataacagatttaaaggtgctttgtgaggtgtcatacactatattcatatgatggatggcagaggctacactgtccagctcacccagaaagagtagaaaacgaattttttctattcrttctggaccagaaaacctgccaaacagccttagctcctaaaggtggagggaatgtgcaggaggagagtatgcagagggccttggtgctgcccacttctgaggcatgtactgctccctaggctgtcgttctgttttcatttggctgcctactttttactctgtcatcagagctatttttaggcaccttacctggcagaggaa

SEQ ID NO: 1670 - DNA, 1176 bp, Homo sapiens
tgtgtgtgtgcatgtctgtgtgtgtgcatgtctgtgtgtgtcaggggtggttctgctgctggtgagggaggaggcaaggcctctcagaaccaggattaggctggtgggggaagggagaagggtgttttgcttattggaaacagcaggtgcaaaggggctgaggccagtcagtcatcagggagagaggtggggactgcagaggtggagatctgactccctggagatcctgggtctgtggagcaaaggatcccgagagccttgacctgggagaggggaaggctgtctgtcctrtgagaagaaaggctgttgtgagtctctgacgacaagaggcccctcaggaggttgagaagagtccaggaccctcttccttctcatcaaatgcaagtgtccacttctatgtgattcaaatttttaaataactttttattgtggtaaatacatacatgaaacatgaaacttactagcttagccatttttaagtgtacaattcagtcacatcagtgcattcactgtgttgtgtaatcatcatcgctatccagttccagaacttttcatcatcccaaatgaaactctacccattaaacaactcctcttcccttctccccagccctggtaacctctatgctgctttttgcctttatgaattagccttttctagatacctcagtttataagcaatttaagaaaacagcttattgaagttcttttattattattatttgttacaatgagacctcttctctcttctcttctcttcttttttttctttcatggagtttcactcttgttgcccagaccggagtgcagcagcgcaatctcggctcactgcaacatctgcctcccgggttcaagcgattttcctgcctcagcctcctgagtagccgggattacaggtgcccgtcaccacgcccacctaattttttgtgtttttagtagagacggggtttcatcatgttggccaggctggtctcaacctcctgacctcaggtgatccacctgcctcggtatcccaaagtgctgggattacaggcgtgagccaccgcacctggtttttttttttttttttttttttaacaatgctgaataaaaggagtgatggcagacatcactatcttgtcctgttttagaggaagaaatttacatgcaataaactgcacaaaagtgcatacttgataa

SEQ ID NO: 1671 - DNA, 1176 bp, Homo sapiens
tgtgtgtgtgcatgtctgtgtgtgtgcatgtctgtgtgtgtcaggggtggttctgctgctggtgagggaggaggcaaggcctctcagaaccaggattaggctggtgggggaagggagaagggtgttttgcttattggaaacagcaggtgcaaaggggctgaggccagtcagtcatcagggagagaggtggggactgcagaggtggagatctgactccctggagatcctgggtctgtggagcaaaggatcccgagagccttgacctgggagaggggaaggctgtctgtcctatgagaagaaaggctgttgtgagtctctgacgacaagaggcccctcaggaggttgagaagagtccaggaccctcttccttctcatcaaatgcaagtgtccacttctatgtgattcaaatttttaaataactttttattgtggtaaatacatacatgaaacatgaaacttactagcttagccatttttaagtgtacaattcagtcacatcagtgcattcactgtgttgtgtaatcatcatcgctatccagttccagaacttttcatcatcccaaatgaaactctacccattaaacaactcctcttcccttctccccagccctggtaacctctatgctgctttttgcctttatgaattagccttttctagatacctcagtttataagcaatttaagaaaacagcttattgaagttcttttattattattatttgttacaatgagacctcttctctcttctcttctcttcttttttttctttcatggagtttcactcttgttgcccagaccggagtgcagcagcgcaatctcggctcactgcaayatctgcctcccgggttcaagcgattttcctgcctcagcctcctgagtagccgggattacaggtgcccgtcaccacgcccacctaattttttgtgtttttagtagagacggggtttcatcatgttggccaggctggtctcaacctcctgacctcaggtgatccacctgcctcggtatcccaaagtgctgggattacaggcgtgagccaccgcacctggtttttttttttttttttttttttaacaatgctgaataaaaggagtgatggcagacatcactatcttgtcctgttttagaggaagaaatttacatgcaataaactgcacaaaagtgcatacttgataa

SEQ ID NO: 1672 - DNA, 1206 bp, Homo sapiens
ttaatgcatgtgctcaagctcactcacccaattcctgagatcttattggaagttgactaccaatttcaaatgtttttatctatttgggaaattgcctctccctggcgcctgcaaccagctatcatttttagagaggcagtgtcataactgctgaaccgtcacctgatggtcccctgacatcctggtggggaggggagccctctcctgccctgttcatgcccatctaactacctgctgtcaagccccatcctggtagaattgctgtacctcctgagctggtggtgtgtagtatactaaaagagacatattgtggctaagatcaatgataaccataaggtccacctaagcatctcacagggctaatatgtgccacttagcaatatgatacaacctggccaggagatttccaggagacaaggccacctcagcacagatgtaattttcataacccttaaaacaaagcttaccctcacatgagtaacttaaactccctttatgaaagaaacatctggtaactgacccagactgaatccaggtatatgaaagggagaaggatcttccaaacccttagaatgatctctggaggaggagcctcccagtcagctggtctgaccccaactgtaaatggcccatgctcctactaaccatcttgcaagagcactgccggaacactgcttgagcatcatgtggtttctaagacttatctttgacatgaatcaaaccaaagatgaaaagtaacccttggggaagttagccaactaggaccatccaaaacctccaaacacaaaagggtttgggttggaaagggaacatccctagacaagaatgccacacttttactgttcattcttgaaattcagaagttttttttaagcaataaatgtttctcaatttattggggtttatttggtcaatttccagagcctggaaatgtttgtgacaattttatccagttttgtcattgtttttatgaaaagaatttgccaatcactgcagtcacacctctcatgcaaactcttgtggacagtttgtttttaattctttacctcattatttcctcattatgtttgcccatattaatccttctattctcagcttttgttttctagcctctcagtttctattttcagcattktactgtatttctctggaaaagttgaaatgaaaaacatagcatcagctatggatattatactataattacaa

SEQ ID NO: 1673 - DNA, 1191 bp, Homo sapiens
tccagaatcctgacttctccaaggcccaccctggtccggcttccatcatctctccccagaattgctccagttgccacctctctgcacaccttgcagcccccgacagtctgtccccatccccctaatcccctccccaccacagcagccggggcggggcgcctgtgagcacccaagtcaggtccagtccctcctctgctcagaaccctcaatggctcccaccttattcagagcaaaagccaaagtcctccccaggacccagaaggctttgcacagtctcctgtctcctctctgcctcaccctctccactccctccctcattcaccccattccagacctcctcagctgggattacaggcaaccaccacgacacccagctaattttttttgtatttttagtagagacagggtttcaccatgttacccaggctggtctcaaactcctgagctcaggcaatccgcccacctcagcctcccaaagtgctggaattacagatggagcccggccgactcccctatttcaaaattgcacccaccttgctttctcctctatttatttctcacaaccctgtcacctttyttttctttttttttttttttgagacggagtctcaccctgtcccccaggctggagtgcagtggtgcgatctcagctcactgcaagctccgcctcccaggttcacgccattctcctgcctcagcctcccgagtagctgggattacaggtgccaccaccatgcccggctaattttttgtatttttagtagagacggggtttcactatgttggcaggctggtcttcaaactcttgacctcgtgatccgcctgcctcggcctcccaaagtgctgggattacaggcgtgagccaccgcgcctggccctgtcacctttcaacacactacatgttttactacacatcttgtttcttgtctgtctcctgtacttgattgtcagctctgccagcacaatagctgttgtcttttttttttttttttttttttttggagagatgggggtgggtctcactttgttgcccagggcagtctcgaactcctgggctcaagcgatcctcctgcctcagtctcccaaagtgctgggatgacaggtatgagccaccgtgcccagcctacaacgtttgtcttcatcactgctggagaacttaaaaaaggcccttagtcaatatctagtgaatta

SEQ ID NO: 1674 - DNA, 1191 bp, Homo sapiens
tccagaatcctgacttctccaaggcccaccctggtccggcttccatcatctctccccagaattgctccagttgccacctctctgcacaccttgcagcccccgacagtctgtccccatccccctaatcccctccccaccacagcagccggggcggggcgcctgtgagcacccaagtcaggtccagtccctcctctgctcagaaccctcaatggctcccaccttattcagagcaaaagccaaagtcctccccaggacccagaaggctttgcacagtctcctgtctcctctctgcctcaccctctccactccctccctcattcaccccattccagacctcctcagctgggattacaggcaaccaccacgacacccagctaattttttttgtatttttagtagagacagggtttcaccatgttacccaggctggtctcaaactcctgagctcaggcaatccgcccacctcagcctcccaaagtgctggaattacagatggagcccggccgactcccctatttcaaaattgcacccaccttgctttctcctctatttatttctcacaaccctgtcacctttcttttytttttttttttttttgagacggagtctcaccctgtcccccaggctggagtgcagtggtgcgatctcagctcactgcaagctccgcctcccaggttcacgccattctcctgcctcagcctcccgagtagctgggattacaggtgccaccaccatgcccggctaattttttgtatttttagtagagacggggtttcactatgttggcaggctggtcttcaaactcttgacctcgtgatccgcctgcctcggcctcccaaagtgctgggattacaggcgtgagccaccgcgcctggccctgtcacctttcaacacactacatgttttactacacatcttgtttcttgtctgtctcctgtacttgattgtcagctctgccagcacaatagctgttgtcttttttttttttttttttttttttggagagatgggggtgggtctcactttgttgcccagggcagtctcgaactcctgggctcaagcgatcctcctgcctcagtctcccaaagtgctgggatgacaggtatgagccaccgtgcccagcctacaacgtttgtcttcatcactgctggagaacttaaaaaaggcccttagtcaatatctagtgaatta

SEQ ID NO: 1675 - DNA, 723 bp, Homo sapiens
gcaaacatgcttttcatgtcctttagataattttcttttatatgtttattaactactgatatggtttcactctgtgtccccatccaaatctcatcttgtagctcccataattcccatgtgttgtgggagggacccagtgagagaggattgaattgtgagggcagagctttcccgtgctgttcttgggtttgtgaatgggtctcatgagatccaatggttttaaaaataggagttttcctgcacaagctctctctctcttgcctgctgccatgtgagacgtgcctttcacctcccgccatgatcgtgaggcctccccagcgatgtggaactgtaagtccaataaacctcttccttttgtaaatttccctgtctcaggtatgtctttatcagcagcatgaaaacggactaatacaactattgtcctttatcttttttcttttaaagaattcaatcattttcatgttaagtttcctaaatgtatcttgtatttaccttagttttttttctcaaatggcttttaactctatttttacttgtatttgagatatttcttgtacttatytgggtctcaaaactgaccatcctctatttcagtttatctatagaccattttcagcttgaatatcatttttcttttccctctgggaactcttcttattttgtttttcctgtacttgacatcttaattctcatttcatacatcaactataatgtatatagttg

SEQ ID NO: 1676 - DNA, 559 bp, Homo sapiens
  misc_feature (1)...(559): n = A,T,C or G
tnnnnnnnnnnnnnnnnnnnnnnnnnnnnnnnnnnnnnnnnnnnnnnnnnnnnnnnnnnnnnnnnnnnnnnnnnnnnnnnnnnnnnnnnnnnnnnnnnnnnttttggctttggacttatctttttatgtattcttaaaatgyaaatactgcttatattataatggttccattgtttcagtagccactgtatctttgcagtaggttttaacccttcaacatcaattgtggttgcaaaattgaactcaacatatgatttatacttccaaatgaaataaatatgaactctttgggtctttatgtatttaaaatcgtgttcacaattatcatgtgatttatcactagtaatacaactgtcaaaaatgtatctttgttttttaaacaaggaatttccaagcctggccaacacagggagaccacatccctacaaagagatgataagaaaataaaaaaaaaattagcctggcatggtggtgcacacctgtagtcccagctccttgggaggctgaggcaggaggatcacttgagcccaggaggctgtgctatgatggtaccactgca

SEQ ID NO: 1677 - DNA, 380 bp, Homo sapiens
tgcccaaagtgccatctcttttcatgacatttactgagttttaaagttaatcctctaggtattaaactccaggtcacaacagtatctttttttttttttttttttggatttttagtagagacagggtttcaccatattggccaggctggtctcgagctcctgacctcaggtgatcagcctgactcggcctcccaaagtgctgggattacaggcgtgagccacacaacagtatttttacacaggcacttgctggattttagattcatttttacttataacaaacaggtatttctttgtgtttgtatrtgtgagtttgtgtgtgtgtgtgtgtgtgtctatgtatttttcctcatatatctatttagaaagagtgaggtagg

SEQ ID NO: 1678 - DNA, 540 bp, Homo sapiens
caggtgttgaaggacaagccctaacctttttttttaaccccataagcactgctatttggagtgcagttttgcatataaggttgtttatggaagaatatgtggcatcacagaagaaatgtttgggccatgatgggtgttacagatgcatagaggaggagatggggtgacatctggagaaagtgaaccctaagctgagatgcaacaccagagaagctcrctagataaaaaggagagcaagaatgtttcaaaccaaacaagacaaactgtcctgcgacaaaattagatttatctttgatgatattagaaagttagcaagcaggccaaaggtttcctgtcatctcagtgtggtttgatcacctttcaacttcctggtgaattgaccctgcccagtgctgcctttattgagtcaggtgaggagctgttctcctgcatttgccagggggctgccaggctgcagtgcaaaggagctgttgcattcatcccatcctgtccttggcgcctcctctctgctcttgccctggaatctctcagatgacatcc

SEQ ID NO: 1679 - DNA, 1889 bp, Homo sapiens
acattgatacagggacttcaactttatctgtaatgtttcattccttctttttgtttttaaggtctagagaacatatgactaagtgttaacatttgttcattttgaatggagagtgttgagtcttatattaccctcattctttttcgttttttgtgaacatttttttaaagtcccctggaattggccgggcatggtggctcatgcctgtaatcccagcactttgagaggctgaggtgagtggattgcctgaggtcaggagttcgagaccagcctggccaacatggtgaaaccctgtctctactaaaaatacaaaaattagccaggtgtggtggcagatgcctgtaatcccagctactcgggaggctgaggcaggagaattgcttgaactcgggaggcagaggttgcagtgagtccagatggcgccactgcactccagcctgggcaacagagcgagactctgtctcaaacaaaaacaaaaacaaaaacaaaaacaaaacaaaacaaacaacaacaaaacaccaattctgatatgcatgttcttcatgttaagccatctcaaacctcttcagaaaacaaaagtgataaagtgtgaatcctctgtcacgtcatctccttttcagggcctccgccctgactatgcttcatttctcctacagcaaggggacctcggctgcaggggaaacctgctcatcagtccttaacacggccactgcgctacgtaaaagcctagtgtgagcagggtgagcctgtaacgtgggattggtcctgacctctcacgttggtataataaaggagggctctctgtggaaagagagctttgtgtctacttcgtatttgtaaaacagatgcttccatgacttccttttcttcccacacagtattttatattaaatatctaaatgagaaacacagagtcaagatcgctgaaatggctcagcaatacacctcacctataaatcaaagcaaaggaacgcttcagcagtgaaaaacagtctgtcccaagagacaggatacttctcttctatttgtgggtatgctattgtcctgccatgtgacctggcctctgtaggacttcacgtcctttctgtataatatgacatttctcctaacactaactttctatcaacactttcattttaaaaattagaagttattattttcttgtattatttttaagtcctcaaaattaaaaaaaaagaaaaattacgaattaaaaaaataacttggccggggggcagtggctcacacctgtaatcccagcactttgggaggccgaggcaggcggataacctgaggtcaggagttcaagaccagcctgaccaacatggagaaaacccgtctctactaaaaatacaaaattagctgggtgtggcggtgtgtgcttgcaatcccagctacttgggaggctgagacaggagaattgcttgaacacgggaggtggaggttgcgatgagccaagattgcaccattgcactccagcctgggcaacaagagcaaaactccatctcacaaataaaataaaatgaaataacwtaagaaccaaatagagttgaaatattacacattagtaagtatgtgatcaaaggcaggcagttccccaggcgtgtagcaacaagtgatacaggaatgaaatcctagtccccagggtgggactagggtgatatgggggtagaatgatttcggacatgggatttgtttttggttttgtttttggtttagcattccaaaagcagctttcttttataacataaagaaatcagaagaaggctttcaagacagtatgatcaactaagacgctatttccccaactagtgctctgagggaccctatctttagagttcctaagtaggtatacttaatgctcacatgtggaaaattatgtatgctct

SEQ ID NO: 1680 - DNA, 779 bp, Homo sapiens
atggatggagctggaggctatatccttagcaaactaacgcaggagcagaaaaccaaataccgcatgtcctcacttataagtgggagctaaatgataaaaacttatgaacactaagaaggaaacagcagacactggggtctacttgagggtggagggtgcgaggagggagaggagcagaaaagatcactatcgagtactgagcttaatatctgagtgatgaaataatctgtacaacaaacccccatgacatgtgtttacctctgtaaaaaaccttcatatgtgcccccaaacctaaaagaaaagtttaaaaaaatacatgcagaaaaagggagttttgtcagagatttttgaagagttcagtatatgaggtattgggttgaaggttcygtagttttttttgcttttattctatttcaaagttttagtgactctatatattctttcaatcaataagggtaatatctggctttttcctacttagaaagaagctgagagagcagtctgtccttcccatcactccattcctttcttacaaacacaaactatgctcgaatccagaaagtattcaatgattcttgaaaattatttgaaagtttgtacttccatgtctatgtttatgttgcttcctcttcctgggacatcttcattttctcatcaaaattctgttcctgcataaaggccaaaatgtcacttctttctgtaaagccttcaaaatttttcacttcccttacattgtctcttctctcaaattcattctcccgtgtattgaggggacctta

SEQ ID NO: 1681 - DNA, 779 bp, Homo sapiens
atggatggagctggaggctatatccttagcaaactaacgcaggagcagaaaaccaaataccgcatgtcctcacttataagtgggagctaaatgataaaaacttatgaacactaagaaggaaacagcagacactggggtctacttgagggtggagggtgcgaggagggagaggagcagaaaagatcactatcgagtactgagcttaatatctgagtgatgaaataatctgtacaacaaacccccatgacatgtgtttacctctgtaaaaaaccttcatatgtgcccccaaacctaaaagaaaagtttaaaaaaatacatgcagaaaaagggagttttgtcagagatttttgaagagttcagtatatgaggtattgggttgaaggttccgtagttttttttgcttttattctatttcaaagttttagtgactctatatattctttcaatcaataagggtaatatctggctttttcctacttagaaagaagctgagagagcagtctgtccttcccatcactccattcctttmttacaaacacaaactatgctcgaatccagaaagtattcaatgattcttgaaaattatttgaaagtttgtacttccatgtctatgtttatgttgcttcctcttcctgggacatcttcattttctcatcaaaattctgttcctgcataaaggccaaaatgtcacttctttctgtaaagccttcaaaatttttcacttcccttacattgtctcttctctcaaattcattctcccgtgtattgaggggacctta

SEQ ID NO: 1682 - DNA, 922 bp, Homo sapiens
tgaagaaaaagctgcaaagttgaagggaaaaaatatctatgacaaagaatattatatccatccatgttaccattcaaatagaaagtttgcaggccatgtatatttaaacatgaaacaactcaggagataaaatactcatagtgtgaaacctaaatgaaatcgtcattagataaaatacggtaaaaggaatgatggtgatattttaattcatttaaatatataacaaagactattcttttggggaactttggatgcagaaataaatgaaaatattataatataactgacattgtgaaaattaacatctagtttctgttttcagtaatagcagagtatctcatatctgattaacccttccacagataaaattacaaaatataggcaaaagttattttaatgagtttaatatattgaagaggtaggaaaaactagagaggagttgacctttgataaaaggaaaattttctgggcaacatttacatttatatgtatcttatcgcttattatcaccatctgttctacacaggacatcacaactatttctaagtaagaagccaccgtcttcctgsctcgagagtcagagaatggagtttgaagctaccaaagcagctaaaaagtgaagaagggagtgaagggaaatccaagaaactggatcacagagaaatgccccataaactgaatctgaagatcaaaagcgcacatcacataccagagaaaactgacacaaattcatctatacaaagatatataatgattaagttattgaactttacggcatctaggcagaaaaattaagtcacctatcattcctatcatcatttctctctatcatgtaatgtcataatctgcacataaactccactgaaatctttaactgaccctggaccacacataaagcagggaaactccaaggacaaattaa

SEQ ID NO: 1683 - DNA, 993 bp, Homo sapiens
taattcagctcaaaccttctcagtgcccctgttttacagatgaaggaattgaggcccagataggttaagtgagttattagcatcacagaactcatgagatctgagattagactgtaggcatctggactcccagtctaggagattcctgtgagaagatggtgcattatcacacagatttgaatatacatggatctagccagtttccctttaacataaaccctatgtatagtgaaagacagaggtggcttagccaaccctaggatggtgktagtgctatctgctttctgattgcttctcttttcactcattggctaatccagtgacactcatttcaatgtggcatctatatgatttatttatactgaactttctggatcactgaccaagtcaaccaagggtgccaaagttgaccattcatgcaccgaagactgagacagtccctcattttgactgactttgctttcttatatggcaagcagggatttaagagccagcccgggtatcttttgagtgtgtagtgccatttggagaggcctcgcctctactgggggaccacaggtgtctaagatggtctcaatgaaaagtctcttagggttaaagcattttcttagctaagtatgctgagattgtggaaacaaaatgaaataaatgaacaacaacaacagcagcagcaaatcatttggaatcagaaagctaaaggactggtctacaaagggtaagaccttagggtgagtgttgagtgttgcttctttcccagttaagcaggtgatggccctgcctgtactccacaagggagactgactataagcacttagctttccagatgtgaggcaggatttgaagtcagaaatgcctctgtctcttaattctgagtgatcatggaaaagcgacttaatctgtttggacctcagtttcttcatctgtaaaatgctacaaattctgggttgggaaggcacggcggtgcttgggaaaataaataaaatggacaatgca

SEQ ID NO: 1684 - DNA, 1313 bp, Homo sapiens
gaagtgcctcactgtctcccgcaatggctgacatagttagtgctccctccagcagtgcaaatacaatttttcagaggctttcgaataagatcaaggagtgaaatttaacctgttttaatcaaatctagacctagaaaacactaaagtttcctaaaatgcaagcaaattataagatccacatattttcttttatatggctcatctatgccctcagaactgagtctagtccaggcattacaaggaaaacctagactcctaaaaaccacaggaaacatgtggccaaaagcactgtggggaaaaaccaaaagcataacacagatttcagtagggacacttggtatgaagtctccctggtatatcaatcttcattattattttattctataagtgcattccagatcacagcaagttagtagttttgccatatctttcactgcctggctttatgtaagtgctgctaagaataaaattaagcagtgggagaaaaacatcagtttggtgtctaaatttagaaaacttgatgaataaatctattaaatccatcatggggagagagaagagcaaatcatgtcttattggaaagataaaataaatagaaaataaaaggtgattgtctttataatttagaacaacggatttcaatgtaaagccccccccccttttatttacaaatatattggttgattgtgtattttcattcacgtaaccctcaacttgaatttttaaaaagacatactgtgaggcaagaaaccatacagaaaatcattactggagccctgaattctgtatttattgggggaggacctttatgagatcctacttatgtgatataaatcatcctctgaagatcatggaaagcaggtgcctaacattctgcactrcagacatctggcaggcttttatcctcacactccaccctcccgctcaacatctggcagccccttcatccctgctccccacccccacccccaactgcctcccaacatctgccacacacttctcttaacctcagaagcaaatccagtccaaagctcaaagacacaatgttccagggggtggtgaccctagagttaacacgctgggtggggagtaaagcagggtttgtttttatttttttcctaaactttaaatgaatacacaattcacttggaagtatgctttaatgtcaaactggttctcactgagaagcttgtttaaaattgaaatccattgttactatgaacctctttttataagttttaaatcaccttgggaattggagggtacaatcaaattttatggggaggagaataattttatgctgatgacatgca

SEQ ID NO: 1685 - DNA, 1279 bp, Homo sapiens
aatgttgccttttccaaaatcacctatggccctcccagccccccatcctgtgcctataaaaactccaggctcagccaccagagagaagagaaacagctggacaytggagactatggttggacatcggagggaagtggcttgacttcagagggacagcttgatggcattgctttggggccagactccagaggaagattatcttcccacttcatttccttttcagctccccttcctactgagagccactttcattggcaataaaatcctccacatttaccatctccaatttgttcatgcaacctcattcctcctggatgttggacaagaactcgggtgcaggtgcaaaaggctgtcacactgaccctccactgaactgtgaacacttaagccatctacagatggtaaagctaaaagagcgctgactgtaacactctttctggggcttcaggggtctccagaatccccctagacactgccatggagccacacagagttttgctcctgccagtgcccaaaagtgctagccccagctccagttcacctgttctcccccttcctgtgaggggtggagcacagcaggaccaaatgagtggtgtccatccctaccagcactgaaggggctgctggctatttctagtgcccgggcactcgagtttcacccatgaagaggtcagagaaaattttctgcttcagtaggtgctttatcacaaacttctcattgtttataattctaaaattcacttgtcaattgattggttgaaattcaaaacaaattttcttttttgtgttatttatgtattattgttacataataattgtacatgtgactttgtccattaaacaactatgacgaaataagccaacaactgaagaacaaaaggaagaatgaaataatcttcattgtgaacaataaaaatcattctacaaagcaagcttaagcatggcttatgattctcttaagttgtttctaaagatgtaccacttttgaatttcttggggtttgcaaactcaaactaataagacaaaacaaaacaaaaaaccaaggcacttgtaatctatcctttgattttgaaggaggttgatagagtaggataaataattctttcacaaagatatttcactgataacgtgttcatgtatttattcaaattgaatctgttttctgaaaacagctttattatctcctagtgttagtatctcactctgcttttaattacacataactgagtagtattcaccatcatttgccagccaaccaacacagcactatgttcttcaa

SEQ ID NO: 1686 - DNA, 1279 bp, Homo sapiens
aatgttgccttttccaaaatcacctatggccctcccagccccccatcctgtgcctataaaaactccaggctcagccaccagagagaagagaaacagctggacactggagactatggttggacatcggagggaagtggcttgacttcagagggacagcttgatggcattgctttggggccagactccagaggaagattatcttcccacttcatttccttttcagctccccttcctactgagagccactttcattggcaataaaatcctccacatttaccatctccaatttgttcatgcaacctcattcctcctggatgttggacaagaactcgggtgcaggtgcaaaaggctgtcacactgaccctccactgaactgtgaacacttaagccatctacagatggtaaagctaaaagagygctgactgtaacactctttctggggcttcaggggtctccagaatccccctagacactgccatggagccacacagagttttgctcctgccagtgcccaaaagtgctagccccagctccagttcacctgttctcccccttcctgtgaggggtggagcacagcaggaccaaatgagtggtgtccatccctaccagcactgaaggggctgctggctatttctagtgcccgggcactcgagtttcacccatgaagaggtcagagaaaattttctgcttcagtaggtgctttatcacaaacttctcattgtttataattctaaaattcacttgtcaattgattggttgaaattcaaaacaaattttcttttttgtgttatttatgtattattgttacataataattgtacatgtgactttgtccattaaacaactatgacgaaataagccaacaactgaagaacaaaaggaagaatgaaataatcttcattgtgaacaataaaaatcattctacaaagcaagcttaagcatggcttatgattctcttaagttgtttctaaagatgtaccacttttgaatttcttggggtttgcaaactcaaactaataagacaaaacaaaacaaaaaaccaaggcacttgtaatctatcctttgattttgaaggaggttgatagagtaggataaataattctttcacaaagatatttcactgataacgtgttcatgtatttattcaaattgaatctgttttctgaaaacagctttattatctcctagtgttagtatctcactctgcttttaattacacataactgagtagtattcaccatcatttgccagccaaccaacacagcactatgttcttcaa

SEQ ID NO: 1687 - DNA, 1279 bp, Homo sapiens
aatgttgccttttccaaaatcacctatggccctcccagccccccatcctgtgcctataaaaactccaggctcagccaccagagagaagagaaacagctggacactggagactatggttggacatcggagggaagtggcttgacttcagagggacagcttgatggcattgctttggggccagactccagaggaagattatcttcccacttcatttccttttcagctccccttcctactgagagccactttcattggcaataaaatcctccacatttaccatctccaatttgttcatgcaacctcattcctcctggatgttggacaagaactcgggtgcaggtgcaaaaggctgtcacactgaccctccactgaactgtgaacacttaagccatctacagatggtaaagctaaaagagcgctgactgtaacactctttctggggcttcaggggtctccagaatccccctagacactgccatggagccacacagagttttgctcctgccagtgcccaaaagtgctagccccagctccagttcacctgttctcccccttcctgtgaggggtggagcacagcaggaccaaatgagtggtgtccatccctaccagcactgaaggggctgctggctatttctagtgcccgggcactcgagtttcacccatgaagaggtcagagaaaattttctgcttcagtaggtgctttatcacaaacttctcattgtttataattctaaaattcacttgtcaattgattggttgaaattcaaaacaaattttcttttttgtgttatttatgtattattgttacataataattgtacatgtgactttgtccattaaacaactatgacgaaataagccaacaactgaagaacaaaaggaagaatgaaataatcttcattgtgaacaataaaaatcattctacaaagcaagcttaagcatggcttatgattctcttaagttgtttctaaagatgtaccacttttgaatttcttggggtttgcaaactcaaactaataagacaaaacaaaacaaaaaaccaaggcacttgtaatctatcctttgattttgaaggaggttgatagagtaggataaataattctttcacaaagatatttcactgataacgtgttcatgtatttattcaaattgaatctgttttctgaaaacagctttattatctcctagtgtyagtatctcactctgcttttaattacacataactgagtagtattcaccatcatttgccagccaaccaacacagcactatgttcttcaa

SEQ ID NO: 1688 - DNA, 568 bp, Homo sapiens
tgtcagatgacccggtaagaggggagaaaaatcactctccattaagaaacactgccttacatgatctcactcacacatgacttccttttttatttaaaataacaccaccttccaaacctaacwcgattgtaaataccatctatatgctgatcactcccaaatatatatctctccaaccctgacttttttttttcttttttcttttttcttttttttttaaacttttaagttcggggtacatgtgcaggatttgcagatttgttatataggtaaacatgtgtcatggggtttcattgtacagattatttcatcacccaggtattaagcctagtatccattagttctgttgttcctgatcctctgcctcttcccaccttccactctccaataggccccagtgtatgctgttcccctctatgtgtccatgtattctcatcatttaactctcacttaggaggacatgccgtatttggttttttgttcctgtgttagtttgctaaggataacagcctccagctccatctgtttccctgcaaaggacatgatctcattcttttttatggttgca

SEQ ID NO: 1689 - DNA, 582 bp, Homo sapiens
agatagaagtgagaggtgtagatatgaattttaaagttaacaacagacagtatttacagctgtaagaatgaatgaaatttcctaaagagagcatgtacagtgagcaaacgttagggacagagtctacagaataccggtatgtaaggagaagacttgtttttattgggagaaaacacatgatgcctggggtataattaaaaatattccaggccaggtgcagtagctcatgcctgtaatcycggcactttgggaggccaaggcgggtggatcacttgaggtcaggagttcgagaccagcctagccaacatggcgaaaccctgcctctactaaaaatacaaaaattagctgggcatggtggtgatggtgatgcgcacctataattccagctactcgggaggctaaggcatgagaatcacttgaacccaggagacagaggttgcagtgagctgagactgtgccactgcactccagcctgggtgatggaatgagattctttctttaaaaaaggccgggtgcagtggctcacacctgttaattccaacactgggaggccgaggtgggcggaacgaggtcaggagttcg

SEQ ID NO: 1690 - DNA, 582 bp, Homo sapiens
agatagaagtgagaggtgtagatatgaattttaaagttaacaacagacagtatttacagctgtaagaatgaatgaaatttcctaaagagagcatgtacagtgagcaaacgttagggacagagtctacagaataccggtatgtaaggagaagacttgtttttattgggagaaaacacatgatgcctggggtataattaaaaatattccaggccaggtgcagtagctcatgcctgtaatcccggcactttgggaggccaaggcgggtggatcacttgaggtcaggagttcgagaccagcctagccaacatggcgaaaccctgcctctactaaaaatacaaaaattagctgggcatggtggtgatggtgatgygcacctataattccagctactcgggaggctaaggcatgagaatcacttgaacccaggagacagaggttgcagtgagctgagactgtgccactgcactccagcctgggtgatggaatgagattctttctttaaaaaaggccgggtgcagtggctcacacctgttaattccaacactgggaggccgaggtgggcggaacgaggtcaggagttcg

SEQ ID NO: 1691 - DNA, 714 bp, Homo sapiens
gaggccgcccttcacagcctcctgactccactcccaacatcccctttcaagctgacacagagcaaaggctgaccttgtcccatcaaccacttacccacacagacctaattaatctttggttgccagtaaatccagcacacttccctccttgcatactacagaatttcgcagaggggatgctttgggcttcgtttgcttccctatgagatgagctgtggctgaaacacagacagctgccctatagaatgatctgagggccctgtcaacaaaaggcgtccccttgtcagagtgtcagggtgtgggaactcactcctagcccctttccattactcctgaggacttctttccaagaataaagaattcctagaaaaattaaccaattgcctctcacaaggcagtggtgtcctaagacagagttcatacagggataaggggaaaggaaaggaaaagggtactgaagatgggattctgggtgtcttgagacatttgagggctytgggtacctgcaagtagtgagactctaagtgaggatgcaacatgaccctagagtcaaacaaaccatctgggtttgttcaaggtcattaaactatatgacccaccatgcagatgcattataataaatacaaataccactcactgccaaatttagttttggccagacttggcttcagtcaagaacacaaaaatgcaaatcagtggctacttcaacagatg

SEQ ID NO: 1692 - DNA, 1169 bp, Homo sapiens
cctacaggatttttgcaattgaaattaagacctattggttaggaatcattaagattgtaaaaatttgagcctgaaagctgatgatgcaacatccctgagtaggaaagactgagttgatattaccattaatatgtgtttctgaaaagccagagtggaaataatttcatatgtcagaaatcacaggcattttatcagcctcccagacttacaaatacccacttgctattgccagtcaggtccagtgtgtttagtttgcaaattaacacttccctcctgtgcaaagttttatgagaaggttaacaaaacatttgaaggagctgtgaaaaggaagttacatgcagcacaaaccaggcaaccaagagcttttggtggtcatcactgaagatggaaactgtggcagatggaagtctctgcttcttgaagagaaactatgcattgagtatgcatgatctgtgtgcctggatatcatctttacctgctttgttctgtatgttgtcaaagaggatcgctttggggagcattgtgtctgtacactctggatgaacccctytgaagcaggaggtaggatggaatacttgtgcttttgtttaaaacatgcctggggcctatattgacaattttgttaggttctttattaaaaatgtatttgaataaaccataattaatttataccagaagagcaaaacagcagacattgtgccttttttcacagattatggctgaatggattctaaccagtaaatctgtacatttgaattttatttcctggatcttttctcattaagtccaatggagtgatgagcttgggatggaggctttatagaggtatcttttaatatacttttgataaagcactaagaaaatttataataattttaattgataatgcggaagcagaggagcagaacagaagatagtttctcagtgtttagagaccttgaatttattgtttcctttgcaaagtctattagtcacccctgacaagaagcctgcaatttcaggtgtttgcagtttcctgacccttcatagctactctctgtgggatctttatctggcctggctgctgagactgtggctgttttatattcattatttgattaaagactcaacaactttattaaggaggtatcgctctagctttgcagctgggagtttcagagagggaagtg

SEQ ID NO: 1693 - DNA, 1169 bp, Homo sapiens
cctacaggatttttgcaattgaaattaagacctattggttaggaatcattaagattgtaaaaatttgagcctgaaagctgatgatgcaacatccctgagtaggaaagactgagttgatattaccattaatatgtgtttctgaaaagccagagtggaaataatttcatatgtcagaaatcacaggcattttatcagcctcccagacttacaaatacccacttgctattgccagtcaggtccagtgtgtttagtttgcaaattaacacttccctcctgtgcaaagttttatgagaaggttaacaaaacatttgaaggagctgtgaaaaggaagttacatgcagcacaaaccaggcaaccaagagcttttggtggtcatcactgaagatggaaactgtggcagatggaagtctctgcttcttgaagagaaactatgcattgagtatgcatgatctgtgtgcctggatatcatctttacctgctttgttctgtatgttgtcaaagaggatcgctttggggagcattgtgtctgtacactctggatgaacccctttgaagcaggaggtaggatggaatacttgtgcttttgtttaaaacatgcctggggcctatattgacaattttgttaggttctttattaaaaatktatttgaataaaccataattaatttataccagaagagcaaaacagcagacattgtgccttttttcacagattatggctgaatggattctaaccagtaaatctgtacatttgaattttatttcctggatcttttctcattaagtccaatggagtgatgagcttgggatggaggctttatagaggtatcttttaatatacttttgataaagcactaagaaaatttataataattttaattgataatgcggaagcagaggagcagaacagaagatagtttctcagtgtttagagaccttgaatttattgtttcctttgcaaagtctattagtcacccctgacaagaagcctgcaatttcaggtgtttgcagtttcctgacccttcatagctactctctgtgggatctttatctggcctggctgctgagactgtggctgttttatattcattatttgattaaagactcaacaactttattaaggaggtatcgctctagctttgcagctgggagtttcagagagggaagtg

SEQ ID NO: 1694 - DNA, 1169 bp, Homo sapiens
cctacaggatttttgcaattgaaattaagacctattggttaggaatcattaagattgtaaaaatttgagcctgaaagctgatgatgcaacatccctgagtaggaaagactgagttgatattaccattaatatgtgtttctgaaaagccagagtggaaataatttcatatgtcagaaatcacaggcattttatcagcctcccagacttacaaatacccacttgctattgccagtcaggtccagtgtgtttagtttgcaaattaacacttccctcctgtgcaaagttttatgagaaggttaacaaaacatttgaaggagctgtgaaaaggaagttacatgcagcacaaaccaggcaaccaagagcttttggtggtcatcactgaagatggaaactgtggcagatggaagtctctgcttcttgaagagaaactatgcattgagtatgcatgatctgtgtgcctggatatcatctttacctgctttgttctgtatgttgtcaaagaggatcgctttggggagcattgtgtctgtacactctggatgaacccctttgaagcaggaggtaggatggaatacttgtgcttttgtttaaaacatgcctggggcctatattgacaattttgttaggttctttattaaaaatgtatttgaataaaccataattaatttatrccagaagagcaaaacagcagacattgtgccttttttcacagattatggctgaatggattctaaccagtaaatctgtacatttgaattttatttcctggatcttttctcattaagtccaatggagtgatgagcttgggatggaggctttatagaggtatcttttaatatacttttgataaagcactaagaaaatttataataattttaattgataatgcggaagcagaggagcagaacagaagatagtttctcagtgtttagagaccttgaatttattgtttcctttgcaaagtctattagtcacccctgacaagaagcctgcaatttcaggtgtttgcagtttcctgacccttcatagctactctctgtgggatctttatctggcctggctgctgagactgtggctgttttatattcattatttgattaaagactcaacaactttattaaggaggtatcgctctagctttgcagctgggagtttcagagagggaagtg

SEQ ID NO: 1695 - DNA, 1169 bp, Homo sapiens
cctacaggatttttgcaattgaaattaagacctattggttaggaatcattaagattgtaaaaatttgagcctgaaagctgatgatgcaacatccctgagtaggaaagactgagttgatattaccattaatatgtgtttctgaaaagccagagtggaaataatttcatatgtcagaaatcacaggcattttatcagcctcccagacttacaaatacccacttgctattgccagtcaggtccagtgtgtttagtttgcaaattaacacttccctcctgtgcaaagttttatgagaaggttaacaaaacatttgaaggagctgtgaaaaggaagttacatgcagcacaaaccaggcaaccaagagcttttggtggtcatcactgaagatggaaactgtggcagatggaagtctctgcttcttgaagagaaactatgcattgagtatgcatgatctgtgtgcctggatatcatctttacctgctttgttctgtatgttgtcaaagaggatcgctttggggagcattgtgtctgtacactctggatgaacccctttgaagcaggaggtaggatggaatacttgtgcttttgtttaaaacatgcctggggcctatattgacaattttgttaggttctttattaaaaatgtatttgaataaaccataattaatttataccagaagagcaaaacagcagacattgtgccttttttcacagattatggctgaatggattctaaccagtaaatctgtacatttgaattttatttcctggatcttttctcattaagtccaatggagtgatgagcttgggatggaggctttatagaggtatcttttaatatacttttgataaagcactaagaaaatttataataattttaattgataatgcggaagcagaggagcagaacagaagatagtttctcagtgtttagagaccttgaatttattgtttcctttgcaaagtctattagtcacccctgacaagaagcctgcaatttcaggtgtttgcagtttcctgacccttcatagctactctctgtgggmtctttatctggcctggctgctgagactgtggctgttttatattcattatttgattaaagactcaacaactttattaaggaggtatcgctctagctttgcagctgggagtttcagagagggaagtg

SEQ ID NO: 1696 - DNA, 2122 bp, Homo sapiens
gggagaaataataactcaccggtcttgtgagtttgagagcaagagctcagcaagcgtggctcattgctctctcccttgtccttgggatctaactgccartagagagcacattcactatttcctcctagtatcataagaagtaaagatctcatccatgggtggggagacacatggttgtccggcactccctgtgactgaatggctaaaccaaattttgacattcgctattgaaagattcattttcctcacaaacctaagtcacattttcctaatgtaacaccagcagtcatacaaccaatagttttcttattttgacatacttctttgtctttttcagtgggatcagaatctacgtgggacaaagcagtacttttagttaggcacaccccatggacaacaatggtgtttagagaaaataccttttcctttcaactttaagaacaaattattaaagccatgaatgaagactattcattatttggttttctcaacagtacatccagaaatgagtaattgactcagatcagcttgtggacacattctcttcaaagaggcaggatgaaagtttgaaagtgttgatgtttcttttctttctttcttttcttttttttttttttttttagactgactcttacactgtcgcccaggctggagtgcaatggtgcgatcttggttcactgcaacctccacctcccgggttgaagtgattctcctgcctcagcctcccgagtagctgggattacaggtccccaccaccacgcccagctaatttttttgtatttttagtagagacaggatttcactatgttggccaggctggtcttgaaatcctgaccttgtgatcctcctgcctcggcctcccaaagtgctgggattacaggcgtgagccactgcacctggccgatatttcttataggttgaaaagaacttgaattccacacatatccttcagtaactaagtgcctagtcaactagtagggatcccagtttaagacactgaggcaattcttttgttgatttttgtttttgtccaatgctaggaaagcagagaattttactagtatacatatgcactgtttcacttaagatgacatagtagagtccttgcaaaagcagagggtagtacccacaggcagattatggaaatcattcgatataagctaatacaaatatttaactttagatgagtctgcttcaaaaacttcaaataattaatgaataggattaagatcaaccctgacaatttcaatattgagttttgaatccctgcattcagcatttggatcaggaaaaaaactgagccaaattgacatagccaacaaagcagatattcacaaatattttatagacatgtaaaagaccagccagtaagtatttcttttacagaaaattttaaaattttcaatcatgagaaaaataatacttatatatttttagagagatctgtctgttgaagatgtatcccacaggagcaaatgatacaaatattcattttaggaaatgagatagagcaaggtttacattacattgcatcagtcattcaagagtaatgaactatgttaaaagcaacatcagaatgattttctttggaatcacagttatttaaagtgcattccacaactgtagaggaaggtgtcttgtcatattcttacacccactggtacaacaatagaacaacacgatttgaagaaggtaagtgttgaaataaaaatttactgatcaattagaatttgactcacatgaaaaaaaaattccaaacagtgcaatattaggatgacttgaaaccagacaactcccacaaaaaaggggggaaatgatggtagtttatgcaactcttctattgttatgaagatgcaggatatagacaataataaaacccaaagatgctatctcactaaagagtctggtctattttaaattactatagaaatttttcataactattgcttaaatataagtatagttttctcctctcatttcttttagatacatgttcaaatgtcacgtgattagaaaggcttttcctgaccattgtacctaaaatactaccatctccatatcctatttaaccaccatctccatctcctattttgtaactgtaactggttttaattttcttcaa

SEQ ID NO: 1697 - DNA, 2122 bp, Homo sapiens
gggagaaataataactcaccggtcttgtgagtttgagagcaagagctcagcaagcgtggctcattgctctctcccttgtccttgggatctaactgccaatagagagcacattcactatttcctcctagtatcataagaagtaaagatctcatccatgggtggggagacacrtggttgtccggcactccctgtgactgaatggctaaaccaaattttgacattcgctattgaaagattcattttcctcacaaacctaagtcacattttcctaatgtaacaccagcagtcatacaaccaatagttttcttattttgacatacttctttgtctttttcagtgggatcagaatctacgtgggacaaagcagtacttttagttaggcacaccccatggacaacaatggtgtttagagaaaataccttttcctttcaactttaagaacaaattattaaagccatgaatgaagactattcattatttggttttctcaacagtacatccagaaatgagtaattgactcagatcagcttgtggacacattctcttcaaagaggcaggatgaaagtttgaaagtgttgatgtttcttttctttctttcttttcttttttttttttttttttagactgactcttacactgtcgcccaggctggagtgcaatggtgcgatcttggttcactgcaacctccacctcccgggttgaagtgattctcctgcctcagcctcccgagtagctgggattacaggtccccaccaccacgcccagctaatttttttgtatttttagtagagacaggatttcactatgttggccaggctggtcttgaaatcctgaccttgtgatcctcctgcctcggcctcccaaagtgctgggattacaggcgtgagccactgcacctggccgatatttcttataggttgaaaagaacttgaattccacacatatccttcagtaactaagtgcctagtcaactagtagggatcccagtttaagacactgaggcaattcttttgttgatttttgtttttgtccaatgctaggaaagcagagaattttactagtatacatatgcactgtttcacttaagatgacatagtagagtccttgcaaaagcagagggtagtacccacaggcagattatggaaatcattcgatataagctaatacaaatatttaactttagatgagtctgcttcaaaaacttcaaataattaatgaataggattaagatcaaccctgacaatttcaatattgagttttgaatccctgcattcagcatttggatcaggaaaaaaactgagccaaattgacatagccaacaaagcagatattcacaaatattttatagacatgtaaaagaccagccagtaagtatttcttttacagaaaattttaaaattttcaatcatgagaaaaataatacttatatatttttagagagatctgtctgttgaagatgtatcccacaggagcaaatgatacaaatattcattttaggaaatgagatagagcaaggtttacattacattgcatcagtcattcaagagtaatgaactatgttaaaagcaacatcagaatgattttctttggaatcacagttatttaaagtgcattccacaactgtagaggaaggtgtcttgtcatattcttacacccactggtacaacaatagaacaacacgatttgaagaaggtaagtgttgaaataaaaatttactgatcaattagaatttgactcacatgaaaaaaaaattccaaacagtgcaatattaggatgacttgaaaccagacaactcccacaaaaaaggggggaaatgatggtagtttatgcaactcttctattgttatgaagatgcaggatatagacaataataaaacccaaagatgctatctcactaaagagtctggtctattttaaattactatagaaatttttcataactattgcttaaatataagtatagttttctcctctcatttcttttagatacatgttcaaatgtcacgtgattagaaaggcttttcctgaccattgtacctaaaatactaccatctccatatcctatttaaccaccatctccatctcctattttgtaactgtaactggttttaattttcttcaa

SEQ ID NO: 1698 - DNA, 2122 bp, Homo sapiens
gggagaaataataactcaccggtcttgtgagtttgagagcaagagctcagcaagcgtggctcattgctctctcccttgtccttgggatctaactgccaatagagagcacattcactatttcctcctagtatcataagaagtaaagatctcatccatgggtggggagacacatggttgtccggcactccctgtgactgaatggctaaaccaaattttgacattcgctattgaaagattcattttcctcacaaacctaagtcacattttcctaatgtaacaccagcagtcatacaaccaatagttttcttattttgacatacttctttgtctttttcagtgggatcagaatctacgtgggacaaagcagtacttttagttaggcacacccsatggacaacaatggtgtttagagaaaataccttttcctttcaactttaagaacaaattattaaagccatgaatgaagactattcattatttggttttctcaacagtacatccagaaatgagtaattgactcagatcagcttgtggacacattctcttcaaagaggcaggatgaaagtttgaaagtgttgatgtttcttttctttctttcttttcttttttttttttttttttagactgactcttacactgtcgcccaggctggagtgcaatggtgcgatcttggttcactgcaacctccacctcccgggttgaagtgattctcctgcctcagcctcccgagtagctgggattacaggtccccaccaccacgcccagctaatttttttgtatttttagtagagacaggatttcactatgttggccaggctggtcttgaaatcctgaccttgtgatcctcctgcctcggcctcccaaagtgctgggattacaggcgtgagccactgcacctggccgatatttcttataggttgaaaagaacttgaattccacacatatccttcagtaactaagtgcctagtcaactagtagggatcccagtttaagacactgaggcaattcttttgttgatttttgtttttgtccaatgctaggaaagcagagaattttactagtatacatatgcactgtttcacttaagatgacatagtagagtccttgcaaaagcagagggtagtacccacaggcagattatggaaatcattcgatataagctaatacaaatatttaactttagatgagtctgcttcaaaaacttcaaataattaatgaataggattaagatcaaccctgacaatttcaatattgagttttgaatccctgcattcagcatttggatcaggaaaaaaactgagccaaattgacatagccaacaaagcagatattcacaaatattttatagacatgtaaaagaccagccagtaagtatttcttttacagaaaattttaaaattttcaatcatgagaaaaataatacttatatatttttagagagatctgtctgttgaagatgtatcccacaggagcaaatgatacaaatattcattttaggaaatgagatagagcaaggtttacattacattgcatcagtcattcaagagtaatgaactatgttaaaagcaacatcagaatgattttctttggaatcacagttatttaaagtgcattccacaactgtagaggaaggtgtcttgtcatattcttacacccactggtacaacaatagaacaacacgatttgaagaaggtaagtgttgaaataaaaatttactgatcaattagaatttgactcacatgaaaaaaaaattccaaacagtgcaatattaggatgacttgaaaccagacaactcccacaaaaaaggggggaaatgatggtagtttatgcaactcttctattgttatgaagatgcaggatatagacaataataaaacccaaagatgctatctcactaaagagtctggtctattttaaattactatagaaatttttcataactattgcttaaatataagtatagttttctcctctcatttcttttagatacatgttcaaatgtcacgtgattagaaaggcttttcctgaccattgtacctaaaatactaccatctccatatcctatttaaccaccatctccatctcctattttgtaactgtaactggttttaattttcttcaa

SEQ ID NO: 1699 - DNA, 591 bp, Homo sapiens
caattactctgaaagtaattgttcaattgcttgatatttgaattttttttctttttgtgagacagggtctcactccattgctcaggctggagtgcagtggtgcaatcgtggctcactgcagcctctggagcaatcatgacttgctgcagccttgacctccaggctccagtgatcctcccacctcagcctcctgtacagctgggactacagatgtgtgccaccacacctggcttttacatttttttctggacatggggtcatctacaactatgttgctcaggcttgctatgttcccacttcagcctcctaaagtgttgggattacaggcgtgggccaccacacccagcccgaaaattgttttgataatttgtggaaaaaaagtattgtgtggtgttgtgtttacatctgtcagacctgggttagcttgtgtccctctaagtggttattataaaagagtttgaagacaatagatataaggtatgtacactgctgaggcacctgttagaaatgttaaatgaagatttccattgcactctggagctgggaatatggaatggaattgtagcccacagagttgttccattcccwttt

SEQ ID NO: 1700 - DNA, 1216 bp, Homo sapiens
tgcatatacacaatatatttatttaaaaactggcaactgtgcttgccactaggaaagccatctttagcttctgagggtcaggggtgggaggaaatttacttttcactccccattctttggtctattttaatatattgtttattcaacaaacaggyaaataggtcaatactttttttgtttttgcaaatagagaaaaatgattattttataagatggacaatttttttgatatgccatgttttcataagaggacaaaagccacactgaaataaccaattaagttatccacataactgaatgtaggctttgaaaaattacatttgatctgtgtatttggctcaggagaggtggattgtaaattattttctttaaccactagagggcacattgcatttggttgtctttcaatttcatgtaactgaaatgtatattacaagagaatgtcaaagaataagagaaatgtgcttttattttttcttttgagacagagttttgctcttattgctcaggctggagtgcaatggcgtgatgttggctcactgcaacctccgcctccccccggctccccctgccctgggttcaagtgattctcctgcctgcctcagcctcccaagtagctgggattataggcgcccaccaccatgcccggctacttttttgtgtttttagtagagatggggtttcaccatattggccaggctggtctcgaactccagacctcaggtgatccacccacctaggcctcccaaagtgctggaatacaggggtaagccaccatgcccagccgaaatgtgcattttaaatgtaaatattttagaaaaatactttgatgaacttaatgataaacatttaagcatgaagaaaaagacaaagtagagggaaaaaataattcttgaaacctaaaaactggtaaatccagatactgtacttgacaatcaaataaatgaatacaattttttttcagttactaagtggaaagatagtaattccgagtctctaggaagcaaaaacagttgcagcagcaggaagagctgtatcgtgaagtgcaggcaaagacactttatggagttgtgataagaggaaattcatacataaagagaagttttaaaatgtcttatttcattttatttggtgggtaatatatttatatcataaaattttaaaggtacaaaatagtatacagtgagagatagagtcggccttctccctacaatgc

SEQ ID NO: 1701 - DNA, 653 bp, Homo sapiens
tgaatgcatctctgcactgttgacctgcacattacaatgaataaatgtaatcaaatatgctgatatgatgttgccactgatttaaaaacaattggattttttcttctgtgctgtttgtattctcgagaattataatctatgataaattctataaccattaaaaatcctaggtcattgatttatgccttaactcagacatgctgagctcttcaaaataaatgtttcaaaacagcatgcactgcaaattgcaattctaacataaaacaaatgttaaaatgttagcatctttcctgaatatattgtagtgtattaattgctggtcttggtaatgtagcttattagttttgaataatctaagttttaattcatcatttaatttttaattaagtaggtttttttcaagatgtgctttctgcttaaatgttagccagtaaacatagtatatataaaacaattctatggcacaaatayatgacactggcatgtattatatgatttctctatgatctcaaatatgaaagcaatcataacgtttatattctataaaacgaacagccatgttaaatttgacattaaaatttaaataatttaagctcagagacaatgcctggaaaactgaaggcctgaatatgaaagtacaatgaaatcacttt

SEQ ID NO: 1702 - DNA, 1327 bp, Homo sapiens
aaaccaatttacatagaaatatgaaacagcaatgtattgggaaaaattttggaatatgtatatatgtattaacctcaatttacacatgaaggaatttcattaacatgccttgttttgctaccaatgattgtttttatcctatcttgtcaggatattgtcaattatggtgtaacctacatgtggagttaaagcatggcccactaagcaatcctaattcagctagacattgaattatgaatcataggttactaaattagtacacattarttttcatctccatagggagatatttaagtttcaattctgcagaaatctaaagatcctggattcattatgctcagtactgagtgcagtgctttgggggcagtgtcagttgtgggggtgtcacagagtcttgggcatgtgcagtatttcggtgcatcttattggaggtgagaagatctttagacattttctaagatagtcaatctgtggacaagtatagggcttttttgcattttttccatgtcttaataggaaaccagaatcatttaataaatcattcatcaacaattaagattaatttactcagttcagctctacaaatgttgggtttctattatgtgccaagcacttagctgggtactaagataagtaaagtgtggtttttgattttcttgatagaacatagaaaaacaacatttagatcatcatgaaaacggtgaaggattcagtgagagtttttagacaggatgtgtgaaccgaggtcaagttctcctgtagaacggtggtgaagaggacagtaggaagagagtgaaggaagagagtgaaggagtaggaagagagtgaaggaagagagtgaaggagtaggaagagagtgaagagagttgagccctcttccaccacagcatctctcactcatccaggtccctcatccaggttctgctggttatttgttttttgggttttgtgaagattatatatcgtttgcgttgagtattagataacagtaggtggtctccgggacacagcctgtaatgcagtacattgctgtttctctggcagcacaggtgcgtgttcaacaccaggggctcgaatgaagtctccgagtagctttatgttagtgttttgccaccaactgattaaactttgcattttcgttacttttcaactttcagaattgtgaataagggattatgaaccttccccgaatatatgttaggagggagatgagagcaaaggtatatgcagatagcaagtcgccatgcgcggcaggtaaggagtttaggattcatcctgcaggtgatggggttattgaaagtgccgtctgatggcaagcacaaaatgc

SEQ ID NO: 1703 - DNA, 1327 bp, Homo sapiens
aaaccaatttacatagaaatatgaaacagcaatgtattgggaaaaattttggaatatgtatatatgtattaacctcaatttacacatgaaggaatttcattaacatgccttgttttgctaccaatgattgtttttatcctatcttgtcaggatattgtcaattatggtgtaacctacatgtggagttaaagcatggcccactaagcaatcctaattcagctagacattgaattatgaatcataggttactaaattagtacacattagttttcatctccatagggagatatttaagtttcaattctgcagaaatctaaagatcctggattcattatgctcagtactgagtgcagtgctttgggggcagtgtcagttgtgggggtgtcacagagtcttgggcatgtgcagtatttcggtgcatcttattggaggtgagaagatctttagacattttctaagatagtcaatctgtggacaagtatagggcttttttgcattttttccatgtcttaataggaaaccagaatcatttaataaatcattcatcaacaattaagattaatttactcagttcagctctacaaatgttgggtttctattatgtgccaagcacttagctgggtactaagataagtaaagtgtggtttttgattttcttgatagaacatagaaaaacaacatttagatcatcatgaaaacggtgaaggattcagtgagagtttttagacaggatgtgtgaaccgaggtcaagttctcctgtagaacggtggtgaagaggacagtaggaagagagtgaaggaagagagtgaaggagtaggaagagagtgaaggaagagagtgaaggagtaggaagagagtgaagagagttgagccctcttccaccacagcatctctcactcatccaggtccctcatccaggttctgctggttatttgttttttgggttttgtgaagattatatatcgtttgcgttgagtattagataacagtaggtggtctccgggacacagcctgtaatgcagtacattgctgtttctctggcagcacaggtgcgtgttcaacaccaggggctcgaatgaagtctccgagtagctttatgttagtgttttgccaccaactgattaaactttgcattttcgttacttttcaactttcagaattgtgaataagggattatgaaccttccccgaatatatgttasgagggagatgagagcaaaggtatatgcagatagcaagtcgccatgcgcggcaggtaaggagtttaggattcatcctgcaggtgatggggttattgaaagtgccgtctgatggcaagcacaaaatgc

SEQ ID NO: 1704 - DNA, 1327 bp, Homo sapiens
aaaccaatttacatagaaatatgaaacagcaatgtattgggaaaaattttggaatatgtatatatgtattaacctcaatttacacatgaaggaatttcattaacatgccttgttttgctaccaatgattgtttttatcctatcttgtcaggatattgtcaattatggtgtaacctacatgtggagttaaagcatggcccactaagcaatcctaattcagctagacattgaattatgaatcataggttactaaattagtacacattagttttcatctccatagggagatatttaagtttcaattctgcagaaatctaaagatcctggattcattatgctcagtactgagtgcagtgctttgggggcagtgtcagttgtgggggtgtcacagagtcttgggcatgtgcagtatttcggtgcatcttattggaggtgagaagatctttagacattttctaagatagtcaatctgtggacaagtatagggcttttttgcattttttccatgtcttaataggaaaccagaatcatttaataaatcattcatcaacaattaagattaatttactcagttcagctctacaaatgttgggtttctattatgtgccaagcacttagctgggtactaagataagtaaagtgtggtttttgattttcttgatagaacatagaaaaacaacatttagatcatcatgaaaacggtgaaggattcagtgagagtttttagacaggatgtgtgaaccgaggtcaagttctcctgtagaacggtggtgaagaggacagtaggaagagagtgaaggaagagagtgaaggagtaggaagagagtgaaggaagagagtgaaggagtaggaagagagtgaagagagttgagccctcttccaccacagcatctctcactcatccaggtccctcatccaggttctgctggttatttgttttttgggttttgtgaagattatatatcgtttgcgttgagtattagataacagtaggtggtctccgggacacagcctgtaatgcagtacattgctgtttctctggcagcacaggtgcgtgttcaacaccaggggctcgaatgaagtctccgagtagctttatgttagtgttttgccaccaactgattaaactttgcattttcgttacttttcaactttcagaattgtgaataagggattatgaaccttccccgaatatatgttaggagggagatgagagcaaaggtatatgcagatagcaagtcgccatgcrcggcaggtaaggagtttaggattcatcctgcaggtgatggggttattgaaagtgccgtctgatggcaagcacaaaatgc

SEQ ID NO: 1705 - DNA, 1196 bp, Homo sapiens
ctttattacaattcttcttgtgatcagtaaacattcacaaaacactcttatctcaaagaaaatcgttttgtaaaaaattcactacgtagatactggattttcaggtgaattctatgacatccgcttttaatagataatagcatgaggtggtgagacagcttgtttcttaactttcagttgccttttttcagtctcctaaaataatgtgcattattggtaaatctgcaagaattatcagctccaccagattaatttttaaaaatgaagttcttgaaacagctttattattttaatatttcaaattaaaataggtaaagaaagattcattgccctttcaaaataacttcttaaaataatttttcccagtgtgtctataatctcccctaataacattttaggagtcattgcttgctatttctaaaagaacacatgcaaacttatatgctgtgcttttgtgtatccacaatgatgaacttaaaacataggaaaggaacatgaattttatattgctttctttggagacaattaaacttctaagtctgctaacgtgtagtttctagaatcratgtaagcaattaaaaaactgcaacaaaaatgttttgtgaggcataattactataaggtcactagatattacttggagtcagtttagtttatcacattacgacatgacaggacgtgaggcaaaaattataaattccttccctaaatctgtccttttctgatctagatggatgaagaataattaactcttaattattcagatgacttcaaggcagttttaggattcagtaaagattgcagtcattttaaccaagaaaagcagtctcccatcatttatcaaatcttgcaacttgaccaatgatgaataaaaaaaatctatgtttacccacagccctaactgctaccttagaggttgttaagcaacaaatttcctttaaactctaccatatgcaaatcatcagatgcaatttgcattttaaagtatttaactctacatatttattggattttgaggccatgctgatcattgatttatgtgcttctggcaatcatatttccatatttgtatgattttgatgacagtaataattcaaatatgcagaaagttgttctttgaacaatatctttaattacgtcctcaaagcatcattgttttgcccggtgtcctgacaaaaagggtttgaaataagaaa

SEQ ID NO: 1706 - DNA, 596 bp, Homo sapiens
tatttttccccaacgaaaacaaatttaggaagaagggaggcactgttttacattttttgcaaatctctgtaacacctggcttaatagaagrtagctagattctcacatttgcttctgatttctgatgcagtatgacgtgcagtggagtttctggaaaactccactgtacactcatgagagagtaagcgagaaaggaaaataatgtctttatattatcgtgaaaatagtttgtcattaaagatcccctgagaaggcctcagggacccccaacagttcccagaccacactttaagaaccactttaagtcaccattgcaatcattaattctattttaataaattatacctaatatttattaagttctaggtattaagtgttttaaattcattgactcttaattctcataacagcctcattagattgggtactcattattgtccccattttacagagaaggaaactgaggcagacaaagttaggcactgtgccctgggccacacagtgagcaaaggccagggtccagatttcaacccactgtgcctcaacactctgcctttccaaaaagtctcagtcttggccgggcgtggtggctcacg

SEQ ID NO: 1707 - DNA, 596 bp, Homo sapiens
tatttttccccaacgaaaacaaatttaggaagaagggaggcactgttttacattttttgcaaatctctgtaacacctggcttaatagaagatagctagattctcacatttgcttctgatttctgatgcagtatgacgtgcagtggagtttctggaaaactccactgtacactcatgagagagtaagcgagaaaggaaaataatgtctttatattatcgtgaaaatagtttgtcattaaagatcccctgagaaggcctcagggacccccaacagttcccagaccacactttaagaaccactttaagtcaccattgcaatcattarttctattttaataaattatacctaatatttattaagttctaggtattaagtgttttaaattcattgactcttaattctcataacagcctcattagattgggtactcattattgtccccattttacagagaaggaaactgaggcagacaaagttaggcactgtgccctgggccacacagtgagcaaaggccagggtccagatttcaacccactgtgcctcaacactctgcctttccaaaaagtctcagtcttggccgggcgtggtggctcacg

SEQ ID NO: 1708 - DNA, 2294 bp, Homo sapiens
tggggaattatgacaaatgctttctttgcagttcctttaaggactgtgtctctcttgatatagctttctggcttaaaaaacgtttgcctagtgcctgcatctgtttacagaaaatctgacgtgttggtaaatttgcaccttgagtgtcctccaagtaacagctttagtccaaacccaggttctaagggcaaccatccctagccttttaatcacatacatcactctctattacttaatcattgttattattattattattgagacagagtcttgctctgtagctcaggctggggtgcagtggcccaactgctgctcattgcaacttctatctcccgggttcaagcaattctcctgcctcagcctcccgagtagctgggactacaggagtgcgccaccacacccagctaatttttgtatttttagtagagacggggtttcaccatattggtcaggctggtctggagatgcctttttcatcaacagatcagcatggccatgtgtgcgctgaaggcttaaggttgctagatctttccatttatcttgagggaagctggagatcttgaaatttaaatacaagcatctgatttttaattattagcaactaattcagaaaattcaagcatctagcctgggcctggcatcttgctggctttagtctccatgctaagagtgaaagtgagcatgtgtagggtcttaccacctcttcttcctttacgagtctaaatggctatcaggaatcaaagacacatggactttttgttagagggactaaggagtgtcagtatcacaactgaaatggagagtacaaaaaaaaaaaaaaggctggacttggttgaggggacagtgtggaaaaactgatgtgggactgtgacctcagtgggacatcggactggtgatgcccattgtagtttcccggggctgccctaacaaagtcacacagctggggggcttaaacagcagaaacttactgtctcatagtgccggaggctggaggtccaagatccaggcgttggcagggttcgtttcttctgagggctgagaaggaagaatctattccatgcctttcttctggctcctagggaattgccggtaattcatgttccttggccttgagatgcatcacctgtctttacgtccatgttcccttggcattcttctagtgtgcatgtctatctgtgggtctgaacgtcctctttttatacggacacagtcatgttggattagggcacgctctaatgacctcaytttaacttgataatttgcaaagaccctatttccaaataaggccacattcacaagtcctggggcttaggaattcaacctattttgggggatacaatgtaatccataatatctacttagcaattgagtataggattctgaaattctgaagagaggcttgatttaggtataattggcatttaggtggctgttcaacgcagaaagtaacgtaaagaacaatgttcaggtgagtcttgtttggggatttaaaagatgaaagattctaaggatgtgtaatatacgaagtttggtgcttctcaaactttaatgtccataaagtagaaatactggtattcaacttacaatcccaattattacattattattatttgaagggctccagaaggagatctgtgtttttcagtattttttccccattctcattccaggaagaagttccaaaatacattagagaaactattaatttttttttccaaatggacttttctcaccccacaagttggcctcccttggggtgactcctgccctctcctctgccttcccacactcagcaatgtgtcttggttgaagatactggttggaggtttaagatcaatgcccttcgtcctgacaggcagtgaactggtttttcagaacctttctcatgactccaggaagtgcacatgtaattaaactgagtctgtgttgggtttcagattagtgaagtgtgcctgtggcaaaaggtctcttccttcctgagagacgcagcggtgtaattagaatccggagacggattcatcagcatttcttaccagcgtttctacaggatgctccaatattcatctgggcctagttctgcttcctgggagaccatgggatgttgttgctggatgccatctgctggcaaaatgcaggggttcctctcgggtcacttgggtgacactgggggttcagtccattccaagcaagttagctgagagcccaggtaaaagtcagtagcaggctggtaagtgtctgtccttatttccaagtcagtattaaaatggtccaggcgtaaggctggctccaaatcc

SEQ ID NO: 1709 - DNA, 2294 bp, Homo sapiens
tggggaattatgacaaatgctttctttgcagttcctttaaggactgtgtctctcttgatatagctttctggcttaaaaaacgtttgcctagtgcctgcatctgtttacagaaaatctgacgtgttggtaaatttgcaccttgagtgtcctccaagtaacagctttagtccaaacccaggttctaagggcaaccatccctagccttttaatcacatacatcactctctattacttaatcattgttattattattattattgagacagagtcttgctctgtagctcaggctggggtgcagtggcccaactgctgctcattgcaacttctatctcccgggttcaagcaattctcctgcctcagcctcccgagtagctgggactacaggagtgcgccaccacacccagctaatttttgtatttttagtagagacggggtttcaccatattggtcaggctggtctggagatgcctttttcatcaacagatcagcatggccatgtgtgcgctgaaggcttaaggttgctagatctttccatttatcttgagggaagctggagatcttgaaatttaaatacaagcatctgatttttaattattagcaactaattcagaaaattcaagcatctagcctgggcctggcatcttgctggctttagtctccatgctaagagtgaaagtgagcatgtgtagggtcttaccacctcttcttcctttacgagtctaaatggctatcaggaatcaaagacacatggactttttgttagagggactaaggagtgtcagtatcacaactgaaatggagagtacaaaaaaaaaaaaaaggctggacttggttgaggggacagtgtggaaaaactgatgtgggactgtgacctcagtgggacatcggactggtgatgcccattgtagtttcccggggctgccctaacaaagtcacacagctggggggcttaaacagcagaaacttactgtctcatagtgccggaggctggaggtccaagatccaggcgttggcagggttcgtttcttctgagggctgagaaggaagaatctattccatgcctttcttctggctcctagggaattgccggtaattcatgttccttggccttgagatgcatcacctgtctttacgtccatgttcccttggcattcttctagtgtgcatgtctatctgtgggtctgaacgtcctctttttatacggacacagtcatgttggattagggcacgctctaatgacctcacyttaacttgataatttgcaaagaccctatttccaaataaggccacattcacaagtcctggggcttaggaattcaacctattttgggggatacaatgtaatccataatatctacttagcaattgagtataggattctgaaattctgaagagaggcttgatttaggtataattggcatttaggtggctgttcaacgcagaaagtaacgtaaagaacaatgttcaggtgagtcttgtttggggatttaaaagatgaaagattctaaggatgtgtaatatacgaagtttggtgcttctcaaactttaatgtccataaagtagaaatactggtattcaacttacaatcccaattattacattattattatttgaagggctccagaaggagatctgtgtttttcagtattttttccccattctcattccaggaagaagttccaaaatacattagagaaactattaatttttttttccaaatggacttttctcaccccacaagttggcctcccttggggtgactcctgccctctcctctgccttcccacactcagcaatgtgtcttggttgaagatactggttggaggtttaagatcaatgcccttcgtcctgacaggcagtgaactggtttttcagaacctttctcatgactccaggaagtgcacatgtaattaaactgagtctgtgttgggtttcagattagtgaagtgtgcctgtggcaaaaggtctcttccttcctgagagacgcagcggtgtaattagaatccggagacggattcatcagcatttcttaccagcgtttctacaggatgctccaatattcatctgggcctagttctgcttcctgggagaccatgggatgttgttgctggatgccatctgctggcaaaatgcaggggttcctctcgggtcacttgggtgacactgggggttcagtccattccaagcaagttagctgagagcccaggtaaaagtcagtagcaggctggtaagtgtctgtccttatttccaagtcagtattaaaatggtccaggcgtaaggctggctccaaatcc

SEQ ID NO: 1710 - DNA, 2294 bp, Homo sapiens
tggggaattatgacaaatgctttctttgcagttcctttaaggactgtgtctctcttgatatagctttctggcttaaaaaacgtttgcctagtgcctgcatctgtttacagaaaatctgacgtgttggtaaatttgcaccttgagtgtcctccaagtaacagctttagtccaaacccaggttctaagggcaaccatccctagccttttaatcacatacatcactctctattacttaatcattgttattattattattattgagacagagtcttgctctgtagctcaggctggggtgcagtggcccaactgctgctcattgcaacttctatctcccgggttcaagcaattctcctgcctcagcctcccgagtagctgggactacaggagtgcgccaccacacccagctaatttttgtatttttagtagagacggggtttcaccatattggtcaggctggtctggagatgcctttttcatcaacagatcagcatggccatgtgtgcgctgaaggcttaaggttgctagatctttccatttatcttgagggaagctggagatcttgaaatttaaatacaagcatctgatttttaattattagcaactaattcagaaaattcaagcatctagcctgggcctggcatcttgctggctttagtctccatgctaagagtgaaagtgagcatgtgtagggtcttaccacctcttcttcctttacgagtctaaatggctatcaggaatcaaagacacatggactttttgttagagggactaaggagtgtcagtatcacaactgaaatggagagtacaaaaaaaaaaaaaaggctggacttggttgaggggacagtgtggaaaaactgatgtgggactgtgacctcagtgggacatcggactggtgatgcccattgtagtttcccggggctgccctaacaaagtcacacagctggggggcttaaacagcagaaacttactgtctcatagtgccggaggctggaggtccaagatccaggcgttggcagggttcgtttcttctgagggctgagaaggaagaatctattccatgcctttcttctggctcctagggaattgccggtaattcatgttccttggccttgagatgcatcacctgtctttacgtccatgttcccttggcattcttctagtgtgcatgtctatctgtgggtctgaacgtcctctttttatacggacacagtcatgttggattagggcacgctctaatgacctcactttaacttgataatttgcaaagaccctatttccaaataaggccacattcacaagtcctggggcttaggaattcaacctattttgggggatacaatgtaatccataatatctacttagcaattgagtataggattctgaaattctgaagagrggcttgatttaggtataattggcatttaggtggctgttcaacgcagaaagtaacgtaaagaacaatgttcaggtgagtcttgtttggggatttaaaagatgaaagattctaaggatgtgtaatatacgaagtttggtgcttctcaaactttaatgtccataaagtagaaatactggtattcaacttacaatcccaattattacattattattatttgaagggctccagaaggagatctgtgtttttcagtattttttccccattctcattccaggaagaagttccaaaatacattagagaaactattaatttttttttccaaatggacttttctcaccccacaagttggcctcccttggggtgactcctgccctctcctctgccttcccacactcagcaatgtgtcttggttgaagatactggttggaggtttaagatcaatgcccttcgtcctgacaggcagtgaactggtttttcagaacctttctcatgactccaggaagtgcacatgtaattaaactgagtctgtgttgggtttcagattagtgaagtgtgcctgtggcaaaaggtctcttccttcctgagagacgcagcggtgtaattagaatccggagacggattcatcagcatttcttaccagcgtttctacaggatgctccaatattcatctgggcctagttctgcttcctgggagaccatgggatgttgttgctggatgccatctgctggcaaaatgcaggggttcctctcgggtcacttgggtgacactgggggttcagtccattccaagcaagttagctgagagcccaggtaaaagtcagtagcaggctggtaagtgtctgtccttatttccaagtcagtattaaaatggtccaggcgtaaggctggctccaaatcc

SEQ ID NO: 1711 - DNA, 2294 bp, Homo sapiens
tggggaattatgacaaatgctttctttgcagttcctttaaggactgtgtctctcttgatatagctttctggcttaaaaaacgtttgcctagtgcctgcatctgtttacagaaaatctgacgtgttggtaaatttgcaccttgagtgtcctccaagtaacagctttagtccaaacccaggttctaagggcaaccatccctagccttttaatcacatacatcactctctattacttaatcattgttattattattattattgagacagagtcttgctctgtagctcaggctggggtgcagtggcccaactgctgctcattgcaacttctatctcccgggttcaagcaattctcctgcctcagcctcccgagtagctgggactacaggagtgcgccaccacacccagctaatttttgtatttttagtagagacggggtttcaccatattggtcaggctggtctggagatgcctttttcatcaacagatcagcatggccatgtgtgcgctgaaggcttaaggttgctagatctttccatttatcttgagggaagctggagatcttgaaatttaaatacaagcatctgatttttaattattagcaactaattcagaaaattcaagcatctagcctgggcctggcatcttgctggctttagtctccatgctaagagtgaaagtgagcatgtgtagggtcttaccacctcttcttcctttacgagtctaaatggctatcaggaatcaaagacacatggactttttgttagagggactaaggagtgtcagtatcacaactgaaatggagagtacaaaaaaaaaaaaaaggctggacttggttgaggggacagtgtggaaaaactgatgtgggactgtgacctcagtgggacatcggactggtgatgcccattgtagtttcccggggctgccctaacaaagtcacacagctggggggcttaaacagcagaaacttactgtctcatagtgccggaggctggaggtccaagatccaggcgttggcagggttcgtttcttctgagggctgagaaggaagaatctattccatgcctttcttctggctcctagggaattgccggtaattcatgttccttggccttgagatgcatcacctgtctttacgtccatgttcccttggcattcttctagtgtgcatgtctatctgtgggtctgaacgtcctctttttatacggacacagtcatgttggattagggcacgctctaatgacctcactttaacttgataatttgcaaagaccctatttccaaataaggccacattcacaagtcctggggcttaggaattcaacctattttgggggatacaatgtaatccataatatctacttagcaattgagtataggattctgaaattctgaagagaggcttgatttaggtataattggcatttaggtggctgttcaacgcagaaagtaacgtaaagaacaatgttsaggtgagtcttgtttggggatttaaaagatgaaagattctaaggatgtgtaatatacgaagtttggtgcttctcaaactttaatgtccataaagtagaaatactggtattcaacttacaatcccaattattacattattattatttgaagggctccagaaggagatctgtgtttttcagtattttttccccattctcattccaggaagaagttccaaaatacattagagaaactattaatttttttttccaaatggacttttctcaccccacaagttggcctcccttggggtgactcctgccctctcctctgccttcccacactcagcaatgtgtcttggttgaagatactggttggaggtttaagatcaatgcccttcgtcctgacaggcagtgaactggtttttcagaacctttctcatgactccaggaagtgcacatgtaattaaactgagtctgtgttgggtttcagattagtgaagtgtgcctgtggcaaaaggtctcttccttcctgagagacgcagcggtgtaattagaatccggagacggattcatcagcatttcttaccagcgtttctacaggatgctccaatattcatctgggcctagttctgcttcctgggagaccatgggatgttgttgctggatgccatctgctggcaaaatgcaggggttcctctcgggtcacttgggtgacactgggggttcagtccattccaagcaagttagctgagagcccaggtaaaagtcagtagcaggctggtaagtgtctgtccttatttccaagtcagtattaaaatggtccaggcgtaaggctggctccaaatcc

SEQ ID NO: 1712 - DNA, 559 bp, Homo sapiens
cggggctactgattgagagagctttaaaaaatatgaagtccaatacaaacgagtgacatcgttgccagcattgttatcccaaatttatccccatcaatctcagcactagcagtgtaatcacagctaatccgcttgcgcatacagctgtgacagtattttaaaaggcagtcacacgggtctccatctgccagaaacgcagtcgcctcttctgctgaataaacccaaacaggtaaatggtgctgatgtgacagctcctttatcaccagccttctctgcttcggaatttttacttcaaaggaaagcgttaactattgtttcaaatgggaggaacagagaagagagcagaaagataaaaaaacatctctggggttataatagaagctagaccttcgagaagcaggacagtgctttagaaagcaatgcttgggcagaaacagaaagatctggggacagatcccagctccatgactgagtcagctgtgtgtccaaggatgtcatttaacctcactgaatggcagctttctctgaatgcrcctaggttgaaaattaaacatgccca

SEQ ID NO: 1713 - DNA, 1297 bp, Homo sapiens
accatagtggatagtgtagttgctacaagaactcagagggataatttgtgtaaaagaaggagggctgtgaaagatgtaatgacataagtggacaagcagacaagtgtgaggataatgctacaggtgggcataactgtgggagcagagcttgcacgtaggaaacttctggacctgttccagggccaccaaaaacagttgagctaaaacttgttaattgtcagatgatgtaaagcctaaatttatcatttcaactgtggaagttcagtttaatattcactaaactataagatcaatagattgcacgtatttcaaagtataccttaaatagcaaacagcatgcgtgtaagccagttggcaagcagagtagacattcaagactcaatcaatatagttgcagttgcgtttagaagacttaagagtttactcagtttttctgtaactgaattttagagtgataggcactgaaacttacagtgccctttgccagcatttgtctcagcatttgtcaagctattttgaagtttcattgtcctattaatgaagactctgctagttcaaggtttatgacagtttagactggatagttgccaatactactaccactacaaataataataacaataatagctaagttctattgaatagtttacctaatgctgagtactttacatagatttttatctcttttaatctttccgccattcttatagtgaaaactatcatttccccatttgagatatgaaaatattgtattttagagttattaagcaatttttaaaaatcactcagctgccgactggagtcagaatttgaaccttgactctgattccaaagcttactgcttaagtttattttaaagtttttaataaaagtattttcaaaataaattttcagtgtaaataagattgccaccctattattgaaacatacttagaaaatgaaaattctgaactaccctcaaaagctttactagaaatatttacttgtaaaaatggattggtagaaggccaagtattttaatctattaattaaaataattcattcaaggaaatccactgagtactatactattaagcatatatgctttttgagttttaaagcagcraagtcatgtttctttaaatgttttataattgaggtttacatattttaacttaactttccctctagttatgccagtctaatgtatttttattttattcatgaaaattatgtaagtacaaactctcaatattaaggtttgtcaatgtataatttcaaaatatagcaggaagacaaatatttttaattgaatgca

SEQ ID NO: 1714 - DNA, 629 bp, Homo sapiens
tgaaaatgaaattcctttcagtctagagtgtttctccagatgataattaacttrcaggtgtgcaccaccacaaaattcacaaacacttggttaaataaatatatagtgatattaaagcttttctacatgtaaagggaaaggatggtaagaggaggttactacaggatatgagatttaaatggtaaatacaataataaaaggacatgtaaacaaaagcaaatttgggaatgaaattcagcatctaaactttagaaaatagatatactattgaacactgagtcttgtttcagtagtaaaattatttactctcaaagttggataaacttagaaatcttttgaggatttttttctgcctatttatggcatcttatcatttaaagtcaactggaaataatagccaattgattccagctgattcttttacttgtaaataatttaattcctatccaataaagtacattttgtacattacgctacatttttgttcatttatcaaatacttagtgatactaaacatatgttactacatcccagaaatatattgcacagggctctgactttcagtactttctcacacattttggccaagttttggagtctgataatttcacattttggccccacccctt

SEQ ID NO: 1715 - DNA, 1205 bp, Homo sapiens
tgcatttatcacatgttcacctgcagacacacacacacacacacacacacacacacagtcttaggtcttaggtctttaaagaaaactcgttttggttgtcagggaagaaggcttagattcttagttttccagaatagaagaggatctgttttcctgagattagaaatgagatctataatttatactcctcttatattttgctggactttcaattgtttatttggtatttaaataagccaatagttcctgtttggtaccctacctctttaatgtcctttaatagtttgcaatttttccccagtgcttctactaccagcttttcagcagcaaccaaaatcaattcttccccgctctggggccaacaagctcccctctgccatcccactcctcactgtgagagcaattcaatgcccacagccatttgcaggtgcaagagatgcagctccgagcacctctgaagtaggacttcacaacctttctgtaacggaaaatgggtggactgagatctcagcaggcagctgcctctggtttcctttcctggctgcaatctggtggatgggtgctagccagacttaggggttactgcaaaacgggctgaaaggagtgtttgagaagccaggagtgccagccacacacatggaatgctttacctagagtgaacacacatcgtgttcttgctgtactgcatctttctttgcaatccaacttttctctatataaaaggagtggggagaggaggcagtatctttttattgttgttgttgttccttggacagtggactatttttgtttttatttttaaacatcaatcagacatttaccaagatagcatgtggaatggacttgaagcttgtacagccttcggtctatttccacagacatgacctctgcattatagataatgccaagctacttctccagcccatgagaatgtttcagatatcttccacgtttatgactactttagacaatctaaattttacccctaggcacttgtgaaaaggcacagctgttacccagtaaggttaacagaagagcctatctgttcktagagagagcaggcccctggcagcttgtcacagtgtttacctgtaaggcagctgtgtgttgtgaaaagaggccctcactcgggcacgagcaaagctatgttctgccctgatgcagaacttgcttactgatgataagcctcagtttcctcagatgca

SEQ ID NO: 1716 - DNA, 1205 bp, Homo sapiens
tgcatttatcacatgttcacctgcagacacacacacacacacacacacacacacacagtcttaggtcttaggtctttaaagaaaactcgttttggttgtcagggaagaaggcttagattcttagttttccagaatagaagaggatctgttttcctgagattagaaatgagatctataatttatactcctcttatattttgctggactttcaattgtttatttggtatttaaataagccaatagttcctgtttggtaccctacctctttaatgtcctttaatagtttgcaatttttccccagtgcttctactaccagcttttcagcagcaaccaaaatcaattcttccccgctctggggccaacaagctcccctctgccatcccactcctcactgtgagagcaattcaatgcccacagccatttgcaggtgcaagagatgcagctccgagcacctctgaagtaggacttcacaacctttctgtaacggaaaatgggtggactgagatctcagcaggcagctgcctctggtttcctttcctggctgcaatctggtggatgggtgctagccagacttaggggttactgcaaaacgggctgaaaggagtgtttgagaagccaggagtgccagccacacacatggaatgctttacctagagtgaacacacatcgtgttcttgctgtactgcatctttctttgcaatccaacttttctctatataaaaggagtggggagaggaggcagtatctttttattgttgttgttgttccttggacagtggactatttttgtttttatttttaaacatcaatcagacatttaccaagatagcatgtggaatggacttgaagcttgtacagccttcggtctatttccacagacatgacctctgcattatagataatgccaagctacttctccagcccatgagaatgtttcagatatcttccacgtttatgactactttagacaatctaaattttacccctaggcacttgtgaaaaggcacagctgttacccagtaaggttaacagaagagcctatctgttcttagagagagcaggcccctggcagcttgtcacagtgtttacctgtaaggcagctgtgtgttgtgaaaagaggccctcactygggcacgagcaaagctatgttctgccctgatgcagaacttgcttactgatgataagcctcagtttcctcagatgca

SEQ ID NO: 1717 - DNA, 1009 bp, Homo sapiens
ttggtccttaagaactggatgtacagttgcctatttgcgaggacacggaatgactttaaacttcctggataaaatattttctataygtaccaagaaagagcttgggtttaaaatgtttagagtcattgtgattatgacttgttgagagtatgcttatagctaagtaattttctttccttttttcaaaagaaatgggtacggaggtgtatattctgagtcttacagggtcttaattgcctgccatgaggtagtatttaggagcatgattaaattggttaagacacatctagagaaaggaaacctccaagaaggaatgtacttgttaacactgcttctgtgattgaatttaggatttatagcacttaaaatttttaaaaaattgcctgtagtttatgtacacggtgttagagatgaactgaattattcgtaatgtatattttatgctaattcactggtaagtttctcaaataatagttatttaaaattcctcacttttcagaaactgcgtattctttagtaccaagatctctcccctgtcattgtgttcttctaagatatcactggtgctgtgatcgggagctatttgttcaatcatgacctgtggggctttcttaacctcttataaacttaagtgccaatcactaggctggatataattacactttggtgatttctttgagctttaagggctaatgaatagcctcaagtatttaaataactgcttgaactttcttaattgatacaaactgtctgtaataattccacttagtctggtatgccacctgaacagctttatcttgggtttacatacttaattgatagtgttcaatggtacatgatatttatatgagcctttgtcttactgaactgcatgtgagataaccattctaagtcatattttaaagctgtattccaacttcataaacaaatacattagaatcaatgtttgtgttccaggcctgaacaaatattattttatgtcaaattttgttagtcttttgtaaacata

SEQ ID NO: 1718 - DNA, 1009 bp, Homo sapiens
ttggtccttaagaactggatgtacagttgcctatttgcgaggacacggaatgactttaaacttcctggataaaatattttctatatgtaccaagaaagagcttgggtttaaaatgtttagagtcattgtgattatgacttgttgagagtatgcttatagctaagtaattttctttccttttttcaaaagaaatgggtacggaggtgtatattctgagtcttacagrgtcttaattgcctgccatgaggtagtatttaggagcatgattaaattggttaagacacatctagagaaaggaaacctccaagaaggaatgtacttgttaacactgcttctgtgattgaatttaggatttatagcacttaaaatttttaaaaaattgcctgtagtttatgtacacggtgttagagatgaactgaattattcgtaatgtatattttatgctaattcactggtaagtttctcaaataatagttatttaaaattcctcacttttcagaaactgcgtattctttagtaccaagatctctcccctgtcattgtgttcttctaagatatcactggtgctgtgatcgggagctatttgttcaatcatgacctgtggggctttcttaacctcttataaacttaagtgccaatcactaggctggatataattacactttggtgatttctttgagctttaagggctaatgaatagcctcaagtatttaaataactgcttgaactttcttaattgatacaaactgtctgtaataattccacttagtctggtatgccacctgaacagctttatcttgggtttacatacttaattgatagtgttcaatggtacatgatatttatatgagcctttgtcttactgaactgcatgtgagataaccattctaagtcatattttaaagctgtattccaacttcataaacaaatacattagaatcaatgtttgtgttccaggcctgaacaaatattattttatgtcaaattttgttagtcttttgtaaacata

SEQ ID NO: 1719 - DNA, 1009 bp, Homo sapiens
ttggtccttaagaactggatgtacagttgcctatttgcgaggacacggaatgactttaaacttcctggataaaatattttctatatgtaccaagaaagagcttgggtttaaaatgtttagagtcattgtgattatgacttgttgagagtatgcttatagctaagtaattttctttccttttttcaaaagaaatgggtacggaggtgtatattctgagtcttacagggtcttaattgcctgccatgaggtagtatttaggarcatgattaaattggttaagacacatctagagaaaggaaacctccaagaaggaatgtacttgttaacactgcttctgtgattgaatttaggatttatagcacttaaaatttttaaaaaattgcctgtagtttatgtacacggtgttagagatgaactgaattattcgtaatgtatattttatgctaattcactggtaagtttctcaaataatagttatttaaaattcctcacttttcagaaactgcgtattctttagtaccaagatctctcccctgtcattgtgttcttctaagatatcactggtgctgtgatcgggagctatttgttcaatcatgacctgtggggctttcttaacctcttataaacttaagtgccaatcactaggctggatataattacactttggtgatttctttgagctttaagggctaatgaatagcctcaagtatttaaataactgcttgaactttcttaattgatacaaactgtctgtaataattccacttagtctggtatgccacctgaacagctttatcttgggtttacatacttaattgatagtgttcaatggtacatgatatttatatgagcctttgtcttactgaactgcatgtgagataaccattctaagtcatattttaaagctgtattccaacttcataaacaaatacattagaatcaatgtttgtgttccaggcctgaacaaatattattttatgtcaaattttgttagtcttttgtaaacata

SEQ ID NO: 1720 - DNA, 1009 bp, Homo sapiens
ttggtccttaagaactggatgtacagttgcctatttgcgaggacacggaatgactttaaacttcctggataaaatattttctatatgtaccaagaaagagcttgggtttaaaatgtttagagtcattgtgattatgacttgttgagagtatgcttatagctaagtaattttctttccttttttcaaaagaaatgggtacggaggtgtatattctgagtcttacagggtcttaattgcctgccatgaggtagtatttaggagcatgattaaattggttaagacacatctagagaaaggaaacctccaagaaggaatgtacttgttaacactgcttctgtgattgaatttargatttatagcacttaaaatttttaaaaaattgcctgtagtttatgtacacggtgttagagatgaactgaattattcgtaatgtatattttatgctaattcactggtaagtttctcaaataatagttatttaaaattcctcacttttcagaaactgcgtattctttagtaccaagatctctcccctgtcattgtgttcttctaagatatcactggtgctgtgatcgggagctatttgttcaatcatgacctgtggggctttcttaacctcttataaacttaagtgccaatcactaggctggatataattacactttggtgatttctttgagctttaagggctaatgaatagcctcaagtatttaaataactgcttgaactttcttaattgatacaaactgtctgtaataattccacttagtctggtatgccacctgaacagctttatcttgggtttacatacttaattgatagtgttcaatggtacatgatatttatatgagcctttgtcttactgaactgcatgtgagataaccattctaagtcatattttaaagctgtattccaacttcataaacaaatacattagaatcaatgtttgtgttccaggcctgaacaaatattattttatgtcaaattttgttagtcttttgtaaacata

SEQ ID NO: 1721 - DNA, 1158 bp, Homo sapiens
gcatttttttaactttcttctgatttggaaatataagaaccacaatgatcaattttgtctctcagataaaaagatcaccaaaataattttaaaataatattatattgacagtaaataaataaatgtttacaaataaattcattgtttcagttaaactctttaattctaattccaccatgatcttctattatctccccaagttagtgttggggtggatagggagtgaggtgggagagaattgtctccatctgtgtaatcactgttgacctcacaaaatgtggagggagagagagaaagtggaggaagcaggttcatgtaattcatgaaattaatatcattcataactttccttaaacaattcctttttatgattttcaactccaaaaaatacataaatttgatcatctcatttctatcgctagtgccccactgtctatagggartcacagcccgaattacagaccccaggagggttaggctgtacctccctctcctatccatagccagggctgcagcagttttaaaacatctgcctggctgcttcaggccctctcacattttcctgcgtctccacagagtagaactattcaagacatctacctttcctaggaaggcttctagccctcacaagcactccctcttctctgcatccttgccagacctctgttattccacagatcatgttgcaagacaaatgtttatttcctgtcacttaatttcagaccgctgaagggaaaaaaaagagtggaaaatgaatcatctgtgtatccttgtgatcaactgcagtgtcctgtataacccaataatactaaaagaatgaagatagcaagtttatgatctacctcacttcacaattaagctgatatgatctaaaccaaacatttattaataattgaaatgtcagtagtcaaagatataaataacactcaaatgtgaagggtaaatgataaaaggaagcaggtcattgatagagagggcacaacgcttctcctgcctttggtcccatatccactgtgatctcccccttagctttttttcttctttgttacccctcagaacagtgtaatactgtgttttcatgtgaccctgagccttcactgagccactggtgagcactgtgttagaagcctcttcctagactctatcatcacctggcta

SEQ ID NO: 1722 - DNA, 582 bp, Homo sapiens
ccaacaaaactttatgtaccaaaacaagcagtgagctggattttgcccaagggctactgttggtcacctcttatacttagataattaacacaaccacaaatcgggcctgatttttagcatgtgccattttcatggtgcaaatattctcaccattactaattttaagttagcaacgtaacatcatcgcatgccaaattagaaagagatgggaaataaaacaccattatctagtatttccacatcataaataacatatataaataacctaaggagtatgggtaataggaacaggtagtaaaataattagaaattgatgagtttttgagtatttattaacttagttgttaacatgttttatttacttggaaacgtatataattaatttaatttatttaattgctgtgcttaaaaagtgatgcataaaattcctgaaaacttaagaatctgttttcttgagctgataataggtgtgggttccygcacatcgttgccacagctgtatctctttcttgaaaccctctctactctctgcatctcctactttaatctggtttcttcttccttctttgaatttcctttatt

SEQ ID NO: 1723 - DNA, 582 bp, Homo sapiens
ccaacaaaactttatgtaccaaaacaagcagtgagctggattttgcccaagggctactgttggtcacctcttatacttagataattaacacaaccacaaatcgggcctgatttttagcatgtgccattttcatggtgcaaatattctcaccattactaattttaagttagcaacgtaacatcatcgcatgccaaattagaaagagatgggaaataaaacaccattatctagtatttccacatcataaataacatatataaataacctaaggagtatgggtaataggaacaggtagtaaaataattagaaattgatgagtttttgagtatttattaacttagttgttaacatgttttatttacttggaaacgtatataattaatttaatttatttaattgctgtgcttaaaaagtgatgcataaaattcctgaaaacttaagaatctgttttcttgagctgataataggtgtgggttcctgcacatcgttgccacagctgtatctctttcttgaaaccctctctactctctgcatctcctactttaatctggtttcttcttccttctttgratttcctttatt

SEQ ID NO: 1724 - DNA, 528 bp, Homo sapiens
atctgcaatctttacagcaacccagaaaagcaggttttacttctccattgtacaagaaactaaaaccgaaatgcaggtaagtgatgtgctcaaagtcacacaaatagaatgtggcaaagacagaagttggccccaagccaagtctgcctaattcccaaacctatgctcaatccctcacccacagagagtggcgagatgaccagtacacttgaaggagcagcccaccagcttagtcttgtgccccagcaaaattacaggaatgtgttgaaactcactgttctcatctataagattactctacacaatcttcaggaacccagaaaaataaattcccagaatgagtggggattctgggatctgtacttttytttaaatgtggtttgtttttgcaaagtcagttacctaattaaatcctttgccattctcagattattctcatgaaaaaattgacgtcaacacagagaaaaaatgtccttagatctacaaaagcacgagaaagctgtctaggctacataaactctgtttgct

SEQ ID NO: 1725 - DNA, 1009 bp, Homo sapiens
tgcataatggttatatgtactttgaacctttagaattcaatgartacaattcagttatatttttaggcatgggctacgggaagcgcagttgctttaaatgttatctataaaagccttagctggcagttgagctttttcatttcgtttttctcttatctctctagaagtgaggagataatttttagaaataaataacattctaaagcgggggaagaaacactcaacattcaatgatcagatcttagggaatgctttgttcctatttcagctaaagggtataacactgattgaatgattttaagttgggatttttggcgactgttacattggacttcatattaaaataccacaacatgatactagtgtttccaaataaaattgtgtatctttctttggctagaaggtgttttctttcaatgaaatgaagcaaatgcacctgtgtagttaaaattctttatttttgttggtctctggaaagaaaaaaaatgtacgtagtattcaatatttaaattccattcttgcggcagaccgatgtagccatacaattggccacagaatccagattctgccatggaatttgccctgtggatatcacggtgtagccccactctcatgtggccgacacggaggtgagggggagtattccatttgctttgctttggctctggcttaggaaaattgcccaggcaattgctttttgtagcatgtaatgctgttagttcctatcacactgctaacagcctcccaccctcaagtagaccacaaagcagagagaagaaagaaaacttcttcttctactaaccatattggctcagtatcaatagaaaacaggagcttttcaatcctacctcctcagactctttgcggatttgggggcgccagagtggaattacttactctatcatgtaccaggtattacctggcattgtgcaaatattcttttcctaatatatgttttagaaagaaataaaatcttcagaaaagtccaaaaaaaaaaaaaaaaaaaagg

SEQ ID NO: 1726 - DNA, 1009 bp, Homo sapiens
tgcataatggttatatgtactttgaacctttagaattcaatgagtacaattcagttatatttttaggcatgggctacgggaagcgcagttgctttaaatgttatctataaaagccttagctggcagttgagctttttcatttcgtttttctcttatctctctagaagtgaggagataatttttagaaataaataacattctaaagcgggggaagaaacactcaacattcaatgatcagatcttagggaatgctttgttcctatttcagctaaagggtataacactgattgaatgattttaagttgggatttttggcgactgttacattggacttcatattaaaataccacaacatgatactagtgtttccaaataaaattgtgtatctttctttggctagaaggtgttttctttcaatgaaatgaagcaaatgcacctgtgtagttaaaattctttatttttgttggtctctggaaagaaaaaaaatgtacgtagtattcaatatttaaattccattcttgcggcagaccgatgtagccatacaattggccacagaatccagattctgccatggaatttgccctgtggatatcacggtgtagccccactctcatgtggccgacacggaggkgagggggagtattccatttgctttgctttggctctggcttaggaaaattgcccaggcaattgctttttgtagcatgtaatgctgttagttcctatcacactgctaacagcctcccaccctcaagtagaccacaaagcagagagaagaaagaaaacttcttcttctactaaccatattggctcagtatcaatagaaaacaggagcttttcaatcctacctcctcagactctttgcggatttgggggcgccagagtggaattacttactctatcatgtaccaggtattacctggcattgtgcaaatattcttttcctaatatatgttttagaaagaaataaaatcttcagaaaagtccaaaaaaaaaaaaaaaaaaaagg

SEQ ID NO: 1727 - DNA, 731 bp, Homo sapiens
tgtgcattaattcctctgctattctgcaacaaccgttttcagtagatattaacattaatgacatctttgtgaagagcaatgagctggccctgcagtctacacccactgagcgtgtcttcatggtttctctcttcaaaggtggataagaagagtcctttttggacttyccctctggacataaaaggccatctaatttctgtttctctatctttaaagaataaataaccttcagaaccaccatctcctctcctcggctctctcctgactattgctggcatctgttttcagtcatcctctacataccttccaagacttttctcttcatctgcctgaccttttctctttgacccagatctctgcacctcttttctcaatttgcactcctttttcctaattcctactcctaaacctttcttctttttcatatcaagctcatcgtttttgttttctcacttctaatactatcaaaaattgctgtcaacaattttaagtacttgaggtaaaatccagatgtttataatgagcagcagtgccaaacacaagacagttaatataaacaatatgtttacaaacttccttgtactggctagaatattcttaactcatataactagactgagtactgaatgtgcataagaaagaagaaagcattaaaatcattaaatttgaaagctcatacatctgtgttattttcataactttttcagactggggtacctaaggtagggaat

SEQ ID NO: 1728 - DNA, 1043 bp, Homo sapiens
acttatgagtgagaacaggcaacctacttaatgggagaaaatttttgcaatctatctatctgacaaaggtctaatagccacatcttttatactgatgatccctccagcttgtaaccaggcatcctgccactgagagtagattacattagcctcaaatatcacaaacaccctcyaaatgtgatcccccttttatttttccattctgtacaaatctgtcattcataattatgcgaacatctttggcaatctctatttttaatcaggacaacactgttgcttaatgtattctcaaaattacttctcattgtgcgaaattcaagttttatgctctctaaacatgtatctctcaagtttctagttgtagaaggcagaattttgttttccttcttcctccataccaagtaatttctgttccttcttgttacttccatggttgtgtttttttcttcacatggcaaaaaggactttgtgtatgcagttaaaattactcatcaactgactttaaaatagggagatgatcttgcattatctgggttacctcactgtattcacagaaatccttaaaaggcaaaatgggcagtcagagaggttcagtgcccaagaaagactcaacaggactatgttgattggaagatggagagagccatgtgaaaagcatgagaactgagatatgccaattagcagtgggcctacaagcctactccccagatcagaactgcagcccagcagcacctttatttcagccttgtgggatgctgagcagagaatctagccactctgttgcacttccgacctacagaaccatgagatactaaacaggtgctattttacgctgctaagtctttggtaataggaataaaaaactaacacatttgtgttgtatgagatagtggacatgcctataccttattaacatccttgattctagtgtagactttggatacatagcctgtctttcagtctggctgaaaatctcatggtgtcctgaagtgccctgcatgaccttcttttgattttatccatggccattttgattatttaat

SEQ ID NO: 1729 - DNA, 1251 bp, Homo sapiens
tttaattagatgttttgcatcttaattcacatagtacttaaaatcattccatatgtgtcacactattaagccatgttaactatggaatattggcataagagaaggcagtaatgtagtcaaggccatatagtgagcaaytggtagagctgaaatccacaccagttctttctgactttatagttcattttttatttacttcataatattttctgagataacaaattctaagaaaaaggctgactgtaaacactttgggtattttgatatcattgtttactctttcagtcatgtgttctcacaccacagtcattaaataatcagtataattgttaagaatcaaataattgtgatagaaggcaagtaaccaacattttctctttccagaaggtttcataattgctacaagagtttgcttatatattgcttgctataatcatcacaataatccttggaggtaaatacatataactgtctccatctgaatctcaaataagcaaagaagagctcagaacttaataactccctcaggtcaaccgccagtaagtgagagaggctgcatatagctccaggtctaagtgacttcaaatccatgctctaccccaggaggccacgtgcttgctctctaagagcaatgaaaattcttcactatggacaagtgcacattagaaattattatgcagcacagtgaaccatcagatattctattcccaattctaggaatctgcacatcatagggaagcgtttttaaaattatttagtatatttacttgcttggtttttttttaatcaaagccattggctgcctcacacagccaaatattttgcatagagatgttgttaagaacattgactgacttgtaaagatcctgagcagtaaaaattctgagcatcagaaatggtgaacatttataacatatttattttgttaattttttctcagaatgcctatatatctggacaaaattctaagtactgatgcaatgggtagctttaatgtatggagtatggattctcaaggtcaccttatgtagctctggatctcaaccctggattagcatgaggaacattagagatgtttgtaaaaatacagcttttcaggtcccatgattgatttggaatctttggaatacaatacagttatattaaacaatggctgtaaaatggattttgcttaacaatggcatggaggattcatgttatatcatctttgctgagctagaactgtacttcccagaattttctccttccatg

SEQ ID NO: 1730 - DNA, 564 bp, Homo sapiens
  misc_feature (1)...(564): n = A,T,C or G
atgtnnnnnnnnnnnnnnnnnnnnnnnnnnnnnnnnnnnnnnnnnnnnnnnnnnnnnnnnnnnnnnnnnnnnnnnnnnnnnnnnnnnnnnnnnnnnnnnnnnnntgctgcaacaaacatgggagtgcagatatctgttcggtacactgacttcctttctcttgggtatatacccagcagtgggattgctggatcatatgatagctccatttttagttgtttgaggaacctccaaactgttcttcatagttagttgttgtagtaatttatattctcaccaacagtgtatgaaggttcccttttctccacacccttgccagcatttgttatgccggctagactgcctcttaccatgcagatacatttctatttccatgctgactgttacttcatctttctatccatcacagtgcttcctacagcataggttctttrgctatcttttggttaatgacatgtctctttcttttcagatgtatgagacgagactttgttaagcaccttaagaagaaactgaaacgtatgatttgagaatacttgtccctggaggattatcacaccccaa

SEQ ID NO: 1731 - DNA, 1349 bp, Homo sapiens
ccataatatgtaattaaatacacagtgttaaatttttttgatattttactaaattttgctcttacatccaaagattttgaaatgacttccacttctactgtaatatactgatgctttcctttcagctatctgaaagccatagtgacccaattaagttcagcaataaatatttttgagcaatacagtttcaggttcaatgctgaacattggtaagccaaaataaataaggcactgtcttctgttagatgtagatgtggaaacgggaagacatatataattacactaccgtgagacattcacaataataaaatacagatgtggtacagagaagtcagtggctgactctttgggaaatgggcagtgaggaaatgatacctgagcagaattttgaccaggcagacatttaaggcaagagcaaatggaaaggtgaaggcactgacaagcacaggaggttccaggaaatgcaaataggtcagtctaacaggagaattatgttacaagaagtgaagaaagacatgactggaccatgggcaggaccatataaggaaaagccttttcataatgagaaacttggactttacgctacaggtaatgggacagcaattccatattagaagaagtgtgatggaggtcagattagcattccagatagacccatttttgtaggaatttgcaggaacaaaacccaaagaaaagcaataaatgaggggccaatttttatagaccagttgggatatgaaaataactagaacgttgagaatagaagaggattgagtcaaataagtaaataagggctttttaaaataagcacacattatttaagtcaactgttatctttcccatgcgtgacaagtggttatgagccaaattttctttatagccaaccactgaccaaagtcatttgggcaagcttgacattcagcacaatgtgtcctccttgataaatgttctaaggagccaagacagtcacctgtcaaaattgataagtgagacgacagtggggaatgcaggcttatttgtaacggcacagctgccagcatttgcagcctgtttacctctagactgattctgtctcactctgagrtttttctatttccacccaaatagcccccaaaacacattgaggctatgcctacctatgtgagatattcattccagaccagtctgcaagtgcaggaggaggataaagaggctactttcattaggctattttcacaactgaagagtttcaatagctttaaaagagacggcatgaacttcatcaattctctgtagccatttagcaaaaagggtagtaaattctgtgaaatagattacagtagtgcctacttctaaaatcctaaaatgtt

SEQ ID NO: 1732 - DNA, 1179 bp, Homo sapiens
tgcatggctagatgggtacaacttttaaaaagtaggctaatgatgaattttcataccttccgaattctttaagataggaaatctacagttgcagtactagttggtagtcamatctcaccatcaggaccccttgttgggatagaaaaagatgtagtttctgagttttctgtctgctgccataatgtatgtcattattctttccaacccaccgtctctcccctcaagataaaaagttcatgctgaaatggttttctttgcattataccttctagaatgcacctgataatggcaccctgtacatctattataaatctgttaagattcccccatctacccttgctcttagccttaagttccttgaaggcagggggcctgcgtttggcttggtggtctcaattcctgccatgtgctgtaccttagtaactcagtaaatgttagtctaatgtctaagatcagggctttggggttctcattaaaagaaggcagcattgttcattgagggcataagagctagtgaaataaagcctccgcaaggagctttacagtccactgaatagacagaacaatgtttataaggcttggttcaggtgacagttattagaaaatcttggcagtgagtgttacgttttaaaataagtataagcatcttagaaaattttaaaactattaaaaatattcctcagcattgctaatagcttgcttatttatttaacatagggcttccgttacaagatgaggtctgtgtatgctcacttccccatcaacgttgttatccaggagaatgggtctcttgttgaaatccgaaatttcttgggtgaaaaatatatccgcagggttcggatgagaccaggtatgtgcataccctcagacagaattaagaaatttttccttcatatttttttcctccttttccactcccaacttccatactttagttggctgttgttttgtgtttgtgctgagtaaaaccagatttgttttagaattatctcttgattacacttaaactgttggtgctacttaagggtttatatcattatgtcgattacaatttcagaaagttgatacattggagtagcttgcagtggtggttgtatttaacttggcaaatgaaatcttttaaaaagactttaaatttacaaaaggtgtatataatggtgtgtatttatggagcacaat

SEQ ID NO: 1733 - DNA, 1030 bp, Homo sapiens
ggtggggaggggtgggaagaagggagattcttagtatcaaaataatggctgtccagaaatactctgatactagctatggtcagcaacatttaatgaaaacscttatgttaaaaataaacccctgcctcctggcttcaagcgattctcctgcctcagcctcctgagtagctgggagtataggcacgtaccaccacacccagctaattttttgtatttttactagagatgggtttcacagtgttagccaggatggtttcgatctcctgacctcatgatccgcccgcctcggcctcccaaagtgctgagattacaggcgtgagccactgtgcccggcctcaaaatcttaagaaaaggttcttttggtgcatggagttttacatggaataaattagtgcctctgcaatttaaatattttttacacagatttgatgctgtgcaaatgccctctccccttttaggtgttgcttgttcagtatctcaagcccagaaagatgaattaatccttgaaggaaatgacattgagcttgtttcaaattcaggtttgtatgtttactatgtctaactatgcctacaagattttgtctaaatcttgtttaaaatacagtattttgctaatttttatttgattagctttttaaattgtgaaaataaaaaggtcacattctgaaattttaagtacagcacataatgaaatactttctttttaagatgggttaggctgatgtattaattgctttatcttcactcctatagcggctttgattcagcaagccacaacagttaaaaacaaggatatcaggaaatttttggatggtatctatgtctctgaaaaaggaactgttcagcaggctgatgaataagatctaagaggtaagttcttacagtgtcttaagttttattactgctctagttgaatgaagctcttaatttactaaaagacttaaactgaatttgtagtaatagaaaatggagagttaagcattctggaacacagtaaatttgacagaataaaagatggaattggcatgca

SEQ ID NO: 1734 - DNA, 1030 bp, Homo sapiens
ggtggggaggggtgggaagaagggagattcttagtatcaaaataatggctgtccagaaatactctgatactagctatggtcagcaacatttaatgaaaacccttatgttaaaaataaacccctgcctcctggcttcaagcgattctcctgcctcagcctcctgagtagctgggagtataggcacgtaccaccacacccagctaattttttgtatttttactagagatgggtttcacagtgttagccaggatggtttcgatctcctgacctcatgatccgcccgcctcggcctcccaaagtgctgagattacaggcgtgagccactgtgcccggcctcaaaatcttaagaaaaggttcttttggtgcatggagttttacatggaataaattagtgcctctgcaatttaaatattttttacacagatttgatgctgtgcaaatgccctctccccttttaggtgttgcttgttcagtatctcaagcccagaaagatgaattaatccttgaaggaaatgacattgagcttgtttcaaattcaggtttgtatgtttactatgtctaactatgcctacaagattttgtctaaatcttgtttaaaatacagtattttgctaatttttatttgattagytttttaaattgtgaaaataaaaaggtcacattctgaaattttaagtacagcacataatgaaatactttctttttaagatgggttaggctgatgtattaattgctttatcttcactcctatagcggctttgattcagcaagccacaacagttaaaaacaaggatatcaggaaatttttggatggtatctatgtctctgaaaaaggaactgttcagcaggctgatgaataagatctaagaggtaagttcttacagtgtcttaagttttattactgctctagttgaatgaagctcttaatttactaaaagacttaaactgaatttgtagtaatagaaaatggagagttaagcattctggaacacagtaaatttgacagaataaaagatggaattggcatgca

SEQ ID NO: 1735 - DNA, 1420 bp, Homo sapiens
tgcatgttgatgttatatgaaagcaagatagttcatatttttatttggtgccttagaaagaatactaaatggtgtgggttttttaattataacatttagrgtgtaacagaatttgtattgcctgctttaaaatatttaaacagtggctgggcatggtgtctcatacctgtaatcccagcactttgggaggccaaggcgggtggatcacgaggtcaggagatcaagaccatcctggctaacatggtgaaacccgtctctactaaaaatacaaaaaattagctgggcattgaggcgggtgcctgtagtcccagctactcgggaggctgaggcaggagaatggcgtgaacccgggaggcagagcttgcggtgagctgagatcgcaccactgcactccaacctggatgacaaagcgagactctgcctcaaagaaaaaaaaaattaaaatcgcttaccccgtataacagatatttatgaaactatttttttgtggccagcattatgctagatacaaatacaaatggatacatagacaaacaaaatatgacctctgctcccagggaactcagaggcaaaaagctattacaatgcaaagacagttttggaatcatgcacactactatgggagcagttcaagaaagtaactaagccctactggagtcagggaaagcttctcagagaagcccttgaaagtgatgacacctgcctgtggttgtgtagtattttgccggatgaagagcaagaagaaaaacattcctttgcagaggtaggtacatgaacacagagatgggtgatgtctgacggacttaggaagccggttaaagttggaaccatggatttgacagtggagaaattagcaggaaaaaaacttagaacttggctgggtcagatcctaaagggcctggcatgtttagactaaggacacttttctctactctgatgctaggaggggtgcactgaatgtttgaaaatggacttgcaatacagaaagacaaccttggcaaatgtgagaattggcaggtggcgaaattcaagggcctttgctagtgatccatgtggaaggcaatggtggcctgaattaaagtctaataaggtggtagagagaaataactccaaaaatagcaattagatacaatcagtgggaccatagactgctgggctgtggatttagagagagaggaaatgtcagagtctggcttgggggtgttttagtttgctggggctgctacaaaaagcaccacaaactgagtgacttaaacagcagaaatttgttgtcttacagttctggaggccagaattctgaaatcaatgttttggcagggtggccttcttctgaggactgtgagagacgatctgttcaaagctgctcttcttggcttgaagatttctattgttatcgtatgtctcttcacatcaccttcct

SEQ ID NO: 1736 - DNA, 1420 bp, Homo sapiens
tgcatgttgatgttatatgaaagcaagatagttcatatttttatttggtgccttagaaagaatactaaatggtgtgggttttttaattataacatttagagtgtaacagaatttgtattgcctgctttaaaatatttaaacagtggctgggcatggtgtctcatacctgtaatcccagcactttgggaggccaaggcgggtggatcacgaggtcaggagatcragaccatcctggctaacatggtgaaacccgtctctactaaaaatacaaaaaattagctgggcattgaggcgggtgcctgtagtcccagctactcgggaggctgaggcaggagaatggcgtgaacccgggaggcagagcttgcggtgagctgagatcgcaccactgcactccaacctggatgacaaagcgagactctgcctcaaagaaaaaaaaaattaaaatcgcttaccccgtataacagatatttatgaaactatttttttgtggccagcattatgctagatacaaatacaaatggatacatagacaaacaaaatatgacctctgctcccagggaactcagaggcaaaaagctattacaatgcaaagacagttttggaatcatgcacactactatgggagcagttcaagaaagtaactaagccctactggagtcagggaaagcttctcagagaagcccttgaaagtgatgacacctgcctgtggttgtgtagtattttgccggatgaagagcaagaagaaaaacattcctttgcagaggtaggtacatgaacacagagatgggtgatgtctgacggacttaggaagccggttaaagttggaaccatggatttgacagtggagaaattagcaggaaaaaaacttagaacttggctgggtcagatcctaaagggcctggcatgtttagactaaggacacttttctctactctgatgctaggaggggtgcactgaatgtttgaaaatggacttgcaatacagaaagacaaccttggcaaatgtgagaattggcaggtggcgaaattcaagggcctttgctagtgatccatgtggaaggcaatggtggcctgaattaaagtctaataaggtggtagagagaaataactccaaaaatagcaattagatacaatcagtgggaccatagactgctgggctgtggatttagagagagaggaaatgtcagagtctggcttgggggtgttttagtttgctggggctgctacaaaaagcaccacaaactgagtgacttaaacagcagaaatttgttgtcttacagttctggaggccagaattctgaaatcaatgttttggcagggtggccttcttctgaggactgtgagagacgatctgttcaaagctgctcttcttggcttgaagatttctattgttatcgtatgtctcttcacatcaccttcct

SEQ ID NO: 1737 - DNA, 683 bp, Homo sapiens
cattttaacaacagtagctagcatttactgaatrttctgagggctttgcatgcacttccacatcattcccacctcacagcaatgctataaaataggtatgcttgttatcttcattttactgagaaggaaatgaaggcacaaagaggttaagtaacataagatcacggagctagtatgcagtagagcagggattgctccaggctgactgacacctggtctcagccactgggctatactgaagtcatgagaagcttctacttgcaaacagagggcttggaaataagcacagtgaagttcagttatgtgacagctgactgggagagacctttcaaccccccaaaattaagctgtatctgaaattcctcccaaagtaaaattgccttcgttttcatgaggacaggtttgtgttaccagtttacagtctagtgaggggaagagagaggtaaagataattaaaatacagtgacctgagggttgacaggtatccacatgaagataccacctgaggtcagagcacactgtgagtacctgtctggaaacatctgggaagactgcagaggggaagatctttcagcagagttttgaaggatgagttggaaactgttggataaatagggtgaagatgacattcaagacatgtacaaatgtgaaaaaggagttaacaagactagcaaagcaggcag

SEQ ID NO: 1738 - DNA, 683 bp, Homo sapiens
cattttaacaacagtagctagcatttactgaatgttctgagggctttgcatgcacttccacatcattcccacctcacagcaatgctataaaataggtaygcttgttatcttcattttactgagaaggaaatgaaggcacaaagaggttaagtaacataagatcacggagctagtatgcagtagagcagggattgctccaggctgactgacacctggtctcagccactgggctatactgaagtcatgagaagcttctacttgcaaacagagggcttggaaataagcacagtgaagttcagttatgtgacagctgactgggagagacctttcaaccccccaaaattaagctgtatctgaaattcctcccaaagtaaaattgccttcgttttcatgaggacaggtttgtgttaccagtttacagtctagtgaggggaagagagaggtaaagataattaaaatacagtgacctgagggttgacaggtatccacatgaagataccacctgaggtcagagcacactgtgagtacctgtctggaaacatctgggaagactgcagaggggaagatctttcagcagagttttgaaggatgagttggaaactgttggataaatagggtgaagatgacattcaagacatgtacaaatgtgaaaaaggagttaacaagactagcaaagcaggcag

SEQ ID NO: 1739 - DNA, 683 bp, Homo sapiens
cattttaacaacagtagctagcatttactgaatgttctgagggctttgcatgcacttccacatcattcccacctcacagcaatgctataaaataggtatgcttgttatcttcattttactgagaaggaaatgaaggcacaaagaggttaagtaacataagatcacggagctagtatgcagtagagcagggattgctccaggctgactgacacctggtctcagccactgggctatrctgaagtcatgagaagcttctacttgcaaacagagggcttggaaataagcacagtgaagttcagttatgtgacagctgactgggagagacctttcaaccccccaaaattaagctgtatctgaaattcctcccaaagtaaaattgccttcgttttcatgaggacaggtttgtgttaccagtttacagtctagtgaggggaagagagaggtaaagataattaaaatacagtgacctgagggttgacaggtatccacatgaagataccacctgaggtcagagcacactgtgagtacctgtctggaaacatctgggaagactgcagaggggaagatctttcagcagagttttgaaggatgagttggaaactgttggataaatagggtgaagatgacattcaagacatgtacaaatgtgaaaaaggagttaacaagactagcaaagcaggcag

SEQ ID NO: 1740 - DNA, 683 bp, Homo sapiens
cattttaacaacagtagctagcatttactgaatgttctgagggctttgcatgcacttccacatcattcccacctcacagcaatgctataaaataggtatgcttgttatcttcattttactgagaaggaaatgaaggcacaaagaggttaagtaacataagatcacggagctagtatgcagtagagcagggattgctccaggctgactgacacctggtctcagccactgggctatactgaagtcatgagaagcttctacttgcaaacagagggcttggaaataagcacagtgaagttcagttatgtgacagctgactgggagagacctttcaaccccccaaaattaagctgtatctgaaattcctcccaaagtaaaattgccttcgttttcatgaggacaggtttgtgttaccagtttacagtctagtgaggggaagagagaggtaaagataattaaaatacagtgacckgagggttgacaggtatccacatgaagataccacctgaggtcagagcacactgtgagtacctgtctggaaacatctgggaagactgcagaggggaagatctttcagcagagttttgaaggatgagttggaaactgttggataaatagggtgaagatgacattcaagacatgtacaaatgtgaaaaaggagttaacaagactagcaaagcaggcag

SEQ ID NO: 1741 - DNA, 683 bp, Homo sapiens
cattttaacaacagtagctagcatttactgaatgttctgagggctttgcatgcacttccacatcattcccacctcacagcaatgctataaaataggtatgcttgttatcttcattttactgagaaggaaatgaaggcacaaagaggttaagtaacataagatcacggagctagtatgcagtagagcagggattgctccaggctgactgacacctggtctcagccactgggctatactgaagtcatgagaagcttctacttgcaaacagagggcttggaaataagcacagtgaagttcagttatgtgacagctgactgggagagacctttcaaccccccaaaattaagctgtatctgaaattcctcccaaagtaaaattgccttcgttttcatgaggacaggtttgtgttaccagtttacagtctagtgaggggaagagagaggtaaagataattaaaatacagtgacctgagggttgacaggtatccacatgaagataccacctgaggtcagagcacactgtgagtacctgtctggaaacatctgggaagactgcagaggggaagatctttcagcagagttttgaaggaygagttggaaactgttggataaatagggtgaagatgacattcaagacatgtacaaatgtgaaaaaggagttaacaagactagcaaagcaggcag

SEQ ID NO: 1742 - DNA, 658 bp, Homo sapiens
gctacaagggaaatcatatcataaggtagattccagtgaatattttcactgatcaccaatgaaaatttcaaaccatcatagaagacttaaatctaccaawatatgagttggttttccaactggaatctttcaatcaagggtacaaacattaggataggctatttaggtgaacactaaggacatccacgagttgtgatggttagtgatatctattcatggctaatggcgaggtggtgtggaacagagaagatgaagatgcagggaggcactaaagctcctctgaaatctatccaaatgtcagagtcatggtaatgaccattgcccctcagccaccttcactgtcttgggcaggggacccatagtgggtcagatgataaaaaatggaagtgaggtgtgggcacttcctaccctcatctgctccaaagcctatacaaagtagttaagaaacaggcttgtgattttgacagaaccagctttaagtgctagttccacagtttactgattttgtgccttgaacaagtcagttggccattttgtctcagcttcctgaattctaagatgtgatttaattatagcgacctcagaaaatagtggtgaggactaaatgaaaccacacacataaaaaagttagcagaatgactgacactgagacagcact

SEQ ID NO: 1743 - DNA, 658 bp, Homo sapiens
gctacaagggaaatcatatcataaggtagattccagtgaatattttcactgatcaccaatgaaaatttcaaaccatcatagaagacttaaatctaccaatatatgagttggttttccaactggaatctttcaatcaagggtacaaacattaggataggctatttaggtgaacactaaggacatccacgagttgtgatggttagtgatatctattcatggctaatggcgaggtggtgtggaacagagaagatgaagatgcagggaggcactaaagctcctctgaaatctatccaaatgtcagagtcatggtaatgaccattgcccctcagccaccttcactgtcttgggcaggggacccatagtgggtcagatgatamaaaatggaagtgaggtgtgggcacttcctaccctcatctgctccaaagcctatacaaagtagttaagaaacaggcttgtgattttgacagaaccagctttaagtgctagttccacagtttactgattttgtgccttgaacaagtcagttggccattttgtctcagcttcctgaattctaagatgtgatttaattatagcgacctcagaaaatagtggtgaggactaaatgaaaccacacacataaaaaagttagcagaatgactgacactgagacagcact

SEQ ID NO: 1744 - DNA, 688 bp, Homo sapiens
aagattgtgccgctgcactccagcctgcgtgacagagcgatactctgtctaaaaaaaaaaagaaagaaggaaaagaaaatgaaagatgcccttatggaagagcacaagtgcgcatgggcaggtgtggagagccaagagaggccaatgggaacacatgggaggagggcaggtgtttgcaaaacaagacaggtgtaggcaggtatagacaagtgtggacaggtatgaacaggggtaggcagctgtgaacaggcataaataggaatgtatacaaacaacataaacaggcaggtgtggccagagtggatagatgtggccrgtgtacacaaatatgtacaggatgtgtggacaagtgtagatgattgttgacagtgtgaacaagcatggacaggtgtgtataggtgcggccagtataaacaggtgtgaaatgatattgatgggtataaacaggacaggcaagtggagatggtataaacaagtgtgttcaagaatgaacagtatggagaggtgtggaaggacccaaagttctaaatatacatcaagtgtgaaccaacatgtttgcacatgaacaggtgaacgggtgtaaagtgaacttatgtggatttatgtaaacaccttgagagacattccatagacagttgttaaatggatgaatgcatgaagtggcatagtgataatgtgtgggctggca

SEQ ID NO: 1745 - DNA, 688 bp, Homo sapiens
aagattgtgccgctgcactccagcctgcgtgacagagcgatactctgtctaaaaaaaaaaagaaagaaggaaaagaaaatgaaagatgcccttatggaagagcacaagtgcgcatgggcaggtgtggagagccaagagaggccaatgggaacacatgggaggagggcaggtgtttgcaaaacaagacaggtgtaggcaggtatagacaagtgtggacaggtatgaacaggggtaggcagctgtgaacaggcataaataggaatgtatacaaacaacataaacaggcaggtgtggccagagtggatagatgtggccagtgtacacaaatatgtacaggatgtgtggacaagtgtagatgattgttgacagtgtgaacaagcatggacaggtgtgtataggtgcggccagtataaacaggtgtgaaatgatattgatgggtataaacaggacaggcaagtggagatggtataaacaagtgtgttcaagaatgaacagtatggasaggtgtggaaggacccaaagttctaaatatacatcaagtgtgaaccaacatgtttgcacatgaacaggtgaacgggtgtaaagtgaacttatgtggatttatgtaaacaccttgagagacattccatagacagttgttaaatggatgaatgcatgaagtggcatagtgataatgtgtgggctggca

SEQ ID NO: 1746 - DNA, 1257 bp, Homo sapiens
tgcattctggaacttgtagtctcctggatcataggcctgaattggttccacattttgcgtaaccaatcggcttgtgccatccccaccccgcctcttcagccggacggaaataaacagttccgctcctggcaggggcgcgatcttggggastccggcagcgcgttaagggaagtcctgctggtcgaatgcgacctggacatggcgtgggagcgccgagctgtccccttgtggatggggagctttcgttcactcagcagacgtttatggggcgcatgcgtgactctggggcgtttagctgagccggaggccccggctcttggggacgcggtgggctggcggcgtcggatcaccccgccatccatctcaccactcccagcgctgagcccggggcggggggagagtccctcatgggaaggggaggccgtgtgcccgcctggctcccaccacgttcgcaggccggccgggcgcccctcgcagccccctctccggcctcgcggtggcgccgctccccccttagcgcccagcgggtcccggccggaagactgaaggctgagtgggactgggcacggcgcgaaaccggcatcctgataactaggatttacagaataaggctgactcctgtcagctcgtgacccagccctgggcgtcctccacggggcagctgtcattccctaaccgccccccaccaaacccctgcacctccgagctgaatccgtgaggcggagagagggggctgcacttcccacgtggtagttccggtactcgttaatgttaaggaattagagtttgcttttcagtagacagctgctttcctgactgtggtggccaacctctagatccacctgcttgacttcgctttccagggaggtctcctatgtgaagaaacaaagctgcctcactagaaaagatcaggaaacagcagcgttctgtgaggtcctgtgcaataccaggttggaccttgcgggacaagtacagtgggttaaggatagtcataatgaaatctgccccaatggttagatgtattttggcgcctgcaatctctgcagtctttaaaaagaattaagtcagactatgtgctgatatgggaagatcatcaagggttattaagcacagaatgctgtatacatatagttgtatttgtataaaaaataggatctagatagaaaatttttgcaaagatccatcagaaaatgtctgtggcatttttgagacatgggtctaggaatttggggtggattggtgactcggtatgtcagt

SEQ ID NO: 1747 - DNA, 561 bp, Homo sapiens
ggatcacttgaggtcaggagttcgggaccagcctggccatcacggcaagactccatctctactaaaaatacaaaaattagctgggcgtggtggtgcatgcctgtaatcccagctactcgggaggctgagacaggagaatcgcttgaacccaggaggcggaggttgcggaggttgcagtgagccgagatcacrctactacactccagcctgggcaacagagcgagactctggcttgaaaaaaataataaaataaaaataaataaataaatattaaactctccaagtttctgacctcattgttttgaccccatgagaggaagtatacctcaaagactaatcatgtcttcatgccttcaactgcagtgactgcagtcggttctcagacttcttaattttaatgccctcatgttaaaggaaaatgaaattctagtttagtgaaggtttgcaggagttttctggccacttggtgatttcttataggtcgacagagaataaatactttatagcttcatctatctaggcatcatttaaatttaggactggtttcctgggcatcgaatt

SEQ ID NO: 1748 - DNA, 575 bp, Homo sapiens
acttggctctgtgcttggccgctatgatgggaatgtgtatgaaaacttgtttgagtgggctaagaactccccactgaacaaagcagaggtaaaaatccagtgtctctgcacctttttaaaagtcttcacttaaatattgaagcaggaaaggcctctcgaaggggatttatctgtgaaagctctgaaagtaccatggccacttctgacagtcactttatttgagcaacaggttcagaagggaactgggttgttcccacagtaaccagggtcttaatcaatttcaatttttgataacgaattgaacatttaaaaatatatacaggccgggtgcgttggctcacacctgtaatcccagcactgtgggaggccgagtgggcagatcacctgaggtcaggagttcgagactagcctggctaaaatggcgaaacccaatctctactaaaaatacaaaaaaagcagccaggcagtaatggtgcayggctgtagtcccagctactcgggaattctcctgcctcagcttgaacccaggagaacccaggaggcggaggttgcagtgagccacgttcgtgccattg

SEQ ID NO: 1749 - DNA, 1013 bp, Homo sapiens
atctgtgtcctttgcaatatcctttatcataaacaggtgaaagcgagtgttttcctgagttctgtgagctgctccagcaagttagttgaacccaaagagagggtcatgggaaccccaacttgaagcccatgggtcagaagttccagaggcctggacttgagactggtgtgtgtgtgtgtgtgtgtgtgtgtgtgtgcgcgcgcgtgcgctaggggggtgcagaggaggcagacctcggtactgagccctcaatctatgggatctgacactatctctgggtggatagtgtcaggactgaattagagacacccagctggtgcctgctgtttggtgtatggggaaaaaaattccacaaatttggtcataaaagtcttcttctgtgttgacgattgttacgatttgagagtagagaaaaaacacggttagaaagaattttccatacacagcgtaacatttcaataatttggaaagttaaatgtcacgtattcttatatactattgtcattaaagagtgattaattcggtaataatggcaatcagatttcttggataggccgaaattctcagctgaactaaagtattaggaaggtagatgatgatgacaaggacgatgatgctactaagaacaaaagcaatcatgataataatagttattgagcactggaccaagcctagctctaaaagcctgatgtttgttctcataactagagtgaccctctctatatattttatcttctaaagtggaatacttatgacaatgaaagagggagctattaaaaattatgataggataacaggcaaaaaccagaacagtcagagcaaattgagatgtactcatgacacacaacctagtaataaacctcatgtcagtgtgaaattataggaggcaaagtcaaggatgcttatgttataaactttaaattactactcccttcccccaaccctcagcttcaaactgtttagcaactataaattaragatatgaatatttataatgccaagccctataaaat

SEQ ID NO: 1750 - DNA, 1205 bp, Homo sapiens
aatgccttgtaacatagtttccaaggtcctcaaaaaggacatgcttagttacaagaattgttgtacttggggacgccccacaattatggttttccattaggtatttatagttcatatgtagaacacctaaccaaggtgtaatttaccagtccccatcatttttttttttaatctgaagcaatgttgcctgctcacacatttgacattccaactttatcagttttctagggagaagggagctagaaagttgatcaaagtacaaattctcatacagatggacaaagggtgtttttaaccctttactcacartaatatctgttagtttcatttattttatatttaaagatactgaaacctgaaacttagagcagttaaatgacttgccccaactcatgggctaataagcctagaacccagatgttcttatttctagactgattatttccaacaacactgtaatatcctaaagcaagagtcagcaaactatggtccaagggccacatttagtcctccacctattttcagaaataaagagttattggaacacagccacatttatttgttcatgtattagacctgactactttcatgccacattggcagaatttgagtttggcccacaaagtctaaaatatttactatatggtgttttatagaaaatgtttgctaacctctgctctaaagtataattacaaattggccaggtgcagtggctcacacctgtaatcccagcactttgagaggccgaaatgggtggatcacttgaggccaggagttcgagacgagcctggccaacatggcaaaaccccgtctgtactaaaaacacaaaaattagccaggcttggtggtgcatgcctgtaatctcagctactctggaggctgaggcacaagaaccgcttgagctggggaggcagaggttgcagtgagccgagatcatgccactgcactccagcctgggcgacagagcgagactgtgtcaaaatagtaaataaataaacaaataaattctaattataaattgtttaactctttctatgagtctatataaggagtttatagaaaagcatttgtttctaatgtttgattattaaaaatacccctgtattttttattttattttaattgacaaataataagtacatatatttatgaggtacaatgtgatgttttgatatatgtttacattgtggaataattatgcatac

SEQ ID NO: 1751 - DNA, 1205 bp, Homo sapiens
aatgccttgtaacatagtttccaaggtcctcaaaaaggacatgcttagttacaagaattgttgtacttggggacgccccacaattatggttttccattaggtatttatagttcatatgtagaacacctaaccaaggtgtaatttaccagtccccatcatttttttttttaatctgaagcaatgttgcctgctcacacatttgacattccaactttatcagttttctagggagaagggagctagaaagttgatcaaagtacaaattctcatacagatggacaaagggtgtttttaaccctttactcacagtaatatctgttagtttcatttattttatatttaaagatactgaaacctgaaacttagagcagttaaatgacttgccccaactcatgggctaataagcctagaacccagatgttcttatttctagactgattatttccaacaacactgtaatatcctaaagcaagagtcagcaaactatggtccaagggccacatttagtcctccacctattttcagaaataaagagttattggaacacagccacatttatttgttcatgtattagacctgactactttcatgccacattggcagaatttgagtttggcccacaaagyctaaaatatttactatatggtgttttatagaaaatgtttgctaacctctgctctaaagtataattacaaattggccaggtgcagtggctcacacctgtaatcccagcactttgagaggccgaaatgggtggatcacttgaggccaggagttcgagacgagcctggccaacatggcaaaaccccgtctgtactaaaaacacaaaaattagccaggcttggtggtgcatgcctgtaatctcagctactctggaggctgaggcacaagaaccgcttgagctggggaggcagaggttgcagtgagccgagatcatgccactgcactccagcctgggcgacagagcgagactgtgtcaaaatagtaaataaataaacaaataaattctaattataaattgtttaactctttctatgagtctatataaggagtttatagaaaagcatttgtttctaatgtttgattattaaaaatacccctgtattttttattttattttaattgacaaataataagtacatatatttatgaggtacaatgtgatgttttgatatatgtttacattgtggaataattatgcatac

SEQ ID NO: 1752 - DNA, 1205 bp, Homo sapiens
aatgccttgtaacatagtttccaaggtcctcaaaaaggacatgcttagttacaagaattgttgtacttggggacgccccacaattatggttttccattaggtatttatagttcatatgtagaacacctaaccaaggtgtaatttaccagtccccatcatttttttttttaatctgaagcaatgttgcctgctcacacatttgacattccaactttatcagttttctagggagaagggagctagaaagttgatcaaagtacaaattctcatacagatggacaaagggtgtttttaaccctttactcacagtaatatctgttagtttcatttattttatatttaaagatactgaaacctgaaacttagagcagttaaatgacttgccccaactcatgggctaataagcctagaacccagatgttcttatttctagactgattatttccaacaacactgtaatatcctaaagcaagagtcagcaaactatggtccaagggccacatttagtcctccacctattttcagaaataaagagttattggaacacagccacatttatttgttcatgtattagacctgactactttcatgccacattggcagaatttgagtttggcccacaaagtctaaaatatttactatatggtgttttatagaaaatgtttgctaacctctgctctaaagtataattacaaattggccaggtgcagtggctcacacctgtaatcccagcactttgagaggccgaaatgggtggatcacttgaggccaggagttcgagacgagcctggccaacatggcaaaaccccgtctgtactaaaaacacaaaaattagccaggcttggtggtgcatgcctgtaatctcagctactctggaggctgaggcacaagaaccgcttgagctggggaggcagaggttgcagtgagccgagatcatgccactgcactccagcctgggcgacagagcgagactgtgtcaaaatagtaaataaataaacaaataaattctaattataaattgtttaactctttctatgagtctatataaggagwttatagaaaagcatttgtttctaatgtttgattattaaaaatacccctgtattttttattttattttaattgacaaataataagtacatatatttatgaggtacaatgtgatgttttgatatatgtttacattgtggaataattatgcatac

SEQ ID NO: 1753 - DNA, 563 bp, Homo sapiens
tttattgaggtgtcactttatcagtgggaccacttcacaaaagttaacagattgagcatttaatatctttactaacttatacacctgccacagtataagttactgtcacacccagtaagaaagcgtggaaaatatattagatggcagaatctgaatattatacaaagtatcttgacagattgaagttctcaactaaatatgacaggttgaaatgttatgtaagaacaaactcttcctcctctcccaaataagtctgtttcatcttatataaaattttacctcaattaagaaataaaaacaatatcatttttaactgctctccttacttacacaataccttagccatgctaacaatcagggcatccarcaaatctaagtactttctctctcttacttcacacagtacatatggacccttcttatgcaagaaaacaactaactgaaataggctgattgccaaacctcagtcatttgcagacagaatttaaaagagttcagaagactaatcaggttatacaggaacagacttcgtgaaccatcagggatattatacaattcaccct

SEQ ID NO: 1754 - DNA, 1476 bp, Homo sapiens
attgcttatccactcaatgaaacatggctaacaaagaagaaaatcagtatccctggaacttttaaccttaccaacaagtaaaataataatatcatatagaattgctactcctgggaatggtgatgcttagaaaggttttgaacacaacatcgggaagagttggcattggcatatgtgaagttgtagctttactagctgtgtgacggtatgaggaaagtgaatacaattcaaagatgggttggtctcttcctgctggccagaagagaagagagcaaagaaaaaaagagaatatggatataaatttgaaaaagaaaaatacttgatttctctggaaacaataaaaaaatcagggcaaaagtcaggtgccaaaatagttttatattctgcgaggattgttgccataaccccatttcaacaggagacttgggcagagggcagcaaactatggcttatgggtcacattcagccaccatatgtctttgtacagtttgagaactaacaattgttttaacatttgaagaaactgaaaataattaataaatgggtgagacatgaatattatatgaaattcaaatttgtgtccccaagtaaattgtcacgggacacagccatgcccattcgtttatgtgtagttacgtattagggctgcttttgatccacaatagcggtgttaagtagtcgtggcagagacctattggcctgcaaagcctaaaacatttaccatctggaccgttatagaaagtttgctgacctctgctctaggtgttcaaggagttgtggcccaacctccagtccatctaagtcttggtcctgcctgtatttcagagccgctttaacgggtgagttggtgagtgcagtacagggcttcaatgtacgagaaataaaaaaacttttaaatgcagtatccattaatttacccaaattggaaaatggacaagacagcatcctttggtggaaatttttttaaatccacgaccctcctggtctgtttttgggacactttgtagccagtatgtacaaatgtctgatttagctgggccatccatctgggaccagctagctgaagcttgcaatcgcagttagctgaaatttgaaacttgaatatttcaagtggtagacatttagcaataacaaattatctacatcattatttgatatcttttaatttgcattccaagaagttgtgcgtttccaaagcagtgaaagaaaataaaacaaaaatttwaaaaatggaaacgatatgtcaacataaaagccagaaaaaaattaatttttaaaatactattataccctgtaaattacgtgtagccttgatgggcatagaacttcaccggttaatatggtagccactaaccacatgtagctattgagcacccagcccagaatatgcctatttggaatagacatatgctgtaaaatacatattggattccgaaggcatagtactgaaaaaaaaaaagaatccaaaatatttta

SEQ ID NO: 1755 - DNA, 680 bp, Homo sapiens
ccagctaatcttcagatgtttccaaggtcatggtccacagcaaaagttgtgcgtgagtcaactatttttttaaaccccataattctcaaatcattcttgcatttttgcccctatcaacttgatakatatatattttgagacggagtttcgctcgtgtcgcccaggctggagtgcaacagcgcgatctcggctcactgcaacttctgcctctcgggttcaagtgattctcctgcctcagcctcccaagtagctgggattacaggcgcctgccaccacagctggctcattttcatatttttagtagagacagggtttcaccatgttggccaggcaggtctcgaactcctgacctcaggtgatccgcctgcctcggcctcgcaaagtgctgggattataggcatgagccaccatgcccagccaacttgatatgttgatttttctccaaatccaagggagaaatgggaagacaggaataaattttcccttaagttcagcttctcccaatgtgtcaaattgagagaaaatagggaaacagggaaggagaaaaaaaaaaaggaaggaaaaaaacagtgctgtctgctacaaaaatggttttaagggttgtgaaagagaaggaaagcaacagctcctggttctttctttttatttcagaaaagtaattctccttttacatcactaat

SEQ ID NO: 1756 - DNA, 680 bp, Homo sapiens
ccagctaatcttcagatgtttccaaggtcatggtccacagcaaaagttgtgcgtgagtcaactatttttttaaaccccataattctcaaatcattcttgcatttttgcccctatcaacttgatatatatatattttgagacggagtttcgctcgtgtcgcccaggctggagtgcaacagcgcgatctcggctcactgcaacttctgcctctcgggttcaagtgattctcctgcctcagcctcccaagtagctgggattacaggcgcctgccaccacagctggctcattttcatatttttagtagagacagggtttcaccatgttggccaggcaggtctcgaactcctgacctcaggtgatccgcctgcctcggcctcgcaaagtgctgggattataggcatgagccaccatgcccagccaacttgatatgttgatttttctccaaatccaagggagaaatgggaaracaggaataaattttcccttaagttcagcttctcccaatgtgtcaaattgagagaaaatagggaaacagggaaggagaaaaaaaaaaaggaaggaaaaaaacagtgctgtctgctacaaaaatggttttaagggttgtgaaagagaaggaaagcaacagctcctggttctttctttttatttcagaaaagtaattctccttttacatcactaat

SEQ ID NO: 1757 - DNA, 680 bp, Homo sapiens
ccagctaatcttcagatgtttccaaggtcatggtccacagcaaaagttgtgcgtgagtcaactatttttttaaaccccataattctcaaatcattcttgcatttttgcccctatcaacttgatatatatatattttgagacggagtttcgctcgtgtcgcccaggctggagtgcaacagcgcgatctcggctcactgcaacttctgcctctcgggttcaagtgattctcctgcctcagcctcccaagtagctgggattacaggcgcctgccaccacagctggctcattttcatatttttagtagagacagggtttcaccatgttggccaggcaggtctcgaactcctgacctcaggtgatccgcctgcctcggcctcgcaaagtgctgggattataggcatgagccaccatgcccagccaacttgatatgttgatttttctccaaatccaagggagaaatgggaagacaggaataaattttcccttaagttcagcttctcccaatgtgtcaaattgagagaaaatagggaaacagggaaggagaaaaaaaaaaaggaaggaaaaraacagtgctgtctgctacaaaaatggttttaagggttgtgaaagagaaggaaagcaacagctcctggttctttctttttatttcagaaaagtaattctccttttacatcactaat

SEQ ID NO: 1758 - DNA, 1188 bp, Homo sapiens
gttctgagatactggaaaggcctttgcaaaaagattttgtctcttgatatttatgaagcacattcatccgaccacagaagatacatatcaactttgacagaaaatatgaacacattcaaatgatttatacctttgaaacatagatcgttgtggggttcataacccaagtataactttcccacagattcactcaatttccttcctctttctgtgcaatatattgtatattgcaagaagctcacctccactcaccttattcctcaggctttcttctcaactatcttctgtatagatttaaccagtgggaggcgttggcaggagattggagagcaggagaaggggagatttcagggtatttctttccctctttcactgctttgggcaacagctgatacagagtaagtggccaaaaaatactagctattattaggtcttctaataatgatcttctaaaatcactttttcagtggttacccccattgatttgccatgaatgtctcttcagacatctttgcaaagaattgagcctgactttagatactcattcaaaatcaaaatcagtaattttaggattgaggactctggtattatttaagaactcttaactgtaccaagcctcactcccatttctggctttcccctatatatcagttaagtaataactccaatagtgtaaaatttgcaatagtgttatgtaacaaatcaccctaaaacttattgacttaaaattatcaccatttataattgcacacagtctgtggggtcccgtgagctgttgtgttgttctggctcactcatacattttcagtcagctaatgggtgggctargggctggcttatctagcataagcgcagctaggatgattcacctctgctccatatggtctctcatccttcggcaagcgctcctgggcttattctcatgcaagaaacaggattctaatagagaaggaaacaagacttcttgaagcttaagcttggagctggctcactcatttctaacacatttttttaaccaaagcaaatcacaaggcaggcccatattcagggattagggaaataggttacaactcctgatggtagcaactttaaaagtcacattgcaaaaagatgtgcatacagagaggtcaccagtgcaatctaccacaccttgcaatctattaagtttctcaccccctcacaagtaag

SEQ ID NO: 1759 - DNA, 645 bp, Homo sapiens
tgcattaatatttgctagtattgtgaatgcacagagaaactccagaaaaatatataaggaacaaccgtggaaaaagtagagaactgaatgggcaagggaagcatcacagtggtgwataccctatcatgggatttttaagcctctattagttatgcaaatatataaataagatccaaatttaaaaaaagtcagaattagaaactaaaacagtttaacaggaataaatattaaaattcctaatttaggttccaaagatcaactacaaataaaaaaatcttaaaagtaattcatgtcaaaagcttgataagctttggcaaataaacataaacataaccaaaacataaaccgaaaattactacaccaaaaaaaaaataaatatatatatataattttttttaattttattattattatacttttaagtttttttttgagacggagtctcgctctgtcgcccaggctggagtgcagtggcgtgatctccgctcactgcaagctccacctcctgggttcacgccattctgctgcctcagcctcccaagtaactgggactacaggtgcctgccaccacacccagctgattttttgtattttttagtagagatggggtttcaccatgttagccaggatggtctcgatctcctg

SEQ ID NO: 1760 - DNA, 645 bp, Homo sapiens
tgcattaatatttgctagtattgtgaatgcacagagaaactccagaaaaatatataaggaacaaccgtggaaaaagtagagaactgaatgggcaagggaagcatcacagtggtgaataccctatcatgggatttttaagcctctattagttatgcaaatatataaataagatccaaattwaaaaaaagtcagaattagaaactaaaacagtttaacaggaataaatattaaaattcctaatttaggttccaaagatcaactacaaataaaaaaatcttaaaagtaattcatgtcaaaagcttgataagctttggcaaataaacataaacataaccaaaacataaaccgaaaattactacaccaaaaaaaaaataaatatatatatataattttttttaattttattattattatacttttaagtttttttttgagacggagtctcgctctgtcgcccaggctggagtgcagtggcgtgatctccgctcactgcaagctccacctcctgggttcacgccattctgctgcctcagcctcccaagtaactgggactacaggtgcctgccaccacacccagctgattttttgtattttttagtagagatggggtttcaccatgttagccaggatggtctcgatctcctg

SEQ ID NO: 1761 - DNA, 645 bp, Homo sapiens
tgcattaatatttgctagtattgtgaatgcacagagaaactccagaaaaatatataaggaacaaccgtggaaaaagtagagaactgaatgggcaagggaagcatcacagtggtgaataccctatcatgggatttttaagcctctattagttatgcaaatatataaataagatccaaatttaaaaaaagtcagaattagaaactaaaacagtttaacaggaataaatattaaaattcctaatttaggttccaaagatcaactacaaataaaaaaatcttaaaagtaattcatgtcaaaagcttgataagctttggcaaataaacataaacataaccaaaacataaaccgaaaattactacaccaaaaaaaaaataaatatatatatayaattttttttaattttattattattatacttttaagtttttttttgagacggagtctcgctctgtcgcccaggctggagtgcagtggcgtgatctccgctcactgcaagctccacctcctgggttcacgccattctgctgcctcagcctcccaagtaactgggactacaggtgcctgccaccacacccagctgattttttgtattttttagtagagatggggtttcaccatgttagccaggatggtctcgatctcctg

SEQ ID NO: 1762 - DNA, 664 bp, Homo sapiens
tgctgtatagtgtcatttgtttgacactctaatagactgaaccacctctgtgcagggacagtgttttcagcttctaagaaagaaactggtcagaggcaggattggcatagcatggaaaactcactaaatatatcttattagtattagtattaatattaataagaatagccaacrtggcaaggctcaatacagtggaacatgccgtatacagtagaaatatgtctttttttctgagacttaaattttaattacatgtactgagccagagatgttgaatctaaagactcctagggaggggccctgttggatcattgaacctacatgaacacttggctgggctagagaaccaagttgtttggtcaaacaccagtctagaggtccctgtgaagatattttctagatgtgactaacacttaaatctgtggatgttgaataaagcagactgcattccataatgtgggtgggcctcctctaatcagttgaaggccttgaggaaaaaacctgtgaggtccccaaaggaagagggaattctgcctccatatggccttcagactcaagctgcagcgttgactctttcttgagcctccagcccgctgtacttttgaacttgccagcctccacaattggagagccagttccttaaagtaaatttatctctctgttt

SEQ ID NO: 1763 - DNA, 664 bp, Homo sapiens
tgctgtatagtgtcatttgtttgacactctaatagactgaaccacctctgtgcagggacagtgttttcagcttctaagaaagaaactggtcagaggcaggattggcatagcatggaaaactcactaaatatatcttattagtattagtattaatattaataagaatagccaacatggcaaggctcaatacagtggaacatgccgtatacagtagaaatatgyctttttttctgagacttaaattttaattacatgtactgagccagagatgttgaatctaaagactcctagggaggggccctgttggatcattgaacctacatgaacacttggctgggctagagaaccaagttgtttggtcaaacaccagtctagaggtccctgtgaagatattttctagatgtgactaacacttaaatctgtggatgttgaataaagcagactgcattccataatgtgggtgggcctcctctaatcagttgaaggccttgaggaaaaaacctgtgaggtccccaaaggaagagggaattctgcctccatatggccttcagactcaagctgcagcgttgactctttcttgagcctccagcccgctgtacttttgaacttgccagcctccacaattggagagccagttccttaaagtaaatttatctctctgttt

SEQ ID NO: 1764 - DNA, 664 bp, Homo sapiens
tgctgtatagtgtcatttgtttgacactctaatagactgaaccacctctgtgcagggacagtgttttcagcttctaagaaagaaactggtcagaggcaggattggcatagcatggaaaactcactaaatatatcttattagtattagtattaatattaataagaatagccaacatggcaaggctcaatacagtggaacatgccgtatacagtagaaatatgtctttttttctgagacttaaattttaattacatgtactgagccagagatgttgaatctaaagactcctagggaggggccctgttggatcattgaacctacatgaacacttggctgggctagagaaccaagttgtttggtcaaacaccagtctagaggtccctgtgaagatattttctagatgtgactaacacttaaatctgtggatgttgaataaagcagactgcattccataatgtgggtgggcctcctctaatcagttgaaggccttgaggaaaaaacctgtgaggtccccaaaggaagagggaattctgcctccatatggccttcagactcargctgcagcgttgactctttcttgagcctccagcccgctgtacttttgaacttgccagcctccacaattggagagccagttccttaaagtaaatttatctctctgttt

SEQ ID NO: 1765 - DNA, 1502 bp, Homo sapiens
ccaaagcggtggcccctgtggtgagggtcatgacaactaaagcactggaagactgatctctgagatccactctgggctctgttcgagcctaagctgtgcacacacctgctgcaggtcaacaggctggcctgcatctgcacataggcacctggcctgaacctcagactcaaatcgggttcttgcctcaagcctctacctgatactctcatgcgttcattaattcattcactatatgtttgttgagtagttattttgtgtaagaaagttgcctatgtgctgagaaaaactttatgaagtttatagtctagctggggagaccagactcaactatttgtgggaatatctgtttagtgaattacaactgtaatatgcaccattaagaaagataaagggagctgggtgctgtggtacatgcttgtaatcccagctacttgagaggctggggtggaagaataacttgagcccagaagttcacagccagcccaggcaacatagtgagaccctgtctctaggaaaaaaaagaaatagaaagaaagaaggaaggaaggataaagaaaagaaaaaacaaagagggaaggaaggaaaaagaaagagagaaaggagaaagaaaaataaagaagagagaaagagagagaaagaaagacagaaaaagaaagagaaagagaggaagggaggaaggagaagggaagggaagagaagaaaataaaggaaggaagggagggaagaaggaagaaagagggtggagggtgctatggggaaaagctaagctgtacttgggtttcagggaaggcttcctaagaggtaacctgtaaacatctctgaaaaccagagattctgtttcatattcttcacctttcatatctataaacagttgttaaaattctcaagtatatctttttgctttctattctcatccccagtgcccttgatccggcccttggtatatggcacggtgcagaaaagagttaacacagcggaggactgggactgccctccttaaaaaggcttgcttgcaagtttggttcttggctggcatcagtgaacttggatctcagcggtgttcccaccattccctgacaagctatgcctaaactatttgcctcaataatatggtttatgctgaacacctgctttcctttcaggagtctggaatgcctcatgcaagrcagagggcgcttatgtgaccagcttcagtaaagacctgagtactgagcctctaacgagcttcctgggtagacaccatttcacaggtgttgtcccagcttgtcgctggagcaattaagagggctcctggaaacttgcgcctggtttcctctggacttccctttgctgattttactttgtatcctgttgctgtaacaaatctgagccctgagtatgaccatatatgctgggtccttgtgagtccttcttgccaatcagtaaacctggggtgggcttgtgaccctgaatgcaggtgcccagttaatttcttctctgacactattccatatcctgatgca

SEQ ID NO: 1766 - DNA, 1502 bp, Homo sapiens
ccaaagcggtggcccctgtggtgagggtcatgacaactaaagcactggaagactgatctctgagatccactctgggctctgttcgagcctaagctgtgcacacacctgctgcaggtcaacaggctggcctgcatctgcacataggcacctggcctgaacctcagactcaaatcgggttcttgcctcaagcctctacctgatactctcatgcgttcattaattcattcactatatgtttgttgagtagttattttgtgtaagaaagttgcctatgtgctgagaaaaactttatgaagtttatagtctagctggggagaccagactcaactatttgtgggaatatctgtttagtgaattacaactgtaatatgcaccattaagaaagataaagggagctgggtgctgtggtacatgcttgtaatcccagctacttgagaggctggggtggaagaataacttgagcccagaagttcacagccagcccaggcaacatagtgagaccctgtctctaggaaaaaaaagaaatagaaagaaagaaggaaggaaggataaagaaaagaaaaaacaaagagggaaggaaggaaaaagaaagagagaaaggagaaagaaaaataaagaagagagaaagagagagaaagaaagacagaaaaagaaagagaaagagaggaagggaggaaggagaagggaagggaagagaagaaaataaaggaaggaagggagggaagaaggaagaaagagggtggagggtgctatggggaaaagctaagctgtacttgggtttcagggaaggcttcctaagaggtaacctgtaaacatctctgaaaaccagagattctgtttcatattcttcacctttcatatctataaacagttgttaaaattctcaagtatatctttttgctttctattctcatccccagtgcccttgatccggcccttggtatatggcacggtgcagaaaagagttaacacagcggaggactgggactgccctccttaaaaaggcttgcttgcaagtttggttcttggctggcatcagtgaacttggatctcagcggtgttcccaccattccctgacaagctatgcctaaactatttgcctcaataatatggtttatgctgaacacctgctttcctttcaggagtctggaatgcctcatgcaagacagagggcgcttatgtgaccagcttcagtaaagacctgagtactgagcctctaacgagcttcctggrtagacaccatttcacaggtgttgtcccagcttgtcgctggagcaattaagagggctcctggaaacttgcgcctggtttcctctggacttccctttgctgattttactttgtatcctgttgctgtaacaaatctgagccctgagtatgaccatatatgctgggtccttgtgagtccttcttgccaatcagtaaacctggggtgggcttgtgaccctgaatgcaggtgcccagttaatttcttctctgacactattccatatcctgatgca

SEQ ID NO: 1767 - DNA, 1502 bp, Homo sapiens
ccaaagcggtggcccctgtggtgagggtcatgacaactaaagcactggaagactgatctctgagatccactctgggctctgttcgagcctaagctgtgcacacacctgctgcaggtcaacaggctggcctgcatctgcacataggcacctggcctgaacctcagactcaaatcgggttcttgcctcaagcctctacctgatactctcatgcgttcattaattcattcactatatgtttgttgagtagttattttgtgtaagaaagttgcctatgtgctgagaaaaactttatgaagtttatagtctagctggggagaccagactcaactatttgtgggaatatctgtttagtgaattacaactgtaatatgcaccattaagaaagataaagggagctgggtgctgtggtacatgcttgtaatcccagctacttgagaggctggggtggaagaataacttgagcccagaagttcacagccagcccaggcaacatagtgagaccctgtctctaggaaaaaaaagaaatagaaagaaagaaggaaggaaggataaagaaaagaaaaaacaaagagggaaggaaggaaaaagaaagagagaaaggagaaagaaaaataaagaagagagaaagagagagaaagaaagacagaaaaagaaagagaaagagaggaagggaggaaggagaagggaagggaagagaagaaaataaaggaaggaagggagggaagaaggaagaaagagggtggagggtgctatggggaaaagctaagctgtacttgggtttcagggaaggcttcctaagaggtaacctgtaaacatctctgaaaaccagagattctgtttcatattcttcacctttcatatctataaacagttgttaaaattctcaagtatatctttttgctttctattctcatccccagtgcccttgatccggcccttggtatatggcacggtgcagaaaagagttaacacagcggaggactgggactgccctccttaaaaaggcttgcttgcaagtttggttcttggctggcatcagtgaacttggatctcagcggtgttcccaccattccctgacaagctatgcctaaactatttgcctcaataatatggtttatgctgaacacctgctttcctttcaggagtctggaatgcctcatgcaagacagagggcgcttatgtgaccagcttcagtaaagacctgagtactgagcctctaacgagcttcctgggtagacaccatttcacaggtgttgtcccagcttgtcgctggagcaattaagagggctcctggaaacttgcrcctggtttcctctggacttccctttgctgattttactttgtatcctgttgctgtaacaaatctgagccctgagtatgaccatatatgctgggtccttgtgagtccttcttgccaatcagtaaacctggggtgggcttgtgaccctgaatgcaggtgcccagttaatttcttctctgacactattccatatcctgatgca

SEQ ID NO: 1768 - DNA, 661 bp, Homo sapiens
cttagaagaaaattttgtggtgttattartaagagaacatgaaaatatggtaaaccctatttatggtatgttcttcctccattgaggagaattgttaagcatgaagaaagaggaacctttgatctttcataagaacacatccccaaatgccctagagttcccagaaattctccagtgaccttccataggagatgaagtttcctccaccactggatatagagactacatgtaaaatttcaatttcaacagaaaaaagttcagctgtgaaaaacaatctaagatcttaagacattaagaatgtaatttttaattgtaattggcacattttgttgactacatgaatgagcaaatggataaatggagtctgaattcatttgctagtatatttgtgtattttaaatgtaaatacgtttcattgtgtgcatatatgcttatgtactgtttgatcatcataactgcccacaagttaaatcttatcagacatcatgaatatgaacagtctctacaaaaggccagaattctaaggtaaaataaaacaaaaactcagttactggataccaaaaccttggatatatctaagcaaccaaattgcgagctggagtttttagctcttaattagggtttctcaatataaaataaccaaataatcaaaagctacgat

SEQ ID NO: 1769 - DNA, 661 bp, Homo sapiens
cttagaagaaaattttgtggtgttattagtaagagaacatgaaaatatggtaaaccctatttatggtatgttcttcctccattgaggagaattgttaagcatgaagaaagaggaacctttgatctttcataagaacacatccccaaatgccctagagttcccagaaattctccagtgaccttccataggagatgaagtttcctccaccactrgatatagagactacatgtaaaatttcaatttcaacagaaaaaagttcagctgtgaaaaacaatctaagatcttaagacattaagaatgtaatttttaattgtaattggcacattttgttgactacatgaatgagcaaatggataaatggagtctgaattcatttgctagtatatttgtgtattttaaatgtaaatacgtttcattgtgtgcatatatgcttatgtactgtttgatcatcataactgcccacaagttaaatcttatcagacatcatgaatatgaacagtctctacaaaaggccagaattctaaggtaaaataaaacaaaaactcagttactggataccaaaaccttggatatatctaagcaaccaaattgcgagctggagtttttagctcttaattagggtttctcaatataaaataaccaaataatcaaaagctacgat

SEQ ID NO: 1770 - DNA, 1231 bp, Homo sapiens
tcaggtaaaagcaattctgttgcagctcttcctgaatattttagaaaaagtaaaattaatgacttaggaattaattttctctgtttgctcttagagtttactcaaacattgattttttttcagttgccatcaccacattccttttactcttttgacgtttaaactcgaaatgtgtaactgtgttacttgcgagtatttgcaagaaatacattcaaataaacagatgtattttatgttttattctgctcttcaactgaaaccataaatctaacaaagatatcaggagactgattggtcataccattaatggaaaattaatcttcgagaaatcttttctgacagcggttagtgaatagagtaaacatttcagataacacatagacgctgaaaaatattttacttttattgtttttaatgttataataaattataaatttgttataattagcaattatgcctactctttcaactccatatccccatgatattgttattgttattattattgccattattattttttttttgagatggagtctccctctgtcacccaggctggattgcagtggcgtgatcttggctcactgcaacctccacctcctgggttcagacgattctgctgcctcagcctccagagtagctgggaccacaggtgtgtgacaccacacccagctaattttttgtatttttagtagagacagggtttcaccatgttagctaggatggtctcgatctcctaacctcatratctgcccccctcagccccccaaagtgctgggattacaggcgtgagccaccacgcccggcccccatgatattacttttgactgatcttattaatattaaagaaaaaatgaatcaacattaaatttgctgatagaaagtagtgttgattctaaaaatattattcattagtatatatcaatgcttgactaatattggctttccctaaatattaacatgtgttaaatctaaaaatatttttgaaattgaatatataaattgtgccattgcttatatctgctttctccatagtagtatagggataagaataatatttaaattataagaggtattaagacacaattaatagccctggctttatgcttgctacagaattgatgctctattaataagagtggtggtggtgttttttatttactttctatcttattgggaaaatagtatcaatctggaagaaacctgtgtatgattctatgtatctatatgc

SEQ ID NO: 1771 - DNA, 2655 bp, Homo sapiens
tgcataattacacttatatgtacatgttatatatatatacacacacaaacgtgtttatattttgcctagtcaattgaaaataagttataaataacttgacacttcacctctgaatatttcagtgcatatttcatatgaattaagacattctcccaaatatccataacacctaagaaaattgacaataactcaataatatctaataaatatttcatattgaattttgaaattttccccaacatgtcttttagagctgttrttttccccaatccaagaactaatcaatgctcacacatttgcatgtgttcgttacgtctctttaatacgttctcattcggaactttttaccatttgtttcttatgatgcttttgaagaagtgaggccctttgtcttgcagggtgtcccacattctgaatttgcctgattgttccttcatttttagattcaattaaacatttttggaaagaatactacataaatgataatgtgcttttttattgcatcacacttgaggacttaacgatatccagatatattactattgatgcttttaagttggtcacttggtaatcaagtgactgccaaatcttttcatgtatgggtacattttgagcattgtaattagtaagtaatctatgatatgattctttaaaaaaccacatgaacatgatttttgcagcatttcatttgttttagcattcattgataatctttgtcctacttaattattttattagttattgcaacatggaatattctagaaataaaaaaagttgctgaaattaagaaattattacatgagtttaacaggacattagacacaaatgatgaaatgattagtgaagtagaagatcaatcaataagtagaaatatcaggactgaaacacatataaggaaaaggaaggaaatatgaagaaaacaattcaggagatacttaggacactgtaagaggtctaatatgagtgtaaaaactctgaggaaaaggagacaaatagttgggcataaataataattgaatagataatggttgacagtattccaaaactaaaaagtcactaagtcacaggttcaagaaatactcccattttccaagccagtttagtaaaataataggcacaccagagtaaaacttctaaagagcagaggcaaagaaaatatttaaacttagccaaaaagacatattcccttcgaatgagtcatgctaagacaaacagctgaattataaagcagaagaataaaatattgccttccacttattgaaagaagataactatcaagctagaattctatgcacaaaagaaatattcttcaaaaatgaagaagaaacaaaatattttcacatacatgcttgagaaaatttttcaacaacagatttgcctaataaataataataaaggaagttgttcagtcataaataaatcacagatgaaagcaaggaaaaaagggaaatgaatgaagagcaatgggaatgatcagtaagtgctaaatccaaatgaacactgattttataataataggtactgcctaaaatgcattcagaatttaaaatataatgaaaataccacacaacctgggtatatatagaattttatgtgttctaatgtcttttggttgtctgacatatggcaaaaagtgctaattatattatactgcttaaataagttaaacatgcatataatattgtaatatccaagatgaacaataaaaaatagtacagtaaatcgatttttaactaaaatttaatagaaagaaaatgggaaaataaaacagaaatacttgattaatccaaaagaagctagtggtaaaaagaagcaaacagcaggtggaaaagaaaaacaatttttaaagtattagagaaaatttagcctagtgattaaaacgtgttattgaccaatttatacttgttttaatcccatctttttcacttcttagtgagtagtaagattatataacaccctaataagtctgttttttccagctgtgtacaacaattgcctaaaaaattagatggctttattgccttgaaggaatactgaacgagaagtttaaacaagtgaattctagccttggtcttactagtgtttaatcgtggccaaaaaaaaaaaaaaaaaaagtctttattcactggacatgtcatttagctttggtggtcgttagtatgtggaatttttaaaaataattttaagaagactaactttgcctacttttcagaatttcttttaaaataaatgaaatgaaattacatacataagagaatgctgagaagtgtgtcatgttcaaatgtaaaatgtgtttgacctccttcgtaagtgttgaaatcacttgtcattattggttccctaaaggaggaaacaaataggaaaaggaaaaaaaaaaaggactttgtcatcctacaagtattgttcttcagagaggataaattgaagcctttagataaattaactgctaaagtaaagcccttcatgtttaataaacttaatggaaaggaataacttcaacaaatacacaagttattcagtctgttcttgaatagctgtttcttgattcacacacatttggtaaggtattatttagaaaacatcaataaacaaactagctttatcagaactgtaagagtatttacaaaataattttatataaatctattctcaaaa

SEQ ID NO: 1772 - DNA, 584 bp, Homo sapiens
aaaaaagtagaagttgaatgttgactggagcttttggagaaaggactaaggcaacacaaataactccgtgtattctaaaagacggcaggagtttgaaggcattttagggagagaactataaaatagtatgatgtgaagtagtatttgtgaacctcagtgaggaccccaggtcctttgcacatgtgtggaggaaggctcagttccttacatcactcaggctttgatcaactgctacttctttgggttgtaattcccataactgtagtaacatcttctaacatttcctttccccgatatatttttctttatagcccttactcgtagcagcagaacattacagaatacagrctcagggggccaagacttaaaggaggccaagacgtagtccattttgcttaccactatgtctctgttactagcatagtgcttggtatttattagatgttacatatatatttgtcaagtaaatgaataatgcctgcaagatgtttggaaacaagaacccaccatatttgctgatagatttgctatagggtacaaaatgaaggaagcgtccaacctagcaactgtctgtaatctaattt

SEQ ID NO: 1773 - DNA, 609 bp, Homo sapiens
aaagttctaatggtcagaaactacatatttaaatgactgatatatgtgaatcaaggttgagaattcagctttcaagagatagtattgaggtcttttattatgaaacttaagtatgtttaccttacaggtccaaatcgcttgatatgaacattgtgattagttagtacattaattttaaagcatttgcatttgtcaaatgatagaccccrttatgtatatatcttcactttgaacattccagatgttcaaatgttggtagatatataataacaagcatcagtttctagcctacaagatgcttctcacttttgatgtcttctgaattatgttagattacttattgcttatcctttgagttacattgtaaattaaattcaagtttcctggttaaactacatttattttgccttgcatagatttgagaatttttatgaagttccattttcatattatttgaacatcaaggcaatgctgattgtcaagaaaagactgaatatttgcctaccgtaggcaattgtaaagtggcacctcctatattttaaagtttttagttttggcatggtgactttttaatcagtgtttatcctttgtatggttactattaattca

SEQ ID NO: 1774 - DNA, 609 bp, Homo sapiens
aaagttctaatggtcagaaactacatatttaaatgactgatatatgtgaatcaaggttgagaattcagctttcaagagatagtattgaggtcttttattatgaaacttaagtatgtttaccttacaggtccaaatcgcttgatatgaacattgtgattagttagtacattaattttaaagcatttgcatttgtcaaatgatagaccccgttatgtatatatcttcactttgaacattccagatgttcaaatgttggyagatatataataacaagcatcagtttctagcctacaagatgcttctcacttttgatgtcttctgaattatgttagattacttattgcttatcctttgagttacattgtaaattaaattcaagtttcctggttaaactacatttattttgccttgcatagatttgagaatttttatgaagttccattttcatattatttgaacatcaaggcaatgctgattgtcaagaaaagactgaatatttgcctaccgtaggcaattgtaaagtggcacctcctatattttaaagtttttagttttggcatggtgactttttaatcagtgtttatcctttgtatggttactattaattca

SEQ ID NO: 1775 - DNA, 1368 bp, Homo sapiens
ttgggttctcataattttcatttatagtcgtcgggttattatatttatggtgtgacttgtgatattttcagacaggcaatagtaaatgggcaattaaacttaaataacagtctgctccataatgtattccaagtaaggttgcttctggccaccacatttaactgggtcctacaatcactctctttggccttcrctatatctcttctgcaaataattctcctccctagcagtgccagcctgcgctactgtaagctccgcataattcagtaagtgaggaacaagcagtcgaaggaagatatgtgagaatattgggacaaagaaaaaggttggaacaaaagagcatatcctataactgtaattcaatgagactgattttccagtgtttggtaaattgtcatttgaagtaagttccaacagaggacttccaaacatattttaaataatggcaatatcatattaaggttgtactctcctagagcagaaatgtgttcttcggtacacaattcctttgagatattgctcataaaaaataaattgcatttgggtactgagtcacacacactacctccacttgtaaatttacaatgcacattgtgtattaaagcctcttacaagtttcatttaaaacaaaaagggaaagtgcttatcttccaaatttgtcagttttctgaaaacatccagtttcatggaatacctttggtaaagtactgttcttagggcatcttttttaaaaaaaggaagaggtcacttaattgtttatctgaatttggtatgtgtatttttaaagtcatcactttagagtaatatatcacagtgtgttaagatggctaataaaaagaaaattatacttggatttacttttccatgtaaaactgaaggactgagatgtaagataccaatttggtgaaataaggatttagctcaacattgtatgtttttgagcttggccattatttaagacaacatttgagagttttgattacttgacatcctaatgtgctaaggtatcaacaactaaaaaataaagtatcatgaaaataagaatgtcttcatgaaagttaatggcagtttttctttcaatcaaggggaagtctgctgaaatgctgttgtctttgtaattggcaaaattgtttctcaatataataatcttactttcaggaaataaaagaaagtttattaaatatgaggaaagtaattgttgcataaaagtgtcccttgaataattgtttcatagtagtgaacattttataataataaccttttttacaacagaaggagatgggttgtacgtaaactataacaatccacatgatagaatattctattctgaaaaatatttatgaaaagagtattagtaacatggaaaaa

SEQ ID NO: 1776 - DNA, 606 bp, Homo sapiens
ttttttttttgagacagagtcttgctctgttgcccaggctggagtgcagtggtgcaatcttggctcactgcaagctccgyctcccgagttcacaccattctcccacctcagcctcccgagtagctgggactacaggcacccaccaccacacccggctaattttttgtatttttagtagagacggggtttcaccatgttagccaggatggtcttgatctcctgaccttgtgatccgcccgcctcggcctccgaaagtgctgggattacaggcgtgagccacagcgcctggccctctctgtatttcttaaaatttattttttgcagttccttttgtccttagggtgtgttatttgaagtgacgtgtctctgtggttgtcatcaacttgatacgctgatgaattaattttgcttttggtttttaggaattaccttttttccattgtgatttaattttgttttctatgcatgggaagcactgacaggtgtaccttcacacagtgcaggtttggttccagaccactgccataaagcacatagcacagttaggcaagtcacacacattttttggtttcccagtgcatgtaaaagttacgtttaccagccggg

SEQ ID NO: 1777 - DNA, 741 bp, Homo sapiens
gatgaagactagctcagaaatgtgactgttttctttttgtttacctctattttctgataattatatagtgatcatgtatgtctttcataattaaaaaatcattgtaaaaaattattctagtagattaatagtatcagaagagacagagagctagaaataacaatttacctttaaaatatcttgaaaatggactgcaaccatgtgcaatgatccaaccctctagctcaggagtcggccgcccacagcccaccacctgttttgtaaataaaattgtattggaacacagccatgctcatcctatagatgccttctaactctatcacgttagagttgacttgttgmgacaaagaccccgaggcctgcaacagcctgaaatgtagaccacctggctctttgcaggaaaagcttgctggctcctgccctagagagtaccctgctctccgcgtttaccggggtgggggggaggtccctccacaatgccagcacaggcagcctgcagctcctgctgtgtcctctgcccgtttggtgtatctgtgtgtctctctgctgaaggtcagaaactagattcatctttatatttttataaggcctggcacattttttaccttaaatgagtccatattatgaaaatatttctgttctgcttgagtaaggaagtctcagctgatgtcccaccctccaacagtcatgcgtggccacagagttggggatcctcccgctgagtgctgcacagagaccccc

SEQ ID NO: 1778 - DNA, 1187 bp, Homo sapiens
tgcatagctggctcttgttctgttacactcacttatgtattttcttctgctgaaagtgtggacttatgtgtgtggcattaaggaaagagagagcatcagtcaccctgagataatcatgcgtccttgggggcttccagtatggctgagagagataaggaaggctggggtaaaacagcgcttctctgctttttacctctgcttctccatgagatagagggtaatggcgttttgttccttccacaagtgacgcactttcaagatggaagaagatacactgtgaatagacatcgggacacccttggctgttctgtgcttccccggcccacctggggaagccagaggtctctgtcccttggctgctcatgtaaagaggtcccttggcctggcttggggcagagattctctgcagaagtgggcmgaacacagacgtgaggggtacgcgtaggaggattcgttcacacacctgttactgctcgattcagctgcttttgtccatcgcatcaagaccctgtaggagcaagttctaaagacttgaaagctaacaccagtgtcttttctttctttctttcttttttgagacaaggtctcactctgttgctcaggctggagtgcagtggtgtgatcacggctcactgtagcctcaacttcctgggctcaaacaatcctcccgcctcagcctcccaagtagctgagtgaaaacacaccaccaaccctggctgattttttatgcttttctagagacggggttttgccatgttgcccaggctggcctcccatagtgctgggattgcaggtgtgagccaccacgcccttcttgccagtgttttctcaaattccttacatctgttttggcttcagagtcccttcagaccttctgccagggagtgtaaagtgccccctaaccctcctttgcactggccatgggtcctgctgtactttcagaatgctgcccaagcatagtgcctgcgcctcagggacctgcaggatgtgcatgtgtgagtgtgtacggcctgtgtgccagtgtgtttggtgtgtgtgtgtgatgtgtgagaggatgtgtggtgtgaagggtgtgatggtgtgagtgtgagagtgtgtgtgagtgtgtacatgaggctaacaatgactgcacacttcctctgtatctgacacatccctagggttttcgcacacatgacttcattttg

SEQ ID NO: 1779 - DNA, 1187 bp, Homo sapiens
tgcatagctggctcttgttctgttacactcacttatgtattttcttctgctgaaagtgtggacttatgtgtgtggcattaaggaaagagagagcatcagtcaccctgagataatcatgcgtccttgggggcttccagtatggctgagagagataaggaaggctggggtaaaacagcgcttctctgctttttacctctgcttctccatgagatagagggtaatggcgttttgttccttccacaagtgacgcactttcaagatggaagaagatacactgtgaatagacatcgggacacccttggctgttctgtgcttccccggcccacctggggaagccagaggtctctgtcccttggctgctcatgtaaagaggtcccttggcctggcttggggcagagattctctgcagaagtgggcagaacacagacgtgaggggtacgcgtaggaggattcgttcacacacctgttactgctcgattcagctgcttttgtccatcgcatcaagaccctgtaggagcaagttctaaagacttgaaagctaacaccagtgtcttttctttctttctttcttttttgagacaaggtctcactctgttgctcaggctggagtgcagtggtgtgatcacggctcactgtagcctcaacttcctgggctcaaacaatcctcccrcctcagcctcccaagtagctgagtgaaaacacaccaccaaccctggctgattttttatgcttttctagagacggggttttgccatgttgcccaggctggcctcccatagtgctgggattgcaggtgtgagccaccacgcccttcttgccagtgttttctcaaattccttacatctgttttggcttcagagtcccttcagaccttctgccagggagtgtaaagtgccccctaaccctcctttgcactggccatgggtcctgctgtactttcagaatgctgcccaagcatagtgcctgcgcctcagggacctgcaggatgtgcatgtgtgagtgtgtacggcctgtgtgccagtgtgtttggtgtgtgtgtgtgatgtgtgagaggatgtgtggtgtgaagggtgtgatggtgtgagtgtgagagtgtgtgtgagtgtgtacatgaggctaacaatgactgcacacttcctctgtatctgacacatccctagggttttcgcacacatgacttcattttg

SEQ ID NO: 1780 - DNA, 1151 bp, Homo sapiens
tcttttgctccttcatattgtctgtttyatagggacctgcctctaggtggagagatgtctgagagcctgagactggataattctgtctagtttcagggagcactgttggctgtgtgtgtgtgtgtgtgtgcaacattcttcaatatcagcttattcagtaaataaaggcaggattttatccttcccccaacccccctattctcactccatttgttttatttccaagttagttcagaacttaggcagacaagacagatgctatttactgagcctatcaaaacaccccaacatctgctgcatgaattaatgagtttgaaaaagagacaatgaataaaatgtggaaggccagaacataggagaagtaattgaggcttcttatgtgccttgagaggggaagttgaactttggagttgcttcattaaaacaaattgaggattcagctgatgacgtgcaggcctttctcttcttgaacaaaggcctcagcaacggcgcagacctcagaaggctgatcgtcttagcaaagatttgggccatacaaaacagtgagcaagcttcagcaaggggattggactttagcaaagatttcagagtccagacctcagccaaaatgctggcttcaggtcttaagcgcattatccaaacaccagctggccctgactgtatcagcaaaggctgggccatttgcatgtgcaggccacctgggggctacagcaaggttttgtgggaagtggggtctctgctcatctctgctgctcacagaggccttataaacaggctcaggttttcgattagacagaaaagagagttttactggcctttttaactttgtaggaaaagcaatatttgatgcttttaaactgcaaagcagctgacgtctacagaatactggtgaggttcttgctttaaattgttaatgccaactggagtgtttataagtgaaataacaaggtgttttgttttgttttcaaataaacaggaacagtatcagcataagggcaggaattgatccaactagatttttttaaaagtttatacttgtggatgcaaggaaattgatgaatggaagttaactatatgcttctctctgcttttgtgaattttaatgccaggcctaggcacatggtcctagacactatgtcccaagttgcttt

SEQ ID NO: 1781 - DNA, 1151 bp, Homo sapiens
tcttttgctccttcatattgtctgtttcatagggacctgcctctaggtggagagatgtctgagagcctgagactggataattctgtctagtttcagggagcactgttggctgtgtgtgtgtgtgtgtgtgcaacattcttcaatatcagcttattcagtaaataaaggcaggattttatccttcccccaacccccctattctcactccatttgttttatttccaagttagttcagaacttaggcagacaagacagatgctatttactgagcctatcaaaacaccccaacatctgctgcatgaattaatgagtttgaaaaagagacaatgaataaaatgtggaaggccagaacataggagaagtaattgaggcttcttatgtgccttgagaggggaagttgaactttggagttgcttcattaaaacaaattgaggattcagctgatgacgtgcaggcctttctcttcttgaacaaaggcctcagcaacggcgcagacctcagaaggctgatcgtcttagcaaagatttgggccatacaaaacagtgagcaagcttcagcaaggggattggactttagcaaagatttcagagtccagacctcagccaaaatgctggcttcaggtcttaagcgcattatccaaacaccagctggccctgactgtatcagcaaaggctgggccatttgcatgtgcaggccacctgggggctacagcaaggttttgtgggaagtggggtctctgctcatctctgctgctcacagaggccttataaacaggctcaggttttcgattagacagaaaagagagttttactggcctttttaactttgtaggaaaagcaatrtttgatgcttttaaactgcaaagcagctgacgtctacagaatactggtgaggttcttgctttaaattgttaatgccaactggagtgtttataagtgaaataacaaggtgttttgttttgttttcaaataaacaggaacagtatcagcataagggcaggaattgatccaactagatttttttaaaagtttatacttgtggatgcaaggaaattgatgaatggaagttaactatatgcttctctctgcttttgtgaattttaatgccaggcctaggcacatggtcctagacactatgtcccaagttgcttt

SEQ ID NO: 1782 - DNA, 1538 bp, Homo sapiens
ttgactacaagttcacccaaagatcctaggccttgacttgatgctttgacttgatggaacttggggtggycttccttgagaaagtggtgagtctaatttgtataagagggagagtgaagcaaatatttagtggcaagaagggagaactattggggatgttcacaaatacgttgcttgtccttcattctctgcatagaatagaatcaaacctgccttcctacttcagtttgaacataaggcttgtttttgtcaatacaatgtgagaagaactggtgtgtgtcacttctggctgtgtgtgtttcaccaagcttccttcaccattaccatagctacctgcagggttccagatattgggtactccatcagcttaagtcctaaagtgagatacgtatggacctcatccctaaaactgatgaactgtagaaatgttgtgtgaaccagaaataaaccaatcctgcctgatactatagccctggtattactcttccctacttcttgggagcaagcatgcccatagagaatgcgtttactactgctcttagatgccgtaagtcttacagttccaatgatgcctggaagatgtaatcagaaagccccactgtctaaagatgtaagttaaattttccagcctggcctctataaataacaaaatcttatcagtgaattatttgtcttattctctattgtatggaaattcaagtatagaatagaaggactgatctggaacacaacaaatgcaaagtttttcagcaacattcgttgggcactattcttacaaatcttcacaactactttaatatagaggttttggttattattctcatatccttacagatattgttaatagtgattaacagtttttaaagaagaagaaactaagacacagagaagttaattgttcaacaaattagcttcatttcttttagcttatgatttcttaaaaaaagatacctagaaaagtgaatgaaacattattcttttttatttgtacaaccatgtgggactttttggttatgtctgcattatgttttgaggaaaaaaggaattaggttttttaagaataagaaatcaatgacccctaaataaataatttactaaaatagaattccatgcaagtaaaggaatctgaaaatttattttaaaatgtactcattaatagcctgtcagaccagaaaattgtaaaactctgtagcacttcgtattgcctattatgggtaatagtatatggtgaaaatttgatttcacattgattgagccattagacaaattaactttaaacattctttgaaaagccatatcagtatgaatagatggataagtagatatgctggttgcataataaaatatttttagaagcatgtaggagtctttgggggtaggaggtgccgaacttttaaacaccatggatacctacgtggacttctctagggttcaacacaattctggtacacttatgcctgcccttgcactatcaaaagtgtcatagtataaacaattgattagtggtcaccctaactacatgctatcttttgatctgc

SEQ ID NO: 1783 - DNA, 1292 bp, Homo sapiens
tcatatacaaaatatgcagtttcctctgattaagaggaacaatttttatatgtacataatgtcaagtagaccttggcttatgttagagagtatgtagaaataactgatttattttgtcattcataagaaattaccttggccaggtgtcgtggctcatgcctgtaatcctagcaattctggaggctgaagtgagaggactgcttgagcccaggagattgaggctgttcgagttgcactccagcactccagcctgagaaatagagcaggattctgtcttaaaaaaattaccatggcaagtagtctcctttttcatctagaaggatgtctttaaatacaacagactaagagaatgttacattttgtgacttgaggacactgggagacaaagctgtatttacctccttcacatgcgcaccaatacatttctccacattctcattaaatatttaattgctttaccatgggttcaatatttgtatttaaatttacgtaacacatcttaaaaagtagcatatcttaaaatataatactagcatcagtggtgacacgacaaatgagggtaccctattgttttgtaatatttagaaaatgcagcttgatctttttgcctcaaattgtgatctacaaaccaaaagcattagtaaattagtaaattagtaaaaacatactctctgactcaaacccagatctactgaatcagattatgtattttaacaacatcctcaggagttttatgtacataaaaatttgagatacactatcctgaatattgaaaaaagtaataccagatacctaatatgtagtacctgcttcagaggagtttattgttcaaaggagagactatgcaagtaaaccaatagttatcttattgtgtgatttgtgaaggatcaatattaattcctttattgaacccaggttttggtggaaggaaagtgtgagagaaaacagggggaaaatactatttaaattgttattcatgcttattatgcagcaaaagcggaagtatgattacggggctccctctgggtgttatgaaaatgttctaaagttgactgttgtgataactgcacatctatgaatacactgaaaaccactgaattgtaccctttgggtgaattgtatggtatgtgaattatattgcaataaaacccattttaaaaatgaaaaaaaagtatgagaaagaaagaatacagacacaagtatgtggataagaaaaagacagagagctacaaaatcatgcagctatttctattaacaagagggagatttcatatkggggggagatatttatg

SEQ ID NO: 1784 - DNA, 569 bp, Homo sapiens
  misc_feature (1)...(569): n = A,T,C or G
ctcttccaccctcagaggaccaagcattgaatgacactatgcaggcagagcacttagcacacgggaagtacatcaacacggttgtcttcctgatgtctggctggccccagttctgcctttccattctttgttttgtgcctgggtttatatccttggccttcagcagcctggaagcaaggccccatctcagtatctggcttcagttgattgcttggccatctctgtcccacccactggcccaacgctgggtttctggagcacatcctctggtgcttcttggaaaactgggttgatagagctggaggggtcttggggagtggctccgacctcacactgtatagaggagaatgccgaggcccaaagagagncagagtcttgactaggcccattcccacagtctactaataatacygagtacctgctgttcccaggcactgtctaggtatgatacccaagtgagaaagtcactgcacctacagagtccaccttatcatagtgagggagaaagacgatcnacaaaaaataggtcaacaaaaacataaactagaaaatatcagagtgataaaggc

SEQ ID NO: 1785 - DNA, 1357 bp, Homo sapiens
agagtttgagaccagcctgatcaacatggtgaaaccccgtctctactaaaaacataaaaattagccgggcatggtggcagatgcctgtaatcccagctacttgagaggctgaggcaggagaattgcttgaatccaggaggcagaggttgcagtgagccgagactgcaccattgcactccagcccgggtgacagagtgagactctgtctcaaaaaaaaaaaaaaaaaaagttttcattcctcaagataaagaagagatggtggcaataaggggagaaatggaatataaaatgttgctcctaatgtctgctgttttaggtggaagaaatatcccaccacacagaaaagagatgcttaaaaagcaaacaccccctaccttctggagcattttagaagactctgaaatcacccagacatttgagtcgtcagctgtgaaaggcttcctgtactgtacagtgagaaattgtctttatgcttattatctcacttcataagaaagtctgagaataaataagaggaaaaatatgagggatgcccatgatgatcacttgagttgaaagactctgaaaatggaagtcattagtatctgaaaggctcatagtaaaatataaaatgcatgatatattttgacaaagatattcaatgataaaatatagatccaacttgcaggccatttatcaacttttgtccttttggaggaaataaacttgtctactgtagacaagctggtatacagaaggagagaaaagtttcttcaatgctagtaaacatgcctgggtattctactgtcagagattaattcctttggcttagcctaggccttcttttaaaaggtgawctacttgaagaaagctgacctggtaagtcagaatatcaggtgttaccatgtttcatgtgattaaactatttagatttccctcctaactcaaatcacataaagaacatgaggccaagcacagtggttcatgcctgtaattctagcactttgggaggccaaggcaggttattcacctgaggtcaggagttcgagaccagactgacgaacatggtgaaactcgtctctactaaaaatacaaagattagctgggtatggtggcacactcctgcagtcccacctactcaggaggctgaggcaggaggatcacttgaacctgggaggcagaggttgcagtgagccaagatcgtgccattgcactccagcctgggcgacagagtgagactccgtcaaaaaaaaaaaaaaaaaaaaaacaaccagaaaagaaaacgagagaaatggaccatttacaggatgaggatgagaacataggaaggaagagtaatctggaaagcgttgccctgacaagatgtgcatgcctgcct

SEQ ID NO: 1786 - DNA, 1113 bp, Homo sapiens
ttaactgctaggcaggctttttatgtgaaggaattttttaaaaattattgacatatatttacagttcactggcaaaaaaaattactagaatgtttaacctatttttccaattttttgtttgattttattggcaatgaaaaatatcaagttttagttaacatgtttggggtttttaaaagttgatacagtatctgttcatcttttscctgcccttttttttgaaagtcagtaaatatattttgagaatgttttatatggtaatgttctggtaatcacaggcccgagtaaaaatagctttagttatatgggtgaggtcatgaaattaaactacaagtatatgcttatctgtccacagaagcctaaaacacacactatgtccttccctcttcattatttgccacaagtcaagtgtagttcacaacatggcataacatgaagaataaaatcccttccatcatgggcctggaaatgaagacctctttacctcagaggcaaatatcagttaatgatagaacagtaaaacttgctacttaatttttaatttgatcaaatacatcactaacttttttcccaggaatgacatatagaaagaagcttctgtcgtgatagatccttacgtatagtaatgtaaaatatggtagtttatatcttatatacatatatgtgtgtgtgtgagtgtggggactgttttaagtatatactgtacttcctagaggagttcacaacagcttatgttctttctccacaagctgaaacttaaatatgtgaaagcggtttcagtaacctgccatgttgccgtttgtgtttttcatcccttgtgatccccaagacaggaatgagcaccaaggtgatagttcgctgagtctcataaccctaacacttcccagctgtccgcttctgccggaagcgatgtgcaaaagatgcttgggacactctgccgtaagagtcagattgcttatccagctctgcagaacaagtgtagccatctcatacttctgctattttcagtgtcaaagaactggtcatggtgtcctttgtcagaccatttctcagatagaagaggataggtcagtttgcacttaggaaaaatgaaacataccattgctaatgcat

SEQ ID NO: 1787 - DNA, 1113 bp, Homo sapiens
ttaactgctaggcaggctttttatgtgaaggaattttttaaaaattattgacatatatttacagttcactggcaaaaaaaattactagaatgtttaacctatttttccaattttttgtttgattttattggcaatgaaaaatatcaagttttagttaacatgtttggggtttttaaaagttgatacagtatctgttcatcttttccctgcccttttttttgaaagtcagtaaatatattttgagaatgttttatatggtaatgttctggtaatcacaggcccgagtaaaaatagctttagttatatgggtgaggtcatgaaattaaactacaagtatatgcttatctgtccacagaagcctaaaacacacactatgtccttccctcttcattatttgccacaagtcaagtgtagttcacaacatggcataacatgaagaataaaatcccttccatcatgggcctggaaatgaagacctctttacctcagaggcaaatatcagttaatgatagaacagtaaaacttgctacttaatttttaatttgatcaaatacatcactaacttttttcccaggaatgacatatagaaagaagcttctgtcgtgatagatccttacgtatagtaatgtaaaatatggtagtttatatcttatatacatatrtgtgtgtgtgtgagtgtggggactgttttaagtatatactgtacttcctagaggagttcacaacagcttatgttctttctccacaagctgaaacttaaatatgtgaaagcggtttcagtaacctgccatgttgccgtttgtgtttttcatcccttgtgatccccaagacaggaatgagcaccaaggtgatagttcgctgagtctcataaccctaacacttcccagctgtccgcttctgccggaagcgatgtgcaaaagatgcttgggacactctgccgtaagagtcagattgcttatccagctctgcagaacaagtgtagccatctcatacttctgctattttcagtgtcaaagaactggtcatggtgtcctttgtcagaccatttctcagatagaagaggataggtcagtttgcacttaggaaaaatgaaacataccattgctaatgcat

SEQ ID NO: 1788 - DNA, 824 bp, Homo sapiens
gttaatattaattagacaagtgtagaatgttttatcttcagtctcctttagaccaatatcagtctgactgaatttctatgtttaaaatcagttattgtgtcactaggcaaaatcatgtagttaaaagttatgaccatttaaaatgtgaatcaattatttccattcttctgtttattatttaataaactccaaataggaatatctcttccatatgtgagcagtcacccaaaaagtcatccatacattggcaggggagggaaaaaaaaggaactacggagcaagatgataataggaaaaataagaggagagataaaaaaaaatggagaagggtaagaaaaggagacattttattctgagagaaaaaataggttgactgaaaaacatatgttcaacatcagttaagcagattaaagctggactttggatgtaagctatactcattgatttaacaaatattagtttactgtctgattcgtatttggtattgtgctaagtttatagtaatgaagaaagtggatatggaaaatggctggaagccaagagaaggaagtaaaacttaacccacaaatactatataaatatatattataattagtgctatgatgggactttagctgggagatatttctgagattaaatggtcagataagacaattygaaagagtgactaaattgagactagaaagatgagtaggctctacttgagtgtagtacagtacaagggaagctatgtaggtgtagtttacaagcatatgggtagattttccttgaaaatgttagtaatggtagcagagtcattttatgaatcctaaaaaagtgactat

SEQ ID NO: 1789 - DNA, 1158 bp, Homo sapiens
tgctttagcaggctctggaattctttaatatgtgaaaaaaataaatttatgtttggtttcaataactaatgmttttatttacttcacttgcagcccaaataaattctaactgacacaattatagaaattattacttttattttacagatttaataatttgctgaaaatttcaatggggctaaaatttgaacatagggcacttctgacacctaagcccaacacacttcctacttctctctaaatagataatagtaaccattggcaggtgtaagctgaaagacaaaccctaatggaacatccatcagtgattagaacatcgcaggagtagctcatgttgtcctccacatagaaaaacattcctatgacaaattagagtgaacgaccgtctctttagaattgagtagatattggacaccacctctgtaaaggactcatattctccccaaagtatctaagtaagaactaggaggaaatcagaatgcagtatcagaaatgttaggcaaatgatcaaaaagtaccacgttaccaaggttgctgtgaggtgcatttcaaagcctttaagaaataagccaagacttcaaggggaattttttaggaaatagaaaaagaagtccttatttctcctcccacaccccattctctcaacccctccatatcagctctagttcttttggtttttgtctgttttcatttttttaaacacctggacaaatcttatcacttccagaaaatgaagggatggggaactcaaccttgcttctcactgtgctgagtgagcccccagactccacattgttggcttagcttgtagtgttgtgctctgacagcccttagcagctgaagcataaagaatagaaataatatttcaggattttattaggactattaatttttttctcttgtagataaaactcttcaatatttctaacagtaatactattatcttagtatatgaatggcacctatgatgctcaaaacagctgtgatagcccattcactatgaacagcagagatggctgaagcccattagttagctcagcttttcataacttaagaaaaacctgccagccatgtatccctcacttctacatattttataataatggaacatttttagataaaatcataaataaaagatgctgctgagtttttgaacaa

SEQ ID NO: 1790 - DNA, 1158 bp, Homo sapiens
tgctttagcaggctctggaattctttaatatgtgaaaaaaataaatttatgtttggtttcaataactaatgcttttatttacttcacttgcagcccaaataaattctaactgacacaattatagaaattattacttttattttacagatttaataatttgctgaaaatttcaatggggctaaaatttgaacatagggcacttctgacacctaagcccaacacacttcctacttctctctaaatagataatagtaaccattggcaggtgtaagctgaaagacaaaccctaatggaacatccatcagtgattagaacatcgcaggagtagctcatgttgtcctccacatagaaaaacattcctatgacaaattagagtgaacgaccgtctctttagaattgagtagatattggacaccacctctgtaaaggactcatattctcyccaaagtatctaagtaagaactaggaggaaatcagaatgcagtatcagaaatgttaggcaaatgatcaaaaagtaccacgttaccaaggttgctgtgaggtgcatttcaaagcctttaagaaataagccaagacttcaaggggaattttttaggaaatagaaaaagaagtccttatttctcctcccacaccccattctctcaacccctccatatcagctctagttcttttggtttttgtctgttttcatttttttaaacacctggacaaatcttatcacttccagaaaatgaagggatggggaactcaaccttgcttctcactgtgctgagtgagcccccagactccacattgttggcttagcttgtagtgttgtgctctgacagcccttagcagctgaagcataaagaatagaaataatatttcaggattttattaggactattaatttttttctcttgtagataaaactcttcaatatttctaacagtaatactattatcttagtatatgaatggcacctatgatgctcaaaacagctgtgatagcccattcactatgaacagcagagatggctgaagcccattagttagctcagcttttcataacttaagaaaaacctgccagccatgtatccctcacttctacatattttataataatggaacatttttagataaaatcataaataaaagatgctgctgagtttttgaacaa

SEQ ID NO: 1791 - DNA, 642 bp, Homo sapiens
atattatttaatctgctctttacagcacctcttcaagatagatattaccatctgagacgttaaataccctgcccaaggatacatggtcagtgaatggaggagtcaggatttgaatcgggaattatgtgtctccttgacagagtctttttgcattatacctcacaatcaagactgatattagagatgtcccattctatcgtagcttgcatagtattttaygtacaatatgtatgtaaaaatacaatatgtatttcctaacacatattaaaacagtggatttggaagagatggacttggcatgagcctataaggatagggaaagttagaaggacagtgatggctcttggagataggagaggccagtgaaagctgcagaagaggagtgtagattccaaggagccagttaatgcattgggaaaagcggaattcaggaagatattgattgaagaataagctgttcttatcagttgataaagagagtttgtaacacacttacaaacctgtctgaacacaaagccatctttccaccagctgattctttttctccctttgctttgttgtaaatttcattttctgtatactctgtcacctatgttgctgtagtgactgatctgctcacaacttgtaaaaatagaaggaaaa

SEQ ID NO: 1792 - DNA, 642 bp, Homo sapiens
atattatttaatctgctctttacagcacctcttcaagatagatattaccatctgagacgttaaataccctgcccaaggatacatggtcagtgaatggaggagtcaggatttgaatcgggaattatgtgtctccttgacagagtctttttgcattatacctcacaatcaagactgatattagagatgtcccattctatcgtagcttgcatagtattttatgtacaatatgtatgtaaaaatacaatatgtatttcctaacacatattaaaacagtggatttggaagagatggacttggcatgagcctataaggatagggaaagttagaaggacagtgatggctcttggagataggagaggccagtgaargctgcagaagaggagtgtagattccaaggagccagttaatgcattgggaaaagcggaattcaggaagatattgattgaagaataagctgttcttatcagttgataaagagagtttgtaacacacttacaaacctgtctgaacacaaagccatctttccaccagctgattctttttctccctttgctttgttgtaaatttcattttctgtatactctgtcacctatgttgctgtagtgactgatctgctcacaacttgtaaaaatagaaggaaaa

SEQ ID NO: 1793 - DNA, 642 bp, Homo sapiens
atattatttaatctgctctttacagcacctcttcaagatagatattaccatctgagacgttaaataccctgcccaaggatacatggtcagtgaatggaggagtcaggatttgaatcgggaattatgtgtctccttgacagagtctttttgcattatacctcacaatcaagactgatattagagatgtcccattctatcgtagcttgcatagtattttatgtacaatatgtatgtaaaaatacaatatgtatttcctaacacatattaaaacagtggatttggaagagatggacttggcatgagcctataaggatagggaaagttagaaggacagtgatggctcttggagataggagaggccagtgaaagctgcagaagaggagtgtagattccaaggagccagttaatgcattgggaaaagcggaattcaggaagatattgattgaagaataagctgtycttatcagttgataaagagagtttgtaacacacttacaaacctgtctgaacacaaagccatctttccaccagctgattctttttctccctttgctttgttgtaaatttcattttctgtatactctgtcacctatgttgctgtagtgactgatctgctcacaacttgtaaaaatagaaggaaaa

SEQ ID NO: 1794 - DNA, 642 bp, Homo sapiens
atattatttaatctgctctttacagcacctcttcaagatagatattaccatctgagacgttaaataccctgcccaaggatacatggtcagtgaatggaggagtcaggatttgaatcgggaattatgtgtctccttgacagagtctttttgcattatacctcacaatcaagactgatattagagatgtcccattctatcgtagcttgcatagtattttatgtacaatatgtatgtaaaaatacaatatgtatttcctaacacatattaaaacagtggatttggaagagatggacttggcatgagcctataaggatagggaaagttagaaggacagtgatggctcttggagataggagaggccagtgaaagctgcagaagaggagtgtagattccaaggagccagttaatgcattgggaaaagcggaattcaggaagatattgattgaagaataagctgttcttatcagttgataaagagagtttgtaacacacttacaaacctgtctgaacacaaagccatctttccaccagctgattctttytctccctttgctttgttgtaaatttcattttctgtatactctgtcacctatgttgctgtagtgactgatctgctcacaacttgtaaaaatagaaggaaaa

SEQ ID NO: 1795 - DNA, 1234 bp, Homo sapiens
ataaatgtctatttttataaaaatattgaaggagtcttataataaatatataaatatgtgctttatatactttagtgtattttgggcatttttccatagcaacacatttaggctgcttccttctttttaataaacaccttataattttatattacatattaaatatatattaaaagctctataacatttaattaatatattaaatgctctataacatttaattaagtttaaaaatttatttacccagtactttatcaatggatattaagatacttttcctttctttgtttttttcatccttccaaactgtggcaggcagtctcaaaagatggcccccaatgagcattatctccttgtgtattcccttccctcattgaattagtctgtcctgtgtaacaagaagacattgtgcgaatggcaacatatgacttccacgactaggttataaaaagcatagtggcttctgccttgtactttcttgaattactcattctgggagatgccagttaacttatcatgaagatcctccaacagttatattgggaggcaaggggtgaggagcttggccctcttgcaacttgtcagcccacaggtcaaattggaattggatcttccagccccagtcagactttgagatgactgcagtctctgtcaacacattgactacaaccccatgaaacagccactcaactaaattgctctccaataactgagacacagaaactctatgagataatgatgtctattatgactttaaactttaaagttttggggtaatttttaagcacaggagtagataactaatagacaaacaatgtcacaatgatcatccacgtctacttatttttgtgagaatataaaaagtctgtaaaacaaattcttaggaatagaattgaaaatagttgaaaagagtgtgaattttaaatttcacttaataatatgcaatttaatttaacagtgtcccacagwgaatgagtgggcttctccatacctaccctcaacattgaagctcacactataattttgccattttataacttttaaaaaagtttttttttttccaacttggacttagttatgcaggaggttgagcatttataaaatattcattgacaatttatatttatatttctgttaactgccaatttatatcttaactcgctttatattgaattgatctttttgctattagagctttttgtataataagaaaattagcccttttttataagta

SEQ ID NO: 1796 - DNA, 1269 bp, Homo sapiens
gttggtagatttaccctacaaaaatgtggagtgttagtgtagtcaaaaacacagtaggccgggtgtggtggctcacgcctgtaatcccagcactttgggaggccgaggtgggcagatcatctgaggtcaggagttcaagacaagtctggccaacatggttaaaccccgtctctactaaaaatacaaaaattagccgggtgtggtggtgggtgcctgtaatcccagctacttgggaggctgaggcaggagaatcgcttgaactcgggaggcagcacttgaacctgggaggcggaagttgcagtgagctgagatcacacccctgtactccagcatgggcaacaagagtgagacgccaactcccaaaaaaaaaaaaaaaaaaaaaaagccacaataacgaattaaaagtcaaacatcaattggtcaaactatttgcatatagacagataatagttcctaaactatttattagtttttttcctctggttttatatttttcaaaacatatgacattctgttattatttttgccagcatatttgaaaatttctgttcttttcattgtttcctatattccatttcttctgtgatgatttgcttttcttcgttttgaactacttcccttattaactatttcagtaagagtcatgaatggtaaattatcttggccttccatatctgcatttattattcaattcttgaatgatagctaactgtgtaacgtttccaaggttcaaacttcattcctttcttcattcattcagatgaatttagttttttcctctgatatcttttaatgtttttgctttagttttgatgttctgcaggtttgctatgatgkctctaaatgtggatatatatgtgtatattctgctcaaattttgttattgttttttcacttaataaaaaatgaaaatttgggctactttatatctgtatattaatatgcaaatattgaaactacaacatgtaggggtcaaaatgtattatacctaaaatagacccgaattcagaagccatgtcatatttaggtgatggtcaagattctgtgaatacaaccatatgcaaaaccagatacagggtcacctatatgggaaacaaaagagacagggatttggaaagtcatcttttagtcccctgacatggagtctaaactttcaaacaactcttttgagaagaatttaatttcagaagtagcagctcagggagatgcactgagacctcaggcatatttgcagactattttgaaatagaagactgtagctgagccaga

SEQ ID NO: 1797 - DNA, 659 bp, Homo sapiens
ttgagtactatattttgagtagaaagtgtcacatatgaaaatcaccctcctcataagttttcagtctttgttaagtgctactactaatgatgacattgatgatggtgttgggaggagagtaaatggtgatgccagtcttgggaaacatgtgtaagaccctctcaggaaattgtttttagagaaacataagtttgaagccatatccaaccttctgccctcaaatgacatcactaattttgttgcatatcttacacaggaaattctctctaagataatttttgatgcttcaaaaaatcaaatttactccttaagactgaatatttgacacttctaaggatatgtataaaaatgtattgtaggtgccaatggaagttgaaaactatggcaatgacagcattattggaacttagcctcctgggatgaccattttgtatgggaagacattcagatggatgctttgataaaaactgctacttgtccyctatatccattttcttttcatacatggtagtagaatccctgatttttagctggatacatgactgcatggaagaaaggctacatttccttgcctccttccaaacaagatgaaatcatgtcacttggttttggtcaatgggatataagcaaaagtgtcatgtggcaaccttgaattttca

SEQ ID NO: 1798 - DNA, 658 bp, Homo sapiens
catctctattatggagagaaatatttgcaagagtaatgttttcatagatactcccatcaaaatacaaaagaatcaatggcctgacctctcaggtgtccaatatatagatgcttggaacaaagtcttcctaatcttcctaggaatactcaaacttaatgtgtgcttttaaggttattcaaactcaagtccagatttacaaagataatctacttacagagaattgacctcacaaaggttgccactcctaatattcagaagcaaattctttcctggaaataagcatgtgcttttcaccagagagaagaataaaaagtaaaattggtaygtcagtcattcatcttgtcattctttcattcagcatttgtggaacattcatgtttttcacccaaagggtataagtgtacttggccagattttgtaatctacatagagagctagaatgccacatctgacattgaagggcttcccatttaaagtatgaaattcagttcattcattttcaaatatttattatgaacctactcaattcaacactctttcagatgtgttaaggatgcaactttgaatcagaggaacctgattttgccctctctgaatttaaagttcattgtagaggatgtacactaaaacctgaaggacaaaaagtaactaatcatgc

SEQ ID NO: 1799 - DNA, 1282 bp, Homo sapiens
ccaggtataggggtcctccacattctgctcaacacaaaagatttctccarccccaaccatggatcctggagctgggagtgtatggcttacccttagaaccaggagaggtgacagctagcccaagggcccaggcaggggctgggctgtggacacaatttttttttattttggagacagagtcttgctctgtcactaaggctggagtgcagtggagtgatcttagctcactgcaacctctgcctcccaggttcaactaattctcctgcctcagcctcccaagtaactgggattacaggtgcatgccaccacacccggttttgtttttttttttttttgacagagtcttgctttgttgcccaggctggagcacagtggcgcgatctcggctcactgcaaactccgccccccgggttcacgccattctcctgcctcagcctcccgagtagctggaactacaagcaccctccaccacgcccggccaattttttgtatttttagtagagacggggtttcatcatgttggccaggctggtctcaaactcctgacctcaggtgatccgcctgcctcagcttcccaaagtgctgggattacaggcgtgagccaccatgcctggcccctgccctgatttcaaagctgcaagctcagagcagacatttcacacccacctggagaagaggaggcagcccctgcccactggtacccataccctccctggggtggtgaagcagcctgggactggctgacctgagtgtgggatccacccccacaagttctcagtaaacctgacgggcgggtctagcttgtcctgacgtcctcagttcccgctgctggcggggcacaggcaacatgacagagagtcaggtgggagggggtccagacaaatgcctgggacagtcaggccaggctgaaccagcaggcccaccaggctggggccctcacaggagagcccctggggttaggtgaggcagagcagatggaatgtggagctcaggaagccccagccctgggccctactgagcaccctgagggatcctattctcagatactccagctgtggtgagccccaggtgtgtcagggtactgctcagtggcaccccatggaggctcaagttcaagacctcagaccctgcccagcgcagcctccacacacactcaagctgcttcgggcagtttattgaggttttcacgttggggtaggggaagtggcacacacatgctcttgctgtgtacacacagtgaaggacctctcccgcaggcaagcacatgcccacagcttgagca

SEQ ID NO: 1800 - DNA, 1282 bp, Homo sapiens
ccaggtataggggtcctccacattctgctcaacacaaaagatttctccagccccaaccatggatcctggagctgggagtgtatggcttacccttagaaccaggagaggtgacagctagcccaagggcccaggcaggggctgggctgtggacacaatttttttttattttggagacagagtcttgctctgtcactaaggctggagtgcagtggagtgatcttagctcactgcaacctctgcctcccaggttcaactaattctcctgcctcagcctcccaagtaactgggattacaggtgcatgccaccacacccggttttgtttttttttttttttgacagagtcttgctttgttgcccaggctggagcacagtggcgcgatctcggctcactgcaaactccgccccccgggttcacgccattctcctgcctcagcctcccgagtagctggaactacaagcaccctccaccacgcccggccaattttttgtatttttagtagagacggggtttcatcatgttggccaggctggtctcaaactcctgacctcaggtgatccgcctgcctcagcttcccaaagtgctgggattacaggcgtgagccaccatgcctggcccctgccctgatttcaaagctgcaagctcagagcagacatttcacacccacctggagaagaggaggcagcccctgcccactggtacccataccctccctggggtggtgaagcagcctgggactggctgacctgagtgtgggatccacccccacaagttctcagtaaacctgacgggcgggtctagcttgtcctgacgtcctcagttcccgctgctggcggggcacaggcaacatgacagagagtcaggtgggagggggtccagacaaaygcctgggacagtcaggccaggctgaaccagcaggcccaccaggctggggccctcacaggagagcccctggggttaggtgaggcagagcagatggaatgtggagctcaggaagccccagccctgggccctactgagcaccctgagggatcctattctcagatactccagctgtggtgagccccaggtgtgtcagggtactgctcagtggcaccccatggaggctcaagttcaagacctcagaccctgcccagcgcagcctccacacacactcaagctgcttcgggcagtttattgaggttttcacgttggggtaggggaagtggcacacacatgctcttgctgtgtacacacagtgaaggacctctcccgcaggcaagcacatgcccacagcttgagca

SEQ ID NO: 1801 - DNA, 1282 bp, Homo sapiens
ccaggtataggggtcctccacattctgctcaacacaaaagatttctccagccccaaccatggatcctggagctgggagtgtatggcttacccttagaaccaggagaggtgacagctagcccaagggcccaggcaggggctgggctgtggacacaatttttttttattttggagacagagtcttgctctgtcactaaggctggagtgcagtggagtgatcttagctcactgcaacctctgcctcccaggttcaactaattctcctgcctcagcctcccaagtaactgggattacaggtgcatgccaccacacccggttttgtttttttttttttttgacagagtcttgctttgttgcccaggctggagcacagtggcgcgatctcggctcactgcaaactccgccccccgggttcacgccattctcctgcctcagcctcccgagtagctggaactacaagcaccctccaccacgcccggccaattttttgtatttttagtagagacggggtttcatcatgttggccaggctggtctcaaactcctgacctcaggtgatccgcctgcctcagcttcccaaagtgctgggattacaggcgtgagccaccatgcctggcccctgccctgatttcaaagctgcaagctcagagcagacatttcacacccacctggagaagaggaggcagcccctgcccactggtacccataccctccctggggtggtgaagcagcctgggactggctgacctgagtgtgggatccacccccacaagttctcagtaaacctgacgggcgggtctagcttgtcctgacgtcctcagttcccgctgctggcggggcacaggcaacatgacagagagtcaggtgggagggggtccagacaaatgcctgggacagtcaggccaggctgaaccagcaggcccaccaggctggggccctcacaggagagcccctggggttaggtgaggcagagcagatggaatgtggagctcaggaagccccagccctgggccctactgagcaccctgagggatcctattctcagatactccagctgtggtgagccccaggtgtgtcagggtactgctcagtggcaccccatggaggctcaagttcaagacctcagaccctgcccrgcgcagcctccacacacactcaagctgcttcgggcagtttattgaggttttcacgttggggtaggggaagtggcacacacatgctcttgctgtgtacacacagtgaaggacctctcccgcaggcaagcacatgcccacagcttgagca

SEQ ID NO: 1802 - DNA, 578 bp, Homo sapiens
atctggacctttaaaaaagggagctaaaatttgtctaactttctttgttcatagataagaaaagtttttcatggccatagtagaagtcagaggtgaaatcggaaattccaatttgcttcatcagggaatttcttttaggtgkattttaggattttaaatattattaaatactaagagtgacatttgctacttggtgtttaatatgtagtagttcacatgttaattcctctgggaaggatttacatcttcaaaagttaagaaaatgacaaatataatattgcagaaagaacaagtcaatttttactgagtgtatctatgccttcaaacaaaaaaactgagtgcctatcaagcgtctcattgttctctataaagtaaatgatattgttaagacaggtactgttgcagctcttctgattcaaagtgttttctctgcgattagagaaccaaagataggtaaagttgacatcttagcattattctattctgacactttgttccccttttctaagaaatggaatataaatgtacatctgctccaattttctactcacactggacctcctcaagttctttttcac

SEQ ID NO: 1803 - DNA, 1152 bp, Homo sapiens
ccgagtaggccaacctttggggccctgtgtgcaactgcaatttgtgtaacacaccctaaatggatggttagttgggcccacctgarttcctatatttatggtaaagtttttaaatatcagaattatataattcaattcaggatttggcaagcagaagagctgattagtatgaaccaaagcaataaattttatgggtgtcctgaactggtagtgtgaacacttggtattatttaggatatctaccacataagtttaagtctcactaatatcacaaaactctttttctcaggggtgtgtaaataattcctgttcctgccatgggctccttttttcttggtcctttttgttgtccaattccacctccacctagattccagagtatcttttcctgcttgtttctagaagtatttactgtacttacttctatcaaatttacatactttctaccttcagagtgtaggaagtggcttacactagaaacacacatacatgagataaatacagtcacaaacctacaaaataaaaaaagagtggaggagaaaaaattttaatattcaggctaaaagaaagccactgtaatagagttttaatgtagttctgagcttcactataggcatagcaaagagggttgtctacagggtcttcttgagttccatcagcatttgcctgatctcagttgttaatatataaggctgtcagtcttagctgaagggtttgtttttaatcttattttttttctgttatctttttctgcagttgcagatttctgtattgagaatatgctctatctagtcagagaaatctattaatgtcttttttatcttttgcacttagattttgatgtacagagtgacaatatccccgtgatgtatcatccaaaattatatgctaattcacaattcactgaactcttaaaatgagccaagaattactataaagttaggtctttacctccattatgtcatttaatgaaacaatcctatgttaagtgctattattatccccgttttatagatgaggttatctgaggctcagcaattattttcccaagttctcacagctagtcagtagaagagctggcatgttaaatctcaaaacctactcttttaaatattaaacatccaggctttctaagagttcccagagttagca

SEQ ID NO: 1804 - DNA, 1152 bp, Homo sapiens
ccgagtaggccaacctttggggccctgtgtgcaactgcaatttgtgtaacacaccctaaatggatggttagttgggcccacctgagttcctatatttatggtaaagtttttaaatatcagaattatataattcaattcaggatttggcaagcagaagagctgattagtatgaaccaaagcaataaattttatgggtgtcctgaactggtagtgtgaacacttggtattatttaggatatctaccacataagtttaagtctcactaatatcacaaaactctttttctcaggggtgtgtaaataattcctgttcctgccatgggctccttttttcttggtcctttttgttgtccrattccacctccacctagattccagagtatcttttcctgcttgtttctagaagtatttactgtacttacttctatcaaatttacatactttctaccttcagagtgtaggaagtggcttacactagaaacacacatacatgagataaatacagtcacaaacctacaaaataaaaaaagagtggaggagaaaaaattttaatattcaggctaaaagaaagccactgtaatagagttttaatgtagttctgagcttcactataggcatagcaaagagggttgtctacagggtcttcttgagttccatcagcatttgcctgatctcagttgttaatatataaggctgtcagtcttagctgaagggtttgtttttaatcttattttttttctgttatctttttctgcagttgcagatttctgtattgagaatatgctctatctagtcagagaaatctattaatgtcttttttatcttttgcacttagattttgatgtacagagtgacaatatccccgtgatgtatcatccaaaattatatgctaattcacaattcactgaactcttaaaatgagccaagaattactataaagttaggtctttacctccattatgtcatttaatgaaacaatcctatgttaagtgctattattatccccgttttatagatgaggttatctgaggctcagcaattattttcccaagttctcacagctagtcagtagaagagctggcatgttaaatctcaaaacctactcttttaaatattaaacatccaggctttctaagagttcccagagttagca

SEQ ID NO: 1805 - DNA, 1321 bp, Homo sapiens
cagctacctgccaaaacccctactagtgttttgttctaccactttagaaggaaacacacacacacacacacacacacgcacgcacacacacacgccagcacaaaccagtttatttcagctagttagtttattttttgcatctttcccaattctcatgatctctcccacagttcctcaggaaacagtgccctgttggtcatttgaaataaattataatgaaaatctttaaaccatagaaatttgcaaatgctacacatcaggactttttttttttttttttttttttttttaacccaagaaccattttactagcatacagctgcccagcgytcaactaaaagcaatggactagattgccaattacagcatggccacaatattagggtggaatggacagagccaagaacactgctctgtagtgttagaaagtgagagtgtgctcagtgcccacttcaggtcccctacctctttcatctacggccacagaagctactcaaaatttaatcataatattgaaaggggcagggaatttccttcagatttcccaaggtctgaaatgggaagataaagttaccttctccacagaactaatggaaaatcaagagggaaggtaattttaaaacttctctcaagttattttgaaatataaaccttcctgggatacttctggctcctggaatattttgcaaaatagctattgaccttccatcctgctcctcaagcaactgggactgactggctcacaagccctctgcctggactttcaacacagcaacgatgtctctccattgccctctacccataccataggagagagatgattgactttcacaatttcattctaggacccttatctcgggagcaatcagctagcatggttgttgattatttattttgtgtcttataatagttttattcctagtttgcttcaggaaaatgcaataaatatgttaaccatgggaaaactgataaagttgcggaagctctcatgatcagtttttagggactttcatggtaatatatatggagtaaggctaacctcttttacactaatttattttattcgttctcatgttgagaaacagtagtctagattcactttctctgtacctcttttttcatttctaggatttatcaaccaaatgggttcaaatagttttagtctatgaacattaagtcttctttttggtaaatgttgagcaaccaaccgagatactgtcacgttgttgagctgtacgttagctcagatctaccacccaactgttgttctttctttctttgatagattttctgaaattttatccgtatccaatcccatcgc

SEQ ID NO: 1806 - DNA, 1321 bp, Homo sapiens
cagctacctgccaaaacccctactagtgttttgttctaccactttagaaggaaacacacacacacacacacacacacgcacgcacacacacacgccagcacaaaccagtttatttcagctagttagtttattttttgcatctttcccaattctcatgatctctcccacagttcctcaggaaacagtgccctgttggtcatttgaaataaattataatgaaaatctttaaaccatagaaatttgcaaatgctacacatcaggactttttttttttttttttttttttttttaacccaagaaccattttactagcatacagctgcccagcgttcaactaaaagcaatggactagattgccaattacagcatggccacaatattagggtggaatggacagagccaagaacactgctctgtagtgttagaaagtgagagtgtgctcagtgcccacttcaggtcccctacctctttcatctacggccacagaagctactcaaaatttaatcataatattgaaaggggcagggaatttccttcagatttcccaaggtctgaaatgggaagataaagttaccttctccacagaactaatggaaaatcaagagggaaggtaattttaaaacttctctcaagttattttgaaatataaaccttcctgggatacttctggctcctggaatattttgcaaaatagctattgaccttccatcctgctcctcaagcaactgggactgactggctcacaagccctctgcctggactttcaacacagcaacgatgtctctccattgccctctacccataccataggagagagatgattgactttcacaatttcattctaggacccttatctcgggagcaatcagctagcatggttgttgattatttattttgtgtcttataatagttttattcctagtttgcttcaggaaaatgcaataaatatgttaaccatgggaaaactgataaagttgcggaagctctcatgatcagtttttagggactttcatggtaatatatatggagtaaggctaacctcttttacactaatttattttattcgttctcatgttgagaaacagtagtctagattcactttctctgtacctcttttttcatttctaggatttatcaaccaaatgggttcaaatagttttagtctatgaacattaagtcttctttttggtaaatgttgagcaaccaaccgagatactgtcaygttgttgagctgtacgttagctcagatctaccacccaactgttgttctttctttctttgatagattttctgaaattttatccgtatccaatcccatcgc

SEQ ID NO: 1807 - DNA, 1305 bp, Homo sapiens
tttactacttatgaatgtgtaatttttctattttataataaagtttcatggcttctctgggtaccttctattgggaacatatttagatacattagaatttttttttcttttttttgagacagagtctcactctgtcgyccagactggagtgcagtggcatgatctcagctcactgcatcctctgcctcctgggttcaagcaattctcctgcctcagcctcctgagtagccgggattacaggtgcctgccaccaagcccagctaattttttgtatttttaatagagacagggtttcaccatgttggccaggctggtctcgaactcctgacctcaggtgactcacctgcctcgacatcccaaagtgctgggattactggcatgagccactgctcctagacaatacattagaattctacataatgtagcaattgttaaatatccatattatatttccccaccactaccagatccttgtttcacttctgtataatatttttggtgtgccagttctctttaatcttccctaggaattatgtacccacatacataaaaaagtataaataatagtataagcaccattagtataagtatcatagtcctaatttttcatggaccatagcagaaggaaacaatcaaaagttgtctaactttttattcacaatattttgatgttcatactataaaacaagtttgtattaggttgatttaccatgggatggcctattagggacaagggcaaataactagatctatgatctcagaaacacaacggaatgttgctatttttcttacagaaaactagatctctttattatattatgatctctttattacattattgtgccaaattttcttctcaaagttttggtattactgtcgataacatcctacaatataaccctacttataaaccattaatcaatgacgatccaacttatacaagaagactacttaggcattacccagttgataacagctattaaaaataaacacaaactacaaagaagacattacttttaatctgttaaatagcaaaaaagaatggcattactatagtagacattaacagttttattttatgatagaataagttataaaatacatttggtaattactatgttcccttcactgatgatgtatctagaaggtaataggcactcaaataaatgttagcatttacaattttttgttgttgctatgatttattctttttattgttactattatttaatccatagcctttgatgatatttcattcatttaaaaagttctattttttacataggtttttaaatttccataaag

SEQ ID NO: 1808 - DNA, 1305 bp, Homo sapiens
tttactacttatgaatgtgtaatttttctattttataataaagtttcatggcttctctgggtaccttctattgggaacatatttagatacattagaatttttttttcttttttttgagacagagtctcactctgtcgcccagactggagtgcagtggcatgatctcagctcactgcatcctctgcctcctgggttcaagcaattctcctgcctcagcctcctgagtagccgggattacaggtgcctgccaccaagcccagctaattttttgtatttttaatagagacagggtttcaccatgttggccaggctggtctcgaactcctgacctcaggtgactcacctgcctcgacatcccaaagtgctgggattactggcatgagccactgctcctagacaatacattagaattctacataatgtagcaattgttaaatatccatattatatttccccaccactaccagatccttgtttcacttctgtataatatttttggtgtgccagttctctttaatcttccctaggaattatgtacccacatacataaaaaagtataaataatagtataagcaycattagtataagtatcatagtcctaatttttcatggaccatagcagaaggaaacaatcaaaagttgtctaactttttattcacaatattttgatgttcatactataaaacaagtttgtattaggttgatttaccatgggatggcctattagggacaagggcaaataactagatctatgatctcagaaacacaacggaatgttgctatttttcttacagaaaactagatctctttattatattatgatctctttattacattattgtgccaaattttcttctcaaagttttggtattactgtcgataacatcctacaatataaccctacttataaaccattaatcaatgacgatccaacttatacaagaagactacttaggcattacccagttgataacagctattaaaaataaacacaaactacaaagaagacattacttttaatctgttaaatagcaaaaaagaatggcattactatagtagacattaacagttttattttatgatagaataagttataaaatacatttggtaattactatgttcccttcactgatgatgtatctagaaggtaataggcactcaaataaatgttagcatttacaattttttgttgttgctatgatttattctttttattgttactattatttaatccatagcctttgatgatatttcattcatttaaaaagttctattttttacataggtttttaaatttccataaag

SEQ ID NO: 1809 - DNA, 1305 bp, Homo sapiens
tttactacttatgaatgtgtaatttttctattttataataaagtttcatggcttctctgggtaccttctattgggaacatatttagatacattagaatttttttttcttttttttgagacagagtctcactctgtcgcccagactggagtgcagtggcatgatctcagctcactgcatcctctgcctcctgggttcaagcaattctcctgcctcagcctcctgagtagccgggattacaggtgcctgccaccaagcccagctaattttttgtatttttaatagagacagggtttcaccatgttggccaggctggtctcgaactcctgacctcaggtgactcacctgcctcgacatcccaaagtgctgggattactggcatgagccactgctcctagacaatacattagaattctacataatgtagcaattgttaaatatccatattatatttccccaccactaccagatccttgtttcacttctgtataatatttttggtgtgccagttctctttaatcttccctaggaattatgtacccacatacataaaaaagtataaataatagtataagcaccattagtataagtatcatagtcctaatttttcatggaccatagcagaaggaaacaatcaaaagttgtctaactttttattcacaatattttgatgttcatactataaaacaagtttgtattaggttgatttaccatgggatggcctattagggacaagggcaaataactagatctatgatctcagaaacacaacggaatgttgctatttttcttacagaaaactagatctctttattatattatgatctctttattacattattgtgccaaattttcttctcaaagttttggwattactgtcgataacatcctacaatataaccctacttataaaccattaatcaatgacgatccaacttatacaagaagactacttaggcattacccagttgataacagctattaaaaataaacacaaactacaaagaagacattacttttaatctgttaaatagcaaaaaagaatggcattactatagtagacattaacagttttattttatgatagaataagttataaaatacatttggtaattactatgttcccttcactgatgatgtatctagaaggtaataggcactcaaataaatgttagcatttacaattttttgttgttgctatgatttattctttttattgttactattatttaatccatagcctttgatgatatttcattcatttaaaaagttctattttttacataggtttttaaatttccataaag

SEQ ID NO: 1810 - DNA, 1305 bp, Homo sapiens
tttactacttatgaatgtgtaatttttctattttataataaagtttcatggcttctctgggtaccttctattgggaacatatttagatacattagaatttttttttcttttttttgagacagagtctcactctgtcgcccagactggagtgcagtggcatgatctcagctcactgcatcctctgcctcctgggttcaagcaattctcctgcctcagcctcctgagtagccgggattacaggtgcctgccaccaagcccagctaattttttgtatttttaatagagacagggtttcaccatgttggccaggctggtctcgaactcctgacctcaggtgactcacctgcctcgacatcccaaagtgctgggattactggcatgagccactgctcctagacaatacattagaattctacataatgtagcaattgttaaatatccatattatatttccccaccactaccagatccttgtttcacttctgtataatatttttggtgtgccagttctctttaatcttccctaggaattatgtacccacatacataaaaaagtataaataatagtataagcaccattagtataagtatcatagtcctaatttttcatggaccatagcagaaggaaacaatcaaaagttgtctaactttttattcacaatattttgatgttcatactataaaacaagtttgtattaggttgatttaccatgggatggcctattagggacaagggcaaataactagatctatgatctcagaaacacaacggaatgttgctatttttcttacagaaaactagatctctttattatattatgatctctttattacattattgtgccaaattttcttctcaaagttttggtattrctgtcgataacatcctacaatataaccctacttataaaccattaatcaatgacgatccaacttatacaagaagactacttaggcattacccagttgataacagctattaaaaataaacacaaactacaaagaagacattacttttaatctgttaaatagcaaaaaagaatggcattactatagtagacattaacagttttattttatgatagaataagttataaaatacatttggtaattactatgttcccttcactgatgatgtatctagaaggtaataggcactcaaataaatgttagcatttacaattttttgttgttgctatgatttattctttttattgttactattatttaatccatagcctttgatgatatttcattcatttaaaaagttctattttttacataggtttttaaatttccataaag

SEQ ID NO: 1811 - DNA, 1305 bp, Homo sapiens
tttactacttatgaatgtgtaatttttctattttataataaagtttcatggcttctctgggtaccttctattgggaacatatttagatacattagaatttttttttcttttttttgagacagagtctcactctgtcgcccagactggagtgcagtggcatgatctcagctcactgcatcctctgcctcctgggttcaagcaattctcctgcctcagcctcctgagtagccgggattacaggtgcctgccaccaagcccagctaattttttgtatttttaatagagacagggtttcaccatgttggccaggctggtctcgaactcctgacctcaggtgactcacctgcctcgacatcccaaagtgctgggattactggcatgagccactgctcctagacaatacattagaattctacataatgtagcaattgttaaatatccatattatatttccccaccactaccagatccttgtttcacttctgtataatatttttggtgtgccagttctctttaatcttccctaggaattatgtacccacatacataaaaaagtataaataatagtataagcaccattagtataagtatcatagtcctaatttttcatggaccatagcagaaggaaacaatcaaaagttgtctaactttttattcacaatattttgatgttcatactataaaacaagtttgtattaggttgatttaccatgggatggcctattagggacaagggcaaataactagatctatgatctcagaaacacaacggaatgttgctatttttcttacagaaaactagatctctttattatattatgatctctttattacattattgtgccaaattttcttctcaaagttttggtattactgtcgataacatcctacaatataaccctacttataaaccattaatcaatgaygatccaacttatacaagaagactacttaggcattacccagttgataacagctattaaaaataaacacaaactacaaagaagacattacttttaatctgttaaatagcaaaaaagaatggcattactatagtagacattaacagttttattttatgatagaataagttataaaatacatttggtaattactatgttcccttcactgatgatgtatctagaaggtaataggcactcaaataaatgttagcatttacaattttttgttgttgctatgatttattctttttattgttactattatttaatccatagcctttgatgatatttcattcatttaaaaagttctattttttacataggtttttaaatttccataaag

SEQ ID NO: 1812 - DNA, 1305 bp, Homo sapiens
tttactacttatgaatgtgtaatttttctattttataataaagtttcatggcttctctgggtaccttctattgggaacatatttagatacattagaatttttttttcttttttttgagacagagtctcactctgtcgcccagactggagtgcagtggcatgatctcagctcactgcatcctctgcctcctgggttcaagcaattctcctgcctcagcctcctgagtagccgggattacaggtgcctgccaccaagcccagctaattttttgtatttttaatagagacagggtttcaccatgttggccaggctggtctcgaactcctgacctcaggtgactcacctgcctcgacatcccaaagtgctgggattactggcatgagccactgctcctagacaatacattagaattctacataatgtagcaattgttaaatatccatattatatttccccaccactaccagatccttgtttcacttctgtataatatttttggtgtgccagttctctttaatcttccctaggaattatgtacccacatacataaaaaagtataaataatagtataagcaccattagtataagtatcatagtcctaatttttcatggaccatagcagaaggaaacaatcaaaagttgtctaactttttattcacaatattttgatgttcatactataaaacaagtttgtattaggttgatttaccatgggatggcctattagggacaagggcaaataactagatctatgatctcagaaacacaacggaatgttgctatttttcttacagaaaactagatctctttattatattatgatctctttattacattattgtgccaaattttcttctcaaagttttggtattactgtcgataacatcctacaatataaccctacttataaaccattaatcaatgacgatccaacttatacaagaagactacttaggcattacccagttgataacagctattaaaaataaacacaaactayaaagaagacattacttttaatctgttaaatagcaaaaaagaatggcattactatagtagacattaacagttttattttatgatagaataagttataaaatacatttggtaattactatgttcccttcactgatgatgtatctagaaggtaataggcactcaaataaatgttagcatttacaattttttgttgttgctatgatttattctttttattgttactattatttaatccatagcctttgatgatatttcattcatttaaaaagttctattttttacataggtttttaaatttccataaag

SEQ ID NO: 1813 - DNA, 969 bp, Homo sapiens
cttgacagactttgaagattcgtagacacacttttatttggttttaagccatggaaaatactttaaaaacaggaatagaagttgaaactttcagttattcttgctctaaatttacttttttaaagtttgattgctaaattgcagaataatgacacagtcttaagtctttatattataacccatgtttgaagttgtatctcaacaaaaaataccctttgtagatatagtaatatttggtttaaatcatttaaaaataatttacttccatcattggaaaacagaaagtagtctgatttgaaaacagcagcagatttagctttcaaaacattaaactattactttccaattttgtattctagtgctgmccatgttgtccatgacaaatggagcagctctggagtcttagaatcataaaagatggagacattgttttttgttttttttttttttgcaattacttctgagaattaggtaagaagtgccttattaaattattcagtgaacaagcatgttattttaaagtaccaagatagtgtttgcttttcatttttgttcataaaatgtcttcaaaagttgtcttaataaaaaaagaggcaagtttgccttcctatacagatcatatgtaaaaacatcatttgtgacactgaattaaagatttgttttcatgtaaaatattcatagaatgtcacttaaagagatttcttcagttcattcataccagggaaaattatgatgtatcaaaagcttcaataggaaaggtgtctttctcttctttcctatctttttggccccactgcctcattacattaggccatatcagtgctcatacatacagctcatacacacacacacacacacacacacacacacacactcacacaacatgaatattttatctgttaaatattgatttccttttttgtgcccattgcattaggcaccctatatctttaaggctaactaattaaa

SEQ ID NO: 1814 - DNA, 969 bp, Homo sapiens
cttgacagactttgaagattcgtagacacacttttatttggttttaagccatggaaaatactttaaaaacaggaatagaagttgaaactttcagttattcttgctctaaatttacttttttaaagtttgattgctaaattgcagaataatgacacagtcttaagtctttatattataacccatgtttgaagttgtatctcaacaaaaaataccctttgtagatatagtaatatttggtttaaatcatttaaaaataatttacttccatcattggaaaacagaaagtagtctgatttgaaaacagcagcagatttagctttcaaaacattaaactattactttccaattttgtattctagtgctgaccatgttgtccatgacaaatggagcagctctggagtcttagaatcataaaagatggagacattgttttttgttttttttttttttgcaattacttctgagaattaggtaagaagtgccttattaaattattcagtgaacaagcatgttattttraagtaccaagatagtgtttgcttttcatttttgttcataaaatgtcttcaaaagttgtcttaataaaaaaagaggcaagtttgccttcctatacagatcatatgtaaaaacatcatttgtgacactgaattaaagatttgttttcatgtaaaatattcatagaatgtcacttaaagagatttcttcagttcattcataccagggaaaattatgatgtatcaaaagcttcaataggaaaggtgtctttctcttctttcctatctttttggccccactgcctcattacattaggccatatcagtgctcatacatacagctcatacacacacacacacacacacacacacacacacactcacacaacatgaatattttatctgttaaatattgatttccttttttgtgcccattgcattaggcaccctatatctttaaggctaactaattaaa

SEQ ID NO: 1815 - DNA, 2141 bp, Homo sapiens
  misc_feature (1)...(2141): n = A,T,C or G
ccagataaggaaaatgtggtacatatacaccgtggaatattatatagtcataaaaaagaatgataatgtcctttgcagcaacatggatggagctcgacgccatgatactaagttaacacagaaagagaaaaccaaacactgcatgttctcatttaaaagtgggagctaaacgctgagtacacatagacataaaaaagggaacaatagacaacagggcctacttgagggtggagtgtgggaggagagtgaagatttgaaaaaccacctattgggtactctgcttattacctgggtgatgaaatcatctatacaccaaacctctgcaacattcagtttatctataaaccaatctgcacatttactcctgaaactgcaataaaagttaaaaaataaattctgaccaccctgcaatgcgatcccaactaaggaaatctccctcttgcaggttgttggggatgatcagaagatacccccaaggatctaattctataatagcaaggggttttgcagctgagcaggggttgagcagagagaacaggtggggagagtggggacagggagaatgaataccagcctttatgaggcatcacctgtaaattaatgtggctgaaacactgaaaatagaatagaaaagttaaccacagcaccctgaccaaaaaacccagagaaacaattaagagagtacagagaacacaatcaaaaccagttagtacaatcaaaacacaatcacaaactgcttatgcggatgcacttttttttcctgttttacagaaaccaaatataaaaatctatccaaaaactgacttttattctttgctgcttgaagaggggttagattaagatttttaaagctttataaggaattaaaaatgcagaaaataagacattatctcccaaagaaacaaaggaaggaaatgcaatgtcttctctgtgaaaaaccaagcaagacatgccatgaggttaataaaactgaattcaaatcatcatggtcccacttacaaactcttccattccttaataccaggcctaagtaccataacatctccaaagttccactggaagataacagaacagaaattaatagcagcattcagctatgaccttctggttggaggcctgctcattactgcagtgagctcagccttttaccagtgtttatagagcctttcttgccatcaaaaactcccctccaaaaaacaggcagtgtgattctttttaaatccttttatgccatacttccttaaatattcccattatatttataataaaatacttatctcacatctaatttacaagaaaatcacaattacataaaactatttgaatcagcatgactaacacctttttttcattagatttacatgagaaacgtgtgataacgtggaatctgagtaatagttaatctttgctaacccatcaggccatatggaaactggctcctgcttatctcgctcctcattttatatgacttactgtcctctagcctacaggcctccttcctataatctaagcaccttaaaaattgtacaccaggtgcttctccactctgaaatatcacctctccagatcgcttcctcacacttttcttctcagcattcaaacttcacttccccaagaggcctctctggccattccctctctccgttagcacatcaccctatttcatgttctatttaatatttcattntcattaaattgtcttaatctctgatttgtttatttccgtattattacctaggagggcgccagcanganatacattattttacaacaaaccttgcaaattgaggtttgcttaataaagggactatttacaaaagtggggacagagtgtggagaaaccatagggatggtgcagtaaccagggcctaggaacagcgagggacattagcwcccctaagcctagaggggtaaggggaaaagcagatgctggcacatgaagatgaaaagggttttgtattccaaagaccacctggcagactctgtgaccttcaggagctaatttaagcaattgacagagaccccaaagagaggcagctggagaattaattccccaaagtctgtgctcccttgccctctgcttggccaaccccagcaagaagcagagggtagggcatctgttgatgaaggccaggggttga

SEQ ID NO: 1816 - DNA, 2141 bp, Homo sapiens
  misc_feature (1)...(2141): n = A,T,C or G
ccagataaggaaaatgtggtacatatacaccgtggaatattatatagtcataaaaaagaatgataatgtcctttgcagcaacatggatggagctcgacgccatgatactaagttaacacagaaagagaaaaccaaacactgcatgttctcatttaaaagtgggagctaaacgctgagtacacatagacataaaaaagggaacaatagacaacagggcctacttgagggtggagtgtgggaggagagtgaagatttgaaaaaccacctattgggtactctgcttattacctgggtgatgaaatcatctatacaccaaacctctgcaacattcagtttatctataaaccaatctgcacatttactcctgaaactgcaataaaagttaaaaaataaattctgaccaccctgcaatgcgatcccaactaaggaaatctccctcttgcaggttgttggggatgatcagaagatacccccaaggatctaattctataatagcaaggggttttgcagctgagcaggggttgagcagagagaacaggtggggagagtggggacagggagaatgaataccagcctttatgaggcatcacctgtaaattaatgtggctgaaacactgaaaatagaatagaaaagttaaccacagcaccctgaccaaaaaacccagagaaacaattaagagagtacagagaacacaatcaaaaccagttagtacaatcaaaacacaatcacaaactgcttatgcggatgcacttttttttcctgttttacagaaaccaaatataaaaatctatccaaaaactgacttttattctttgctgcttgaagaggggttagattaagatttttaaagctttataaggaattaaaaatgcagaaaataagacattatctcccaaagaaacaaaggaaggaaatgcaatgtcttctctgtgaaaaaccaagcaagacatgccatgaggttaataaaactgaattcaaatcatcatggtcccacttacaaactcttccattccttaataccaggcctaagtaccataacatctccaaagttccactggaagataacagaacagaaattaatagcagcattcagctatgaccttctggttggaggcctgctcattactgcagtgagctcagccttttaccagtgtttatagagcctttcttgccatcaaaaactcccctccaaaaaacaggcagtgtgattctttttaaatccttttatgccatacttccttaaatattcccattatatttataataaaatacttatctcacatctaatttacaagaaaatcacaattacataaaactatttgaatcagcatgactaacacctttttttcattagatttacatgagaaacgtgtgataacgtggaatctgagtaatagttaatctttgctaacccatcaggccatatggaaactggctcctgcttatctcgctcctcattttatatgacttactgtcctctagcctacaggcctccttcctataatctaagcaccttaaaaattgtacaccaggtgcttctccactctgaaatatcacctctccagatcgcttcctcacacttttcttctcagcattcaaacttcacttccccaagaggcctctctggccattccctctctccgttagcacatcaccctatttcatgttctatttaatatttcattntcattaaattgtcttaatctctgatttgtttatttccgtattattacctaggagggcgccagcanganatacattattttacaacaaaccttgcaaattgaggtttgcttaataaagggactatttacaaaagtggggacagagtgtggagaaaccatagggatggtgcagtaaccagggcctaggaacagcgagggacattagcacccctaagcctagaggggtaaggggaaaagcagatgctggcacatgaagatgaaaagggttttgtattccaaagaccacctggcagactctgtgaccttcaggagctaatttargcaattgacagagaccccaaagagaggcagctggagaattaattccccaaagtctgtgctcccttgccctctgcttggccaaccccagcaagaagcagagggtagggcatctgttgatgaaggccaggggttga

SEQ ID NO: 1817 - DNA, 634 bp, Homo sapiens
ctcttggtgtgacccagacagagtcrcttcacccactgatatggtttggctgtgtccccacccaaatctcatcttgaattgtagctcccataattcctacatgttgtgggagggaccccgtgggagataattgaatcacggggacagtttcccccatactgttcttgtggtagcgaataagtcacatgagatctgatggctttataaggggaaacacctttcactttgctctcatcttctctcatctgccgccatgtaagacatgcctttaccttccactatgattgtgaggcctccccagccacgtggaactgtgagtctattaaacccctttttctttataaattacccagtctcaggtatgtctttatcagcagtgtgaaaacattaatacacccactttgggtcctggtttttgtagcagacgttatcagtgccccatgaatatcccctgtgtttctcaacccaggcactattgacaccaggggctggataatcctttgttgtggccctttcttgtaaactggaggatatttagcagcatctgtggcctccagatgccagccagacccctgtccttgccatgtcctcaacttagctccatggcaaggctaaaactacttgagtgcaattg

SEQ ID NO: 1818 - DNA, 579 bp, Homo sapiens
agtgtgctttgtgtcctakttaagaaatctttctctagaatgatgacatgaagatattcgcttatattatcttctaaaagcattatgttctatgcttcacataagagtctatatgcttcacataagagtctataatgtgtggaatttattgttaagtgagtgatgtgatatagggtccaattctctttttatctagacagatttctaaatgtctaagcacaagtttttgaaaacagtctacttgttcttcctccactgctcagctgtgccatctttgctttaaatcacgtatcattatacgtgtgggtattctcactaggttttaaaattttgtctattcttgaatccatggccatagttaattactctagcattttttctttgtaaaattgaacttaatttttactttatttttgattcagggagtacatgtacatgtttcttacatggatacaatatgtactggtggggattgggcttctagtgtacccattatccagacagtaaacattgtacatattagataattttccagctctcactccacttctacactccttaattttggagtccccagtt

SEQ ID NO: 1819 - DNA, 757 bp, Homo sapiens
attaacagttcaagaattcttacctttaaagtaggtgtgcaataaaacctctctcacggtagctttgaggatagtataaattaactaagagtgttctaagtagggctgctcctgtcaatctacagaagatgaaggcaacaaccactttgacattgtaatacttcaagaagaggagtccattggttgttggaattttagatatttgactttcatttatttttcctatcagaaattcataatattacagctacctttttctctgttctctaaatctctccatcaattattttaaaaatatattccaaattagttaagtaaggcaattcactttaaaaaaatgagtttacaaaaaaagtttgttaattcaagccagtcaatctaaatttagccttctagtaaacttggatttttatttaattactttatggtgtgtagacttgtaattagtaacagctgtgaattttccctttgtaaatgtkgggaggataagttatcgaattaatcacatttggacaaatatcaagtttttaaaagaggaaagatctgggtagattcttggcaacatttgggaaattttattaaaagttacaaatatattttcactaaccttgttttaaaggcaaaatatgaagaaatatctttcctcccaaccccaagttaattatgtcattcaactctttacctcctaaggagattcttcattctctggaactattctaaacatttattttatcacctctgtatgtctttagatgca

SEQ ID NO: 1820 - DNA, 1361 bp, Homo sapiens
caaatgctaatctcattcagcacagccctcacagaaacacccagaacaatgtttaaccaagcatctgggcacctggtggtgcagtcaagttgacacataaaattgtcasagggatttatggagatctagacattatctctgaattgcagaaaagaggatacgaaaggaagaaaaggcttgaaggtaggtctcctggctgagtcagaatcttttaaagactttttaaaaaagtctcctttggcaggcagatcacttgagcggaggagtccaacaccagcctgggcaacatggtgaaaccccatctctacaaaaaaaatgcaaaaattacctgggtttggtgatgcacacctgtggcctcagctactagggaggatgaggtgggaggatcccttgagcctgggaagcagaggttgcagtgagctatgattgcaccactttacaccagcctgagtgacagagcaagatcctgtctcaaaacaaaacaaaaaaatctcttttaaataaattttctgggctaagaaaaaacccacatacttagatggtgaaatgttaaattgatgtgatccagttagcaggtcaacaataacttgttttgtcagtgttaaggtaatggctgggtttttttgtgtctactaaatatttatctttaaaaaagtatttctctgtttctctttatctagcttcttcagaaatcaaatcttctagtaggaggcaaagattctattctagcaactagttactaagtggtatatgacacactttaaatcccatgttcaaagaagaacttctggttttaggaaacttgtagaaacgaagcctgctgatggttttttctttttttcttttcttttgttccttttttttttttcactctgtcacccaggctggagtgaagtggtaagatctcggctcgttgtaatctctgcctcccaggttcaagcaattcttatgcctcagtctcccgagtagctgagattacaggtatatatcaccacatctgtctaatgtttttgtatttttagtagaggcagtgtttcaccatgttggtcaggctggtctcgaacttctgacctcaggtgatccacctgcctaggcctcccaaagcactgggattacaggcatgagccattcctttcttttcttaaaaataaactttgaaagttaactctttaaatgaaagactctttgaaacaacaaattcttctaaggtactgaagttttattcacatatttatttcagatgtttcgagtaaacttgaaaaggataggcacgaagcaatttgttgctgccggtcatccccaagtccccatggaggctgtaaattttgagaaacaatgtgttgagtgcacagaatttagtt

SEQ ID NO: 1821 - DNA, 1361 bp, Homo sapiens
caaatgctaatctcattcagcacagccctcacagaaacacccagaacaatgtttaaccaagcatctgggcacctggtggtgcagtcaagttgacacataaaattgtcacagrgatttatggagatctagacattatctctgaattgcagaaaagaggatacgaaaggaagaaaaggcttgaaggtaggtctcctggctgagtcagaatcttttaaagactttttaaaaaagtctcctttggcaggcagatcacttgagcggaggagtccaacaccagcctgggcaacatggtgaaaccccatctctacaaaaaaaatgcaaaaattacctgggtttggtgatgcacacctgtggcctcagctactagggaggatgaggtgggaggatcccttgagcctgggaagcagaggttgcagtgagctatgattgcaccactttacaccagcctgagtgacagagcaagatcctgtctcaaaacaaaacaaaaaaatctcttttaaataaattttctgggctaagaaaaaacccacatacttagatggtgaaatgttaaattgatgtgatccagttagcaggtcaacaataacttgttttgtcagtgttaaggtaatggctgggtttttttgtgtctactaaatatttatctttaaaaaagtatttctctgtttctctttatctagcttcttcagaaatcaaatcttctagtaggaggcaaagattctattctagcaactagttactaagtggtatatgacacactttaaatcccatgttcaaagaagaacttctggttttaggaaacttgtagaaacgaagcctgctgatggttttttctttttttcttttcttttgttccttttttttttttcactctgtcacccaggctggagtgaagtggtaagatctcggctcgttgtaatctctgcctcccaggttcaagcaattcttatgcctcagtctcccgagtagctgagattacaggtatatatcaccacatctgtctaatgtttttgtatttttagtagaggcagtgtttcaccatgttggtcaggctggtctcgaacttctgacctcaggtgatccacctgcctaggcctcccaaagcactgggattacaggcatgagccattcctttcttttcttaaaaataaactttgaaagttaactctttaaatgaaagactctttgaaacaacaaattcttctaaggtactgaagttttattcacatatttatttcagatgtttcgagtaaacttgaaaaggataggcacgaagcaatttgttgctgccggtcatccccaagtccccatggaggctgtaaattttgagaaacaatgtgttgagtgcacagaatttagtt

SEQ ID NO: 1822 - DNA, 1361 bp, Homo sapiens
caaatgctaatctcattcagcacagccctcacagaaacacccagaacaatgtttaaccaagcatctgggcacctggtggtgcagtcaagttgacacataaaattgtcacagggatttatggagatctagacattatctctgaattgcagaaaagaggatacgaaaggaagaaaaggcttgaaggtaggtctcctggctgagtcagaatcttttaaagactttttaaaaaagtctcctttggcaggcagatcacttgagcggaggagtccaacaccagcctgggcaacatggtgaaaccccatctctacaaaaaaaatgcaaaaattacctgggtttggtgatgcacacctgtggcctcagctactagggaggatgaggtgggaggatcccttgagyctgggaagcagaggttgcagtgagctatgattgcaccactttacaccagcctgagtgacagagcaagatcctgtctcaaaacaaaacaaaaaaatctcttttaaataaattttctgggctaagaaaaaacccacatacttagatggtgaaatgttaaattgatgtgatccagttagcaggtcaacaataacttgttttgtcagtgttaaggtaatggctgggtttttttgtgtctactaaatatttatctttaaaaaagtatttctctgtttctctttatctagcttcttcagaaatcaaatcttctagtaggaggcaaagattctattctagcaactagttactaagtggtatatgacacactttaaatcccatgttcaaagaagaacttctggttttaggaaacttgtagaaacgaagcctgctgatggttttttctttttttcttttcttttgttccttttttttttttcactctgtcacccaggctggagtgaagtggtaagatctcggctcgttgtaatctctgcctcccaggttcaagcaattcttatgcctcagtctcccgagtagctgagattacaggtatatatcaccacatctgtctaatgtttttgtatttttagtagaggcagtgtttcaccatgttggtcaggctggtctcgaacttctgacctcaggtgatccacctgcctaggcctcccaaagcactgggattacaggcatgagccattcctttcttttcttaaaaataaactttgaaagttaactctttaaatgaaagactctttgaaacaacaaattcttctaaggtactgaagttttattcacatatttatttcagatgtttcgagtaaacttgaaaaggataggcacgaagcaatttgttgctgccggtcatccccaagtccccatggaggctgtaaattttgagaaacaatgtgttgagtgcacagaatttagtt

SEQ ID NO: 1823 - DNA, 1269 bp, Homo sapiens
ttatccattatctagctatcatctatctctatcacctataaatatacatatatatatcttctattttctttctatcatcctacttatctatctattatatatcatctattatttaccgtctgtctctctatcatcctatctatctctctatccatccattatacctctctctctctctctctttctctctctctcttatctacctacctaatctttaacccaattcacttgtaatgttttggttctaattttttactcttattttctcaagcactcatgtatttcaaaatataggatgatatctgaataaattatatcctaagatttaaaactgtcaactctcatcaccactgctttcagactattgatcaaattagaaaagaatgacctatgaccttctatctacaaatttaatctgacagtttgacccttgcacatagggcaggatgtcaacatttcacttctactactccttcaaaaccagtatttgagttctaatagccaagtccatttttcwgttctattttaatttttaacattgtatctactcttaaattacctttatctctaatttcagaattaatctctgtcatctagattctatcatctttctaaattctcagagacctcacttcaccaattttccctcagatttgtttccttaaatcatgtctactttcaggcctttcacaatttaaaaaagacaaaatgatgcgctatcaacaatacacctttttctagtataaatcttacatttgaccattctccttcttttccttcacagctcatctttctgagttgaagcatctcctgtctcaacttccttgtggctcactcaatccttaaccctcttaaaaacacacctcttcacctgtctcacaagtgaaacatctcttggcaaaatcacaaattgtttccatctatgctccaattcatacccttgccttatcattttcaatcactctaaaatattctagatatattgtgaatctctttgcaaggcatatggctgtggtgactgttttgcctctgctcactgtgtgtgttcgcttatggcatgccctggctcacactgggtcccccgagttatcaccagctatgctaatgagatctgctgtctcaaattctcatgccaaggaacacatcgctccctctctgccataaagcatcaatccacttccctggttaatgccttgtcatcctcatggagtcaggtcagatggaatctctttcacaaatatccccttacactttttctctgagttagtg

SEQ ID NO: 1824 - DNA, 469 bp, Homo sapiens
  misc_feature (1)...(469): n = A,T,C or G
gnnnnnnnnnnnnnnnnnnnnnnnnnnnnnnnnnnnnnnnnnnnnnnnnnnnnnnnnnnnnnnnnnnnnnnnnnnnnnnnnnnnnnnnnnnnnnnnnnnnnaatatcttattatattctactcacctatttttgaaatgtggctgaccaccaatactgaaaccacagaaagtaaaatcaaaggggtactactgtaaaaaaatgtttaaaagtggaacaactaagatgttcacaaatttcacaagataccrtctaaaaataagaagacttttcatgagaataagatatcacccacttcattctctaagggtttcagttgagatgcaaagatacatgtttaattcctgaactcataataggttttttggtacttctataatgggtaagcatatgcaaggcaactaattcaggaagccaattccccagtcccatttaggaaggctatcatattctctagtctctttggtgcc

SEQ ID NO: 1825 - DNA, 1123 bp, Homo sapiens
  misc_feature (1)...(1123): n = A,T,C or G
cctaagtgggatgcttaatctcatttaataagtgggaaaactgaggttgcgtttcttatggctgcttattacgcctatgtgtgccaccataatcacctgggccaacttcgtcaatagggtgatcattgtccttgaactgatggtggtgtttatgagcatatcgtcatcacccttccttaggaagtgccagaaggaagacaggcgattaagatgccacataaaactcagtaaccttactggaaagagtgccttctctgtgctagtctaaatgccacactctgtgtctttttcaggtgctgaaagtatctggaagattccattattatcaggatgactcagaaaatttaataattacttgtttttgctttgttttgtgtgcccatgttttacatgatgtgaccttctgctgccctgtactatcataaattgcatctttctgaaggcagttctgagtaagtttgtgtccatgagtatgtgctagcatttcagctcatgggcattgccttaaagaagtaactggagctgtcagcaatctgttgtgaggtcttcaactagctcatttattaaatagctttaggacaaatattcttggctgaaaaatctggtataaaaatgaaaaggagagtcctgcaaacaaagaatacaggtcactgtgttcagatatttttccctaaaaaaaatgggtaagagatgtagagttaaaaaatatttntgagttgttatgaccagttgatgacagacgtggtttttacttttaaaatatggtatctgtgactacaattgattgtaggcaaaaccaccagagatgcttcttttgcttgaattcagctattttccttttctgtgttcttctcccaacttgtgatttgttcttacccatgaattaggtggctcttgagttgctcttgatcttacccctattctttgctgttgtccctaagcaatgctctttatctggggccaaacccacttcttctcccctctcaatactttccagccaagggtcctgactttccggtccaggtgcaagttcctgacgckggataattccaggcatcatttccacaacatagagcttttgggacagaaaagcctttacacagcactcatctcagattcccca

SEQ ID NO: 1826 - DNA, 658 bp, Homo sapiens
aatatatagattatcaacatggaactgcccttaacaaatgacctgctgagtgagtttgcttctaattccctttcacaattgaagagttagagaatttagggtgtgtcttggccaaggttacacaaagaatacaagtaaaataaagaacaatggccaggcacggtggctcatgcctgtaatcccagcactttgggaggctgaaaggggcagatcacctgaggtcaggagttcaagaccagcctggccaacatgatgaaaccccatctctactgaaaaatacaaaaaacaaacaacaacaacaaaaagccgggygtggtggtgggcacctgtagtgccagctacttgggaggctgaggcggagaatcgcttgaacccgggaggtggaggttgcagtgagccgagttcatgccactgcactccagcctgggcaatagagtgagactgtctcaaaaaacaaaaaaacaaaacaacaacaacaacaaaaaacaaacaaaaaaaaactactggatgaaagaattctttaagaatctttgctctttcttcaagactcagttcggccatttcttgcagaaacggttactgacctccataaggtgaacaagctgctcctttgttctctcatactatctttctgtctttgcactcagcatgtgatctt

SEQ ID NO: 1827 - DNA, 1273 bp, Homo sapiens
tttcttttttgagatagggtctcactgtcgcccagactggaatgcagtggcaatcacggctcactgcagccttgaactcctgggctaaagcaatccttccgcctcagcctcctgagtagctgggactacaggcatgcgccactactcccaacgaatttttaaattttttatagacatggatttttgttattttgccaggctggtctcaaactcctggactcaagcagttctcctgccttggcctcccaaagtgctaggattacagagccaccatgctaggcctattagaatacattcttactcacctcttccttttaaacaaaccgtagcatagtatatgtactgtctataccttatttccttttttcacttatcttggcaatcttttcatatcagtatgawggagagcttcctcttttttttttttttttttgagacagtttcactcggtcatgcaggctggagtatagtggtgcgatgtgggctcactgcaacctacgcctcctggactcaagcgatcctcccgtcgagagcttcctccttttaaaaaatatttctgttgaatggaataatattttattttaaacaatttgaaagattttaggttgccagagtagttccgttcctgtttggattgcattccaggttggcacacatctctctttccaagttgtccactttcccttcctctgctttcactgccccagctctttccaggcttcctcatttggctgcatgtgtagtaccatgccgaaagcactggactgccagacgggagacaggaattttggtcttggcttgactgatgcctactattgtgtgcctgcttttgataccagtttcctcttttgactagacagtttctggagtttggctttaacattctttgatttgattcttaacttgtgtggtggcaatggccacctttcacccaatagtgactataggctaggtgttggagtctgaagaggaggaggcttggagtaagagctggaagcgcattagaagtggaacagaagtacagtagcccttatgtgaagggatgacaatatggcacaagaatcggtgtgccatcatctttagctgtctaaagcaatttgggcaacctgagactgaatgtataagagtcatatgagagaagtttttatttatttgtcaagatcccttgcagtttatctggagttagcttttgaatttgtgtatttgacaaagagtttgattttttttttaggggatagagaaaaagttttgtgacaggacttccaattttgat

SEQ ID NO: 1828 - DNA, 1201 bp, Homo sapiens
tcaactatcaaagattttaaaaagtatgatagatggaacttaaacattgaaaagtagagtttaaaatatcagtagataaaaggtatagttatttatgtttcacagagagattatattcaccttcctgagactttttcagaaattttaattaaaatcaaaataaattttaaattttcagtctgtacttgccaataaacaaattgactttcaatcagtatttgtcagttaacaatttgaaaattcaaacaaaatattttcgtgcctttgaccatctagaatagataacaattgctattgatgacactgtgcttttctgtggttaaaaaaatagcatgaatgagagctaatattamaagaccaaaattagttctttaaaatttcagattggaagtttaatgaagatttaagctttggtaaaagctaaaataatatttcaatttttttgcttattcatgttgattgatgacagatagattatttttacttttccgctaaatgtcttgattctcatgatgttgtattttggtttttagccctaaagcaaagaaacaagcacatgacgagcacttttgggatagcagacactgtgctgggtgctttaaatatactactaataatcatgtacaataggcatttctctcctcattttattaatgtcaaaagaaaggaatgagaggttaaatattttctctgagtcctataacaggttagtgccaaagctgacatttaaactgctggcttagcatctctcaaaaggaaatgacttgttaagaagctgtaagaatgaaagcataaactcacttaaaatcatgaacctctatgaaggtttatgtgttctggaaatgactgactagctccagagtgtggggcactttaccgtctagtatgcagcctcggccctctagggcctgacattttattagggaaagctactgaaggcatacaataggaaactcaccctaggaacagccaaggtgctatcaaaaaataaatgtactatgtggaaagagaattccttcttttaacttctccaagtattgcagttatcttttatgtctagtataatagtaatcagtcttttcttcatatctataaataaagtgaatatttaataactatataaatgcatttattaataatgtccctaaagattgtatatgtgatatagttgtgagtccattataaagcttgttgaatgaat

SEQ ID NO: 1829 - DNA, 663 bp, Homo sapiens
tgcatgcacacgtacttgactatgtactgactgatctttctttttttttttttttgagacggagtctcgctctgttgtccagactggagtgcagtggcgcaatatcggctcactgtaacctccacctcctgggttccagcgattctcctccatcagcctcctgagtagctgggattacaggcacgcaccaccatgcctggctaatttttgtactttttttttttttttttgagacagagtctcgctctgtcrcccagactggagtgcagtggtgcgatctcggctcactgcaagctctgcctcccaggttcacgccattctcctgcctcagcctcctgagtagctgggactacaggcgcccgccaccacgcccggctaattttttgtattttagtagagacagggtttcaccatgttagccagaatggtctcgatctcctgacctcatgatccgcctgcctcggcctcccaaagtgctgggattacaggcatgagccactgcgcctggcctgatctttcttacagaggtaaaaatccgtatttagacagataattaaactaagttatccccgtagttttgtataacctaggggtggtttttaaagtcctagcaaatttttagttacatattttatttcctcgtttctccatttcatgcttctg

SEQ ID NO: 1830 - DNA, 622 bp, Homo sapiens
gtcaggcagccccaggcatgsgtaccctttatgaataccttcctcgaatgcgaatgcgctggtcaggacaatttctatgtctggaattccaaacaaccagaccattaaaattcatgggaatgcaagtcaggcagccctggcaggcattttcccgtgggccagggggctgcctgcaggccagcccgccgtgtgtgctgagcgctctgcacacggtactccaccgccccgcgtcctcatgttacggctgaggatgcacaggccagagagagcccgaggaacctgactctaggcaccatgactccgaagcccagtgtgtctggctgtgccaggagtttcctgagctctctcacacgtgagtctggggatgggcagcggtgggcacagagtggatgctgagcagaggctgccggctgctgcagagtcctgtcccctggcctggcttctgaggtgggtgatggccacctggcacagcccatggaaatgccccaccatgtctgaccctgggcagccaggccccttaatccgaccgcctcttgaagcaaggtgctgcctggcccaagtgagaccattgtctcagctgtcacgtaagaatgaatgcggccagcccactgggggcctgggt

SEQ ID NO: 1831 - DNA, 1689 bp, Homo sapiens
atatacaagtaagaatacaaaaaaattaaaaaagtaatacgtcattgattctttttttaagcatcacttctcatcctttcagtccagaggaactcagacagttgagacacactgagaatgaaccactggtgtccgatttccttaagaagcacactctgtagtggagataaacatgctggtggtttatttgcagtgtgctcttgggatcgacacttttgaacacaactatagccactagccctacaacttgaaataartgaccccactgtggtaatttacggttaataacactttcttctcaaaaatagtatttccaccaaaagataaatgattttaaataatcatctcatctttcattccagcacagagtttgatccagctctctccaatggctaaagaaagactaggatttaacttgtggtaataaatattacatgttttcatcaaaacacagttctcctccctttgcaggcattttcaaccacttgcagttaacaaagtcacaagactagtcttggcacgggatatgtgaggaagtgatgtgaattcctggccaaagcatagaagtgcagaggcaagaccatccaggtgactcttgcgaagcatcagctatggaggcaatgtggtccacgacacttgtgacaggttagcggcttgggcagagagtgggaggaatattaagcatgggtacataattgctctgaaaagtcgtggactggtaccagacttcgtacgaataagaaataaatatgttaagcaatttcgatttgggggcttgcaccacttttgtctcttctgatacaacaatcgattgtgcaaaacagtctacaaatcagacttttaaataaatactttccactcaggaatgggtgaagtttatcaaggtcatttccaggtgtctgggaaatttatttgaccgggttacaccaatattaaaatatgaatccattgaatctatataaattgtaaaacataactttaattcaaaaacaagcttttagaaagtttcaaagatacctgtttattctctgcagtgtgtcaatcaaatcacttaatgcattttataccaaaatttaatagtcaagcaaatgatcaggatagtaaattttctaacacattttttataagagagagaaagcctttccgttttgaaaaagagaatgcagaatggagagtgatatttgtcatactgaatagcattatgggtcccttattcgggcaagttccaagtttggatgaggagcttgtctttttgtggtcaatggcagggtgaaagcagaacacaagcctatcactttctgcacagggtttccaaatgcctgccgcttcatcccagactgtgtggaatatgctctacctctttctgacagtgctccaagggttagcctaataggaaggtgaaaggcagaggccaagggtgtgggaagtgatttctggccattagctattttactatcaattctgatttccttaaggggcttaaaactgtcactatgttcaaaggtttacacacttacaacagcctcagacagcaaaaaagatagtcaattttccactataatattataatagcactcgtgctatttagtgctctctactctgatgaatttctgggacttgtggggtatgattcccagtgtggcaacttgactttagctgttcccacacttaccagcattgacatttgat

SEQ ID NO: 1832 - DNA, 1681 bp, Homo sapiens
tggatttgacctggcagatccctgctctgagagatgagtggcagccattcctcacagcttgatagatggtaaatgcttcctcatctgttcccctccccagaccctctcagttctccattgacaatggcctacaaaccagctctcacccacaaggagtgccaatcaagataggaatgttatttatttatctgtcaacttcatcctgagcaaaaggtgctcaagtgcacgtgggcaggtgattgatagaaaatataaggcttaggtttttttttttttttaagctcatgtattttctccaaggagccgaggacactgtagcaagacctgtaaacaaaactattccttttggcatccttaggaagtagaaggagaaactttaactacagagagagattatttggtagtaatgagagatcttctctaaccaggcttagagtttggagcagactgttgggtgatgcccacatcctgcttcctgctgtccacctctatcttcagaggggcctgggccccatgtccagttccatagggtgaatcatgaactgtttaaatcaaggactagatacataagacatggtccctttctccttctggatgttgccctgtgtatgtgttgatgtctgcgtattgatgcctggaattgcagcagccatgttgggagtacgaggggagctggtctgggcaggacacactgaggatggttgagtggaaagtggaagcagcctggatccttgctgacattgctgagccactgaggaagccaacactggagccgtgttcctctggagttgttataggaactaaattcccctattgtttaaagttattttaaattggggtttctatttcttacagctgaaaatattaaaattcatatagaggtcaggaaagagatgccctacacagaatcccgtatcgggcacatcgtgggttcctagttgatcgactgaaggaacaattttaaatacatgaatccaattgtagtttagcaaagagactttttataaagaagtccctttgtaagaggactgccttcttccaacatctctggcagggtagccatctccagtttattttacttgaaatctcagtgacaaataagtggggaaacccagagcccctttcagctgaagagcatatagcccactaattgaacctatcccacccgggttggtaaccaagtctttactagtgaatccagcatctcctgataatcccataactctgatagaaggaccaatcaaatcaacacacatgattcaatcgtatatttgcaaagtcacccttgtaacagtgggctctagttatagtttgagatgcaaagactatccctcccttctattctggttattttggcacttaacaaattactccaaaaccgagtggtgttaaacaaccatttattgtgctcgcagattytgcgggccagaagtttagacaggacacagtggggcaggctcatctctatagagcagcttgagatctggggctagaataatttgaaacattactcactcacaggtctggtggtccatactggtaagagtcaaagacctgagggccctctagcctctttctgtctctaatccaaccccaccagtctctctgacctcatctctttcttctctgcactctaaccaactggccttcttattctcttcaaatccaagtatgttcctgc

SEQ ID NO: 1833 - DNA, 2420 bp, Homo sapiens
tacttgtaccccatacatttgtataaataacttaaaaagaaccacaagagtttactatcttgtttgtttataaatgcaaatacattatgaatgtttcccatgacattaactattattgatgcaggagctaaaaagaaattttaattttaataaaaacagcccccatattatttcttttctaacatagagcagtgtgtaaaattgagctgcagacatagataagcaagacggaagcttgcacagataaacgccggcagctgtgtcaataagaaaaggtgctacctggggactaggcatgttcagaatggtggctctatcttccctttcctttgtaaaccatgtgtacagtaagaagcaggcaacatggcatcagccaggcaaagaccgcatctgcattatagaagattaggtgggggcagtcagcttccccgtgcactgtgtaaacatcacacctggctcaaccaatatttgggccatatgtaaatcagaccctgcctcctcaagccggtctataaaatctggtgcgctttgctgcaggccggaagtccactcaggcaaccctctccctcacaggagagagagctattttcctttctctttcttttgcctattaaacctccacttctaaacctacttcttgtgtgtccacatactcaatttccttggcatgagacgacaaaacccaagtatttaccccagacagacgacactgcttcattataagtgataaatttattagttaaaattgctatattaagaaatatagcacattttaaggctgctgatgcacagtgcaataactgccatatacaaataggacaccaattatacttagagcccaggcacagagactcacacctgtaatcccagcactttaggctcccagggcaggtggatcacttgaagtcagaggtttaagatcagcctgaccaaaatggtgaaaccccatctccactaaaaatatgaacttttttttttagtagaaaaaaacttttttctattagtaggcatggtggtgcactcctgtaaccctacaagggtgagttaagagaattgcttgaacccaggaggcagaggatgcagtgagttgagatcacatcactccagcctgggtgacagagtgagaccccgtctcaaaaaaaaaaaaaaaaagtattacaaagctcttgtttccctgcacttaccatttatgaatagttcaatgaaatatgttatttttaaaaacattttccattttggtatgtaaaaaactggcatctcattattttaatatgcattttagtaactaggtaacttggttttatatatgtttagtgtattactttttgaattgcctagtcatgtcttctgcttattttgctattcaattatttaatattttagtgattcatatgagctccccattatagtaaccatttgtccaaaattattatatatatatatctccattcagattccagtgttcattctcaatgtttttgagagaaaaggacttcctcccctctaaagatttccactctctaaagagcttaaacaagtaccaattactcaaacacaattagggaagtttaaacattatctaattgaactttatttgtggaaaataaatgttcttacctttccattattatttaaccatgtatagaaaggagcccatacattctaggctgataaatctctttttaaaaagggaaaatgtattctgtcaaagaggggaccaaattccaagttcacactgcactttgctaaacacattgcctttgtgttggctgtgttctctctgaaacacagagctgctcacatgacagccctgttccaaaacatttgatggctcatagcagccagcacaaccgaccccccattcatttttccaaggtcaacacctcttattatcacaactctatgcaacacttccaaactctattctctactcacactccacttcttgtcctactcggtcctcaagtaagcctcatatttttatactccaaggcctatacttaaactgtttttttcctaaatgtacattttcccattcccacatctttcttttccacatggcaaaccctgcacatttgagagcattactttctctttccacttgaatgttctccacttgttcttgctgattgtgaggcactggtgagttttagaactggaatcatattttatccatctttgcagttctagagccttgcgctggggtaattgtcaaaaaatggttcccaatgcaaacttgctgatggtgatattcaacagatgagaaaatgagccagaatgcctgtctactaatccagatggtttttcactattattttgctaaaactcccccattgtcattagcaaaataacaatgataataatgatactagtactaaatacacaarataagtcagttataattgagctggtagcatgca

SEQ ID NO: 1834 - DNA, 2420 bp, Homo sapiens
tacttgtaccccatacatttgtataaataacttaaaaagaaccacaagagtttactatcttgtttgtttataaatgcaaatacattatgaatgtttcccatgacattaactattattgatgcaggagctaaaaagaaattttaattttaataaaaacagcccccatattatttcttttctaacatagagcagtgtgtaaaattgagctgcagacatagataagcaagacggaagcttgcacagataaacgccggcagctgtgtcaataagaaaaggtgctacctggggactaggcatgttcagaatggtggctctatcttccctttcctttgtaaaccatgtgtacagtaagaagcaggcaacatggcatcagccaggcaaagaccgcatctgcattatagaagattaggtgggggcagtcagcttccccgtgcactgtgtaaacatcacacctggctcaaccaatatttgggccatatgtaaatcagaccctgcctcctcaagccggtctataaaatctggtgcgctttgctgcaggccggaagtccactcaggcaaccctctccctcacaggagagagagctattttcctttctctttcttttgcctattaaacctccacttctaaacctacttcttgtgtgtccacatactcaatttccttggcatgagacgacaaaacccaagtatttaccccagacagacgacactgcttcattataagtgataaatttattagttaaaattgctatattaagaaatatagcacattttaaggctgctgatgcacagtgcaataactgccatatacaaataggacaccaattatacttagagcccaggcacagagactcacacctgtaatcccagcactttaggctcccagggcaggtggatcacttgaagtcagaggtttaagatcagcctgaccaaaatggtgaaaccccatctccactaaaaatatgaacttttttttttagtagaaaaaaacttttttctattagtaggcatggtggtgcactcctgtaaccctacaagggtgagttaagagaattgcttgaacccaggaggcagaggatgcagtgagttgagatcacatcactccagcctgggtgacagagtgagaccccgtctcaaaaaaaaaaaaaaaaagtattacaaagctcttgtttccctgcacttaccatttatgaatagttcaatgaaatatgttatttttaaaaacattttccattttggtatgtaaaaaactggcatctcattattttaatatgcattttagtaactaggtaacttggttttatatatgtttagtgtattactttttgaattgcctagtcatgtcttctgcttattttgctattcaattatttaatattttagtgattcatatgagctccccattatagtaaccatttgtccaaaattattatatatatatatctccattcagattccagtgttcattctcaatgtttttgagagaaaaggacttcctcccctctaaagatttccactctctaaagagcttaaacaagtaccaattactcaaacacaattagggaagtttaaayattatctaattgaactttatttgtggaaaataaatgttcttacctttccattattatttaaccatgtatagaaaggagcccatacattctaggctgataaatctctttttaaaaagggaaaatgtattctgtcaaagaggggaccaaattccaagttcacactgcactttgctaaacacattgcctttgtgttggctgtgttctctctgaaacacagagctgctcacatgacagccctgttccaaaacatttgatggctcatagcagccagcacaaccgaccccccattcatttttccaaggtcaacacctcttattatcacaactctatgcaacacttccaaactctattctctactcacactccacttcttgtcctactcggtcctcaagtaagcctcatatttttatactccaaggcctatacttaaactgtttttttcctaaatgtacattttcccattcccacatctttcttttccacatggcaaaccctgcacatttgagagcattactttctctttccacttgaatgttctccacttgttcttgctgattgtgaggcactggtgagttttagaactggaatcatattttatccatctttgcagttctagagccttgcgctggggtaattgtcaaaaaatggttcccaatgcaaacttgctgatggtgatattcaacagatgagaaaatgagccagaatgcctgtctactaatccagatggtttttcactattattttgctaaaactcccccattgtcattagcaaaataacaatgataataatgatactagtactaaatacacaaaataagtcagttataattgagctggtagcatgca

SEQ ID NO: 1835 - DNA, 2420 bp, Homo sapiens
tacttgtaccccatacatttgtataaataacttaaaaagaaccacaagagtttactatcttgtttgtttataaatgcaaatacattatgaatgtttcccatgacattaactattattgatgcaggagctaaaaagaaattttaattttaataaaaacagcccccatattatttcttttctaacatagagcagtgtgtaaaattgagctgcagacatagataagcaagacggaagcttgcacagataaacgccggcagctgtgtcaataagaaaaggtgctacctggggactaggcatgttcagaatggtggctctatcttccctttcctttgtaaaccatgtgtacagtaagaagcaggcaacatggcatcagccaggcaaagaccgcatctgcattatagaagattaggtgggggcagtcagcttccccgtgcactgtgtaaacatcacacctggctcaaccaatatttgggccatatgtaaatcagaccctgcctcctcaagccggtctataaaatctggtgcgctttgctgcaggccggaagtccactcaggcaaccctctccctcacaggagagagagctattttcctttctctttcttttgcctattaaacctccacttctaaacctacttcttgtgtgtccacatactcaatttccttggcatgagacgacaaaacccaagtatttaccccagacagacgacactgcttcattataagtgataaatttattagttaaaattgctatattaagaaatatagcacattttaaggctgctgatgcacagtgcaataactgccatatacaaataggacaccaattatacttagagcccaggcacagagactcacacctgtaatcccagcactttaggctcccagggcaggtggatcacttgaagtcagaggtttaagatcagcctgaccaaaatggtgaaaccccatctccactaaaaatatgaacttttttttttagtagaaaaaaacttttttctattagtaggcatggtggtgcactcctgtaaccctacaagggtgagttaagagaattgcttgaacccaggaggcagaggatgcagtgagttgagatcacatcactccagcctgggtgacagagtgagaccccgtctcaaaaaaaaaaaaaaaaagtattacaaagctcttgtttccctgcacttaccatttatgaatagttcaatgaaatatgttatttttaaaaacattttccattttggtatgtaaaaaactggcatctcattattttaatatgcattttagtaactaggtaacttggttttatatatgtttagtgtattactttttgaattgcctagtcatgtcttctgcttattttgctattcaattatttaatattttagtgattcatatgagctccccattatagtaaccatttgtccaaaattattatatatatatatctccattcagattccagtgttcattctcaatgtttttgagagaaaaggacttcctcccctctaaagatttccactctctaaagagcttaaacaagtaccaattactcaaacacaattagggaagtttaaacattatctaattgaactttatttgtggaaaataaatgttcttacctttccattattatttaaccatgtatagaaaggagcccatacattctaggctgataaatctctttttaaaaagggaaaatgtattctgtcaaagaggggaccaaattccaagttcacactgcactttgctaaacacattgcctttgtgttggctgtgttctctctgaaacacagagctgctcacatgacagccctgttccaaaacatttgatggctcatagcagccarcacaaccgaccccccattcatttttccaaggtcaacacctcttattatcacaactctatgcaacacttccaaactctattctctactcacactccacttcttgtcctactcggtcctcaagtaagcctcatatttttatactccaaggcctatacttaaactgtttttttcctaaatgtacattttcccattcccacatctttcttttccacatggcaaaccctgcacatttgagagcattactttctctttccacttgaatgttctccacttgttcttgctgattgtgaggcactggtgagttttagaactggaatcatattttatccatctttgcagttctagagccttgcgctggggtaattgtcaaaaaatggttcccaatgcaaacttgctgatggtgatattcaacagatgagaaaatgagccagaatgcctgtctactaatccagatggtttttcactattattttgctaaaactcccccattgtcattagcaaaataacaatgataataatgatactagtactaaatacacaaaataagtcagttataattgagctggtagcatgca

SEQ ID NO: 1836 - DNA, 1292 bp, Homo sapiens
tatagaaagtatttcttttttgttagagaatgtgtgctacatacctttaggctctaccttccaatccgaatggaaggctggcatgctccctcttcacctggtaatagcccttggtgtacagatttggtgtctaggagaacatcccaagtctctggcatgtggcgtcaccacgctggggagtggcagtggctctcctgtgtggagcactctgtcgaggctgtgccgctcccaggcagggcaggcatgctgcattcagagcctgtaagaccctctcccagggctggtcggaaagcagctggttctgatgaggaggctgtaaggcttccaatcttggggacccttgtgtctggaaagagggatctgggaktcctagaaaaatctcccagggcaggtctccattccagagagtaaaagctgcagcctcgagcgtctcttctcctcccagctgtccccgttcaggtcagggaccagggcaggctttgtcaccagggaggtgggtaccgggtggtcccggccaagtggccaggctccagtctggggaagcctttgagctgtctctgcagggcttgagaggtggggaggagggagagggacaggctagaagcccaggacaaggaagtgaggtcaggcctgagtgcagacactgggcagccaaggtccagagacgctgaggtctgctctggccacaaatgagcccagactccagcttctgaccctccccatgactctgtccccacacacgggggcctctcatgggcacggctatggcccacaaagtacaagctccttaccctgccccttgcccagcctgggacctcccatgttctaggaggatgaggaagtcctgggaaccatttctctatttctcttcctctctgacctgtgaatctcttcttcttacttccaaaaggccagggcagaagtcagaatggctgcttggtccacggaagcctgaagcctggtgcctaaagtgaatatggtcttggcaagatcagaactgctgagagccaaggtttccttattgactaaattaaatcacaatcctcccccggctaacctagaactctgggaatcaaatataccaataaaatgtctgtaaaagcactgtttgaatttgcatttgcaccactgctcttagtagaggaagcggcagcctgaggctgatgtgagcactgggctgggagtcagcggttctaagtgtgagcactgggctgggagtcagcggttctaagtgtgagccccagctctgcaacctaccaacctatttgggactctccacttctcatctgaaa

SEQ ID NO: 1837 - DNA, 1292 bp, Homo sapiens
tatagaaagtatttcttttttgttagagaatgtgtgctacatacctttaggctctaccttccaatccgaatggaaggctggcatgctccctcttcacctggtaatagcccttggtgtacagatttggtgtctaggagaacatcccaagtctctggcatgtggcgtcaccacgctggggagtggcagtggctctcctgtgtggagcactctgtcgaggctgtgccgctcccaggcagggcaggcatgctgcattcagagcctgtaagaccctctcccagggctggtcggaaagcagctggttctgatgaggaggctgtaaggcttccaatcttggggacccttgtgtctggaaagagggatctgggagtcctagaaaaatctcccagggcaggtctccattccagagagtaaaagctgcagcctcgagcgtctcttctcctcccagctgtccccgttcaggtcagggaccagggcaggctttgtcaccagggaggtgggtaccgggtggtcccggccaagtggccaggctccagtctggggmagcctttgagctgtctctgcagggcttgagaggtggggaggagggagagggacaggctagaagcccaggacaaggaagtgaggtcaggcctgagtgcagacactgggcagccaaggtccagagacgctgaggtctgctctggccacaaatgagcccagactccagcttctgaccctccccatgactctgtccccacacacgggggcctctcatgggcacggctatggcccacaaagtacaagctccttaccctgccccttgcccagcctgggacctcccatgttctaggaggatgaggaagtcctgggaaccatttctctatttctcttcctctctgacctgtgaatctcttcttcttacttccaaaaggccagggcagaagtcagaatggctgcttggtccacggaagcctgaagcctggtgcctaaagtgaatatggtcttggcaagatcagaactgctgagagccaaggtttccttattgactaaattaaatcacaatcctcccccggctaacctagaactctgggaatcaaatataccaataaaatgtctgtaaaagcactgtttgaatttgcatttgcaccactgctcttagtagaggaagcggcagcctgaggctgatgtgagcactgggctgggagtcagcggttctaagtgtgagcactgggctgggagtcagcggttctaagtgtgagccccagctctgcaacctaccaacctatttgggactctccacttctcatctgaaa

SEQ ID NO: 1838 - DNA, 1292 bp, Homo sapiens
tatagaaagtatttcttttttgttagagaatgtgtgctacatacctttaggctctaccttccaatccgaatggaaggctggcatgctccctcttcacctggtaatagcccttggtgtacagatttggtgtctaggagaacatcccaagtctctggcatgtggcgtcaccacgctggggagtggcagtggctctcctgtgtggagcactctgtcgaggctgtgccgctcccaggcagggcaggcatgctgcattcagagcctgtaagaccctctcccagggctggtcggaaagcagctggttctgatgaggaggctgtaaggcttccaatcttggggacccttgtgtctggaaagagggatctgggagtcctagaaaaatctcccagggcaggtctccattccagagagtaaaagctgcagcctcgagcgtctcttctcctcccagctgtccccgttcaggtcagggaccagggcaggctttgtcaccagggaggtgggtaccgggtggtcccggccaagtggccaggctccagtctggggaagcctttgagctgtctctgcagggcttgagaggtggggaggagggagagggacaggctagaagcccaggacaaggaagtgaggtcaggcctgagtgcagacactgggcagccaaggtccagagacgctgaggtctgctctggccacaaatgagcccagactccagcttctgaccctccccatgactctgtccccacacacgggggcctctcatgggcacggctatggcccacaaagtacaagctccttaccctgccccttgcccagcctgggacctcccatgttctaggaggatgaggaagtcctgggaaccatttctctatttctcttcctctctgacctgtgaatctcttcttcttacttccaaaaggccagggcagaagtcagaatggctgcttggtccrcggaagcctgaagcctggtgcctaaagtgaatatggtcttggcaagatcagaactgctgagagccaaggtttccttattgactaaattaaatcacaatcctcccccggctaacctagaactctgggaatcaaatataccaataaaatgtctgtaaaagcactgtttgaatttgcatttgcaccactgctcttagtagaggaagcggcagcctgaggctgatgtgagcactgggctgggagtcagcggttctaagtgtgagcactgggctgggagtcagcggttctaagtgtgagccccagctctgcaacctaccaacctatttgggactctccacttctcatctgaaa

SEQ ID NO: 1839 - DNA, 1292 bp, Homo sapiens
tatagaaagtatttcttttttgttagagaatgtgtgctacatacctttaggctctaccttccaatccgaatggaaggctggcatgctccctcttcacctggtaatagcccttggtgtacagatttggtgtctaggagaacatcccaagtctctggcatgtggcgtcaccacgctggggagtggcagtggctctcctgtgtggagcactctgtcgaggctgtgccgctcccaggcagggcaggcatgctgcattcagagcctgtaagaccctctcccagggctggtcggaaagcagctggttctgatgaggaggctgtaaggcttccaatcttggggacccttgtgtctggaaagagggatctgggagtcctagaaaaatctcccagggcaggtctccattccagagagtaaaagctgcagcctcgagcgtctcttctcctcccagctgtccccgttcaggtcagggaccagggcaggctttgtcaccagggaggtgggtaccgggtggtcccggccaagtggccaggctccagtctggggaagcctttgagctgtctctgcagggcttgagaggtggggaggagggagagggacaggctagaagcccaggacaaggaagtgaggtcaggcctgagtgcagacactgggcagccaaggtccagagacgctgaggtctgctctggccacaaatgagcccagactccagcttctgaccctccccatgactctgtccccacacacgggggcctctcatgggcacggctatggcccacaaagtacaagctccttaccctgccccttgcccagcctgggacctcccatgttctaggaggatgaggaagtcctgggaaccatttctctatttctcttcctctctgacctgtgaatctcttcttcttacttccaaaaggccagggcagaagtcagaatggctgcttggtccacggaagcctgaagcctggtgcctaaagtgaatatggtcttggcaasatcagaactgctgagagccaaggtttccttattgactaaattaaatcacaatcctcccccggctaacctagaactctgggaatcaaatataccaataaaatgtctgtaaaagcactgtttgaatttgcatttgcaccactgctcttagtagaggaagcggcagcctgaggctgatgtgagcactgggctgggagtcagcggttctaagtgtgagcactgggctgggagtcagcggttctaagtgtgagccccagctctgcaacctaccaacctatttgggactctccacttctcatctgaaa

SEQ ID NO: 1840 - DNA, 528 bp, Homo sapiens
cctgagacggttaaaggcatctcagagctaaacctctgaaatcttctcctctgacttttcattgcagcatgattaaaggtgtatgtgggtgtgtgtgtgttgaagcgggggagctttctggcttagtaatcacaagactttctaatgaagctcttgaaaaatctyccacatgaggctgtcttcttaggttgagtggtctttctcctggggagcctccaggccctggggaagcacttgtgggatggagctccgtgtgggtgggatgcagcctcctttcccacagttctgaaggctcagctccatgtcaggccacacagcacattattaaaaggactgcacttttgcctgccctccaggctgatacctctgaaaggtttagaaacccatgagacgctcatgggttttatattttttggaggagactaaggctaaaggttttaccacgagaagagaaggggttaggaaaaaaaagatggtggccaaaaacattgtgtgtctcagtaaccttaccaggttcaaactcaaagc

SEQ ID NO: 1841 - DNA, 528 bp, Homo sapiens
cctgagacggttaaaggcatctcagagctaaacctctgaaatcttctcctctgacttttcattgcagcatgattaaaggtgtatgtgggtgtgtgtgtgttgaagcgggggagctttctggcttagtaatcacaagactttctaatgaagctcttgaaaaatcttccacatgaggctgtcttcttaggttgagtggyctttctcctggggagcctccaggccctggggaagcacttgtgggatggagctccgtgtgggtgggatgcagcctcctttcccacagttctgaaggctcagctccatgtcaggccacacagcacattattaaaaggactgcacttttgcctgccctccaggctgatacctctgaaaggtttagaaacccatgagacgctcatgggttttatattttttggaggagactaaggctaaaggttttaccacgagaagagaaggggttaggaaaaaaaagatggtggccaaaaacattgtgtgtctcagtaaccttaccaggttcaaactcaaagc

SEQ ID NO: 1842 - DNA, 528 bp, Homo sapiens
cctgagacggttaaaggcatctcagagctaaacctctgaaatcttctcctctgacttttcattgcagcatgattaaaggtgtatgtgggtgtgtgtgtgttgaagcgggggagctttctggcttagtaatcacaagactttctaatgaagctcttgaaaaatcttccacatgaggctgtcttcttaggttgagtggtctttctcctggggagcctccaggccctggggaagcacttgtgggatggrgctccgtgtgggtgggatgcagcctcctttcccacagttctgaaggctcagctccatgtcaggccacacagcacattattaaaaggactgcacttttgcctgccctccaggctgatacctctgaaaggtttagaaacccatgagacgctcatgggttttatattttttggaggagactaaggctaaaggttttaccacgagaagagaaggggttaggaaaaaaaagatggtggccaaaaacattgtgtgtctcagtaaccttaccaggttcaaactcaaagc

SEQ ID NO: 1843 - DNA, 528 bp, Homo sapiens
cctgagacggttaaaggcatctcagagctaaacctctgaaatcttctcctctgacttttcattgcagcatgattaaaggtgtatgtgggtgtgtgtgtgttgaagcgggggagctttctggcttagtaatcacaagactttctaatgaagctcttgaaaaatcttccacatgaggctgtcttcttaggttgagtggtctttctcctggggagcctccaggccctggggaagcacttgtgggatggagctccgtgtgggtggratgcagcctcctttcccacagttctgaaggctcagctccatgtcaggccacacagcacattattaaaaggactgcacttttgcctgccctccaggctgatacctctgaaaggtttagaaacccatgagacgctcatgggttttatattttttggaggagactaaggctaaaggttttaccacgagaagagaaggggttaggaaaaaaaagatggtggccaaaaacattgtgtgtctcagtaaccttaccaggttcaaactcaaagc

SEQ ID NO: 1844 - DNA, 432 bp, Homo sapiens
ggctaggcagggtgtcagggcaaagtagtgacagcagaggggagaaggaggaaggagagatggctcctgttgcctgtgcagtgggggtctctcaggcttagggagaagcatttctgcttttctttaaaactaactctaaactgagactttacacagaggcctctgccaaacacrgtatgtatgtatgtatgtatttccccagagaagaccagaatgaggacattcatcatgtccaggaacccagacatacaggggtcatccaaagtgcaatcagcttgtcctctgggtgactgtcgttgaaaagaggcacttgaattattcataggcccagacattctggctgctatcagacacacactctgatctccatgcatgtcgccaccaggtttacggatctgtgcagacatccccactcctagcaggactccccag

SEQ ID NO: 1845 - DNA, 1047 bp, Homo sapiens
agcaaaatcataaattataaatgttttgtgttcagaatgaagagatgagattcaatacattttgctggacattttagcataaaaagaaaaattctgagtattagttacagttatcctaaaagtaaaacattaagttaccctgcaccatgctgagaaatgtagtaagtgttaaacattcacagaataaatgatttcaaaaccatatttagctaaactaaaaaaatatatatactttggatagttcctgggccaaatacttattctactttttttgagggacttgctcaataaattattaaaatggctaagtaaatatattttttataatctgattataatgctctgacatgttgtaaaatgaccacttgggcaaagaataactgcaattatgagttctttgaaaagtaaattacccttacctattcagtgaaatgggatttttatttttaaaaaaccacttggttagcttggttctagttgctgaataytccagaaaactgcatttgaaaagtaaattatatagttatgacttaattaattagaaagcatttattttttctctcctacctgtaatgcagtattttccaagttgtgtttcttttccatggagactaacatactgagagattttttataactttgtaatggaataaaagaaaaaaattccattatcaaataaaaattggaacacttttataatatattttaatagattcacaatgcactttacgattgcaggagctcttataattttctcttataaagacaaattaattttctttaaccttacaagtgtatctcatctccctccactattctctgtgagcatatttatcagttatcatccctcacctggatgatgacagcagcaccagcattcatctcttcacttttattcatatctgcaattatatacaccaaagccaacatttacagacataaatcaggcctttttttttgcttaaaaattatttaatggttcaaccagtttttattatatttcagataaaatgatattttcaccaggtcttcaagaatctatgacca

SEQ ID NO: 1846 - DNA, 953 bp, Homo sapiens
tgcattgcaccaagaatgatcttgtgccttcactcctcaaaaataaagccattttttagcgtgatttttcattattttgtcctacctctcaatatatccagacccttttcttgtctctgggcttgtgtatctttcgacttactagaagtttttttaaaatatgccatggccattcacatacccatgcttccaaaaatgctcctctgtctttctcacaacattgctcacctaggaaacccacatttatccttaatctcatatcctagacattatctatttttggaattctgtagtagaccttttggtgttctgcattatcccctccaagctcattcacgattttaaacatggttgtggtagacaattccttgtgagttgaggttttcctccagatagcagtgttcccactcaaacatctttctattttctgagtcaggacattttacggtgtcatacaaggctgcttcttgttctgagtgtgcacagactaagaaaaaagaaaaattaacactggacaacccttaactaacagggcttaggaactagtgggtaactctacagcttcctgtgctttagaaggaaagttctggtagatatcgagggggyctttatggaatgaagtttccattgcccagagcacagcattaataacaaacaagtgtattgactctctcgacttttcttgactcatttttctacctcatcacttctgcctcctggaattatctaacacactacatatatttcagtcctaatgccagtttctgctttgggagaaagacaaaagatgaaaggatcatttttataaccctcacccttaacatatttttaattcctctctactatgcactctctatatgttcatgtgcataagcttgtattagtcttttacattatttttattattgtttgcatttcctttttcttactagattgtaagcttattgagaggg

SEQ ID NO: 1847 - DNA, 713 bp, Homo sapiens
actagcttagagagtttattccatttgccccaaatactgccctttggaacccgccaacgatccatgtgtgcttcagatagcctcgtccaggcaggagtagctttctgaaatttaaatttttatctatttacaaacatttttatgtgtaacaaaaagtaaaaatgtgcctaacaagtataattaaccctgaaatggaaaaaaaaaaaaaagaatataaagtatatcaagggtatccacagaggaggtagtactttgkgtggaaagagcatggttttgaggtttggatacattttgtctgagaattttgttatattgttgaaatatgacatttaacatttggtgtgggtaatactgactttagagggtgcgttgaagcttgattaatgtgatcagtgtcactggaccctagcatgtccttgtgtgtgtatctatgtacaggaatacaccatgcttaatataatcagtgtaactagattctagcatgtccttgtgtttgtatctatgtacaggaatacaccatggttaatataatcagtgtaactagattctagtttgtccttgtgtgtgtatatatatgtacaggcatacaccatggttaatataatcagtgtaattagactctagcatgtccttgtgtatgtatatatgtacacgcgtacacccatggtcaatgtaatcagtgtaactggactctagcatgtcatagtgtgtgt

SEQ ID NO: 1848 - DNA, 1276 bp, Homo sapiens
aatcgcctaaatctggacacaaccacacrtcctcccatggatgaagaggtaactacctgtgtctccctgtgcaggctaacaccattccacaattgaaaggaacatgccactgacacacagtgcattggggtggatctcaaaaacatgatgcttagtgaaagcagccagttacaaagagcccatgctgcgtatctccactcacacgaccttcccaagacaacagtgtgacagggatagaaggcaaatcagcagtcagcaggttgggtgggaagggctggactccagcaagaggggtgcagttcctcggcatcctgactatggaaccttgtacgtgtgaaaattctcagacctaaacacctcttttaaatgggaccagatggggaaataaaactatcattttttggtcatctgtttcatatcagtcaccacaggtacagttgtgatccttgaacaacacaagtctgaactacatgggtccacctacatacagattttttcttaaaaaaatttttttttaaattaaatcttcttaaatagacatggggttggccaggcataatggctcatgcctgtaatcccagcactttgggaggccaagatgggcagatcacgaggtcagcagattgagaacatcttggccaacatagtgaaacctcatctctactaaaaatacaaaaaaaaaaaaaaatctgggtgtggtggcacgcacctgtggtcccagctactcagaaggctgaggcaggagaatcacttgaacccaggaggtggaggttgcagtgagccgagatcatgccactgtactccagtctgagcaacaagagcgaaactccgtctcaaaaaaaaaaaaaaaaaaaaagacacggggtctcgctatgttgctcagactggtctcgaactccaggactcaagtaaccctcccaaccttggactcccaaattgctaggatcacaggcatgaaccaccacacctggcccacttttttttcaataaatatattggaaaaatgtattggaaaatttcatatcagccatgccagcagacgtgaatccttgctcttctggccaaatacttttttacctggtcttggaaatgcagcttttggacagatgtagtagctcatgcttgtaatcccagcactttgggaggctgaggcaggaggatcactggagcctaggagatggaggttgcagtaagcattgcaaccatttgaagaaacttgcagatgaaccttgtagcctagaaatattgaaaaagttaagaaaaaggtatgtcatga

SEQ ID NO: 1849 - DNA, 1276 bp, Homo sapiens
aatcgcctaaatctggacacaaccacacatcctcccatggatgaagaggtaactacctgtgtctccctgtgcaggctaacaccattccacaattgaaaggaacatgccactgacacacagtgcattggggtggatctcaaaaacatgatgcttagtgaaagcagccagttacaaagagcccatgctgcgtatctccactcacacgaccttcccaagacaacagtgtgacagggatagaaggcaaatcagcagtcagcaggttgggtgggaagggctggactccagcaagaggggtgcagttcctcggcatcctgactatggaaccttgtacgtgtgaaaattctcagacctaaacacctcttttaaatgggaccagatggggaaataaaactatcattttttggtcatctgtttcatatcagtcaccacaggtacagttgtgatccttgaacaacacaagtctgaactacatgggtcyacctacatacagattttttcttaaaaaaatttttttttaaattaaatcttcttaaatagacatggggttggccaggcataatggctcatgcctgtaatcccagcactttgggaggccaagatgggcagatcacgaggtcagcagattgagaacatcttggccaacatagtgaaacctcatctctactaaaaatacaaaaaaaaaaaaaaatctgggtgtggtggcacgcacctgtggtcccagctactcagaaggctgaggcaggagaatcacttgaacccaggaggtggaggttgcagtgagccgagatcatgccactgtactccagtctgagcaacaagagcgaaactccgtctcaaaaaaaaaaaaaaaaaaaaagacacggggtctcgctatgttgctcagactggtctcgaactccaggactcaagtaaccctcccaaccttggactcccaaattgctaggatcacaggcatgaaccaccacacctggcccacttttttttcaataaatatattggaaaaatgtattggaaaatttcatatcagccatgccagcagacgtgaatccttgctcttctggccaaatacttttttacctggtcttggaaatgcagcttttggacagatgtagtagctcatgcttgtaatcccagcactttgggaggctgaggcaggaggatcactggagcctaggagatggaggttgcagtaagcattgcaaccatttgaagaaacttgcagatgaaccttgtagcctagaaatattgaaaaagttaagaaaaaggtatgtcatga

SEQ ID NO: 1850 - DNA, 1255 bp, Homo sapiens
tttctaagtctatttacaaacattgctagtaatttcttgctagaatatcaataacggtggtatcgtgttgcttaattggacactttggtagtctatttaacacatctttatttctaagcctgttagcttcccctagaaatttcccacatatacaggaagtattagcctgaacttgtatwatattttttagaaaagttaggaaatgagggcatttttttttttctgatgagcgactgtcacctcccttagccccaggaagagtataagtcttcagtaatatttcttgtgatcttaaatctaaaattttattttatattttaaagaaaacattcctaacttccaaatatacacttttgtttttcattttccatttaactcaagagcttaagatattgcaatcttaacacacactgctctgctctcaggtgtttaaagtctgtccacttttgctttaggccaaagggaatatttacacaaaagagtgtcttgcttctagatcacatctgtccgttcacatttgaggaagaggaagttgtctaatcatttgcctatatgaaacaattcacaattatctattttgagcaaaaacgttcccacatggttgaattatttgatcccaattagccagatgttctactaactaaacatttgtgccactttttaatttcatgtgtttttccatgtagagcccaacactctgaagaaaagtttgaagttctattgatttgaaaatacttcctcaaaatccagcagaacaccctagttcctcacacagccatactacttataacagcacaagttcttcacttcctcatgattgaggtgtaaactacacatactcatccccgtcctctctgctactcagtgacaagcatcaaatcagcacctctttaaatgcccacttcgtacatcacagagaactgtgtggcttatgattcatttataatatgcctttaacagacactttcatttaatgtccttgattttgtgatttgatatttatattatgcactaattcaagaaaacaaaacaaatatgaataatttgtcttttggggaaaactgaggtcataatatctctgggatctgctgcttgcaaagataaaaacctactgtaattatgtttcaaattttgatgctccaaccttaattgtcaaaaacacttatggctcttaccttaactgaagttaaggattcagataaattcaatatggctttatgatttcaggatacattttcaaaaacataaaaagaca

SEQ ID NO: 1851 - DNA, 393 bp, Homo sapiens
  misc_feature (1)...(393): n = A,T,C or G
tgcataggcaagcttccattatctgtgcaaaatawttcctttatttgggcactgttcagaaggctttactatttaacctcctanaagggatgcaaagattattcacaataagatctatttagggattttgtcttccatatttgtcttccagatcctcacatgcagactagggtcccataaatacaaataggtattgaatatctggattaagagtttttattaaatgagtaatgactactgctttatattatgaagtgtcaatgtaagggaaatcatgagttttaggactannnnnnnnnnnnnnnnnnnnnnnnnnnnnnnnnnnnnnnnnnnnnnnnnnnnnnnnnnnnnnnnnnnnnnnnnnnnnnnnnnnnnnnnnnnnnnnnnnnngtt

SEQ ID NO: 1852 - DNA, 1258 bp, Homo sapiens
tgcatcattatgcttaggatttggaacattcctattagcaatgtccactgtcatcacaattgtttcatatttgagattctggaatttggaattgtcaaccagtatcatctgaaaaatgaaagccatgtactaatattgaaaagaaggacaacttactctttgaaaatatggttgtataataaatatacaagaaaattactaaaagtaaatttcagcatgatgctttcttatgttcaagcaataccctataaagggtctatttgtaatagcaataaaatatattagataggaatttataatagcaagtaatatataaaatagcttggaataagcctaagcatttgtataggaccctttatgaagacaactgtaattaaatgtgatctcaatcaatactgataacactaatatgacaaaatagttctgaagtgtagtgagataaatatgtgagaacagttaaaaaaaattccaaggggaaaaatatttatggattgggtaaaggaactagcccgtcatctcaaatattgaaatgttttatgaaaaccacagttgttaaaatagtttagtactgacactgaactagatcagtgaaattgaatggagattcagtaaaaaacccaaatatataagtgtacttagtatatgttaaagtttgtttttcaaatcagtgagagaaaagatggattattctacagcatgtcaggataactggctagtagtttggataaagataaagccaatcactgctgcacttttatacaagaataaaattgtgaatggaccaaatacacaaatattaaaaaaaaaaaactagagaaataaagaaaacaatagtgaattttcagtgattttgggatagggaggacctttctaaatgtgacacaagtttcaaaagccaaatatgtatatatacttgactacataaaaattaaaatgctaaaggttaactaaatgactgaaattgtttagtttctttagctaaaaaacatgctgtggggtaagggagtggatatttgctacatatttgataaaagacaaatgtccttgaaaatccaaaggttttttttttataaattaataaaagataagcccttaaaaaayatgtaaagttatacaagaaacaattcataacacacataaaaatggccaggatacatgcaaggatgttcactcttctttatgaatgaagaaattcaaattaaagcaagatactattttatattcataagactggcaaagatttaaaatttacttatca

SEQ ID NO: 1853 - DNA, 1235 bp, Homo sapiens
tgcatatttcacagttggctatgttgtcatggcttactctataattataacacaaatttattaagaattgttcatacctatatgcctttctttctgtaaacttttatactgaaatgtaataaaaagcttttaatactttgatagtgattgaggctggacaaaattagtaatttttaaagtgagaaaatgaggaggtcttttaagaaaatatttaccagccttgaaacagcatttgtcttactgaaygcaagcaccatgagctctcaggtggcttgcattatgtttgaaatgtttgctaatgacatgcggcaaagaccactaagtgtctgctacatattcttggtcaagacattaactgctcactaaatactcttcctctccttctatcacgagatgttgctactaagtagctgcccgctcagagatttcatttcttaacctctgtttcatctaggtgagatcatataattagctctgaccaatggaatgtacaatacggtggtatgtgtcacttccaggtcaagtgtctttctttctctggcaccccatgtagcctcatagggcattttttttttaccttgtaagctgtgtatatttatttatgacatagatatccatgttgctttctaatgtttgctctctataattatttgttggaccattatatgtgtcaaagataattttccagaaaaaggtaaaattatgactctcatacagatataaagttgaactcttggtaaataatttattatacttattcaatggaggagctgtgcagtcaatgggggaactgtgcagatgttataatcaattcaaataaaacgtccaaaaatcacaatgtgtatgaagtaaaaggaaattgaaaatgacagcaaaaatgctttctgtgggagaggagggaggctgtaaaagtcaattaaatgtctaggacagattttacacatgtttatcagttactgtaacttaagaattataaaataactgaaaaacaatgaaaggctagaatcagataacctggaaggatttttcatatgtaggcagtatacagttttccacaaattgtttcctatatgtggaaagagatgaaacagaagccaacctgctgtttaatgctcttatctaagccaagtaagaaaaacttacatgaatatattgaaaagaaatttactttaacttgcctttttaaaaagtattttgttttattagatgtagtaataaagtagcaagtatattat

SEQ ID NO: 1854 - DNA, 544 bp, Homo sapiens
cagccgcacaaagccacacccaggcaagcttgtacatacttgaaagagtaagagaatgtggaaaatctgaattaaggcaaaggtaacaggcctctacatggttatattctttgctgctcccaatatactttcccatgttgtcttgttttgagtcttatggcaatcctggagggacaaagagcaggtatagtatcaactacattttacagaaaagaaaactatgaaaaaacagttgccacagtgccagggcagagcagatgctcagtaaactccttcctccattccatgcggtttggatgctcagtgaccatatgatgcatgaacaaatgtggctcagtggcatgaagtgactcatccagtgtgacacagctaataagggggcagaggaggcacttaaacttggattatctcgccctgggccacactacacaaagctacatcccaaactgtgagcatttctatccrcttcttgaattcgtggactgcaagttcagagaccttaattccccactgcatgaaagaggctttctcatgcctgccagcc

SEQ ID NO: 1855 - DNA, 552 bp, Homo sapiens
ttctgttgtttataatctatccagtctgaagtattttgttacagcagtccaaacgaactaagacaatttccttctattctccactctcctggccccttgcttcagccaaacaggttaatcactgttccccacataaactacagacttcactgtctccatttccgggttgatgctgtttcctccacctgaaatggccattgctaagcgctggtataaccctcccacctgcactgaccttctctggctttaggaacctcacaactctccatgctgagaatctctagcactcattgtttgtcccactctaatgtccctccttatcttctgtatctaagttatttggatcttactcacatgcccttatttcacttttagtttcttggggaygtgggttgtagcttacctaacattttgtaagctcttcttatgcagtaagggatcaataaatgtgaataaataagtgaatgaataaaagtgtcaatttaaaaagtcaatatttagggtataataaaatctattttttaaaaaattcaaatacccagagatacaagg

SEQ ID NO: 1856 - DNA, 665 bp, Homo sapiens
tgcatgctcttagctgaggtcaaacaaggtgatgctttgccttcttgtttcagcgttcacactgtaaacaagagtccgttygtggtctatttagtgccacttttttgtgtgcgtttttgtgctttttgttggtaatttcactatataaagtggcacccaagtgtaatgctgaagagttgtctagtgttcctaagtacaagaaggctgtgacgtgggacagaaagtacatgtgttagatgagctttgttcaggcatgagatatagtgctgttggatatgagttcaatagtaataaatcaatgtgatattacataaggtgtctttatacagaaacacatataaaacaaggttatgtatttatcagttgaggaaaatatgaccagaggcttcgaaaaaccttattctgtatttctactagaagcaatggtccaatatttgctaagtctatgttcatggtgactttatagaatataactatcaggaataatgagaattgactgtatatgtgtatatgaatacatacccacacgtatctgcattttcagaatctacccacttttgaacgcttccactgctaccaacttagtccaattcaccatcacccttccgagaccattgcaatagcctccttactcctgccccatccttgccctcctaaagtctatt

SEQ ID NO: 1857 - DNA, 578 bp, Homo sapiens
atcctacctgagtatttgtttattataataagaccttattagaaatcatttttataaaaaaatcaattgatatattcattttctcccctctccatttctgttgaaatgatgaatttgaaagaaaaaaatgtaattttaaaaacagttggccttgttctgagaaattcctctatgtaccagtttttgccctttggccacatmtttgctgttgtggatcaggggcattgtattgcatataagttctgttgagcgtaatggctagtgcagttacagcccaccaataacagcaggaagccccttcgtctgttggctctgcttacagaactttgaagtaaggagactgtgattgtaacacatacttcctagggtacaccatggagataaagttgaaaaccaccatctggattctttaagagttatgctgaggcatgcctaatgatggtagctccagtaatataccccatactgtctggcaacagcatcataattgttttaaatgcacggtatgtaggtcatacagctttattcaagtgaactgtaaaggtttgcattctctcactttattaaaaaaaacattg

SEQ ID NO: 1858 - DNA, 1413 bp, Homo sapiens
gtcctgtctggcacttttcagagccttctggggacaaaatgtaagctacagagcagtgctttcaaaaagggatttccaaggagcagtggatgtcattcttatgttaattttccactgatgaaaacccatgggcagcagtccagcaacccaagccttctgaacaggctgggttctgaaggggatgtttttcctacctctccacttctgccattcttttgtcttatttctcaattgttcagagcttgaggaagaaaggctaatgccattcatagtgcagtctcagattccaaaattattaatcagatgagtgtaatttttagaatcaaatctaataatgctggratcaaggattattctttaaaaataacagaaaaatatttttaagacatcactttaccaaaatgagaggaaaaggaaataatcttttatattttatttgtaaattaaaattaaacaatgatgttaaagaagtacactgtagtagatctgagttgcaggcattatgcaaccttttacagacctcctgggccactcagttgatctgttagagtctcatctataaaataggaatgataatatgagactgggctgagatcagcatattggataagatagtgtttttaggtatattcaagctaaaaacctacagcttgattatgcatacattatacccattagtatcctgagtacgattgtctaaaagaaataccaacagaataactaatttaaagctttctaaaagccacattaagtaagcaaaataaagcagataaaactaatttattatatattatttgacttgatatattcaaagcattatttttagtattaaattctcataaaaagtataatattctagattagttttaaaattgtctctaaaatatgacatgtattttatatctccagaacatctcaatttggactagacacacttcaggtgttcatggccatatgtggctaatggcttctgtattagcacatagacagagaaattaaggcagctgtggaagaaaattagtactagtttgattggagcaacataggtaatattctcaagttgatgtcatggtttacaactcccatagtcaatcataaagtggctaaattatagaacagtcctaaactttacatctgggtcaaacctgagaggtcatatgatctaacccttttgattttagttgcaagaattatgctcaggagaaaatatgtgacccaccaatgtcacacagggaattggcaaaagggctgaaaccaaaagcaaggcctcttattttccagctatgggcacactgcacaagatggctttgcggtgtctcccttctttggacccagtgaaagcatttaacttacttctgagtgacaagaaagaaaagaagcagtaatagtgtttccacttaatgctggctgcct

SEQ ID NO: 1859 - DNA, 1260 bp, Homo sapiens
tgcattcacatatcttagtattttgttctgttttaatgacaaattacccttttagaaatgaaaaacacttgagattttttttttcctcctaaaatgggtcattctacagtggatattttgtagcagaggtagcctcacctcatcctcctggaaggcaaacatgataaataccatacttgtataattgaatagaaatgccttttccatgttcaggttttaaaatcttccacctgccaccctcaatattccattaccatcaacttctgcatttcatttatcctgcagattagatttgcaaataagaattgcggattctctcttcattttaaaccaggcttttcaagtactgcattatgttccattgagccaggtttcaagatgtggaaataaaactcaatgagagatagtcataaacactgtctttaacctctagaattatagtgatatgtggcattacaggaattsgcaacatgacagaaagtcgtaagatggattatgaggtaaaacatctgatggaaggaaagagtgtaatggtgggttatatgaatgtagtaaatggtactccagaagagatatgtgggaactctgaggtttaatgcagacaggtgcccttagctgggtcaactgggaaatgaaatcctcaaatgaccagaagcctctttctagcaacaccatagtcttaatgcgtgaccttaggcaagtcacttacctgcacggtcctcacttgcctagctttaaaatgatgctcataatcgatacataaccagataatgcttacaaagagctctgagattcttggatgaaaggccctatttacatgtaaagtagtgttatcattcaaatcccccctctgctaaatactctgtaacaggtgtattaaaggagaggaaatgaggaaggagaaaaaggaaaattggctcctgaagggatagaaatctgattatctcaaattgactcattctgaaaagggggaagaggagggtagatctgctgcatttaaccatttccaaacagactttactttgaataagcgaataaacacaatgagaccaatctgtacattttccaatcatgagggaaaaaaaatctgagataagtccactaaacttctgagcataatccccctaaaaaacagtttcaaatacatgcatgtggcttccattaatatgtaccactataaaaatttaaaatacatctatttcaccacttattgacacgtaattttatatatatatatatatatatatatatatatatata

SEQ ID NO: 1860 - DNA, 1260 bp, Homo sapiens
tgcattcacatatcttagtattttgttctgttttaatgacaaattacccttttagaaatgaaaaacacttgagattttttttttcctcctaaaatgggtcattctacagtggatattttgtagcagaggtagcctcacctcatcctcctggaaggcaaacatgataaataccatacttgtataattgaatagaaatgccttttccatgttcaggttttaaaatcttccacctgccaccctcaatattccattaccatcaacttctgcatttcatttatcctgcagattagatttgcaaataagaattgcggattctctcttcattttaaaccaggcttttcaagtactgcattatgttccattgagccaggtttcaagatgtggaaataaaactcaatgagagatagtcataaacactgtctttaacctctagaattatagtgatatgtggcattacaggaattggcaacatgacagaaagtcgtaagatggattatgaggtaaaacatctgatggaaggaaagagtgtaatggtgggttatatgaatgtagtaaatggtactccagaagagatatgtgggaactctgaggtttaatgcagacaggtgcccttagctgggtcaactgggaaatgaaatcctcaaatgaccagaagcctctttctagcaacaccatagtcttaatgcgtgaccttaggcaagtcacttacctgcacggtcctcacttgcctagctttaaaatgatgctcataatcgatacataaccagataatgcttacaaagagctctgagattcttggatgaaaggccctatttacatgtaaagtagtgttatcattcaaatcccccctctgctaaatactctgtaacaggtgtattaaaggagaggaaatgaggaaggagaaaaaggaaaattggctcctgaagggatagaaatctgattatctcaaattgactcattctgaaaagggggaagaggagggtagatctgctgcatttaaccatttccaaacagactttactttgaataagcgaataaacacaatgagaccaatctgtacattttccaatcatgagggaaaaaaaatctgagataagtccactaaacttctgagcataatccccctaaaaaacagtttcaaatacatgcmtgtggcttccattaatatgtaccactataaaaatttaaaatacatctatttcaccacttattgacacgtaattttatatatatatatatatatatatatatatatatata

SEQ ID NO: 1861 - DNA, 608 bp, Homo sapiens
agtaaagtggcagtgggacagcctactctcactgttgacatctgggatcctacctacaagagaacccacgacccccagagacattggaacaggcaggggcatctgcccagagagtaggcagaaatagaactacagccagccttgaacccagggggttttgcatgttgggtagctgcagcagaacgcagccataggcgcccaacatccaaggctctctttcttccaccaagtasctctcaactcacctgacttctgagcgaagagacagcggggccaactttcctgtgagctgggacacatctgtattgtaggcccttctgcccgccagtccctcccagtactcctgcctggccacacctgcaagaatatgtgcacagcacagcctccactgctcagcctgagggttttttcaaggacccccacctgagtacttcctcagtatccttggagcacttcagatcccccagtgtagctactgcctgaaccagaggggccagacagtggagacacaggctagtcccaaaaccccagggctgcagtgcatagcttgggagtgtgagctgagattggtgcccagcactcaagcagaggaagaattctgaatctca

SEQ ID NO: 1862 - DNA, 607 bp, Homo sapiens
ctttatctatttcctctagattttttagtttgtgtgcataaatgttcataatggtcttgataatctttatttctgtgagatcagtggtaatgtcacatttgtcatttctaattgtgcttatttggacatctctccttttttctttgttaatctaggtagtggtctatcartcttgtttatcctttcaaataaccaacttttcctttcattgatcttttgtataaatttttggatctcaattttgttgaattttgctcagtcatagcaactttagtgtcttcaaataaggttttagtggaacacagccattctcattcatttgcatattttccatagctgctttcatgctacaatggcagaattgagtagttgcaacagaaaacatggcccccaaagcttaagacatttattttcttaccctttatggaaaaagccaatctctggactagaacagtggtccctctcaacatcagtcagtgatgaatttttttttttaccaattcacagaaaaataccaaaaaaagtatttaaaaagtggctttttcataaagttaaacttactcaatttaaagaagagtcctttatcctcagttaacaccctcagtta

SEQ ID NO: 1863 - DNA, 607 bp, Homo sapiens
ctttatctatttcctctagattttttagtttgtgtgcataaatgttcataatggtcttgataatctttatttctgtgagatcagtggtaatgtcacatttgtcatttctaattgtgcttatttggacatctctccttttttctttgttaatctaggtagtggtctatcaatcttgtttatcctttcaaataaccaacttttcctttcattgatcttttgtataaatttttggatctcaattttgttgaattttgctcagtcatagcaaytttagtgtcttcaaataaggttttagtggaacacagccattctcattcatttgcatattttccatagctgctttcatgctacaatggcagaattgagtagttgcaacagaaaacatggcccccaaagcttaagacatttattttcttaccctttatggaaaaagccaatctctggactagaacagtggtccctctcaacatcagtcagtgatgaatttttttttttaccaattcacagaaaaataccaaaaaaagtatttaaaaagtggctttttcataaagttaaacttactcaatttaaagaagagtcctttatcctcagttaacaccctcagtta

SEQ ID NO: 1864 - DNA, 765 bp, Homo sapiens
ccagcttcatctgtgtccctgcaaaggacatgaactcatccttttttgtggctgcatagtattccatggtgtatatgtaccacattttctttatctagtctatcattggtaggaatttcttgagtgatggaaatattgtatatctccagtggaatggagggtatatgagtatgtgcatttgtctcatcaacctatamacagaaaatggtgcatattgtataaaaattatacctcaatcaagttgatttaaaaagaaaaatatccatgtgtttattatgatttgtgcactaaaattatttctcaagatatctctttcatagaggttccaaattggcctcaacatagtgccaggcagaaaactaggtaacattttacagtttaacgaaaagtaggccactgatgctgggaggagctgctctaacaatctaacaaatgaggcgattcccagtcaggcactggttaagggtgatggctggatttaggatgtctggatttgcatctagctcaccatctgccggctgagtgaccttgagaaagttacttaatttctctaagcatccattttctcatgtaaaaaatagggatacaatggtctcaatgttcctgtgtgtacaaagattaaactagacagcctatgtgaagagctcagggtatataaaattcttcatctatatgagctattatttcttatttcatctctcacaagaacacggagatacagaggagaaagaacacaggaaggagaagtgtatgcagctttatgca

SEQ ID NO: 1865 - DNA, 765 bp, Homo sapiens
ccagcttcatctgtgtccctgcaaaggacatgaactcatccttttttgtggctgcatagtattccatggtgtatatgtaccacattttctttatctagtctatcattggtaggaatttcttgagtgatggaaatattgtatatctccagtggaatggagggtatatgagtatgtgcatttgtctcatcaacctatacacagaaaatggtgcatattgtataaaaattatacctcaatcaagttgatttaaaaagaaaaatatccatgtgtttattatgatttgtgcactaaaattatttctcaagatatctctttcatagaggttccaaattggcctcaacatagtgccaggcagaaaactaggtaacattttacagtttaacgaaaagtaggccactgatgctgggaggagctgctctaacaatctaacaaatgaggcgattcccagtcaggcactggttaagggtgatggctggatttaggatgtctggatttgcatctagctcaccatctgccggctgagtgaccttgagaaagttacttaatttctctaagcatccattttctcatgtaaaaaatagggatacaatggtctcaatgttcctgtgtgtacaaagattaaactagacagcctrtgtgaagagctcagggtatataaaattcttcatctatatgagctattatttcttatttcatctctcacaagaacacggagatacagaggagaaagaacacaggaaggagaagtgtatgcagctttatgca

SEQ ID NO: 1866 - DNA, 639 bp, Homo sapiens
agggataatgctaagtggcatttttctagaaaagaatcaagtgattttcatttaacaaaagcatttatttaagatgagatgatgtgtatcttatgctttcagtttataggggtgactttcacaagtaaattatcattctacatttattttatacaaataattttttttttttwaaacagggtctcactctgtcacccaggctagaatgcagtggcatgatcatggctccctgcagcctcgacctctcaggctcaggtaatccttctacctcagcctttggagtagctgggaccacaaattagccagcatgcctggctaactgttatttttttgtagagacagggtctcgccatattacccaggctggcctcaaactcctggcctcaagcaatctacccacctcagcctcccaaagtgttgggattacaggtgtgagccaccacgcacagcctgacatttttaatgtaacatttattgcatcctaagtggcctttatatagaaacctcataaactatatatgctttctttaacactattataaatagctctgaaattacaaaaagctatcaaaacaatttttaaatacctgtatttctactgatcagcaatagctgcctttagcattttggtttttgtct

SEQ ID NO: 1867 - DNA, 639 bp, Homo sapiens
agggataatgctaagtggcatttttctagaaaagaatcaagtgattttcatttaacaaaagcatttatttaagatgagatgatgtgtatcttatgctttcagtttataggggtgactttcacaagtaaattatcattctacatttattttatacaaataatttttttttttttaaacagggtctcactctgtcacccaggctagaatgcagtggcatgatcatggctccctgcagcctcgacctctcaggctcaggtaatccttctacctcagcctttggagtagctgggaccacaaattagccagcawgcctggctaactgttatttttttgtagagacagggtctcgccatattacccaggctggcctcaaactcctggcctcaagcaatctacccacctcagcctcccaaagtgttgggattacaggtgtgagccaccacgcacagcctgacatttttaatgtaacatttattgcatcctaagtggcctttatatagaaacctcataaactatatatgctttctttaacactattataaatagctctgaaattacaaaaagctatcaaaacaatttttaaatacctgtatttctactgatcagcaatagctgcctttagcattttggtttttgtct

SEQ ID NO: 1868 - DNA, 664 bp, Homo sapiens
aaagctatgtatcactgtgcaaatctaaacactcctatccttgtagcatcaaccattcatcttattactggctaaagaatgcccatctcaaataaacaagtgtacaaggtagtgaggtacagggtgtgaggcaccagaggaggaaggcgcccgccttcagtgggatggatgacatgtgttcaaagatcttgagtagctttaacttgacggcaagggctacagtctaggctccaaatatatagtacacttcactctgtgtttgtttgttaagaagtgagaattgatcaccaagttcagtgggaactgttgtatggggattcagtaggcttgtatttttttctccaaagctcactgcatgttttttcttgcctttcctgygacccttacttagccatgtctccagatgatctcctagagcaaatctttaaattttaaaaacatccttgttaagttatgtagacattaccatatgctgaacctatcattactgttggactttgcttcccagacacggagaataaagcaggtgtctacttcttcctcttttgtggtgtcttcccatttaaatggcttattgatgcaagtactgcagcacaaatgaatgctgatgccagctctgcccatgtacatgcccacagaagaagcactgaagggatagcaagaa

SEQ ID NO: 1869 - DNA, 1600 bp, Homo sapiens
tcattttgaacagtttgcctgtggaggcaagagcttcacaaggtactgacatgggagacttgcgctaacattaaataaaatttacaggggccattggtttgggctgagctcctgcattaggcccaacaaaccaaagtaaactggagttactgatgctgaagttccacaccatcaagccaaaactaagctgtttatctgatcttctgaaaaaccaggagagagagagatttaatagcaaaatccccaaaagaggcccattttagctggcatgataaggaagtccccactgctttaasctttacaaggaaagtagctgaaacgatcaatccctttttgctctgtttctgctttcttcagctattttctgcccataaagccaaactctcctgctcagctcgttggaacactcattccattttatagaatgaagtgttgcctgattctagaattgcgaattaaagcaaatttgaactatgtttgttataattttgtcttttgacactaaccatggatgttcaactttttttggtggaaattatatttgcatatagaagagacataaaatataattagtaagcattctcaaattgccaacaatactaacacttttaaaaaactagcagttttatctcaaatgaataaaacgttgggataattctgtgaaatctttcactcctcttccaagtatgttgctttgaataaatacagcttaagaatctccctaacatattgttaccatgttactatgtgctgtaaatgcaatagtcttaaagaccaaattctaaccacaaccatgtatttcctttgttttatatatttaggtcaggcacttaacatggctttaacatagttcctttgtggtttaatttcctttgtgattatttattttatgtaatgggagtgtaaaaatgtcccaaggactgaaaacaaattgcagctcctttttaacataggcactaagaagtactctgttactttgcctttgggtgaatattaaactttcaggatcattttgggtaaaaaatgcaacagtgagacatttacattttcttaataaaacaaacacgggagactacattcacgggcattctttcacactctcttgggcccaagtcttataacaaacaaggaatgagaaaatatggactcctcagtgtgcaatgccactcagcagctcataacggctccctggagatatggaaggattcctggaagtatgaagaaggaaaggtgaactaaatcatcagggcaggaccccagggtcgctctgagcttcctaaccgtgcaaagggagatacgcatccagcttgtaagtgctaaagctgcaaagaggtttttcactccaaatttaccatcgagcctactaatgtgtgtttgctttgggcacttcagcttataccttgatagcgaacaggtctgttttaatggtacgtgtaattttcaattctcattaaaggtgttgtttctcaagacgggagtttttgtgggtttttttgttttgttttaatattcacttacctgttcatttagtaagtaacagaaatatattctcttatgctttggactttatgaacataatgtattcatcaaattttaaaat

SEQ ID NO: 1870 - DNA, 1217 bp, Homo sapiens
ggtgttcaagtgagacttgtggtttaacagaatttggctgtgcctgtgcctggttcttctggtttctggaataggtaaagtcacccctctccccaaataaaaagagaaaaattattagaaaagagatgaacaattgcygtggacaaaaagggaaaaggattggggttaaaactagagtatggcaagtgaggaatgagacaacagtttaaaatatgtttaagaaagatagattctggccaggcctgtggcttatggacgttcttttatttcagcttcctattcaaagaaatattctggcttgtcactgtttttacaatctgacatcacatattgtccaaagacagaattttcttaaattagatggaaatttcttttgcaaactgatcttaatctgcacttttgattgctattcttcaccccattcttatccaagaattagtagaaatcttcttcctgaaaagttatatcagtcattacaattaactaggtattggattgcttaaattcataattctttgctccgatagttcccagaattatgacaagtattcttttgttaatatgtttctttccttgttccttttttgcacgagcacacaaatgccttttctgtttagaagttcacccgatctaggctctgttcccccacaatctccacccctgttgaagtcataagtttctgaatatgacctcgtagtctagacttactgctgatgtgtgtattgtcacgtacaggatcttataaagtcagcgacgtgcatgtagatgcaggcctgctagaggattttgcaaggtacatggtgacgcacacgtccatgttttgttcactgggcaggattgaccccacaggctgttaagattggttactattttccaaatatttctaatggaagacttaacaatgaaaaagccagacctaattgctcttatttcatcagttagtaagaacaggcaaacgtttctcttttaaattagttcagatacttgtcttgagttaagtaaccatttctttcattatgaaggtgtttggtttttgagctgttgctttgtcatgcagttctgtgtttctctgaaacttagtttttaagagatttaagaaaatgttttcataatattatatgcaatccaaatggcacgggaaagaagtaccaaacaccttccttcattcagctattctctgtctctagtcattttctctattcatttgttattcattc

SEQ ID NO: 1871 - DNA, 1217 bp, Homo sapiens
ggtgttcaagtgagacttgtggtttaacagaatttggctgtgcctgtgcctggttcttctggtttctggaataggtaaagtcacccctctccccaaataaaaagagaaaaattattagaaaagagatgaacaattgctgtggacaaaaagggaaaaggattggggttaaaactagagtatggcaagtgaggaatgagacaacagtttaaaatatgtttaagaaagatagattctggccaggcctgtggcttatggacgttcttttatttcagcttcytattcaaagaaatattctggcttgtcactgtttttacaatctgacatcacatattgtccaaagacagaattttcttaaattagatggaaatttcttttgcaaactgatcttaatctgcacttttgattgctattcttcaccccattcttatccaagaattagtagaaatcttcttcctgaaaagttatatcagtcattacaattaactaggtattggattgcttaaattcataattctttgctccgatagttcccagaattatgacaagtattcttttgttaatatgtttctttccttgttccttttttgcacgagcacacaaatgccttttctgtttagaagttcacccgatctaggctctgttcccccacaatctccacccctgttgaagtcataagtttctgaatatgacctcgtagtctagacttactgctgatgtgtgtattgtcacgtacaggatcttataaagtcagcgacgtgcatgtagatgcaggcctgctagaggattttgcaaggtacatggtgacgcacacgtccatgttttgttcactgggcaggattgaccccacaggctgttaagattggttactattttccaaatatttctaatggaagacttaacaatgaaaaagccagacctaattgctcttatttcatcagttagtaagaacaggcaaacgtttctcttttaaattagttcagatacttgtcttgagttaagtaaccatttctttcattatgaaggtgtttggtttttgagctgttgctttgtcatgcagttctgtgtttctctgaaacttagtttttaagagatttaagaaaatgttttcataatattatatgcaatccaaatggcacgggaaagaagtaccaaacaccttccttcattcagctattctctgtctctagtcattttctctattcatttgttattcattc

SEQ ID NO: 1872 - DNA, 1217 bp, Homo sapiens
ggtgttcaagtgagacttgtggtttaacagaatttggctgtgcctgtgcctggttcttctggtttctggaataggtaaagtcacccctctccccaaataaaaagagaaaaattattagaaaagagatgaacaattgctgtggacaaaaagggaaaaggattggggttaaaactagagtatggcaagtgaggaatgagacaacagtttaaaatatgtttaagaaagatagattctggccaggcctgtggcttatggacgttcttttatttcagcttcctattcaaagaaatattctggcttgtcactgtttttacaatctgacatcacatattgtccaaagacagaattttcttaaattagatggaaatttcttttgcaaactgatcttaatctgcacttttgattgctattcttcaccccattcttatccaagaattagtagaaatcttcttcctgaaaagttatatcagtcattacaattaactaggtattggattgcttaaattcataattctttgctccgatagttcccagaattatgacaagtattcttttgttaatatgtttctttccttgttccttttttgcacgagcacacaaatgccttttctgtttagaagttcacccgatctaggctctgttcccccacaatctccacccctgttgaagtcataagtttctgaatatgacctcgtagtctagacttactgctgatgtgtgtattgtcacgtacaggatcttataaagtcagcgacgtgcatgtagatgcaggcctgctagaggattttgcaaggtacatggtgacgcacacgtccatgttttgttcactgggcaggattgaccccacaggctgttaagattggttactattttccaaatatttctaatggaagacttaacaatgaaaaagccagacctaattgctcttatttcatcagttagtaagaacaggcaaacgtttctcttttaaattagttcagatacttgtcttgagttaagtaaccatttctttmattatgaaggtgtttggtttttgagctgttgctttgtcatgcagttctgtgtttctctgaaacttagtttttaagagatttaagaaaatgttttcataatattatatgcaatccaaatggcacgggaaagaagtaccaaacaccttccttcattcagctattctctgtctctagtcattttctctattcatttgttattcattc

SEQ ID NO: 1873 - DNA, 685 bp, Homo sapiens
cttttctctcttctcaactattgcagaattcaaaataatactatgaagtaaatgtgactcttacaatagaaagactgccttacttaacttctccagccaaaatctctttcatgagaatgcactctacatgaggcaggggaaccctgatatctcttcaccactccttgtcattggcagggcaccgcaatccaaatagactggaagaagtccattggagatgtcttattccaatgaatactattaacttctgtttcaggcagcttacaagcctggggtgtgaggagatttggagagggccagcacagctgaggcttttattggttatggcaggcttttagccaggccctgctgytttaaaagcgaacagcatctttgtgcttgcagaggtaatggagctattagagcactactcaagagtaagaaaaaaccagtactcatcccacccccacacaatgggttaacacagttacaaggtaagataagcctcctccctccagccatggctcctcctttctgttttcccttgatgtgacagtgagctcatgaagtcaagctgcgtaaatctcaggagaagtaaatgagggagagacagagaaagagggaaagaaacgggactgcaataaaatagaacgaagaatggtcaagagtgagtttgaaaaaaacaaagaaaagagaagacacacta

SEQ ID NO: 1874 - DNA, 751 bp, Homo sapiens
gcatatgactgaaagaattttcttttttattgaatagtttaaacaattctgtcaatacctagggtgaaaaattaaccacatggggattttgcctgtctgtwgaaatctatagtcacctctctcccatccaccttaccaaatgtggaaacacatttaaattggcctattcttaaacactgaagacacataatatcagctaggcagaaagcaacaatacaacactcaaatataatctggggagttaagtccaaaaggctgaaaaatctaagaaaaatttatcagacttttatgtagtttctgcatgtataattctagaataataaacacttcctaatggtttggaactggatagaggtggtgtttgtacaacactgtaaatgtagtaaatgtcactgaattgttcactttaaaatggttaattttatgttgtatgaatttcaccacaattaaaaaatactttctgaactattgagctctttagaactaggaacttaaatgtaaaaagactctctactttttaaaatctcattttccttctttatatgctgatatagctacatctaagccactgctttcaaaggcttagagataacattttccctcctctcaattgattttttttcttttccattgggcaaatattgatttctctccactctgctcttcatgtgcagttagctctgctgcaactgagaatctttggggtctgagtctgtggcatgcagtttgtattgtaccaaacagaacagag

SEQ ID NO: 1875 - DNA, 648 bp, Homo sapiens
tgcattttaaaataaaataataattattttaaataatatattttaaataatgtattgtaaaataaaataattattttaaataatgtattttaaaataaaatacatattttagtttttttcctttctcttccttgtagttgaagaaaaattatttcacaaaaataaaaattattttgaattttggccacagtaaaaagcagttctgggaattcaaattccttatgccctagttaaacattattagtcaaaagctactgctcactagaacccctttctagaaatctatcctgtaatactgcatatataattcttacatctttatctaggatatttccaattttcaaatttgtatatgtgacctaattaaacaaaatagctcaagaggactgatattctaaataactaattcataaatgttgctaaaagtggtataattttataatttcctgaagagaaactagacaaaatttcctgtaacattacaaatcttaaaagaaacagggtagttttaagtgtgacagagttaattcatgaatgagatatatagactagaatactcatttttaaaaaatgtttattttgaagcaaaggatcattatctcaatctttagcttgtaccyggcagcctgtatttaaagggtttattct

SEQ ID NO: 1876 - DNA, 1100 bp, Homo sapiens
tatacgcagaggtcctggaagattgccggggcttaggggaagaaggaaatggggattgctgttcaatgggtataaagtttcaattatgcragatgaataagttctagaaatctgctgtataatatgatgtctgtagttaacaatactgtattgtgcacttaaaatttaagaatgtagatctcctgttaagtgctcttactacaaggaaataaaagtcatgtataagaaattctataatttttcatacactaaattcttatgtatgctatggtctcattttgggggaaggagagaaagatttgctctatatcattgttatgtctctgtttttttgccctagcttttggggagattttagccatagatagcttaccaccctaaaatagcacattcctaggatgatagtcttcttaattaatttttcaatgtgcattacacatacaataatatacatcccacttcatatagtcatctaattataaaagttttagcataaacacaacaattagaaaaataaggttacatttttgggtgagagaattgtgggtgactctgaggtatggttctgcaacttatgtaaggagcacaccaatgtatttttctgtctttaatgcaaaaagtatttattgagcaccttctctgtgtgccagttgttgttgaagacctgggatgacaaataataaataagtttccctaaaccaatgattagactcctgacttgacactagcagggttttcccagcacagataaatctggcaagcaaaggaaagctttagtgtcagatccaaaatgttagtgcaaatgaatgtaacctgagattgtcctaaatgggattgctgtagccaacgcataatatgttctttgaccttctgagattgactgaaccaaatttgtcatgagaaattgtctcctcttagatctcctatcattcttaacactagattacataacttaaaaaaaaagaaaagaaagaggatagaaaaaaagagtgtcatgaatcaatctaagattcttgtgaatcaaattatattctttgtatctatttttagagaaggtaattgaaactcaattttcagcactgtatactcagttttcattg

SEQ ID NO: 1877 - DNA, 1131 bp, Homo sapiens
tatggtactttattacagcagcccatgtcagccatattctattggttgaagtagtcacaaaggtccacccaagttttcagggaagagacaaagaccccccactcaataggtagagcatcaacatcacattgcaagaagaatacattgaatgggagaaaytatcttgggtattcatagaaaatataatttgccacactctgcttaccttgtaccatactacactataccacactggtactatactacgggacaagcagtatattctgatatattgtagtctactgttttttatgctgatgattaccactgaactgtgttaacaatctagtggctccccatcctcagtttgaaaaacactgtcctgtacaattgtaaattgagacaatagtaaaaaatttcccttctacactggcagaatgctttaagaaaataaatacagggattactgaaatagatcagaaagattaaagtaaaaataactgagcaaaatgaagtttgccacttttactttctaatacctgtttataagagcaatgtttggcaatctcagatgagttcattttataactgagtcaaaatcttaacatacatcattgcttaggccaaaataaaacctctaattattatggcaaaccatgatacctctatacttttttttatatataaaatgcctttttcaagtcaattgtagaaaatgtgcataaccaactgattgtaacacaatcctttaacttgattcattctttacttattcatacaaactatttaggtatggaatttaagagttccttgaagtcatcatctttgtgacaagatctctaagcaagcaagtggctggcgccgtaaaggctaaaggaagagtgatctaaatcttgttcctctgaatgggtcctggggacaatagtctgggtatcacctgagagcttgtagaaaagctcctgacaagtcagaatctgcattttaacaagataccccaggagattcctgaacccattcaggtttgaatagtactgaccgaaatcgatgttttccgaagtgtttagtttgtgcaacctatgagtaaaatatgtggcatgagtatatgtctatgtgtatctttgcataatacacatacactgctataatatttta

SEQ ID NO: 1878 - DNA, 1512 bp, Homo sapiens
ccataaggtcaagggcagcagtcacttgggctcttaaggcactggcttcagttggcactttatcacaatataccacaggcaatagtttgattaattaattgtgatgtcacacatgccctggattcctagtatcccatttcccagtagtaagaagctcagcactgcaatgaagcataggaataaatcaaaatattccccaaatgtcatcattggaggtctatctcctgggaccattcccagagcagaaatttcgtagcaatttgaactggaaaagtttaccataaataattattaattacaagctgggtgctgtggctcacgcctgcaatatcagcactttgggaggccgaggaaagtagatcacaaggtcaggagatcaagaccatcctggccaacatggtgaaaccctgtctctactaaaatgcaaaaaaattmgactggcatggtggcacgcgcctgtagtcccagatactcgagaggctgaggcaggggaatcgcttgaacccaggaggcagaggtttcagtgagccaagatcatgccactgcagcactccagcctgactacagagcaagactccatctcaaataaaataaaataaaaaattgttaattacaaaatatgggattgaagtcatggaggatttgttagtcataataaagactctaaaaatataagaacagcatatacaggaaacaactgttaccctttgggctgagatagcatgctcaaagaataatgttcaaggaaaaatcatgaactggaaatcccccccttactcagggcagagatccaaacctcactgaggaaggtgcatccatggctcactgaatagcaaaaaggccacggaggtcatgagctctcctgggagttactatgtgctgctggtcaccagccactgttaaaagcacacttacagaagccatgcacactgctggagccaggtgttgcagaaattgcgtgtaccgcaggagcctgtctttgggaactcacaggtaccaggaaataaaaccctttcttcctccagcgtccttttagtgccctctactgacaaagcttaatatctaccaacactattactgaataatgaagtgtatatttggactagagagtcaattaatttatggctctcacaaaatgctatattaggattatatttacagataatttttccaagcaagtatagacatgtactgtaatataatgtgaagaaagtaggagagtatttttgctaatggtaaacagtttacagacagttttttaaaagcatatctgccatgccttctctttgaacattgtaaatatagggatctagccaatttactcatgccacacttagatgtgtgaagaaaatgtatctttttcttggttatttttgcttatttgatttttcttatgatccctacctcctgggtaagggaaaaataatacgatgtaaatgttacaatttacaatcttcaattaaatcttttaagagtgttctttaaaaaaagtcattttaaatagattgctca

SEQ ID NO: 1879 - DNA, 1512 bp, Homo sapiens
ccataaggtcaagggcagcagtcacttgggctcttaaggcactggcttcagttggcactttatcacaatataccacaggcaatagtttgattaattaattgtgatgtcacacatgccctggattcctagtatcccatttcccagtagtaagaagctcagcactgcaatgaagcataggaataaatcaaaatattccccaaatgtcatcattggaggtctatctcctgggaccattcccagagcagaaatttcgtagcaatttgaactggaaaagtttaccataaataattattaattacaagctgggtgctgtggctcacgcctgcaatatcagcactttgggaggccgaggaaagtagatcacaaggtcaggagatcaagaccatcctggccaacatggtgaaaccctgtctctactaaaatgcaaaaaaattagactggcatggtggcacgcgcctgtagtcccagatactcgagaggctgaggcaggggaatcgcttgaacccaggaggcagaggtttcagtgagccaagatcatgccactgcagcactccagcctgactacagagcaagactccatctcaaataaaataaaataaaaaattgttaattacaaaatatgggattgaagtcatggaggatttgttagtcataataaagactctaaaaatataagaacagcatatacaggaaacaactgttaccctttgggctgagatagcatgctcaaagaataatgttcaaggaaaaatcatgaactggaaatcccccccttactcagggcagagatccaaacctcactgaggaaggtgcatccatggctcactgaatagcaaaaaggccacggaggtcatgagctctcctgggagttactatgtgctgctggtcaccagccactgttaaaagcacacttacagaagccatgcacactgctggagccaggtgttgcagaaattgcgtgtaccgcaggagcctgtctttgggaactcacaggtaccaggaaataaaaccctttcttcctccagcgtccttttagtgccctctactgacaaagcttaatatctaccaacaytattactgaataatgaagtgtatatttggactagagagtcaattaatttatggctctcacaaaatgctatattaggattatatttacagataatttttccaagcaagtatagacatgtactgtaatataatgtgaagaaagtaggagagtatttttgctaatggtaaacagtttacagacagttttttaaaagcatatctgccatgccttctctttgaacattgtaaatatagggatctagccaatttactcatgccacacttagatgtgtgaagaaaatgtatctttttcttggttatttttgcttatttgatttttcttatgatccctacctcctgggtaagggaaaaataatacgatgtaaatgttacaatttacaatcttcaattaaatcttttaagagtgttctttaaaaaaagtcattttaaatagattgctca

SEQ ID NO: 1880 - DNA, 1512 bp, Homo sapiens
ccataaggtcaagggcagcagtcacttgggctcttaaggcactggcttcagttggcactttatcacaatataccacaggcaatagtttgattaattaattgtgatgtcacacatgccctggattcctagtatcccatttcccagtagtaagaagctcagcactgcaatgaagcataggaataaatcaaaatattccccaaatgtcatcattggaggtctatctcctgggaccattcccagagcagaaatttcgtagcaatttgaactggaaaagtttaccataaataattattaattacaagctgggtgctgtggctcacgcctgcaatatcagcactttgggaggccgaggaaagtagatcacaaggtcaggagatcaagaccatcctggccaacatggtgaaaccctgtctctactaaaatgcaaaaaaattagactggcatggtggcacgcgcctgtagtcccagatactcgagaggctgaggcaggggaatcgcttgaacccaggaggcagaggtttcagtgagccaagatcatgccactgcagcactccagcctgactacagagcaagactccatctcaaataaaataaaataaaaaattgttaattacaaaatatgggattgaagtcatggaggatttgttagtcataataaagactctaaaaatataagaacagcatatacaggaaacaactgttaccctttgggctgagatagcatgctcaaagaataatgttcaaggaaaaatcatgaactggaaatcccccccttactcagggcagagatccaaacctcactgaggaaggtgcatccatggctcactgaatagcaaaaaggccacggaggtcatgagctctcctgggagttactatgtgctgctggtcaccagccactgttaaaagcacacttacagaagccatgcacactgctggagccaggtgttgcagaaattgcgtgtaccgcaggagcctgtctttgggaactcacaggtaccaggaaataaaaccctttcttcctccagcgtccttttagtgccctctactgacaaagcttaatatctaccaacactattactgaataatgaagtgtatatttggactagagagtcaattaatttatggctctcacaaaatgctatattaggattatatttacagataayttttccaagcaagtatagacatgtactgtaatataatgtgaagaaagtaggagagtatttttgctaatggtaaacagtttacagacagttttttaaaagcatatctgccatgccttctctttgaacattgtaaatatagggatctagccaatttactcatgccacacttagatgtgtgaagaaaatgtatctttttcttggttatttttgcttatttgatttttcttatgatccctacctcctgggtaagggaaaaataatacgatgtaaatgttacaatttacaatcttcaattaaatcttttaagagtgttctttaaaaaaagtcattttaaatagattgctca

SEQ ID NO: 1881 - DNA, 1512 bp, Homo sapiens
ccataaggtcaagggcagcagtcacttgggctcttaaggcactggcttcagttggcactttatcacaatataccacaggcaatagtttgattaattaattgtgatgtcacacatgccctggattcctagtatcccatttcccagtagtaagaagctcagcactgcaatgaagcataggaataaatcaaaatattccccaaatgtcatcattggaggtctatctcctgggaccattcccagagcagaaatttcgtagcaatttgaactggaaaagtttaccataaataattattaattacaagctgggtgctgtggctcacgcctgcaatatcagcactttgggaggccgaggaaagtagatcacaaggtcaggagatcaagaccatcctggccaacatggtgaaaccctgtctctactaaaatgcaaaaaaattagactggcatggtggcacgcgcctgtagtcccagatactcgagaggctgaggcaggggaatcgcttgaacccaggaggcagaggtttcagtgagccaagatcatgccactgcagcactccagcctgactacagagcaagactccatctcaaataaaataaaataaaaaattgttaattacaaaatatgggattgaagtcatggaggatttgttagtcataataaagactctaaaaatataagaacagcatatacaggaaacaactgttaccctttgggctgagatagcatgctcaaagaataatgttcaaggaaaaatcatgaactggaaatcccccccttactcagggcagagatccaaacctcactgaggaaggtgcatccatggctcactgaatagcaaaaaggccacggaggtcatgagctctcctgggagttactatgtgctgctggtcaccagccactgttaaaagcacacttacagaagccatgcacactgctggagccaggtgttgcagaaattgcgtgtaccgcaggagcctgtctttgggaactcacaggtaccaggaaataaaaccctttcttcctccagcgtccttttagtgccctctactgacaaagcttaatatctaccaacactattactgaataatgaagtgtatatttggactagagagtcaattaatttatggctctcacaaaatgctatattaggattatatttacagataatttttccaagcaagtatagacatgtactgtaatataatgtgaagaaagtaggagagtatttttgctaatggtaaacagtttacagacagttttttaaaagcatatctgccatgccttctctttgaacattgtaaatatagggatctagccaatttactcatgccacacttagatgtgtgaagaaaatgtatctttttcttggttatttttgcttatttgatttttcttatgatccctacctcctgggtaagggaaraataatacgatgtaaatgttacaatttacaatcttcaattaaatcttttaagagtgttctttaaaaaaagtcattttaaatagattgctca

SEQ ID NO: 1882 - DNA, 1244 bp, Homo sapiens
aaaaaaaatggtatttttttcctcctatcacatctttyaactcttctcggttggctcccctttccctgctcattgacaacatctctggaagatacaacagctcttttgtcactttcagttgtaagaacggtcttattttttgataattttcactttcaggaataaataatccttaggtggtccagtgtcaaaactgagcctcagatactgttctcctcactccacctggccaattttagttgggctgtgatccgtgatgtctttatctttatctcttttcccttctggatcttccagaatcaaaatgaggagataagagattaaaagaaaaagacaaaacatattttgtgacttacacaatttgtggccactggtgcccttaagtcatgatagacatttatgtgctggtttttttatgcagtgtgtgttatgttctttgagaataccattcccccacagcacacacatacacttttagattatggtcctgtgtatttgcctaactgaactcaccacttgcgagctccacacactcagtcctttcctcaacaaattgatcttttcaccatgcccaatttcctcttgtgtaaggatcccatcaagtgagctcacatctggatgctattgtacactcacctggcaactctgccccactctaacatgaaagtgtagggtgcaacctcttgttgcccctaccctgccattgtagagagttccagctgccttccatcttgtgtgttttttagaaaagcaggcatcattctttgcagtcaagtccccagcactgtgttggcatagattggactatttttgcagctttgcagacatctgtctagctaggacagcgagctagatgagagagagatgtccatcttgctttcttaaaagtcctcattctctatcagtgcttcttttggcaaatctgcccagccctacgaggagagcaagagaatagccacacaacactctctttgagtctaagacttactaactccacactctctcaataagttcatcttctgtattaagttattgtttatgtttctatttaaaatcaaagccaggaaaggctaactaatttgtttaaggacttatagctagtgggtggcataactaggatttgaacttgtatatctaaagttctaaagtctatcttaattacaacattataccgtcataatataatttgtgcatgcctaagtcaaccatgctactgatacattagctttaagaaaacatttttt

SEQ ID NO: 1883 - DNA, 1244 bp, Homo sapiens
aaaaaaaatggtatttttttcctcctatcacatctttcaactcttctcggttggctcccctttccctgctcattgacaacatctctggaagatacaacagctcttttgtcactttcagttgtaagaacggtcttattttttgataattttcactttcaggaataaataatccttaggtggtccagtgtcaaaactgagcctcagatactgttctcctcactccacctggccaattttagttgggctgtgatccgtgatgtctttatctttatctcttttcccttctggatcttccagaatcaaaatgaggagataagagattaaaagaaaaagacaaaacatattttrtgacttacacaatttgtggccactggtgcccttaagtcatgatagacatttatgtgctggtttttttatgcagtgtgtgttatgttctttgagaataccattcccccacagcacacacatacacttttagattatggtcctgtgtatttgcctaactgaactcaccacttgcgagctccacacactcagtcctttcctcaacaaattgatcttttcaccatgcccaatttcctcttgtgtaaggatcccatcaagtgagctcacatctggatgctattgtacactcacctggcaactctgccccactctaacatgaaagtgtagggtgcaacctcttgttgcccctaccctgccattgtagagagttccagctgccttccatcttgtgtgttttttagaaaagcaggcatcattctttgcagtcaagtccccagcactgtgttggcatagattggactatttttgcagctttgcagacatctgtctagctaggacagcgagctagatgagagagagatgtccatcttgctttcttaaaagtcctcattctctatcagtgcttcttttggcaaatctgcccagccctacgaggagagcaagagaatagccacacaacactctctttgagtctaagacttactaactccacactctctcaataagttcatcttctgtattaagttattgtttatgtttctatttaaaatcaaagccaggaaaggctaactaatttgtttaaggacttatagctagtgggtggcataactaggatttgaacttgtatatctaaagttctaaagtctatcttaattacaacattataccgtcataatataatttgtgcatgcctaagtcaaccatgctactgatacattagctttaagaaaacatttttt

SEQ ID NO: 1884 - DNA, 1244 bp, Homo sapiens
aaaaaaaatggtatttttttcctcctatcacatctttcaactcttctcggttggctcccctttccctgctcattgacaacatctctggaagatacaacagctcttttgtcactttcagttgtaagaacggtcttattttttgataattttcactttcaggaataaataatccttaggtggtccagtgtcaaaactgagcctcagatactgttctcctcactccacctggccaattttagttgggctgtgatccgtgatgtctttatctttatctcttttcccttctggatcttccagaatcaaaatgaggagataagagattaaaagaaaaagacaaaacatattttgtgacttacacaatttgtggccactggtgcccttaagtcatgatagacatttatgtgctggtttttttatgcagtgtgtgttatgttctttgagaataccattcccccacagcacacacatacacttttagattatggtcctgtgtatttgcctaactgaactcaccacttgcgagctccacacactcagtcctttcctcaacaaattgatcttttcaccatgcccaatttcctcttgtgtaaggatcccatcaagtgagctcacatctggatgctattgtacactcacctggcaactctgccccactctaacatgaaagtgtagggtgcaacctcttgttgcccctaccctgccattgtagagagttccagctgccttccatcttgtgtgttttttagaaaagcaggcatcattctttgcagtcaagtccccagcactgtgttggcatagattggactatttttgcagctttgcagacatctgtctagctaggacagcgagctagatgagagagagatgtccatcttgctttcttaaaagtcctcattctctatcagtgcttcttttggcaaatctgcccagycctacgaggagagcaagagaatagccacacaacactctctttgagtctaagacttactaactccacactctctcaataagttcatcttctgtattaagttattgtttatgtttctatttaaaatcaaagccaggaaaggctaactaatttgtttaaggacttatagctagtgggtggcataactaggatttgaacttgtatatctaaagttctaaagtctatcttaattacaacattataccgtcataatataatttgtgcatgcctaagtcaaccatgctactgatacattagctttaagaaaacatttttt

SEQ ID NO: 1885 - DNA, 1244 bp, Homo sapiens
aaaaaaaatggtatttttttcctcctatcacatctttcaactcttctcggttggctcccctttccctgctcattgacaacatctctggaagatacaacagctcttttgtcactttcagttgtaagaacggtcttattttttgataattttcactttcaggaataaataatccttaggtggtccagtgtcaaaactgagcctcagatactgttctcctcactccacctggccaattttagttgggctgtgatccgtgatgtctttatctttatctcttttcccttctggatcttccagaatcaaaatgaggagataagagattaaaagaaaaagacaaaacatattttgtgacttacacaatttgtggccactggtgcccttaagtcatgatagacatttatgtgctggtttttttatgcagtgtgtgttatgttctttgagaataccattcccccacagcacacacatacacttttagattatggtcctgtgtatttgcctaactgaactcaccacttgcgagctccacacactcagtcctttcctcaacaaattgatcttttcaccatgcccaatttcctcttgtgtaaggatcccatcaagtgagctcacatctggatgctattgtacactcacctggcaactctgccccactctaacatgaaagtgtagggtgcaacctcttgttgcccctaccctgccattgtagagagttccagctgccttccatcttgtgtgttttttagaaaagcaggcatcattctttgcagtcaagtccccagcactgtgttggcatagattggactatttttgcagctttgcagacatctgtctagctaggacagcgagctagatgagagagagatgtccatcttgctttcttaaaagtcctcattctctatcagtgcttcttttggcaaatctgcccagccctacgaggagagcaagagaatagccacacaacactctctttgagtctaagacttactaactccacactctctcaataagttcatcttctgtattaagttattgtttatgtttctatttaaaatcaaagccaggaaaggctaactaatttgtttaaggacttatagctagtgggtggcataactaggatttgaacttgtatwtctaaagttctaaagtctatcttaattacaacattataccgtcataatataatttgtgcatgcctaagtcaaccatgctactgatacattagctttaagaaaacatttttt

SEQ ID NO: 1886 - DNA, 1244 bp, Homo sapiens
aaaaaaaatggtatttttttcctcctatcacatctttcaactcttctcggttggctcccctttccctgctcattgacaacatctctggaagatacaacagctcttttgtcactttcagttgtaagaacggtcttattttttgataattttcactttcaggaataaataatccttaggtggtccagtgtcaaaactgagcctcagatactgttctcctcactccacctggccaattttagttgggctgtgatccgtgatgtctttatctttatctcttttcccttctggatcttccagaatcaaaatgaggagataagagattaaaagaaaaagacaaaacatattttgtgacttacacaatttgtggccactggtgcccttaagtcatgatagacatttatgtgctggtttttttatgcagtgtgtgttatgttctttgagaataccattcccccacagcacacacatacacttttagattatggtcctgtgtatttgcctaactgaactcaccacttgcgagctccacacactcagtcctttcctcaacaaattgatcttttcaccatgcccaatttcctcttgtgtaaggatcccatcaagtgagctcacatctggatgctattgtacactcacctggcaactctgccccactctaacatgaaagtgtagggtgcaacctcttgttgcccctaccctgccattgtagagagttccagctgccttccatcttgtgtgttttttagaaaagcaggcatcattctttgcagtcaagtccccagcactgtgttggcatagattggactatttttgcagctttgcagacatctgtctagctaggacagcgagctagatgagagagagatgtccatcttgctttcttaaaagtcctcattctctatcagtgcttcttttggcaaatctgcccagccctacgaggagagcaagagaatagccacacaacactctctttgagtctaagacttactaactccacactctctcaataagttcatcttctgtattaagttattgtttatgtttctatttaaaatcaaagccaggaaaggctaactaatttgtttaaggacttatagctagtgggtggcataactaggatttgaacttgtatatctaaagttctaaagtctatcttaattacaacattataccrtcataatataatttgtgcatgcctaagtcaaccatgctactgatacattagctttaagaaaacatttttt

SEQ ID NO: 1887 - DNA, 560 bp, Homo sapiens
gctacacctgccacattagcaacagccccatgtggctggcagctaccaaagcggacggtcgcagacaagcagattccggcaccgcagaaagggaggcgccagacagcgctgcccgcctggacctgccgttccctcagccagcgcaagttgctctcatgagcctgggccagctccccacatgacagctcctgctccggacggagccgccgtctcctcccaccacacacttgtcgatgcactcagccacagagaagtcactggtgttctaacaacctgcacattactgatccgtccccacgcatcagaaaacaacaaagctcagaacatggattactctgaatcaatactgttcaggatattatttggtcatgccaaagttgaccctgattacccagtcactattgtcacctcaagtctttgtccagtgataacagttaatatkaaaacaatccatggccgggtgtggtagctcacgcctgtaatcccagcactttgggaggccgaggtgggtggactgcctgagctcaggagttcgggagcagcctgggcaacatgggaaa

SEQ ID NO: 1888 - DNA, 631 bp, Homo sapiens
aaacatattcggaagtgtggggggaaatatatgatttggctttttttttttaaatagacatttatgaaaatagaacctgctagcaaagcaggatttcgttaaaaaaaaaaaaaaaaaacatacaargggtgcattggcttcattctgtcagagttgacattctacctgcacataattgggtttgtgaatgacaggtttctgaggaataaggcatgatttaaagagaggagattctgcattctcctctaccccaaaacaacctctgcaaatcctctaccccaaagttgcagcattaaatcatggcttccgtatctcagcagccataattagccctttcatggcatacacagtattgtcaggcggagaccctttttttaactatctccaagtagcttggtcatctgcaccaggggccgttatcatttggaaaatgactaacaatctataccaattaacttgcctgccattacttgaaaggattcatcatgagtagactggggacagggttgggggcaggaatacttatccttgaaattttgacaggttttttacaacaccgaaccctgaaccacaaggtctttgtttttttggaaaagggttaggatgaaggcaaaaaagggatcttccttta

SEQ ID NO: 1889 - DNA, 631 bp, Homo sapiens
aaacatattcggaagtgtggggggaaatatatgatttggctttttttttttaaatagacatttatgaaaatagaacctgctagcaaagcaggatttcgttaaaaaaaaaaaaaaaaaacatacaaggggtgcattggcttcattctgtcagagttgacattctacctgcacataattgggtttgtgaatgacaggtttctgaggaataaggcatgatttaragagaggagattctgcattctcctctaccccaaaacaacctctgcaaatcctctaccccaaagttgcagcattaaatcatggcttccgtatctcagcagccataattagccctttcatggcatacacagtattgtcaggcggagaccctttttttaactatctccaagtagcttggtcatctgcaccaggggccgttatcatttggaaaatgactaacaatctataccaattaacttgcctgccattacttgaaaggattcatcatgagtagactggggacagggttgggggcaggaatacttatccttgaaattttgacaggttttttacaacaccgaaccctgaaccacaaggtctttgtttttttggaaaagggttaggatgaaggcaaaaaagggatcttccttta

SEQ ID NO: 1890 - DNA, 631 bp, Homo sapiens
aaacatattcggaagtgtggggggaaatatatgatttggctttttttttttaaatagacatttatgaaaatagaacctgctagcaaagcaggatttcgttaaaaaaaaaaaaaaaaaacatacaaggggtgcattggcttcattctgtcagagttgacattctacctgcacataattgggtttgtgaatgacaggtttctgaggaataaggcatgatttaaagagaggagattctgcattctcctctaccccaaaacaacctctgcaaatcctctaccccaaagttgcagcattaaatcatggcttccgtatctcagcagccataattagccctttcatggcatacacagtattgtcaggcggagaccctttytttaactatctccaagtagcttggtcatctgcaccaggggccgttatcatttggaaaatgactaacaatctataccaattaacttgcctgccattacttgaaaggattcatcatgagtagactggggacagggttgggggcaggaatacttatccttgaaattttgacaggttttttacaacaccgaaccctgaaccacaaggtctttgtttttttggaaaagggttaggatgaaggcaaaaaagggatcttccttta

SEQ ID NO: 1891 - DNA, 631 bp, Homo sapiens
aaacatattcggaagtgtggggggaaatatatgatttggctttttttttttaaatagacatttatgaaaatagaacctgctagcaaagcaggatttcgttaaaaaaaaaaaaaaaaaacatacaaggggtgcattggcttcattctgtcagagttgacattctacctgcacataattgggtttgtgaatgacaggtttctgaggaataaggcatgatttaaagagaggagattctgcattctcctctaccccaaaacaacctctgcaaatcctctaccccaaagttgcagcattaaatcatggcttccgtatctcagcagccataattagccctttcatggcatacacagtattgtcaggcggagaccctttttttaactatctccaagtagcttggtcatctgcaccagkggccgttatcatttggaaaatgactaacaatctataccaattaacttgcctgccattacttgaaaggattcatcatgagtagactggggacagggttgggggcaggaatacttatccttgaaattttgacaggttttttacaacaccgaaccctgaaccacaaggtctttgtttttttggaaaagggttaggatgaaggcaaaaaagggatcttccttta

SEQ ID NO: 1892 - DNA, 630 bp, Homo sapiens
gactaggcctcttytctggatccacaaccgtgtccagcccagaatcaggacccccaaacgtgtctgggaccctgtccctttcattctggtctagacaagtccccacacgtggccaaaggacagcacccagactctgcccctgaccagtcaatgtgcagcaaacccacttcagtaggcagaagagtctacccctagggagaaggcgccaggagcaggcaggtgggagggaaagtgttcggcagggcagaaaccctgcctggctgtatccaactgtcactcccactggaggcgctgtgtatgcagggcccggcagtaagcccagctgcctacagccaaggcccagcgacagacatcctccttcggtagcagcagcagcctgtcctcctccagccggctcaggaggcctgccacacccagcatcgcccccccccacatcccataagtgttggccgtgaagacagctacaatgaggatggtcactgcgaccaccaacagcattgcctgaccagccacagagcggccctcagggccgaggtggccgccagccactgccagcaccatgcctcctcccaggagcaggttggcagaggagcggtccccattcacccagtggaaatcgaaggccagaag

SEQ ID NO: 1893 - DNA, 651 bp, Homo sapiens
ttctgggacaagtgtgagccaccacgcctggcctgacttccaacatttaaaggttgggccgacaaagaggagctgtcgatagaggagaaaaagatagagtggccactgttataaaagccaagagaagaaaatatggaagaaggagggagtggttaactgtgtcaaacactgcttaaaggtcaagtaagatgaatacaaatggttagatttgctttgtggaaggtgttggtgatcttgacgtgtgcaatttcagtagagtggagggaatagaaacccaactaagatgttcagtaaggaaggtgagggatgataagaggaaattgggcagtagtaatagggatacaaagaaatgcacagacattagaaccattctggtgagacaaggtatagggggaatgaagaaagtaatcatagtttgttttttttttctttttttgaggcggagcctcgctctgtctctcaggatggagtgcaatggtgtggtcttggctcattgcaamctctgcctcccaagttcaagcgattctcctgcctcagcctcccaagtagctgggattacaggcgcccactgccacgcctggctgatttttgtatttttagtagagatggggtttcaccatgttggccaggcttgtctcaaactcctgacct

SEQ ID NO: 1894 - DNA, 600 bp, Homo sapiens
gtgaactcaataatcaaaagaccagataaaagacattagagaagactcaaataaatggtgagatcatctttggtcatgtatagaaagtacaaatcccaggaaattaccaaaagtatttttcttggaacttgaaaagcctattctaaagtgtataygcaagagaaaatggctaagattcactgagaaaattttgaagaagaataaaatgaaggagggtgggttgggggtgggctgcttatccatcatctttataacaagatgcattatagcatcattttaatttagacaatggtattggcatagtgatagccaaataaaacaatagaactaaggaaaatcacaaagcaaatctaatatggaaacttgacagatgataaatgggtgtaacagatcactatgaaagggaccgattatttattaaacggtgctaaaacaattatcaatccatgtgagaaaaaatgtatggacccttcacatcattgcaaaaagaaaccacttataataaagatatgaatacccaaaagcaaacctttaacatttttagaaaatggtatagaaaaatatttttatggccttggagtagggaaaaatttctttaaa

SEQ ID NO: 1895 - DNA, 938 bp, Homo sapiens
tgcagcggcatgattttatagtcctaccgaatgtgacatcaggcctgatgttaatatgctctgtagatgaagaaagctaaggatttcatcatttggacagcgaataaggtctggtcaccagtcctggaatttatgggagggcagccagtccttgagactttgaaaagggaatgctgatgggcttcgcctccagccctgcctcagcttgagccaaccatgtcaaaggcaagcaacttagccgtgtactatagagcaggaaattaactcaaggtcagcagtcccaagagtggagatgtgaacgatgcactgtgaatgctcaaatgtatctcagcctcagtaccctcaccatcccaaaatactgaccaacttcaggaaatgaatatgaattgtcttacctagcactcttgtaattcactaatatgggaaggcagccctgagcctcaagttccttaaccaactcttgctaactcccaacctttggggtcacagggcactggacggatcctgtgcttcagctggtcagtacctggctggatccaagccttgaacgaacagaccaacagaagctatgcttctctacacttccctgcacaccactcatgtctggaattcccatcttgaccacagcctggggggtggcctctccccagcacctatgaaaaccacacctgatgttcgaacacacatcagatgcccattggawcctgtcctcagatcttctggctaacctggctgaagtagcctctgcaactggggttttcatctcacctaagtctgtatctcagattttttcttcttcccaccagtataagttttggcaagtgcagcaagggtgccaactcccattatgacatacatggtcagggtggagttaggtgcgggaccatgtattagaaactgtagaagtttaagggatcttttttttcggtataaatgca

SEQ ID NO: 1896 - DNA, 938 bp, Homo sapiens
tgcagcggcatgattttatagtcctaccgaatgtgacatcaggcctgatgttaatatgctctgtagatgaagaaagctaaggatttcatcatttggacagcgaataaggtctggtcaccagtcctggaatttatgggagggcagccagtccttgagactttgaaaagggaatgctgatgggcttcgcctccagccctgcctcagcttgagccaaccatgtcaaaggcaagcaacttagccgtgtactatagagcaggaaattaactcaaggtcagcagtcccaagagtggagatgtgaacgatgcactgtgaatgctcaaatgtatctcagcctcagtaccctcaccatcccaaaatactgaccaacttcaggaaatgaatatgaattgtcttacctagcactcttgtaattcactaatatgggaaggcagccctgagcctcaagttccttaaccaactcttgctaactcccaacctttggggtcacagggcactggacggatcctgtgcttcagctggtcagtacctggctggatccaagccttgaacgaacagaccaacagaagctatgcttctctacacttccctgcacaccactcatgtctggaattcccatcttgaccacagcctggggggtggcctctccccagcacctatgaaaaccacacctgatgttcgaacacacatcagatgcccattggaacctgtcctcagatcttctggctaacctggctgaagtagcctctgcaactggggttttcatctcacctaagtctgtatctyagattttttcttcttcccaccagtataagttttggcaagtgcagcaagggtgccaactcccattatgacatacatggtcagggtggagttaggtgcgggaccatgtattagaaactgtagaagtttaagggatcttttttttcggtataaatgca

SEQ ID NO: 1897 - DNA, 1000 bp, Homo sapiens
ttaatttcagaaattttacctgtatttttaatctcatttagaaatgaatagtagccataaaagaggcccttattgactgcccagagtggtgggtcacaaggtaacatgttctgagaatgctgggatgcaacctgccaagagatatatggatgaaacaaatcagaccatgcaaccgcactgcactcctgggaaaaatgctttttaaaaaaataaagataatacatgttttttatttaaagtttagaagttgagaaaataacgatgacaaaaacaatgctcctayacccatctgttctgagcttaccacttgaaacccattattgaaatagaaaccagtttgtcactggtaagcttgaggttcctacatgtcaccatgtagcatgacatagcagaactgtcatcgaaacctcagtcagaattttgtatttctcaacaaaacgtatacccataggatactaatgggcacagtccattacaaagacataatatcattttctatatttattatcataacacattctcacacctatagagtagtttgtatttaatattgtcttttaggcttctgattttgacattggataatgttggtgctgacctctgactgccaggttctcaaaggacagcctcatttttataatttattccccctttcttggtctcttggtacaatgctaaacaatataatgcacaaagcaaacaaagcaaataactgaatatacacctttttgctctatctggtaaggcaaatatacccacttaattcacaccttaataatttattttaaaaaatgttaatctcttttctttaggagcttttcccttggctccttttcctgcagacaaagtaggtagtttactttgtccaaagtcgtgttaagtacaaatgaaataatgatgagctttatgtaggcagattcctccctcctttttatatattaccatttttctcaattagtttatatgctaacatattgtaaacagaaagacttgttagtaa

SEQ ID NO: 1898 - DNA, 608 bp, Homo sapiens
gttcttcacttcacacaaatgattgtcctttagataytaattttaaaaatattaacacaaggtccctcctctaaatccctttggccacagtttgagttcacatccatgccatctccacctgctcactgcaataccttctgtcttgctccctaccctcagccagagtcccaccctcacccccactacctccccactctcattacagagcaagatcaaaacagctccaaacccgaccaggcatttttaaagaataatgctgtttatgaaacttctttaagtaagaaataaatcctttaatggtttcccagtacctgcaaggtaaattccgaagtctttaaccacgtgcatcttgcttttcttttctccttgtgaggcacattccaccatatgtgttctacactggagttatacaaactccaattcttggcctgcccatttttaggttggaaaatcaattcagtaggtctaggccagcattatataatcaaatataataaaatagaacagaacagaacaggttatggcacacataataaagttaaccattgcttcttgatgttttgtttcagtatgtatgtggtagaagatgtaaaatgtattacctattg

SEQ ID NO: 1899 - DNA, 608 bp, Homo sapiens
gttcttcacttcacacaaatgattgtcctttagatattaattttaaaaatattaacacaaggtccctcctctaaatccctttggccacagtttgagttcacatccatgccatctccacctgctcactgcaataccttctgtcttgctccctaccctcagccagagtcccaccctcacccccactacctccccactctcattacagagcaagatcaaaacagctccaaacccgaccaggcatttttaaagaataatgctgtttatgaaacttctttaagyaagaaataaatcctttaatggtttcccagtacctgcaaggtaaattccgaagtctttaaccacgtgcatcttgcttttcttttctccttgtgaggcacattccaccatatgtgttctacactggagttatacaaactccaattcttggcctgcccatttttaggttggaaaatcaattcagtaggtctaggccagcattatataatcaaatataataaaatagaacagaacagaacaggttatggcacacataataaagttaaccattgcttcttgatgttttgtttcagtatgtatgtggtagaagatgtaaaatgtattacctattg

SEQ ID NO: 1900 - DNA, 1284 bp, Homo sapiens
tatactgataatcagcctctctctgcccttcagtgagaaagacaagtgtttcccctctcttccttacgctgcgactatatttcaggtgtaaagctgccctggtggtcatttgggtcttagttcactgcatgaaattctgggccaagaaatacatggtaaggagcctttcatcctgctgtcagagccacttgcagatgtgaggatctgagaatctataggaagatggacactatcagggcatcatatcccttcagtcttgtacagagcaggacctgggaagctgattttctccatggatctcccaatgtaccatgcagaatccagagatgctactcccaggatagagcaggagcagaagggagagaaaagaacttccctcacatgatagagagtggtcgatgtccctcacatggtagggagtggctgatgtccactgcctcaacagctctcgtggcttccttatcttacctggccatttcctaaaagttggaagatttgatttgccttcatatttctgggtacccaagaattcagagtaagatatatgaccagacctccctcctagacagatggctagagcagacttctttggagtgattgatgattcagtggcacttctgcctgggccaacaccgaggctgggggatctgaagctgcagagtcatccttgtaagcagacagatttactctttgtgagtcaggtttgtaaccagctcagagcacccttccacaggactacctcaggaccatctgctttctgttggatgtgcaaactcacatccacacacttgcctcctgctttgccatggctgggatggaatgacacattgctctccctctcacagcgctctgtaacagaaagcatctcccttcaagtcgcctcagtcccgccccttgagctcagaaaagtgaggatggcttgtcragactgaaaaatttttattcctgtatatcttcaccatactgtgatgagttagttaaaagtaatctgtttactaaagcaaattcagtgatcctcctggcaggaggtggggagggtgtactttacgttataaaagttgagcagaatacagtgtttcaaatgtgcatcttatacctgacccctgttcttaaatcagagagcctttgcccaaggtattgacttgttggttctcacttgaatgtctcctggactacatgtgagcttccccctgtgctatattctttgtgagatcaaggacaagaggtactggtttatttatataatactatgcctgatacatcttagcactcaaatatgtgatg

SEQ ID NO: 1901 - DNA, 1284 bp, Homo sapiens
tatactgataatcagcctctctctgcccttcagtgagaaagacaagtgtttcccctctcttccttacgctgcgactatatttcaggtgtaaagctgccctggtggtcatttgggtcttagttcactgcatgaaattctgggccaagaaatacatggtaaggagcctttcatcctgctgtcagagccacttgcagatgtgaggatctgagaatctataggaagatggacactatcagggcatcatatcccttcagtcttgtacagagcaggacctgggaagctgattttctccatggatctcccaatgtaccatgcagaatccagagatgctactcccaggatagagcaggagcagaagggagagaaaagaacttccctcacatgatagagagtggtcgatgtccctcacatggtagggagtggctgatgtccactgcctcaacagctctcgtggcttccttatcttacctggccatttcctaaaagttggaagatttgatttgccttcatatttctgggtacccaagaattcagagtaagatatatgaccagacctccctcctagacagatggctagagcagacttctttggagtgattgatgattcagtggcacttctgcctgggccaacaccgaggctgggggatctgaagctgcagagtcatccttgtaagcagacagatttactctttgtgagtcaggtttgtaaccagctcagagcacccttccacaggactacctcaggaccatctgctttctgttggatgtgcaaactcacatccacacacttgcctcctgctttgccatggctgggatggaatgacacattgctctccctctcacagcgctctgtaacagaaagcatctcccttcaagtcgcctcagtcccgccccttgagctcagaaaagtgaggatggcttgtcgagactgaaaaatttttattcctgtatatcttcaccatactgtgatgagttagttaaaagtaatctgtttactaaagcaaattcagtgatcctcctggcaggaggtggggagggtgtactttacgttataaaagttgagcagaatacagtgtttcaaatgtgcatcttatacctgacccctgttcttaaatcagagwgcctttgcccaaggtattgacttgttggttctcacttgaatgtctcctggactacatgtgagcttccccctgtgctatattctttgtgagatcaaggacaagaggtactggtttatttatataatactatgcctgatacatcttagcactcaaatatgtgatg

SEQ ID NO: 1902 - DNA, 578 bp, Homo sapiens
ctggccattgttaagatgacacagcctgcactcttggtggaccatgacttaagagagccactggaacaagacacacagaccttgtacacagcaccactcctgcatgcctctcattccaagttccccttttaaaatccctctctccacgctgggcatggtggctcatgcctataattccaacactttgggaggccaaagtggggcaatcgcttgaggccaggagtttgagaccagcctgctcaacatggtaaaaccccatctctactaaaaatataaataaaattaataaaaaataaaataaaatccctctctgtagcctaaagtttagaatgttcttttcagggcataagcctagccattccccagatgctaactttgaataaagttttcttttcaccatacattgcttctcwtatttttggcctctgagcagcgagccagcagacttgcttggggttacaaatttggtgccccatgtgaggactgtgcattttgattccacttgcctgtcttcctggtttccaatgagctaggcaattagctgtggcagtgttccagaaattaactgttcaagctac

SEQ ID NO: 1903 - DNA, 1009 bp, Homo sapiens
gatatacacttatttggtaattatgagagttaaatggatgagaacatgtaaagcatctagaacagccctcagtacacagtgtcaataaacacaagctgtttttatttttaattaataatttttgttttttagagacagggtcttactctgtcaccaagactggtatacagtgctgccatcgtagctcactgcagcctccaattcctaggctcaagcgatcttcccactgcctcctgagtcgctgggaatacaggtgtgaagaagcttttttttttttcttttgagatggagtctcactctgttgcccaggctggagtgcagtggtgcgatctcggctcactgcaacctccacctcccgagttcaagcgattctcctgcctcagcctccctagcagctgggactayagtcacgcaccaccacacccggctaatttttgtatttttagtagagacggagtttcatcatgttggtcaggctggtctcaaactcttgaccttgtgatccgcccgcctcggcctcccaaagtgctgggattacaggcaagagccacggcaagccataggtttagcagttatatgccactcccctgccttatgttccgctctcccaataccatattgacaggtaaatctctagtgagtgaatatattattatcatctaaaactatttatgaataacaagctctgagactcctgcagttacatttccattcttgactaatgtgttggtttttttcccagaaaccacttattcccccaaattagtaacatcttcattgattttttaaaatttttaaacattttcatgacacttgttatttgaaatattactaactgatgactatttatattaaaaagttaaaatcatggcctggcaaaatgctcttttatcactatttagaatttcctattttgtgaatcccatgtcctcctctttctttttaatttcctcttttttgggagcatttttcccagtaacttccacagaaagtgttcatggaatatgca

SEQ ID NO: 1904 - DNA, 606 bp, Homo sapiens
gatgcagcttttgctgaaatccagcggacttctctccctgagaagtcaccactctcatgtgagacccgtgtcgacctctgwgatgatttggctcctgtggcaagacagcttgctcccagggagaagcttcctctgagtagcaggagacctgctgcggtgggggctgggctccagaatatgggaaatacctgctacgtgaacgcttccttgcagtgcctgacatacacaccgccccttgccaactacatgctgtcccgggagcactctcaaacgtgtcatcgtcacaagggctgcatgctctgtactatgcaagctcacatcacacgggccctccacaatcctggccacgtcatccagccctcacaggcattggctgctggcttccatagaggcaagcaggaagatgcccatgaatttctcatgttcactgtggatgccatgaaaaaggcatgccttcccaggcacaagcaggtagatcatcactctaaggacaccaccctcatccaccaaatatttggaggctactggagatctcaaatcaagtgtctccactgccacggcatttcagacacttttgacccttacctggacatcgccctggatatc

SEQ ID NO: 1905 - DNA, 606 bp, Homo sapiens
gatgcagcttttgctgaaatccagcggacttctctccctgagaagtcaccactctcatgtgagacccgtgtcgacctctgagatgatttggctcctgtggcaagacagcttgctccsagggagaagcttcctctgagtagcaggagacctgctgcggtgggggctgggctccagaatatgggaaatacctgctacgtgaacgcttccttgcagtgcctgacatacacaccgccccttgccaactacatgctgtcccgggagcactctcaaacgtgtcatcgtcacaagggctgcatgctctgtactatgcaagctcacatcacacgggccctccacaatcctggccacgtcatccagccctcacaggcattggctgctggcttccatagaggcaagcaggaagatgcccatgaatttctcatgttcactgtggatgccatgaaaaaggcatgccttcccaggcacaagcaggtagatcatcactctaaggacaccaccctcatccaccaaatatttggaggctactggagatctcaaatcaagtgtctccactgccacggcatttcagacacttttgacccttacctggacatcgccctggatatc

SEQ ID NO: 1906 - DNA, 762 bp, Homo sapiens
aattttctgtaattacattccataggaggaacatgttgaaaataattgtataagaattctgcatcttttttgtgggagtccacttttagttttttctgttttgagaacttaacaggaggctggcccaagggctgtggcttataaaattcagaagatgctaggcaggatgctggggtgtcgttgatgatgatctcatccaaggtcttggcaaaaggcttgcccatggtttctggccatgccccatccctatctgagacacatgagagcctgaaaagataagcatagcagcttcttctcaaatggtcatgggacttctcaacccagtggcagagtccatgggtaaactgctttggtggtgaaatagttaaaaaaaactttggcaaagtgcttctttctcctgccttagcattagaattcattcgatgtaatggttttgacaatgccttgagcataattacagtgaaatatttttcccctctctacaccacagttcttacagttttattaragaacagtttcacaaaagcttttaaatatttattttcaacttattaaattatagcatgtgctatgtcatttttatgagaagggggtgtgttttcttaggatataagggagggaagattgttttgcagtataattaaaagagtattaaaagggaatggtgattagtgagtgcagtgcagtaacctgcaaaaaaggtttagaaaaaaattcagttgcttccattttgttcagtgtttttggagtaggcatgatgca

SEQ ID NO: 1907 - DNA, 624 bp, Homo sapiens
tgggagcattgctaataacatgaaaagtcagtatcttgaaaacaagtagggtcccctcccctggaatattgaagagatatgaagactgtatcttcaagtacctgaggggagacctaatacaacgagttctgtgactttctgccagacccggtgcagggaatccatgaactggtcaggcctcctgctctgcttggggacccatagccagaaaatgtgctttaggttctaatacagtcagaattacattaattatttggtttactgaaaactcaggccaggtgcagtggtttacatctgtaatcccaacgctttgggaagckgaggctggaggattgcttgagcccaggagttgaagactagcctgggcaacatagggagacccccgtctctataaaaaataaaaaattagctgggcatggtggtgtgcacctgtagttccagctcctcgggaagctgaggtgggagcatcccttgatcccgatcccaggaggttgaggctgcagtgagctataatcacaccactgcactccaacctgggttggagactctggaaaataaaaatataaagagagagagagagagagaaagaaagaaagatagattaaaaaagaaagaaagaaagaa

SEQ ID NO: 1908 - DNA, 1388 bp, Homo sapiens
tgtggccttcactgtagtgaaatagaagatcagatcttcaggactatcaatccaatacctttcattggctatacatttacttaagaaatattgttttcaaacaaatgtacttgctcccaggaggctgtgtggttgagtcaatttgctttgcctaatacttacgatttgctctcagtgattttaaatgcacaggcaccattcagtgtaattgatcttttgagtagaaggattatggcaagccatgttcttctttgtcacttatagaagttaaaagcaaatgcacatacaagctgatgaactggatattttccatattctttgcaaacatttcacttttagaagcatacatctgttttatacttgctaaaggatatacaacccaaagctttctatttctactaataattaagagcccttttttcttttacaacagcatgggtatattttattctactggagagtcacttaaatagttgaggacaaatgtgaatcccacttacacatcttctgtggaacagcatgatatgtgtataactctgaatcattcgagtatcatctccatgtgaatatgcatgtggttagaatagaggagtggacacagtctggaaatggtttgggtctggtttgttatttagttatcctgttaatatccttctacctatctgtgcttgctgtttgaacgggactggggttcaactttggatctccaacatggaacaataaagtctacatcgttcagtgaactttgggcataattactgtgtctaggacaccactacaatttcttttcactgttgtcttcctgcccatccttgaactcaccataatttgaaaaggcagtagatcatagaaaactaccaaaagaccaaccaagagctaaatagtttcttcatagcttctctcattttgcttttgctcaatttcaaattcttgggagtttccatagctaagcactgaaatgtgggcctattcccagtcaggaaccagataatcctttttgttggtatatatgttatgatgtagaaaatgaggagtcacttaaaaaaaattcaatggagaattccatttatttgtaggatttctttttctttgaggattcagagttggaaatgaagtgcctttggccttagagaataagatacaggcaaccacaacagcctggaattatcctcctttcctaaaataattctgctgtcccgagtgacttacagccctgtggacccaacccagggtagggcggagacaggaggcagggtagtgagatgtgctttgaatctatctatgtccaggagtacyccttgccctaggagatttggggaacaaagtaagaggatgtcaactctccatctcctggcaaagagccacttgcttgtgcagtttaatttttt

SEQ ID NO: 1909 - DNA, 594 bp, Homo sapiens
tgaagctaagtattcctcttcctttcctgaaataaatttgattgttctctctgactctgtgttttgactctttctccacattccaacgtaaggatctttctaaatcacatactctacttctttatttagctctcatcatctccagagaataataactcagctctttaaattggtgcccaagggtcttcataatctgagttagacatctccagctctgtctcctgctgtttccccagtaatactaagcaattgtatctccttcgacacctttctgtgagctactcatatgagtatctcagatatactttcatatctcactgtygttaggatgaatgtgtgtgacatgccttataaagcatttatgcatttgaagcacaaaaaatatttagagaccctaatatttcaaatatatacttgtgtctttcttaattttatgattatttttcataaggttgtcttttccaatagacttatagaagactctatggttcttagagttactacatagatgattcaataacagagattcagatttattgactgagagtatcatactggggggaaaattatcaaaatagattctatttctggttc

SEQ ID NO: 1910 - DNA, 730 bp, Homo sapiens
tctataagtgagaccacatctttaaaaacaaaacaaaacaaaaaaatagcatagtatttgcatataaactatgctcatccgcctatatactttaaatcatctctagagtacttatgtataaatagctgttatacaatactgcttcatttgtattattttttattgttgtatttttccccccaaatgcttttgatccacagatgtggaacccatggatacagagggctgagtatacttggattcagagagctcacatttcaccacagctggggagagtatctgggagtgtggatagatattgcttcacttagaaaggccaggccaactatctatcaccctaaaattagatatacaactggatataatgtaatttttaaaattatttaccttatgtactaagagtggtactttcaaaagaaaaaagaaaaaactcttacccagacaataagcccatctcaagaaccaggctggcaaaaacaactgaaccagtttgtctggcaaaaacaaactgaatattgaaaagtaaaacagacttaacagaatccagcactcttctccctttcaggctgtgtttactcttgtggcaaagacragcagggggccaaagagaggcataaaacttgttttttatcaaagtcatcagttctgacacgttagacgaaggaatgcaaagacattatggagggggtattgaccagggaaaatagaaaagagttttttcttactacaa

SEQ ID NO: 1911 - DNA, 730 bp, Homo sapiens
tctataagtgagaccacatctttaaaaacaaaacaaaacaaaaaaatagcatagtatttgcatataaactatgctcatccgcctatatactttaaatcatctctagagtacttatgtataaatagctgttatacaatactgcttcatttgtattattttttattgttgtatttttccccccaaatgcttttgatccacagatgtggaacccatggatacagagggctgagtatacttggattcagagagctcacatttcaccacagctggggagagtatctgggagtgtggatagatattgcttcacttagaaaggccaggccaactatctatcaccctaaaattagatatacaactggatataatgtaatttttaaaattatttaccttatgtactaagagtggtactttcaaaagaaaaaagaaaaaactcttacccagacaataagcccatctcaagaaccaggctggcaaaaacaactgaaccagtttgtctggcaaaaacaaactgaatattgaaaagtaaaacagacttaacagaatccagcactcttctccctttcaggctgtgtttactcttgtggcaaagacaagcagggggccaaagagaggcataaaacttgttttttatcaaagtcatcagttctgacacgttagacgaaggaatgcaaagacattatggagggggtattgaccagggaaaatagaaragagttttttcttactacaa

SEQ ID NO: 1912 - DNA, 1013 bp, Homo sapiens
gcaagtgttagagggaagattccatcacaggcactgatttgagataaaaaagcgtctccacggccgaaatcaactcctctcacaaagccagcaatattcactacatctagaaaggcagaaattttgcgtgctagtttgtggtcctgacaaagaaagtcaaatctttcatctggcacaggtactctcctctagttagaatcaacagtttagaataggaagtttactgctgaagtctgactactggttaatacagtgaagatggcagatttccaaacatttggcaatccagcaacactaattttcagtgagattccaaatcttccaataattgggagtggtttaattccatcacctccctttttgggggtcatcatccttggggtgggcaatgatatggggtatcagtgtcagcgagggacaggtcctgctggcagtcagaggtagacaggaaggaagagagagcaggcctggcccctctgctaagtggcatgctgagcagtagtctattttaggtcaatttttgttctttaatttttttcaagataatttcttttctttacttttcttttttttgaaacagagtcttgctctgttgcccaggctggagtaagtggtgcaaacttggctcactgcaacctccaggtcctgggttcaagcgattctcctgcctcagcctctctagtagttgggactacaggcatgcgccaccacgcccagctaatttttgtatttttagtagagatggggttttaccatgttggccaggctggtctcaaactcctgacctcaggtgatccgcccaycttcgcctcccaaagtgtgggattacaggcgtgagccaccgagcccagccaagagaattcctaagactagccatgacatgattatgtgtctttcttttaatttactctcataaatacaaataaggcaattatttagaatgagaaatctctataatcttttttttttaattgagggatctttctgatttcagggatccattttttggccac

SEQ ID NO: 1913 - DNA, 579 bp, Homo sapiens
ggatgacaggtatgagccaatgcacctggctccttgttttgttttttagaggcaggatcccaatctgtcacccagactagggtacagtgtcatgatcattgctcatkatagcctagaactacttctgggctcaagtgatcctcccacctcagtttcccgagtagctaggactacagggtcatgccaccatgcctggcgcctagctatttttaaaagattttgcagagatggggtcttgctatgttgctcaggcttgtcttgaactcttgatcttgtgatccacccaccttggcctcccaaagtgttgggattacaggcatgagccactgcacccagcctttatcattattattattatttttgagacagagtctctgcccgggagggaggtggggggcagcccccgcccggccagccgccctgtccgggaggtggggggcgcctctgccaggctgccctgtctgggaagtgaggggcccctctgcccaaccgccaccccgtctgggaggtgtatccaacagctcgttgagaacgggccatgatgacgatggcggttttgtcaaatagaaaaggggaaaa

SEQ ID NO: 1914 - DNA, 520 bp, Homo sapiens
cacccttcacaaagcctccactgtagtcaatctcctaactccccaacaacacttagactttcctgcatcagtgtttctcctaaggactatttttgttcactacattctacatgtctggaaaactgtcttctctgtctacatatttcaatcatatccattcttgaatatccagctcgtattttttcttcttctttgaaactattttcttagacttgctatacaaattctcatttgtaaaaagcttatttgttagccaatctgtacagcatcatctgctctcaactcacttgtttactatcatattaggacttctcgcagtgcctacctagwatgggatagaggttcaataaagagtttccaaacatctaaactccaaaatatcttcaactactctcttgaaattttctttaaattgcatatttttatttttctattgtcttcctacctaaacctctttgagagaaagaactatgcttattgtatacttttcctgatcttgctaaattcattgcttaaagtg

SEQ ID NO: 1915 - DNA, 1079 bp, Homo sapiens
tgcatgctgaaaaaaataattgaagcttcagttttctctatatttacaaacatttaactgacatacatataaatacatgactataagaatgtatagacagcacttgtgtgcaatctgctgtatggcttctgtgaatgtcactggagaagactccttatggcacagatttattcattcccacagtttttatttcattttggcagaagattactcagagttttagggtttgtccaatcagcttttaactaagcccagcatacaatgccaataatgaattccctacctaaacccaactaactatgtgaatgctccagatgttcttagctcaaacatctgttgcttaaggcaggggggaggttctgcattgtaccatacctgagttacttgctacatttacatacttcatatgggaggctaattcaatccactgaattttaatataggtcactgtacagaggtcaccaatcatgatagaataataaaatagtgataatttaatgataaaccagtaaaawgaagtaattatgaactaagaagaactccaaaagaaaatcactttactcaatctcagtttgctatggcagtagtatatatattttattacatgttttctactgaataattacaatattataaatacaatagtcataccatggtcccagtaacactgacaaggcctttgaaggacttggagagataaagtctgggctccaggaccacacccgtactttgggccagatcatctaggcttctattcacatagtcagttatttatttgacatattgttctgcactttttgttggaataaagaattccaaggctaactacatatagcctagctccctcattttacagatgagcaaaaagagaccagagaaaataagtccgatcaaccagattaaataatacagtaaatgaaaacttggattagaatctagttttcctaattatctagtactctatgccctgcacaatactccctcctttatgtcaaaacatccctactataaacccatgtgtatatggcaaatccaaattggtggcaagtcagtatcagattcgtttcaaaagaaatgca

SEQ ID NO: 1916 - DNA, 567 bp, Homo sapiens
tgaaaattctagattttcagcttttcttagaaaatgaatgatctggcaacactgggtccatattcctgtgaagccacacacaggggcatctgagtagctaccgctcctttatatagggcatgagctctttcctgttctcacatctgccacccagcctgctctctcaagcacatgctgacgtggcccaccccgcaagcatgaagatttgcactttttgttttggggaaagaggaaagaaaagcaaggaaggaaattagccaggtgtggtggcacgcgcctgtaatcccagctactcgggaggctgaggcaggagaatcgcttgaacccgggaagcrgaggttgcagtgagctgagatcacgccactgcactccagcctgggcgacagggcacgactccatctcaaaaataataataataataataataaagaaaaaaagaaaagcaaggaaggcatgattgattctgtctgcgaggtgtctgggacgatgacaaaggaaaggacatttgagctggagcactggagatggtacttggtaaacatgaaacagaccaaaaatccagcaagt

SEQ ID NO: 1917 - DNA, 533 bp, Homo sapiens
taacttgtcacagttttcttctactgcatgtgaaaagcagaaagttgttgtagagatatattttcaccccgtgtagccagaatagttttgttgccctggtgccaggaaaagrcttctttgtaaatatatatccccactatggtacgagatcatagaaattaattcatcttgcttaagcattgtttcctcgaaggagagagtttttataaataatcctgggagaagttactcagtatgtaagcaatgccttactgtgcatatgtttgtcaaagtaattttccccgtgactggacaggcctgggatggacccacagcaatcagcagttactgggtggaaaggaaataagagtctcaaagcagagggaaacagtgacacaggctgaggaattaaatgactattgtgacttcttttatatcattgattactttatatcgcaatctgaaatcagcaaaaatatttctagagcttatgcattctctatgaacatttaaacatttattacaatatgttaattaaaatgatgcatgcataa

SEQ ID NO: 1918 - DNA, 577 bp, Homo sapiens
tgtgagtatagagcaagcttgtccaagctgtggcccgtgggatgcatgtggtccaggacggctttgaatgagaccaaacacaaatttgtaaactttcttaaaacatgagattttttgtgtgtgatttttttttttaaagctcatcagttatcgttagtgtattttatgtgtggcccaggacaattcttccagcgtggcccagagaagccaaaagattgaatacccctggtatagaggaataagcagcaaacaaaaaatgaaatggggagtcyctctgaaactaatctgcttctgggactgcccaattaaaaaaaaattaaaaagggctgggcacagtggctcacacctgtaatcccagcactttggaaggccgaggcaggtggatcacctgaggttaggagttcgagaccagccagaccaacatggaaaaaccccgtctctactagaaatataaaattagctgggcgtggtggcgcatgcctgtaatcccagctactcaggaggctgaggcaggagaatcacttcaacccaggaggcagaggctgcagtgagtcgagattgtgccattgcactccag

SEQ ID NO: 1919 - DNA, 611 bp, Homo sapiens
gtggaggcctggagaggggctggagtgatgagctccaaggcagagagccccaagcactagaaaaagatggttaatcactctttgttctgctaaacagcccgtgagattagggcttaaccttcagcctctgattttaaaggttattaaatagcagagtagataatttccttcgatactactcctgtgttatcttttgtatttttgctatttgtgtttcaaaaagtgaaaatgctagttagtagtttctacactacttacatttaaatattgtctttgggtttgcagccaccaccactctgcagccatcaccatctagtctgcagagactagaactgccaattgctgttgggggtgagcggcatctatccaggctggtgggatggtggtaaaagaatttaccaagacagttgtaggtaaagaaaggcagatttttttttttttttttttttttttgagacggagtcttgctgtttcacccaggctggagcgcagtggcatgatcttggctcactgcaacctctgcctcccaggttcacgccattatcctgcctcagcctcccragtagctgggactacaggtgcccgccaccaaacctggctaattttttgta

SEQ ID NO: 1920 - DNA, 1527 bp, Homo sapiens
atcacaccagggattccgcagggagccaggcctcgaacccagggccccaggtgcttttgcgcacccagtaagcattgactgggcacccatgcatgttgaggctggggcttcagggctgttatttgatgacatgcccttgtctttgagtgtgtggcagtgtgcatgcgcctgtgtgtttgttttgttttgttttctgtggaaagaacacaaacccaaggcaaacagcctgcatttcaacatctcctggagccgtggaaaccagtaactccctggacaggaaggatttccggttggactcagtgcccatatccagaggcagctggctgctgaggacccaggagagagcagagtccaccaaagaaatggccggcaagggatccagagagggtggccctgctctgggctaaagctgaggccccaccgggaaaggtctcacctagcacactcacccagcaggcaggtggcagagccaggatttgattgaacttggagttctcacctcccagtgcagcgtatcagggcagagctgggacagacacagagttgcaaaggtcagaccaggagtgagggtccagggctgggtggtctcaaagggcaagagaccaggcaagaagaaggaagttggggttaggttgttccaaagtgtaatgtttgccaggtttgtgagagcccccctggcatctgctcaagcccaaaaaggggagacttgccctgggaagagaacagggggagcttaacccgcctggagcaccagagcccatcggagcccaagggccccccctggcaggaccctgacaaggctctacttggaatgtgtgacacagagcctcatgtccttatctgtaagctgggggcaatcaggacacactgagtggcaggagacacctgggcagctcccgcacacagccctggggtggccacctctctcccaccagcccccactgtggtgctgaagctccyaggctcaggctaccagccggcttctgcgctggactccggccataggctggagttcctcccggttttctggcctcatgcatcctcctaacagtcctggcagaagccagggcagagaacaacatgtcagtatgtcgggtgcataaactgaggcctggggaagccctgctgccccagattgacaagcagggacctccaccacacccttcaacctccactgtctgcgctgtttccgatcctgaccagggccaccgagcggattcccaccagcctgtccagtccttccttcagcaaacagctgtctgtcagtgtgtcctgggacctggcccagagctctgagctaagcctgggacccatagtctgctggggagtcaagcccccacctgccctcctcagagaccctggtcctcctccctacagcctggtaaacccagggctaggcatctgaatgccacccttccaggggctgcctcctgtgcagcctgtgcccggctcctgcccaggtgtttggaggtggggagaaggggccgggaataccccaaatgagggatggaggcccagggtggcctt

SEQ ID NO: 1921 - DNA, 1527 bp, Homo sapiens
atcacaccagggattccgcagggagccaggcctcgaacccagggccccaggtgcttttgcgcacccagtaagcattgactgggcacccatgcatgttgaggctggggcttcagggctgttatttgatgacatgcccttgtctttgagtgtgtggcagtgtgcatgcgcctgtgtgtttgttttgttttgttttctgtggaaagaacacaaacccaaggcaaacagcctgcatttcaacatctcctggagccgtggaaaccagtaactccctggacaggaaggatttccggttggactcagtgcccatatccagaggcagctggctgctgaggacccaggagagagcagagtccaccaaagaaatggccggcaagggatccagagagggtggccctgctctgggctaaagctgaggccccaccgggaaaggtctcacctagcacactcacccagcaggcaggtggcagagccaggatttgattgaacttggagttctcacctcccagtgcagcgtatcagggcagagctgggacagacacagagttgcaaaggtcagaccaggagtgagggtccagggctgggtggtctcaaagggcaagagaccaggcaagaagaaggaagttggggttaggttgttccaaagtgtaatgtttgccaggtttgtgagagcccccctggcatctgctcaagcccaaaaaggggagacttgccctgggaagagaacagggggagcttaacccgcctggagcaccagagcccatcggagcccaagggccccccctggcaggaccctgacaaggctctacttggaatgtgtgacacagagcctcatgtccttatctgtaagctgggggcaatcaggacacactgagtggcaggagacacctgggcagctcccgcacacagccctggggtggccacctctctcccaccagcccccactgtggtgctgaagctcccaggctcaggctaccagccggcttctgcgctggactccggccataggctggagttcctcccggttttctggcctcatgcatcctcctaacagtcctggcagaagccagggcagagaacaacatgtcagtatgtcgggtgcataaactgaggcctggggaagccctgctgccccagattgacaagcagggacctccaccacacccttcaacctccactgtctgcgctgtttccgatcctgaccagggccaccgagcggattcccaccagcctgtccagtccttccttcagcaaacagctgtctgtcagtgtgtcctgggaccyggcccagagctctgagctaagcctgggacccatagtctgctggggagtcaagcccccacctgccctcctcagagaccctggtcctcctccctacagcctggtaaacccagggctaggcatctgaatgccacccttccaggggctgcctcctgtgcagcctgtgcccggctcctgcccaggtgtttggaggtggggagaaggggccgggaataccccaaatgagggatggaggcccagggtggcctt

SEQ ID NO: 1922 - DNA, 1527 bp, Homo sapiens
atcacaccagggattccgcagggagccaggcctcgaacccagggccccaggtgcttttgcgcacccagtaagcattgactgggcacccatgcatgttgaggctggggcttcagggctgttatttgatgacatgcccttgtctttgagtgtgtggcagtgtgcatgcgcctgtgtgtttgttttgttttgttttctgtggaaagaacacaaacccaaggcaaacagcctgcatttcaacatctcctggagccgtggaaaccagtaactccctggacaggaaggatttccggttggactcagtgcccatatccagaggcagctggctgctgaggacccaggagagagcagagtccaccaaagaaatggccggcaagggatccagagagggtggccctgctctgggctaaagctgaggccccaccgggaaaggtctcacctagcacactcacccagcaggcaggtggcagagccaggatttgattgaacttggagttctcacctcccagtgcagcgtatcagggcagagctgggacagacacagagttgcaaaggtcagaccaggagtgagggtccagggctgggtggtctcaaagggcaagagaccaggcaagaagaaggaagttggggttaggttgttccaaagtgtaatgtttgccaggtttgtgagagcccccctggcatctgctcaagcccaaaaaggggagacttgccctgggaagagaacagggggagcttaacccgcctggagcaccagagcccatcggagcccaagggccccccctggcaggaccctgacaaggctctacttggaatgtgtgacacagagcctcatgtccttatctgtaagctgggggcaatcaggacacactgagtggcaggagacacctgggcagctcccgcacacagccctggggtggccacctctctcccaccagcccccactgtggtgctgaagctcccaggctcaggctaccagccggcttctgcgctggactccggccataggctggagttcctcccggttttctggcctcatgcatcctcctaacagtcctggcagaagccagggcagagaacaacatgtcagtatgtcgggtgcataaactgaggcctggggaagccctgctgccccagattgacaagcagggacctccaccacacccttcaacctccactgtctgcgctgtttccgatcctgaccagggccaccgagcggattcccaccagcctgtccagtccttccttcagcaaacagctgtctgtcagtgtgtcctgggacctggcccaragctctgagctaagcctgggacccatagtctgctggggagtcaagcccccacctgccctcctcagagaccctggtcctcctccctacagcctggtaaacccagggctaggcatctgaatgccacccttccaggggctgcctcctgtgcagcctgtgcccggctcctgcccaggtgtttggaggtggggagaaggggccgggaataccccaaatgagggatggaggcccagggtggcctt

SEQ ID NO: 1923 - DNA, 648 bp, Homo sapiens
agcaccacagcactccaacctgggcaggcaacagagcaagatcccatctcaaaaaaaaaaaaagacagctgacatttggattcttgtttggctggtgatctagtttttctgtcatgcaaaaccctggaggaaaagagggatgggtgataggaatcagactctaaattccaccctaaacttccagttagcggtgccttagactggctggtgatacaacctaatatgaaatggctatatcagattcatctctttgagaatctgaacttggaagaactgagccctcagcagatgtggggagagaagagacacatgtgagaggctgtgtgatagttgccttagtatttgatgatgctgtgatcagctgcaggccatagtctccctacaaatagttaatgaacacactaatgaagttcaatcacgtttatgaataaacactgattaaaacaatgagatagatgtcttcttctttttcttttcttactcaaaatgtcagtaaccctgttggcaggcrtataagaacagttgtgctcttacactttgctattgaaagtataaattgatagactttctggaagacagcttggaaatacataaatatatactgaaactttaaaattatgcgtgtcctttgacccaacaattacactt

SEQ ID NO: 1924 - DNA, 631 bp, Homo sapiens
  misc_feature (1)...(631): n = A,T,C or G
cagaatatgatcctgtgtccaaacaaatgacaggttttctgtctaggtactgtcatctgtcttcttgtttcaaataatgtttttcattccccattttgatctagatctgtcttttagttctcctgaactttgcagcaggaggtgtagnttatcatatttacactttagtatctacttaacagtgttttctattgaaaaagactgtaagatttgcaatgtggtaattattttgttctcctgtcagttaccagcaacattgtgcagcttgatttgtttttttaatccaatctccccacatccctcccccacaaattgagtgaaatagtagtttttgataaggcacagagccttatcaggctcaggcatgttttagataagctaagtcttgtcaagtctgactctgtagatctctcataactaatgcacaatgaaataatrtgatagaatagaaataaaacctaagttcttggacctgaccatcatttactgccctgggcaagttgtgtggcttctctgagccttggttttcttgtctgcaagtagagattttctgtcctgcctatctgccaggtaattgttaggatcaaacaatataaagactgctagagaaatgtaaaaattctgaaatgcc

SEQ ID NO: 1925 - DNA, 1232 bp, Homo sapiens
gcattagactgatgatgcagacatcatacttctcagtattatgttgccataagtttggaggagagaacaccgaggcttgctttgggaaggttgcttcagatcacacagccagggccacgagttaagaatgccagtttccatctgtcctttcgtattttacttaagtccacagaagagtgagcagaaactgatagaggctagaggccagagatgagccggaataatttgtttggctttggaatgaattgcaatacacacacacacacacacacacacacacacacacacattgtgttgctcttttcacctggcttgtctctgttctgctttagtttttctcggttgtcaaggatctaggatgtgggtcagctgacagtgtgtttgtcctggagcggtcaccatgggcaccgttggaggagactggttccctttgaagggacgcctacgtaacatcccggccttgtcatcagaaggcctgggcatgagctctgggtctgcccacactggccccatgatgttagccaagtcacttcccgttagttaagtctctcctggtctctacaccagtacagtggaatggtgagttgggactgggtcccaccttgccggtctgagaacaggctcgttctgaacattcactcccaatcatttccatcttcccttctttcttgctgtagggctttggggaacaaaacacaggaccgggggcaatgagtgacaccgaactaaatgtctgccgatcggccggtttcccccaagttcactcactcatctcctggagggggtgcaatgaaagcttgtcctcaatttactttgagatatatcccatgatatttttaagcaacgcatttgtattcctaatagtatttgcctcaggtcctataaaaatgagtccataatccttgggtgaagcccagactccattggttctttgactgctgataaacccattgagtaattgagcccaagtggatagatgtgagtcagttctcatgctaggctcrtacaaatgttctcattgataatgaatggttgtacaaagtatttttacctattatctctttaaaactacccaaagtcctgtgatgataccacgactccccgtagagaccgatgaggaagtggggcttcagacggaggcagacttgcctgaggccaggatcccctccacagctgcaggtggaaccagtgagctgccaggtgggaggcagctcccaggccaccctttcatg

SEQ ID NO: 1926 - DNA, 1232 bp, Homo sapiens
gcattagactgatgatgcagacatcatacttctcagtattatgttgccataagtttggaggagagaacaccgaggcttgctttgggaaggttgcttcagatcacacagccagggccacgagttaagaatgccagtttccatctgtcctttcgtattttacttaagtccacagaagagtgagcagaaactgatagaggctagaggccagagatgagccggaataatttgtttggctttggaatgaattgcaatacacacacacacacacacacacacacacacacacacattgtgttgctcttttcacctggcttgtctctgttctgctttagtttttctcggttgtcaaggatctaggatgtgggtcagctgacagtgtgtttgtcctggagcggtcaccatgggcaccgttggaggagactggttccctttgaagggacgcctacgtaacatcccggccttgtcatcagaaggcctgggcatgagctctgggtctgcccacactggccccatgatgttagccaagtcacttcccgttagttaagtctctcctggtctctacaccagtacagtggaatggtgagttgggactgggtcccaccttgccggtctgagaacaggctcgttctgaacattcactcccaatcatttccatcttcccttctttcttgctgtagggctttggggaacaaaacacaggaccgggggcaatgagtgacaccgaactaaatgtctgccgatcggccggtttcccccaagttcactcactcatctcctggagggggtgcaatgaaagcttgtcctcaatttactttgagatatatcccatgatatttttaagcaacgcatttgtattcctaatagtatttgcctcaggtcctataaaaatgagtccataatccttgggtgaagcccagactccattggttctttgactgctgataaacccattgagtaattgagcccaagtggatagatgtgagtcagttctcatgctaggctcgtacaaatgttctcattgataatgaatggttgtacaaagtwtttttacctattatctctttaaaactacccaaagtcctgtgatgataccacgactccccgtagagaccgatgaggaagtggggcttcagacggaggcagacttgcctgaggccaggatcccctccacagctgcaggtggaaccagtgagctgccaggtgggaggcagctcccaggccaccctttcatg

SEQ ID NO: 1927 - DNA, 1232 bp, Homo sapiens
gcattagactgatgatgcagacatcatacttctcagtattatgttgccataagtttggaggagagaacaccgaggcttgctttgggaaggttgcttcagatcacacagccagggccacgagttaagaatgccagtttccatctgtcctttcgtattttacttaagtccacagaagagtgagcagaaactgatagaggctagaggccagagatgagccggaataatttgtttggctttggaatgaattgcaatacacacacacacacacacacacacacacacacacacattgtgttgctcttttcacctggcttgtctctgttctgctttagtttttctcggttgtcaaggatctaggatgtgggtcagctgacagtgtgtttgtcctggagcggtcaccatgggcaccgttggaggagactggttccctttgaagggacgcctacgtaacatcccggccttgtcatcagaaggcctgggcatgagctctgggtctgcccacactggccccatgatgttagccaagtcacttcccgttagttaagtctctcctggtctctacaccagtacagtggaatggtgagttgggactgggtcccaccttgccggtctgagaacaggctcgttctgaacattcactcccaatcatttccatcttcccttctttcttgctgtagggctttggggaacaaaacacaggaccgggggcaatgagtgacaccgaactaaatgtctgccgatcggccggtttcccccaagttcactcactcatctcctggagggggtgcaatgaaagcttgtcctcaatttactttgagatatatcccatgatatttttaagcaacgcatttgtattcctaatagtatttgcctcaggtcctataaaaatgagtccataatccttgggtgaagcccagactccattggttctttgactgctgataaacccattgagtaattgagcccaagtggatagatgtgagtcagttctcatgctaggctcgtacaaatgttctcattgataatgaatggttgtacaaagtatttttacctattatctctttaaaactacccaaagtcctgtgatgataccacgactccccstagagaccgatgaggaagtggggcttcagacggaggcagacttgcctgaggccaggatcccctccacagctgcaggtggaaccagtgagctgccaggtgggaggcagctcccaggccaccctttcatg

SEQ ID NO: 1928 - DNA, 309 bp, Homo sapiens
ctgtttagttttgaaaaaamaattgaaaattaggtacaaaataggtattaaaattttactttcaattaaacaagggctccagaaagaaagaaagttagggtaccaatgggaaacataccaactttacaattttatgctagcagctgtgtgtcaggcggcctttacccgttgagccatgtcaatatgcatagagcaggtctccttgagagctatggtgcaagtcacggagacgtgatgcctgctcctgggacagctttcgcagggatcccaaccactagccactcccaaatgtctgtcaggggacactga

SEQ ID NO: 1929 - DNA, 1254 bp, Homo sapiens
tctcactttcacagtttatcaaaatatgttggtaatctcaggttttctagaagaaataaattttgatgagatttgaagggataacctcatgtttcactcaatgaaatttattcaaaatctactatgtgccctgaatgaaaatattaatttagcactttgtgtgtagcataaagaaagacactacttttttttttctttttctttttttgagtgcagtggcacaatcttggctgactgcaacctccgactcccaggttcaagcaattctcctgcctcagcctcctgagcagctgggattacaggtgcccatcaccaagcctggctatttttttgttttgttttgtatttttagtagagacagtgtttctccatgttagccaggctggtctcaaactcctgacctcgggtgatccacccacttccacctcccaaagtgctgggattacagacgtgaaccaccgtgccccactgaaagacactaatatttattttacgttcattatgttagctaccactaaggagctcacagctcagagagggacaaagacatacaaaaagaattccagcgagtgtgacaagtgcagaaagaaactgtacaaagagggttgggctagagaggaggaaataactcttcttgggcagctgaggaatggatttagccattgaagggagtgtgtatgtgcgtgtgtgcgtgtgtgtgtggtatttcaggcatgatgacacaccataggaaatatatttgttgctaattgatttttttttcttctccaaaaggagggatctacactcttctcagtcatttgctggtcgtgcgtggggtttctgggattgtatgggctgtccatagtcgaaaaaagcaggtgggcacccagaggtcaaacagggctcccagcctggttaggcatggggggtaaccctactgaaagaggccacctgctagaccagcaaaggagcaaatgggagcaacatagaatagtaatgctacctgttacatctgagtcttttaaaagcagcttccacattattgyatttgaccttaatctcattgctgtgatacatcatctctacttttaggcaaggaaatgttggatctaaaggactgactgacctgggtgaagtcctggaacaaacaggcagcaggactaggattcaaacaaaggccatatgattcccaagccagtgatttccactctgaataagagaagggaaagagcaccagacacaacaaactgcagagcaaaataggtaataaaa

SEQ ID NO: 1930 - DNA, 476 bp, Homo sapiens
tgtgtgttgatgaaatcacccaacttacatacatttgaaacttgttttctttcactaatatttcatctggatgtctctccaggtcaactaatatagagcctaccaattatatttatagtagcataatgaaactrcctttgcaaaaactgtaactgagaaaattatgatggtaaaagaaatttgacttaaccgtccccatcttgcttctaacctccaagttgtccttgttcattcttgggcataggctgaactaactttgggaggtacttagtttatagttcaactttgagacaaagataataacaactctttgccaaaacaaacctccttcctccctgggggactagactgccttttcagggctaatgaattagccacaagatgaggaattatggtttaggagttatgcgctggaggctgcagaatttaaaatcctcaaattgctccttgggtaaatcactattggaaaactgaaa

SEQ ID NO: 1931 - DNA, 617 bp, Homo sapiens
ttaacaactattatgtcaacatatttgtttaaaatattttgagaaggcatcagtttggagaaggtgctcaaggcagrcaactcctccttctgttcccaaccaatcctccttccagctttgttgctgcggtcctatccttgcccatggatcctatgtaaagagatggtcagcctgggaatgaacagctatgaagaggtagtgaccctcacccaactaggagggcctacaactcaaaatcataggtgaccaagtaaagctgaatttaccagtctaggagtttctagcagccagatgtttacataggtcaaatctgttttgaagagagaaaatagagaaccagagatggaaggtgggtggcagagggatggagatacggctttaataggataaaagaggtagagggaaataaacagaaggcttagacctgcaagggaagtcaccgtctgagagatgggagggactggggagaggggaaagagggaggcaatgatctttgagagttcataagcaggtggggtggaatgtttgttatattttctgcggatcattactttggccaagttagtgagtggttttgaacatggaagacttagagtgcacatctgttattgaaatcc

SEQ ID NO: 1932 - DNA, 608 bp, Homo sapiens
tgcattgtaacaggcactccaagtgatacttaaggctctaaaatgtaataactgctgatataagggaaaggtcatagaggattataattccttacctattcatgctgtttaactgataaggaaatgcagctttctagagggaaatcacattgctttatgccggagcaatttatacttttaaccgcttgtcttgttgaaccaggatccctggttccacccagtgccaactgaacactcttaacaraagtcctgagagtcattagtgtgttgtcctcgataccacatagggcagagattaaaaagcacatttcacttcagccactgaggttcctagaggtgaagcatttaacccgtcattcagctatgagggcagatccaggatttagacagccaccaccctaagtctaaacctagggacatgcactaaactgcatcatcaaagcatccatttagctgtggggtaaatgcaacctggctaaattgggatattcctaactgccttctcatccaggtcccaatgtcagagcattgcttttatgcttttcctcagccctgaaagaacgtagcacatatatttgcacacactttcaagtggccctggcttggga

SEQ ID NO: 1933 - DNA, 608 bp, Homo sapiens
tgcattgtaacaggcactccaagtgatacttaaggctctaaaatgtaataactgctgatataagggaaaggtcatagaggattataattccttacctattcatgctgtttaactgataaggaaatgcagctttctagagggaaatcacattgctttatgccggagcaatttatacttttaaccgcttgtcttgttgaaccaggatccctggttccacccagtgccaactgaacactcttaacaaaagtcctgagagtcattagtgtgttgtcctcgataccacatagggcagagattaaaaagcacatttcacttcagccactgaggttcctagaggtgaagcatttaacccgtcattsagctatgagggcagatccaggatttagacagccaccaccctaagtctaaacctagggacatgcactaaactgcatcatcaaagcatccatttagctgtggggtaaatgcaacctggctaaattgggatattcctaactgccttctcatccaggtcccaatgtcagagcattgcttttatgcttttcctcagccctgaaagaacgtagcacatatatttgcacacactttcaagtggccctggcttggga

SEQ ID NO: 1934 - DNA, 605 bp, Homo sapiens
gaaccatactaggtgcaacattgatgagatatctttggattattggcatcatctatggaagatttgaatagcaatcattaatccttgacataaaatgtggcttgccaacaattcagtccccaaggcatggctgctgttagactgtgggtacctttattgagacaagagtctaccatgagacagaactatcgtaaactttcttttaaaggcagcaacatgtaaaatatgaaagaaaatcttaagcagagccttaaaaaggttgaagtactgaatgtcagcatatctatgtttactgagtgamctcggtactggataacctgagggaatgaggccattagagtctttgagaactgaatggagacctacagtgtgatagagaccagacacaacccatggcaaagggctgggagagtcatcttaggtgataggcccagctgaacccctatcacactgcttctcccactgcattcctaaagactcctttcataaaatctcaacagtcattaagaaatagagctggtatctgacaatacatggaaggagctgcttttccacccactttagagaaatggctacatgtgacatagagcagaagatgatgagga

SEQ ID NO: 1935 - DNA, 1230 bp, Homo sapiens
  misc_feature (1)...(1230): n = A,T,C or G
tgcatgagaaaaaaaggctgagtagtggcttgcaaagaatcaacttcagaggagaagcagttgctttaatcctaacaccagaggaaaaaagtgggggacgtgctcagggtccctgttttccaggcttcctcaagggaagtggggtttggggttgggagaataaaaggggttgttagtctagttcttggattgttgtttatgtcaatcaggtttccccgattgcaagcaacagaaccaactctgactatcacacaggaaagaaatatgttggtaggactgagggaagcttttaaaataagcagagaggtagagagggagctttaggaagagaaaggagccaggacaacctcaagagtccagcatagcaaagactgaacatcaactggtattttttgttgttgtttttttcctgtctttgcaacactggcatcaagattcagaattctgggaaaaactccaatagttctgtttgagtcactttctcactcttggctannnnnnnnnnnnnnnnnnnnttaaaagatgattggtgtcatcaaagaagagaatagatgctgcccagtaggaaagtgatcagcatctgctacattccctctctaacccataatgacccagctggaagccactgtttccagggggcatcttctagagaccagagcctgtgatgctgatcctgcagttaggaactcctgctatgcgttttcctttgcatgtagatctgagatgtcctaaggaccctttgtrtctctcacaatcctgtggctttcctgattctataaaataagaggaaagatctctgagtttccctttcttctgtaagcaatggaagctactcattctgtcatttgtaggtggccagtaatttcaagttttctattctattcacctgctataggaaacctgcatgtgatgggataggtctatgtagctgtacaccaagcacatatccactcaatccaataaaggatacagctttaaattggtattcaagatgtgcagtaattgtgccctaatgaactgaagatggggattaaaagcctctctgcagatatcacagacactctactaaacacagtagtgttttgcttagagctcaaatttttcaacctctctgcaacatttgacattgttgacaatttttctctttgaaattgttttccttcttggtcctaatatatctgttttctcctacctttctggtagggtcttcccgatcttttgtacttattc

SEQ ID NO: 1936 - DNA, 945 bp, Homo sapiens
aaaaatagttgtattgtcatttagtaataacctttttaaaaaaagttctggttgaatatttttaaaataagtgctaattatgtacagcagtgtcctgcaacaaaccacagagcatgcattttaaatatcaagtaataatatgaattatataaaaagccttgttataattacatgtgccaaaaaatagcaaattatgataaatattaacttttagtctgtttacatatgtaaaaagatgtgtataggtgcctgggtaagtgttaaaataaaaatattatttctaaatgcatcaggctttagttttgttatacattgatggcacactgtaagggacatgagcaaaaataatgggggcttttcgttttttgcaatggattattttttgctattcatttggcagaagcctgtaataaacttgtttgtttctgttggcttcgtttcagttcaaaactggaaacagtggatgcttcagagtcatttaatgctattttacttagaatcattatagtcttgtcattttgcaaaattatctgtgagaactgattctcagcaagcattcttggatatgagaaataatttctactatttagccaaacaacatcaatttcagtttgtactcagtgtaaatacaaatacctaaagacagtgttgttaaagaataagtgacaacctacagaatgagagaaaatatttgtaaactatacatttgayaagcggttaatatccaaaatagataaggaactcaaacaactcaacagcaaaaaataaaataacataatttaaaaataagcaaaagatctaagtagaaatttatcaaaaaaagacatagaaattgtcaacaagtatataaaaaattactcaacatcactaaacatcaaggaaatgtaaatcaaaaccacaatgagatatcatctctccctagttagaaagtctattatcaaatac

SEQ ID NO: 1937 - DNA, 1164 bp, Homo sapiens
aaagccatccattcagctgctcatttaggaatttatttcctggtacatctatctggcttttctttgccatgaaagaactggctcaattctcagttttattggtattttagcttctcaaattgtgcaagatctgtagatttacaaaattgtagtacatctctctttacccttgcaatttacacacttacctgtacttttttctttagtaccagacacaactgttttttaatctgttagaacgtgtagctcaataaaatacaatagcagtatgtgttttggagaatttatgtatgtaatatgaatacggagaatttaaaaaattatattgattaagagaacaaaaggggctggtgaatacttttatatatagttttaataatattcaactttctgtaagtagcccctcccccaccttgatttcacagtggctttggaaagaatttaaatctgatacaaaatcactgtattaaatttccaaagtccccaaattcacctttaaattccttcatccttatccgctggattatgactttcatccaagagctcccccacatctttgtggtcccagaatcaagaaaattcctctttacattgcacttatcttttggcaagtaaaataaaatttgcctggatattcttctccaatcatactgttatgatcagtttgaaatggaaatgaccagacttcatttggattacaagagaaacattctcctttaaaaaaaaaaaattaaaacaaaatgtaaaagtgaataatgggaaatgctgccccaggcctatgtttatagacacagagacaaaccctgaaaactggggcggagggctggatgaagaacamacagtccatcagttttgcttaaaaattgcctaagaaggctgggtgctgtggctcacacctgtaatcccagcactttgggaggccgaggcgggcggatcatgaggccaggagttcgagaccagcctggccaacacggtgaaacccagtctctactaaaaatacaaaaattagccacgtgtggtgtcgagcgcctgtaatcccagctactttggaggctgagacaggagaattgcttgaatctgggaggcggaggttgcagtgctctgagatcgcgccattgcactccagcctggacgacagagcaagaccctgtctcagaaaacaac

SEQ ID NO: 1938 - DNA, 1190 bp, Homo sapiens
tttccttgttgcccactcagtccttcacagcataccaccagcgagaaagataagagtagtgtgggggcatgtctttgtacttcttatcttaactagccttttaaggaccattaggtgataatatttagtttgcttcctcttggaccatcccaagtaacattatataaaataatgcttttaaaatatggggaaaatacagttcttcgaaatatgaattctttaatgcactaacatgcaaatggtttcaaaaaccaaacaacatgatccatattcgaatgtcctaacattatctggatggatccactgtagcctatcatttaataacttgggtttacatatatgattaaattcctggagtagggggaacaggagaagaaaaaacatcctgactgtatcacattcgaattacgtgacctggggctttgattcttcatttataaagtagggaaaaaaacaaaaacttttacaggtttagggaataatttcagcaaagtgaccattacaatgctaggaattgctttaaatatacattcttgacataatgataattataattaattctccaaaataattcttaagctaaagttttagatctgccaccagattttttgtttgtttgtttgagacggagtttcacccttgtcacccaggctggagtgcagtggtgcgatcttggctcactgcaacctccgcctcccgggttcaagtgattctcctgcctcagcctcccaagtagctgggattacaggtgcccaccaccatgcctggctaattgttcctatttttagtagagatggggtttcaccatgttgggcaggctggtcttgaactcctgacctcatgatccgcctgcctcagcctcccaaagtgctgggattataggcgtgagccactgcacccggccccccaggtttaaaaatatgttttgaaggcaaattaataaaaaagtragtgacttacaaactatacagattagaggttagtccatgagaataactgaataaatgggtgtgatttcacctgagatacttggtagatcacatgaacgaacagtagtgaccaagtccagtttaagcaattctctacttgaaaaatattcaattgtgtagtttgtttttcttgttttccttctataatccccaaattttccaaaatggggattatcatgtgaacataagaacatttctaca

SEQ ID NO: 1939 - DNA, 1110 bp, Homo sapiens
catctagattcacatctcagctcagacttgctggtggcctgagctgctcacttaagatgcttgagcctcaatcttctcatctgtaaagtgggaacaatagtaataattatgcagtttcagggaggactaaaagagatggtgtgtgttgagtgcttagcmctgcacctgcctctcataaggagctctttttagtccctcatgaactaagacttcccccgggcttggctggagttgtgaagtagggagaccacaatgagaatcatgggcagttgtttcagcaagtgtgcagggaatggatatgaactagaagtttgcccctgaagtctcgtcatctcaagccttatcttgtgcaaggaggtgaggagaagggctagaagaaactctggacctggacaagattgtggagaggatcttgttccttttcttcatctcacacacacctgttgcccctccaccgcctaggacagcctcctcctcctcctcattctgctatttttcttgagcctatttactgccttaaatgtatagtctctttggattcgacagataaaaacaataacaaaacaatgtcactttctgttccttatcatacggccctagatcctttgacagcatagaatggtgggctttggggtggggagagagcccacaggctgcattcactgtctctgcccgagtgcaaagctgccagtatccatcttgtcacactacgtttttttctgactccccagcctgcaggggccagggtgagtatttgcattaatgtcagacatggccaggttcaatgtgaattcttgcgtgtcaagctgcttatgacctgcatcttcacccaaaaggtttctccagtttattttccttgttccactggaaagataattccagaggaattataaacccgatcttgaacatcctgcagacaaagaatccttgttttcctaaataggacaaaatttgaaatattgacatgagtcaagagaggaggggaggacaggtcaagacacactttttaatatgttagtgctttgcattagacaggtgggagaaagcagttatactgtttacatcaattagaaaagataatagatggaaagttttgtgtctaagaaaaat

SEQ ID NO: 1940 - DNA, 1110 bp, Homo sapiens
catctagattcacatctcagctcagacttgctggtggcctgagctgctcacttaagatgcttgagcctcaatcttctcatctgtaaagtgggaacaatagtaataattatgcagtttcagggaggactaaaagagatggtgtgtgttgagtgcttagccctgcacctgcctctcataaggagctctttttagtccctcatgaactaagacttcccccgggcttggctggagttgtgaagtagggagaccacaatgagaatcatgggcagttgtttcagcaagtgtgcagggaatggatatgaactagaagtttgcccctgaagtctcgtcatctcaagccttatcttgtgcaaggaggtgaggagaagggctagaagaaactctggacctggacaagattgtggagaggatcttgttccttttcttcatctcacacacacctgttgcccctccaccgcctaggacagcctcctcctcctcctcattctgctatttttcttgagcctatttactgccttaaatgtatagtctctttggattcgacagataaaaacaataacaaaacaatgtcactttctgttccttatcatacggccctagatcctttgacagcatagaatggtgggctttggggtggggagagagcccacaggctgcattcactgtctctgcccgagtgcaaagctgccagtatccatcttgtcacactacgtttttttctgactccccagcctgcaggggccagggtgagtatttgcattaatgtcagacatggccaggttcaatgtgaattcttgcgtgtcaagctgcttatgacctgcatcttcacccaaaaggttyctccagtttattttccttgttccactggaaagataattccagaggaattataaacccgatcttgaacatcctgcagacaaagaatccttgttttcctaaataggacaaaatttgaaatattgacatgagtcaagagaggaggggaggacaggtcaagacacactttttaatatgttagtgctttgcattagacaggtgggagaaagcagttatactgtttacatcaattagaaaagataatagatggaaagttttgtgtctaagaaaaat

SEQ ID NO: 1941 - DNA, 983 bp, Homo sapiens
cctaacaatcacaacagcagcgccaacttcaaaatacaaagacaatacaaaatacaaacttgatgacaatatacttttagagatcttgtttctgttcacattaatacattagccacacattttccagatattacaatagtttttctgtaaagggccagagagtgaatctgtaaggctgtatggaccacaaggtctctgcggcaactacctggccactgcagtgcaaaagcagctaggaacaacatgcaaatgaatggacatggctgtgtttcaataaaaccttatcaacactaaaagacagtgtgctgcatttggctgtaggccataatttccttacccctagtttagacaaatcatttctgtcttgtcagttaccattggaattgtgcaggggtcgaatccacgtctttcaaattattccccctgcacttctgttaggaaccactgaataaagggactactttttaatttctgtcaggctttccttaatcttcccatctatggatttttgaaaatgtttctcagatattaaatcaatttcaggctctaaatattgcttcacattcattgacttctaagaacctgggaaggcatagtattcaattttagtttcctgtaatttggaactgctcgttattgatgcttcagatctgcttctgatccttagttctcagatatcctgggaagaaaatatagggacagaaaagggaagagatagaaaaagggaataagggaagtcagagaaagagaagacagggaagagatgagggagtagggactctgaacactgaagagcagaaatatttatggcactctttggactactctaatacagagcaacttacagaatacctgccactggatagcatataaatacaacagccttgtccaggaactacccacaaaatatagaacccgagtaggtgttgcctagaacartggaacaaacaaccattaaatattttacaaaacatatagaactg

SEQ ID NO: 1942 - DNA, 1012 bp, Homo sapiens
tcgttaactggaatcatagaaccctcacctacttccttagctagctccaggaacaaacttttttatatagtgttttagcagacatcttttttattttatgggagagctaagcaatctctgatttgaatgtgttatttttgaattattatgaacattgaaaccatcctttaaaaccataaatatgcaccatagaaaggttttagttgaaaaatctagacacatttttgatgtttatacatacactaaatcattgagaaaatgttytgagatttgccaaagaaatttccctgaacttttatattcatatacacttgaaaggtaggtaaatgtggtctatatgtttctactcatctactattaaacctttcaaatgatgtttgttaaaagcacagaatccatacaggagtcattttcaactcctttttcttttttcgtttttttttttttttttttttttgagacagagcctcgctctgttgcccaggctagagtgcagtggcatggtctcagctcactgcaaactccgccttctgggttcaagtgatcctcctgcctcagcctcccgagtagctagggttacaggtgcctgccatcacacccggctaattttttgtatttttagtagagactgggtttcaccatgtcagccaggctggtcttgaactcctgacctcgtgatctgcccgcctcagccttccgaagtgctgggattataggcgtgagccactgcactcagcctcaactcctttttcataaactcttgagatgtttttccattccaagcccccaccacttcctgatggtgagagcctgatggtctttctaagaaatcatgttggaatatgccaaataaaaatagatagagatatatagtatagctatctatagatacaccaattaagtgccatgtagcttaaatgtaaatttttgcaaatggtgcattttttatttgttaaaaagtgatgtttaaatttgctatagagtttataagacttgtttttgatttcaacaa

SEQ ID NO: 1943 - DNA, 440 bp, Homo sapiens
ttttctttatcaagttttcttaagaaaaggtaaacttaaaaacttgatagagactaacagcttaaatcttgggctcaaagctgaattgctggattcaaagataagttctgccactttccagctgtgtgactttggcaggatattatgactcrtgtgtgctttggtcttctcgttagtaaaactggaatgattagagaattgtcatggggatttaatgagttaatacaagtaaagtatctagattagtgcctttcccattcaaattgctcaataaatgttagctctcatcattatctctgcttagaaaagtgtatagttgatgatggccatatagcaaatattattcaatgaatgatggattgcctctatgtactgtcagcacctggtgcatttttagcgcttttaagttgagttgcttaaaggtatcggacattcaaaaa

SEQ ID NO: 1944 - DNA, 588 bp, Homo sapiens
gcagggatgggctgcgcttagaatcagttccctcctgtatcatttcagggttttttttttttttttttggatttagcttaatttttgtgactgtttctagctctctgygaggccctatgccagctggtctatcctttctctgcttaattcacccccgttaatctgcttggtcagcatatcttctcatctccttgctgtgcctttaggagtgcgtctgtctggaaaaggcatttattatatttactttaactggctgtgtttggcaaggtggtctgggatttcaacttgggaggaaaactgctttgattatactgcccttgtttaccgtatgcactctttgctgtgtatcccttgtctatcaagacagcaaatacttttgcaggaatccaagacacaaattaaacaaaatctctgtctgtgagcacattggcagctcctggtccatgactgttctgcacagcatctcctttatctgaaaaccacacccccatttcagtcttctactctttggggagttggggaagggagtttttcttggatgggtgagccaaaggcccccagaagtgggttgccctgggtctcacactc

SEQ ID NO: 1945 - DNA, 648 bp, Homo sapiens
ttatatttgtcatttaagtaaggtgaaaaatgaaaaacagttggtttagtgcttgtacactaaaccttcaattcccttaaaaaaaaaaaaaaactatgagaagctagagaaagtaaattaaaatacaatttaaaacaattcctttatatatatattggtctatgccaccaattctaatttctatctttgaaatcaaaatgaccagtgactgcctgaaaaatagctaggtcctaaattgcagtatgttttaaattttgagagtttgtatccctccataattttgtaattaatctttcgaattctggtctcaaaaatttggccctgaaatattttgagaagcaccaccatttattcttctaacataaaagaaaaatcaatttagaagacaattggcttccctgctattagctgtgtctgattatgttcatgctatgaaaattctagtcagcaagttgaaacttgttgttgttgaatttkctgttaaacaaatcaaggagagaaatcaatattttccaaatacagcctgggggagaaccgtagcaggaggagaaatggtgctctcagtcatctagggagtctacaccacagagttggagcatatatttaaaaattaactttcccaaacatccttttatggcccattttgac

SEQ ID NO: 1946 - DNA, 688 bp, Homo sapiens
aatgggattatactacatgaatagatctatgacctatttatttgaagtaattacatattaatttctcttatcaaatattattactttaaatgactagtattytagtgtatggaagcactataatttgtccaattgtctctttttaaatatctagattgcttgtatttatcactgtcataaactaccttctaccttctatattagcatttacaattaattatctttcttatctttcttaaagttacattacttctcaaagagcctgccttttgtcttttgtttttgttttggagacagggccttgctctcttgcccaggctgaagtgtagtggctctgtcacagcttactgcagcctcaaactcctgggctcaagcaatcctcctgcttcagcctcacaagtagcctggactacaggcgcatgccaccactcctggctaattttaaaatttttttgtagagacagaatcttgctaagttgcccagactggtctcaaactcctggcctcaggtgatgctcccgccttggccttccaaagtgctgggattacaggcacgagccaccacccccggccaagactgcatatttttaagggcctgatacacattcctaaattgctcttaaaaaagctatgctaacttgcactactaccaataatatatgggagggcttatttctccacccttttc

SEQ ID NO: 1947 - DNA, 576 bp, Homo sapiens
tccccataccacctctcaccaaccaacagttcactgtaaagcaaacccagtcataatttcatccataaatgtttcagtattacattcaatcttaaaccatgctgactacaagaaaaaatgtccttcacattaataacacacattcattcccatttaccaaatatctaggaagatgtaaacacttctgagatggtctaaaacatgctagtcaaacactagtatgtctttagaatctacttctaacacagtgcagcagtggataccaacaggcttaagtaacytttaatacctcttgcttctgctgtgccacttctttcacgtctggtgttagcattagcttcggtctttttacttttttttccttctttttagagacagggtctcactctatcacccatgatggagtacagtggtgcattcatagctcactgcagcctcaacctcccaggctcaagccatcttcccatctcagcctcccaagcagctgggaccacagatgtgcgaccaccatgtccaactaatctttttttttattttttgtagagatggggtctcactatgttgcccaggctagtc

SEQ ID NO: 1948 - DNA, 393 bp, Homo sapiens
ctctcaggctaaagcggttctcctgccccagcctcccgagtagcttggattacaggcatgcgccaccacacctgctaatttttgtatttttagtagagacagcgttttgccgtattggtcaggctggtctcgaagccctgacctcaggtgatctggcccgcctcagcctcccaaagtgctaggattacaggcgtgagccaccatgcctggccacagattcccttttagttgaggtctttgaccaagtgaaccttccctactcaggccctgcagtcarccatcagatttttttgcccatcctgatattaaatcagctgatagtgagataagggaggaatgaggtgatttcagcctagtagctgctcattaaggtgatggctttagttgcaggaa

SEQ ID NO: 1949 - DNA, 3682 bp, Homo sapiens
  misc_feature (1)...(3682): n = A,T,C or G
agtaatagtaatgacatgagtggttaaaagttggtgcttaggattcagagggtgcttaggatccagaggactcccagttgagcatgcaaaattgcgtgcaacttgtgactttctgcaagcttttcaacttccccgagcctcagttttcttttctgtaaaatgatactgataatagttctatgggttgggcttattgtaaggaataaatgagttaatatgttaagtgcttagcacgtattaagcaataaaaatggcattatttcaattactattatttttctagttcaggcctttagaaatgttatctcagtgtattcacaattctatgacatttctatgctttgccacattttacaaggataaagtacattattttctaccatgtagctttaagaaatataacaattatagctaggaaagaatgccttcttagataaaaatgtgtggacaactacaggggaagaatgatgtttaatgattcccaataactacaatcgcctccttataagcaacattcttctgcttccccccttactgtagaaaatgtaaatggtagacattttccagtggacacagagtaattttaatggcattatgtttttgtgtttcaggtgccataacctgtgctgctgacatgttcagctgccagggctctcgtgcctgcgtgccccgacattggctttgtgatggtgaaagggactgtccagatggaagcgatgagctttccacagcaggctgcggtatgaacactggccagggctgcatgtcaaagaaaactgttgcagcatccttggttatttgtttttgtagtatttgccatagcacatttcccattgctttcctagttcctgggcccataggtagtattggacttaatcaggtgggatgacggtatcacagtagttctgcaacctctttaactactgttcaatgtttcaaacatgcacagtcggattacccattttaaaaccactttgataaacacagatttatcatttcacttctcagctaatgtaactgcactttatgtgtacgagtgcagtaggtttggtactttctcttttgcgtcgtccaccaccatccttctgaaggcttttagattgtctgttacagagactctgtgaatgacttctctgatcctaaataactactgatcaggaggtcagtaaacacctattagtcctatggatagggtattaacccttgggtcatgtaaaaatagtatggatatagccgaatgaagctgagggatcagaggagcaccttcggaggtcagacaatttactaagtttctgactctaagtcacctcaggaaattttcagggcattactcaacagtaaaaatttagatgaattcnnnnnnnnnnnnnnnnnnnnnnnnnnnnnnnnnnnnnnnnnnnnnnnnnnnnnnnnnnnnnnnnnnnnnnnnnnnnnnnnnnnnnnnnnnnnnnnnnnnnatgccctatatctttacattatagccacattttgaacacgactactcacagaacttccaaaatattgtatgtggattcataatttctgaacactggccattatctgagcatatctcctttaatattatattttccaaactccagttttctaatgtgctctgtttcacaggtcatctaattaagcattttaaatgaaaatgcaaagttttgcaattgtttatgaaatcaaaagcagaattgctatttttacaagagtttatattttgaacaccttaatttagaaggattttacttttgaaggttttctagtgacaaatatactgggtagaaggggaggctgggaatggaggagagcaataacaaaattggctttggaaataaatggagtgtgttattattataaaaatataatctaataataaaaaagccagccactatgccaattaatttaggtgttattagtcaggtataacaaacccaagtgtttccaaggaagcaacacaaaaacatcagcacagttgctacgtacaaaactgtcaggttgtcttcaagctataacctccttagtcacccacctttaaaaacaaacatatctgctgattagtccaccatattgttaccttacttaggacgtaagtgttttctcttggctcaaagatagatttaaagttaaaaagtatgactagactataccagaaatatatattttatatctatgcattacacattcaaaaaataataataacagacaaatatacctggagtagagtgaccgcattaggactacctcaaaggcaagccttataagaatcatgttgaacaaatygtggttgtatcacctggaaacacagagggaatatgcaagctgatgccaaaattttatagaattgtcatagaaaagaagaagttggcttcttttattataggattgttgattttagcaaagtctaagaaagaatcttctcactgtcggatctgttgtaagacggtctcaaactatttttttttttccttttgtttgtttcctagattcttcttgctcttggaaccaatttgcttgttccgcacaaaaatgtatttctaagcattggatttgtgatggagaagatgactgtggggatgggttagatgaaagtgacagcatttgtggtaagttgtgtatcttctgtcctcaatcagtttttaagcattatatatgctctatcattttatagcatacacaaaatttgctaatttattaaaattaacataaaatttatgtgtacctttctaggtagctgtttttattattttcatgacaatccattattctaatatttttatatataaagctgttattcaatatttggtatttttccttaatattgccacaacaaatgtatttgtacattttatttctagctttcggtgaattctttgaagcaaatatcaatgattgagattacagggtcaaataatcaaacttatttttcattatgctgcctatgtaccaccaagttaccctccaaaattagtatactaatttatactgccacaagccacacgtgctgtttatgtgcatatgtgtgtgttgttttcatccttattgctgaattgttttaaataagaagtaaaggaaagtggctattttatatgatattaaaatgcactttaaaatgtagctttataagattagaggtattagtgtcacgtatctatacttaactactatatgtcaactacaagcccagtatgattgctttgtaatattcacaaatatttaacaaatagttaaatagaattattcactgaatttcctaaggggtaaaagaaggaaacaagctagtctttaaaatttgttcttaccggccaagaatttcactatttttatagatgtctattggttgtctatctaatctatttctgtacatgcatttgtacctgtagctatatattctttactcattacatcagcctttggtggcagctgttatcatcctcttttaggaagagaaggacccaagtcatagaataaggtgtatgtatagattttagtatacttaacacctcttttaaatttcaggggttgtggactgctatttctgtcacaaacatatagagaaaggcggtattttttagtattcaagctcaactgaagttctctttagtaatatgaaattggagatattcttgaaagtaggcaatttactttcttgtatttaagtcactcaaaatctactttttat

SEQ ID NO: 1950 - DNA, 3682 bp, Homo sapiens
  misc_feature (1)...(3682): n = A,T,C or G
agtaatagtaatgacatgagtggttaaaagttggtgcttaggattcagagggtgcttaggatccagaggactcccagttgagcatgcaaaattgcgtgcaacttgtgactttctgcaagcttttcaacttccccgagcctcagttttcttttctgtaaaatgatactgataatagttctatgggttgggcttattgtaaggaataaatgagttaatatgttaagtgcttagcacgtattaagcaataaaaatggcattatttcaattactattatttttctagttcaggcctttagaaatgttatctcagtgtattcacaattctatgacatttctatgctttgccacattttacaaggataaagtacattattttctaccatgtagctttaagaaatataacaattatagctaggaaagaatgccttcttagataaaaatgtgtggacaactacaggggaagaatgatgtttaatgattcccaataactacaatcgcctccttataagcaacattcttctgcttccccccttactgtagaaaatgtaaatggtagacattttccagtggacacagagtaattttaatggcattatgtttttgtgtttcaggtgccataacctgtgctgctgacatgttcagctgccagggctctcgtgcctgcgtgccccgacattggctttgtgatggtgaaagggactgtccagatggaagcgatgagctttccacagcaggctgcggtatgaacactggccagggctgcatgtcaaagaaaactgttgcagcatccttggttatttgtttttgtagtatttgccatagcacatttcccattgctttcctagttcctgggcccataggtagtattggacttaatcaggtgggatgacggtatcacagtagttctgcaacctctttaactactgttcaatgtttcaaacatgcacagtcggattacccattttaaaaccactttgataaacacagatttatcatttcacttctcagctaatgtaactgcactttatgtgtacgagtgcagtaggtttggtactttctcttttgcgtcgtccaccaccatccttctgaaggcttttagattgtctgttacagagactctgtgaatgacttctctgatcctaaataactactgatcaggaggtcagtaaacacctattagtcctatggatagggtattaacccttgggtcatgtaaaaatagtatggatatagccgaatgaagctgagggatcagaggagcaccttcggaggtcagacaatttactaagtttctgactctaagtcacctcaggaaattttcagggcattactcaacagtaaaaatttagatgaattcnnnnnnnnnnnnnnnnnnnnnnnnnnnnnnnnnnnnnnnnnnnnnnnnnnnnnnnnnnnnnnnnnnnnnnnnnnnnnnnnnnnnnnnnnnnnnnnnnnnnatgccctatatctttacattatagccacattttgaacacgactactcacagaacttccaaaatattgtatgtggattcataatttctgaacactggccattatctgagcatatctcctttaatattatattttccaaactccagttttctaatgtgctctgtttcacaggtcatctaattaagcattttaaatgaaaatgcaaagttttgcaattgtttatgaaatcaaaagcagaattgctatttttacaagagtttatattttgaacaccttaatttagaaggattttacttttgaaggttttctagtgacaaatatactgggtagaaggggaggctgggaatggaggagagcaataacaaaattggctttggaaataaatggagtgtgttattattataaaaatataatctaataataaaaaagccagccactatgccaattaatttaggtgttattagtcaggtataacaaacccaagtgtttccaaggaagcaacacaaaaacatcagcacagttgctacgtacaaaactgtcaggttgtcttcaagctataacctccttagtcacccacctttaaaaacaaacatatctgctgattagtccaccatattgttaccttacttaggacgtaagtgttttctcttggctcaaagatagatttaaagttaaaaagtatgactagactataccagaaatatatattttatatctatgcattacacattcaaaaaataataataacagacaaatatacctggagtagagtgaccgcattaggactacctcaaaggcaagccttataagaatcatgttgaacaaatcgtggttgtatcacctggaaacacagagggaatatgcaagctgatgccaaaattttatagaattgtcatagaaaagaagaagttggcttcttttattataggattgttgattttagcaaagtctaagaaagaatcttctcactgtcggatctgttgtaagacggtctcaaactatttttttttttccttttgtttgtttcctagattcttcttgctcttggaaccaatttgcttgttccgcacaaaaatgtatttctaagcattggatttgtgatggagaagatgactgtggggatgggttagatgaaagtgacagcatttgtggtaagttgtgtatcttctgtcctcaatcagtttttaagcattatatatgctctatcattttatagcatacacaaaatttgctaatttattaaaattaacataaaatttatgtgtacctttctaggtagctgtttttattattttcatgacaatccattattctawtatttttatatataaagctgttattcaatatttggtatttttccttaatattgccacaacaaatgtatttgtacattttatttctagctttcggtgaattctttgaagcaaatatcaatgattgagattacagggtcaaataatcaaacttatttttcattatgctgcctatgtaccaccaagttaccctccaaaattagtatactaatttatactgccacaagccacacgtgctgtttatgtgcatatgtgtgtgttgttttcatccttattgctgaattgttttaaataagaagtaaaggaaagtggctattttatatgatattaaaatgcactttaaaatgtagctttataagattagaggtattagtgtcacgtatctatacttaactactatatgtcaactacaagcccagtatgattgctttgtaatattcacaaatatttaacaaatagttaaatagaattattcactgaatttcctaaggggtaaaagaaggaaacaagctagtctttaaaatttgttcttaccggccaagaatttcactatttttatagatgtctattggttgtctatctaatctatttctgtacatgcatttgtacctgtagctatatattctttactcattacatcagcctttggtggcagctgttatcatcctcttttaggaagagaaggacccaagtcatagaataaggtgtatgtatagattttagtatacttaacacctcttttaaatttcaggggttgtggactgctatttctgtcacaaacatatagagaaaggcggtattttttagtattcaagctcaactgaagttctctttagtaatatgaaattggagatattcttgaaagtaggcaatttactttcttgtatttaagtcactcaaaatctactttttat

SEQ ID NO: 1951 - DNA, 3682 bp, Homo sapiens
  misc_feature (1)...(3682): n = A,T,C or G
agtaatagtaatgacatgagtggttaaaagttggtgcttaggattcagagggtgcttaggatccagaggactcccagttgagcatgcaaaattgcgtgcaacttgtgactttctgcaagcttttcaacttccccgagcctcagttttcttttctgtaaaatgatactgataatagttctatgggttgggcttattgtaaggaataaatgagttaatatgttaagtgcttagcacgtattaagcaataaaaatggcattatttcaattactattatttttctagttcaggcctttagaaatgttatctcagtgtattcacaattctatgacatttctatgctttgccacattttacaaggataaagtacattattttctaccatgtagctttaagaaatataacaattatagctaggaaagaatgccttcttagataaaaatgtgtggacaactacaggggaagaatgatgtttaatgattcccaataactacaatcgcctccttataagcaacattcttctgcttccccccttactgtagaaaatgtaaatggtagacattttccagtggacacagagtaattttaatggcattatgtttttgtgtttcaggtgccataacctgtgctgctgacatgttcagctgccagggctctcgtgcctgcgtgccccgacattggctttgtgatggtgaaagggactgtccagatggaagcgatgagctttccacagcaggctgcggtatgaacactggccagggctgcatgtcaaagaaaactgttgcagcatccttggttatttgtttttgtagtatttgccatagcacatttcccattgctttcctagttcctgggcccataggtagtattggacttaatcaggtgggatgacggtatcacagtagttctgcaacctctttaactactgttcaatgtttcaaacatgcacagtcggattacccattttaaaaccactttgataaacacagatttatcatttcacttctcagctaatgtaactgcactttatgtgtacgagtgcagtaggtttggtactttctcttttgcgtcgtccaccaccatccttctgaaggcttttagattgtctgttacagagactctgtgaatgacttctctgatcctaaataactactgatcaggaggtcagtaaacacctattagtcctatggatagggtattaacccttgggtcatgtaaaaatagtatggatatagccgaatgaagctgagggatcagaggagcaccttcggaggtcagacaatttactaagtttctgactctaagtcacctcaggaaattttcagggcattactcaacagtaaaaatttagatgaattcnnnnnnnnnnnnnnnnnnnnnnnnnnnnnnnnnnnnnnnnnnnnnnnnnnnnnnnnnnnnnnnnnnnnnnnnnnnnnnnnnnnnnnnnnnnnnnnnnnnnatgccctatatctttacattatagccacattttgaacacgactactcacagaacttccaaaatattgtatgtggattcataatttctgaacactggccattatctgagcatatctcctttaatattatattttccaaactccagttttctaatgtgctctgtttcacaggtcatctaattaagcattttaaatgaaaatgcaaagttttgcaattgtttatgaaatcaaaagcagaattgctatttttacaagagtttatattttgaacaccttaatttagaaggattttacttttgaaggttttctagtgacaaatatactgggtagaaggggaggctgggaatggaggagagcaataacaaaattggctttggaaataaatggagtgtgttattattataaaaatataatctaataataaaaaagccagccactatgccaattaatttaggtgttattagtcaggtataacaaacccaagtgtttccaaggaagcaacacaaaaacatcagcacagttgctacgtacaaaactgtcaggttgtcttcaagctataacctccttagtcacccacctttaaaaacaaacatatctgctgattagtccaccatattgttaccttacttaggacgtaagtgttttctcttggctcaaagatagatttaaagttaaaaagtatgactagactataccagaaatatatattttatatctatgcattacacattcaaaaaataataataacagacaaatatacctggagtagagtgaccgcattaggactacctcaaaggcaagccttataagaatcatgttgaacaaatcgtggttgtatcacctggaaacacagagggaatatgcaagctgatgccaaaattttatagaattgtcatagaaaagaagaagttggcttcttttattataggattgttgattttagcaaagtctaagaaagaatcttctcactgtcggatctgttgtaagacggtctcaaactatttttttttttccttttgtttgtttcctagattcttcttgctcttggaaccaatttgcttgttccgcacaaaaatgtatttctaagcattggatttgtgatggagaagatgactgtggggatgggttagatgaaagtgacagcatttgtggtaagttgtgtatcttctgtcctcaatcagtttttaagcattatatatgctctatcattttatagcatacacaaaatttgctaatttattaaaattaacataaaatttatgtgtacctttctaggtagctgtttttattattttcatgacaatccattattctaatatttttatatataaagctgttattcaatatttggtatttttccttaatattgccacaacaaatgtatttgtacattttatttctagctttcggtgamttctttgaagcaaatatcaatgattgagattacagggtcaaataatcaaacttatttttcattatgctgcctatgtaccaccaagttaccctccaaaattagtatactaatttatactgccacaagccacacgtgctgtttatgtgcatatgtgtgtgttgttttcatccttattgctgaattgttttaaataagaagtaaaggaaagtggctattttatatgatattaaaatgcactttaaaatgtagctttataagattagaggtattagtgtcacgtatctatacttaactactatatgtcaactacaagcccagtatgattgctttgtaatattcacaaatatttaacaaatagttaaatagaattattcactgaatttcctaaggggtaaaagaaggaaacaagctagtctttaaaatttgttcttaccggccaagaatttcactatttttatagatgtctattggttgtctatctaatctatttctgtacatgcatttgtacctgtagctatatattctttactcattacatcagcctttggtggcagctgttatcatcctcttttaggaagagaaggacccaagtcatagaataaggtgtatgtatagattttagtatacttaacacctcttttaaatttcaggggttgtggactgctatttctgtcacaaacatatagagaaaggcggtattttttagtattcaagctcaactgaagttctctttagtaatatgaaattggagatattcttgaaagtaggcaatttactttcttgtatttaagtcactcaaaatctactttttat

SEQ ID NO: 1952 - DNA, 3682 bp, Homo sapiens
  misc_feature (1)...(3682): n = A,T,C or G
agtaatagtaatgacatgagtggttaaaagttggtgcttaggattcagagggtgcttaggatccagaggactcccagttgagcatgcaaaattgcgtgcaacttgtgactttctgcaagcttttcaacttccccgagcctcagttttcttttctgtaaaatgatactgataatagttctatgggttgggcttattgtaaggaataaatgagttaatatgttaagtgcttagcacgtattaagcaataaaaatggcattatttcaattactattatttttctagttcaggcctttagaaatgttatctcagtgtattcacaattctatgacatttctatgctttgccacattttacaaggataaagtacattattttctaccatgtagctttaagaaatataacaattatagctaggaaagaatgccttcttagataaaaatgtgtggacaactacaggggaagaatgatgtttaatgattcccaataactacaatcgcctccttataagcaacattcttctgcttccccccttactgtagaaaatgtaaatggtagacattttccagtggacacagagtaattttaatggcattatgtttttgtgtttcaggtgccataacctgtgctgctgacatgttcagctgccagggctctcgtgcctgcgtgccccgacattggctttgtgatggtgaaagggactgtccagatggaagcgatgagctttccacagcaggctgcggtatgaacactggccagggctgcatgtcaaagaaaactgttgcagcatccttggttatttgtttttgtagtatttgccatagcacatttcccattgctttcctagttcctgggcccataggtagtattggacttaatcaggtgggatgacggtatcacagtagttctgcaacctctttaactactgttcaatgtttcaaacatgcacagtcggattacccattttaaaaccactttgataaacacagatttatcatttcacttctcagctaatgtaactgcactttatgtgtacgagtgcagtaggtttggtactttctcttttgcgtcgtccaccaccatccttctgaaggcttttagattgtctgttacagagactctgtgaatgacttctctgatcctaaataactactgatcaggaggtcagtaaacacctattagtcctatggatagggtattaacccttgggtcatgtaaaaatagtatggatatagccgaatgaagctgagggatcagaggagcaccttcggaggtcagacaatttactaagtttctgactctaagtcacctcaggaaattttcagggcattactcaacagtaaaaatttagatgaattcnnnnnnnnnnnnnnnnnnnnnnnnnnnnnnnnnnnnnnnnnnnnnnnnnnnnnnnnnnnnnnnnnnnnnnnnnnnnnnnnnnnnnnnnnnnnnnnnnnnnatgccctatatctttacattatagccacattttgaacacgactactcacagaacttccaaaatattgtatgtggattcataatttctgaacactggccattatctgagcatatctcctttaatattatattttccaaactccagttttctaatgtgctctgtttcacaggtcatctaattaagcattttaaatgaaaatgcaaagttttgcaattgtttatgaaatcaaaagcagaattgctatttttacaagagtttatattttgaacaccttaatttagaaggattttacttttgaaggttttctagtgacaaatatactgggtagaaggggaggctgggaatggaggagagcaataacaaaattggctttggaaataaatggagtgtgttattattataaaaatataatctaataataaaaaagccagccactatgccaattaatttaggtgttattagtcaggtataacaaacccaagtgtttccaaggaagcaacacaaaaacatcagcacagttgctacgtacaaaactgtcaggttgtcttcaagctataacctccttagtcacccacctttaaaaacaaacatatctgctgattagtccaccatattgttaccttacttaggacgtaagtgttttctcttggctcaaagatagatttaaagttaaaaagtatgactagactataccagaaatatatattttatatctatgcattacacattcaaaaaataataataacagacaaatatacctggagtagagtgaccgcattaggactacctcaaaggcaagccttataagaatcatgttgaacaaatcgtggttgtatcacctggaaacacagagggaatatgcaagctgatgccaaaattttatagaattgtcatagaaaagaagaagttggcttcttttattataggattgttgattttagcaaagtctaagaaagaatcttctcactgtcggatctgttgtaagacggtctcaaactatttttttttttccttttgtttgtttcctagattcttcttgctcttggaaccaatttgcttgttccgcacaaaaatgtatttctaagcattggatttgtgatggagaagatgactgtggggatgggttagatgaaagtgacagcatttgtggtaagttgtgtatcttctgtcctcaatcagtttttaagcattatatatgctctatcattttatagcatacacaaaatttgctaatttattaaaattaacataaaatttatgtgtacctttctaggtagctgtttttattattttcatgacaatccattattctaatatttttatatataaagctgttattcaatatttggtatttttccttaatattgccacaacaaatgtatttgtacattttatttctagctttcggtgaattctttgaagcaaatatcaatgattgagattacagggtcaaataatcaaacttatttttcaytatgctgcctatgtaccaccaagttaccctccaaaattagtatactaatttatactgccacaagccacacgtgctgtttatgtgcatatgtgtgtgttgttttcatccttattgctgaattgttttaaataagaagtaaaggaaagtggctattttatatgatattaaaatgcactttaaaatgtagctttataagattagaggtattagtgtcacgtatctatacttaactactatatgtcaactacaagcccagtatgattgctttgtaatattcacaaatatttaacaaatagttaaatagaattattcactgaatttcctaaggggtaaaagaaggaaacaagctagtctttaaaatttgttcttaccggccaagaatttcactatttttatagatgtctattggttgtctatctaatctatttctgtacatgcatttgtacctgtagctatatattctttactcattacatcagcctttggtggcagctgttatcatcctcttttaggaagagaaggacccaagtcatagaataaggtgtatgtatagattttagtatacttaacacctcttttaaatttcaggggttgtggactgctatttctgtcacaaacatatagagaaaggcggtattttttagtattcaagctcaactgaagttctctttagtaatatgaaattggagatattcttgaaagtaggcaatttactttcttgtatttaagtcactcaaaatctactttttat

SEQ ID NO: 1953 - DNA, 3682 bp, Homo sapiens
  misc_feature (1)...(3682): n = A,T,C or G
agtaatagtaatgacatgagtggttaaaagttggtgcttaggattcagagggtgcttaggatccagaggactcccagttgagcatgcaaaattgcgtgcaacttgtgactttctgcaagcttttcaacttccccgagcctcagttttcttttctgtaaaatgatactgataatagttctatgggttgggcttattgtaaggaataaatgagttaatatgttaagtgcttagcacgtattaagcaataaaaatggcattatttcaattactattatttttctagttcaggcctttagaaatgttatctcagtgtattcacaattctatgacatttctatgctttgccacattttacaaggataaagtacattattttctaccatgtagctttaagaaatataacaattatagctaggaaagaatgccttcttagataaaaatgtgtggacaactacaggggaagaatgatgtttaatgattcccaataactacaatcgcctccttataagcaacattcttctgcttccccccttactgtagaaaatgtaaatggtagacattttccagtggacacagagtaattttaatggcattatgtttttgtgtttcaggtgccataacctgtgctgctgacatgttcagctgccagggctctcgtgcctgcgtgccccgacattggctttgtgatggtgaaagggactgtccagatggaagcgatgagctttccacagcaggctgcggtatgaacactggccagggctgcatgtcaaagaaaactgttgcagcatccttggttatttgtttttgtagtatttgccatagcacatttcccattgctttcctagttcctgggcccataggtagtattggacttaatcaggtgggatgacggtatcacagtagttctgcaacctctttaactactgttcaatgtttcaaacatgcacagtcggattacccattttaaaaccactttgataaacacagatttatcatttcacttctcagctaatgtaactgcactttatgtgtacgagtgcagtaggtttggtactttctcttttgcgtcgtccaccaccatccttctgaaggcttttagattgtctgttacagagactctgtgaatgacttctctgatcctaaataactactgatcaggaggtcagtaaacacctattagtcctatggatagggtattaacccttgggtcatgtaaaaatagtatggatatagccgaatgaagctgagggatcagaggagcaccttcggaggtcagacaatttactaagtttctgactctaagtcacctcaggaaattttcagggcattactcaacagtaaaaatttagatgaattcnnnnnnnnnnnnnnnnnnnnnnnnnnnnnnnnnnnnnnnnnnnnnnnnnnnnnnnnnnnnnnnnnnnnnnnnnnnnnnnnnnnnnnnnnnnnnnnnnnnnatgccctatatctttacattatagccacattttgaacacgactactcacagaacttccaaaatattgtatgtggattcataatttctgaacactggccattatctgagcatatctcctttaatattatattttccaaactccagttttctaatgtgctctgtttcacaggtcatctaattaagcattttaaatgaaaatgcaaagttttgcaattgtttatgaaatcaaaagcagaattgctatttttacaagagtttatattttgaacaccttaatttagaaggattttacttttgaaggttttctagtgacaaatatactgggtagaaggggaggctgggaatggaggagagcaataacaaaattggctttggaaataaatggagtgtgttattattataaaaatataatctaataataaaaaagccagccactatgccaattaatttaggtgttattagtcaggtataacaaacccaagtgtttccaaggaagcaacacaaaaacatcagcacagttgctacgtacaaaactgtcaggttgtcttcaagctataacctccttagtcacccacctttaaaaacaaacatatctgctgattagtccaccatattgttaccttacttaggacgtaagtgttttctcttggctcaaagatagatttaaagttaaaaagtatgactagactataccagaaatatatattttatatctatgcattacacattcaaaaaataataataacagacaaatatacctggagtagagtgaccgcattaggactacctcaaaggcaagccttataagaatcatgttgaacaaatcgtggttgtatcacctggaaacacagagggaatatgcaagctgatgccaaaattttatagaattgtcatagaaaagaagaagttggcttcttttattataggattgttgattttagcaaagtctaagaaagaatcttctcactgtcggatctgttgtaagacggtctcaaactatttttttttttccttttgtttgtttcctagattcttcttgctcttggaaccaatttgcttgttccgcacaaaaatgtatttctaagcattggatttgtgatggagaagatgactgtggggatgggttagatgaaagtgacagcatttgtggtaagttgtgtatcttctgtcctcaatcagtttttaagcattatatatgctctatcattttatagcatacacaaaatttgctaatttattaaaattaacataaaatttatgtgtacctttctaggtagctgtttttattattttcatgacaatccattattctaatatttttatatataaagctgttattcaatatttggtatttttccttaatattgccacaacaaatgtatttgtacattttatttctagctttcggtgaattctttgaagcaaatatcaatgattgagattacagggtcaaataatcaaacttatttttcattatgctgcctatgtaccaccaagttaccctccaaaattagtatactaatttatamtgccacaagccacacgtgctgtttatgtgcatatgtgtgtgttgttttcatccttattgctgaattgttttaaataagaagtaaaggaaagtggctattttatatgatattaaaatgcactttaaaatgtagctttataagattagaggtattagtgtcacgtatctatacttaactactatatgtcaactacaagcccagtatgattgctttgtaatattcacaaatatttaacaaatagttaaatagaattattcactgaatttcctaaggggtaaaagaaggaaacaagctagtctttaaaatttgttcttaccggccaagaatttcactatttttatagatgtctattggttgtctatctaatctatttctgtacatgcatttgtacctgtagctatatattctttactcattacatcagcctttggtggcagctgttatcatcctcttttaggaagagaaggacccaagtcatagaataaggtgtatgtatagattttagtatacttaacacctcttttaaatttcaggggttgtggactgctatttctgtcacaaacatatagagaaaggcggtattttttagtattcaagctcaactgaagttctctttagtaatatgaaattggagatattcttgaaagtaggcaatttactttcttgtatttaagtcactcaaaatctactttttat

SEQ ID NO: 1954 - DNA, 3682 bp, Homo sapiens
  misc_feature (1)...(3682): n = A,T,C or G
agtaatagtaatgacatgagtggttaaaagttggtgcttaggattcagagggtgcttaggatccagaggactcccagttgagcatgcaaaattgcgtgcaacttgtgactttctgcaagcttttcaacttccccgagcctcagttttcttttctgtaaaatgatactgataatagttctatgggttgggcttattgtaaggaataaatgagttaatatgttaagtgcttagcacgtattaagcaataaaaatggcattatttcaattactattatttttctagttcaggcctttagaaatgttatctcagtgtattcacaattctatgacatttctatgctttgccacattttacaaggataaagtacattattttctaccatgtagctttaagaaatataacaattatagctaggaaagaatgccttcttagataaaaatgtgtggacaactacaggggaagaatgatgtttaatgattcccaataactacaatcgcctccttataagcaacattcttctgcttccccccttactgtagaaaatgtaaatggtagacattttccagtggacacagagtaattttaatggcattatgtttttgtgtttcaggtgccataacctgtgctgctgacatgttcagctgccagggctctcgtgcctgcgtgccccgacattggctttgtgatggtgaaagggactgtccagatggaagcgatgagctttccacagcaggctgcggtatgaacactggccagggctgcatgtcaaagaaaactgttgcagcatccttggttatttgtttttgtagtatttgccatagcacatttcccattgctttcctagttcctgggcccataggtagtattggacttaatcaggtgggatgacggtatcacagtagttctgcaacctctttaactactgttcaatgtttcaaacatgcacagtcggattacccattttaaaaccactttgataaacacagatttatcatttcacttctcagctaatgtaactgcactttatgtgtacgagtgcagtaggtttggtactttctcttttgcgtcgtccaccaccatccttctgaaggcttttagattgtctgttacagagactctgtgaatgacttctctgatcctaaataactactgatcaggaggtcagtaaacacctattagtcctatggatagggtattaacccttgggtcatgtaaaaatagtatggatatagccgaatgaagctgagggatcagaggagcaccttcggaggtcagacaatttactaagtttctgactctaagtcacctcaggaaattttcagggcattactcaacagtaaaaatttagatgaattcnnnnnnnnnnnnnnnnnnnnnnnnnnnnnnnnnnnnnnnnnnnnnnnnnnnnnnnnnnnnnnnnnnnnnnnnnnnnnnnnnnnnnnnnnnnnnnnnnnnnatgccctatatctttacattatagccacattttgaacacgactactcacagaacttccaaaatattgtatgtggattcataatttctgaacactggccattatctgagcatatctcctttaatattatattttccaaactccagttttctaatgtgctctgtttcacaggtcatctaattaagcattttaaatgaaaatgcaaagttttgcaattgtttatgaaatcaaaagcagaattgctatttttacaagagtttatattttgaacaccttaatttagaaggattttacttttgaaggttttctagtgacaaatatactgggtagaaggggaggctgggaatggaggagagcaataacaaaattggctttggaaataaatggagtgtgttattattataaaaatataatctaataataaaaaagccagccactatgccaattaatttaggtgttattagtcaggtataacaaacccaagtgtttccaaggaagcaacacaaaaacatcagcacagttgctacgtacaaaactgtcaggttgtcttcaagctataacctccttagtcacccacctttaaaaacaaacatatctgctgattagtccaccatattgttaccttacttaggacgtaagtgttttctcttggctcaaagatagatttaaagttaaaaagtatgactagactataccagaaatatatattttatatctatgcattacacattcaaaaaataataataacagacaaatatacctggagtagagtgaccgcattaggactacctcaaaggcaagccttataagaatcatgttgaacaaatcgtggttgtatcacctggaaacacagagggaatatgcaagctgatgccaaaattttatagaattgtcatagaaaagaagaagttggcttcttttattataggattgttgattttagcaaagtctaagaaagaatcttctcactgtcggatctgttgtaagacggtctcaaactatttttttttttccttttgtttgtttcctagattcttcttgctcttggaaccaatttgcttgttccgcacaaaaatgtatttctaagcattggatttgtgatggagaagatgactgtggggatgggttagatgaaagtgacagcatttgtggtaagttgtgtatcttctgtcctcaatcagtttttaagcattatatatgctctatcattttatagcatacacaaaatttgctaatttattaaaattaacataaaatttatgtgtacctttctaggtagctgtttttattattttcatgacaatccattattctaatatttttatatataaagctgttattcaatatttggtatttttccttaatattgccacaacaaatgtatttgtacattttatttctagctttcggtgaattctttgaagcaaatatcaatgattgagattacagggtcaaataatcaaacttatttttcattatgctgcctatgtaccaccaagttaccctccaaaattagtatactaatttatactgccacaagccacacgtgctgtttatgtgcatatgtgtgtgttgttttcatccttattgctgaattgttttaaataagaagtaaaggaaagtggctattttatatgatattaaaatgcactttaaaatgtagctttataagattagaggtattagtgtcacgtatctatacttaactactatatgtcaactacaagcccagtatgattgctttgtaatattcacaaatatttaacaaatagttaaatagaattattcactgaatttcctaaggggtaaaagaaggaaacaagctagtctttaaaatttgttcttaccggccaagaatttcactatttttatagatgyctattggttgtctatctaatctatttctgtacatgcatttgtacctgtagctatatattctttactcattacatcagcctttggtggcagctgttatcatcctcttttaggaagagaaggacccaagtcatagaataaggtgtatgtatagattttagtatacttaacacctcttttaaatttcaggggttgtggactgctatttctgtcacaaacatatagagaaaggcggtattttttagtattcaagctcaactgaagttctctttagtaatatgaaattggagatattcttgaaagtaggcaatttactttcttgtatttaagtcactcaaaatctactttttat

SEQ ID NO: 1955 - DNA, 575 bp, Homo sapiens
ctttataaataattcgtctcacttgttttcaactttggagtacaaaagatcgttctcagaagtgtgttaaaaatgttgtttcccaatttccaattcaaaatattctgatgcaggatgtaaacacattctttattgatatgcacatagtgattctgatttggaatattaagggtcccattttgaaaaccatggtctagtttatttccatcttttgagagatgaaaaaagagaaactcacagaaattaatacattttcctgaggtcactcagataattaactatgacagaggtatgagcagaattcaggttccaaaatattaataggctagtgactcttatcaattaaatattattatccgagttggtgtgcaagatggatctagtggaatttatcaacttgtctttcttctccctmgggattcttttccctgagaaaggcagtatatctccagatggcagtggcaactatgaaataaagtcatgaattttttctttggcccattttcttcccaattgactatgatgttttggcatgttcttaacacaaaatctgttgaatactatcaagggagcca

SEQ ID NO: 1956 - DNA, 575 bp, Homo sapiens
ctttataaataattcgtctcacttgttttcaactttggagtacaaaagatcgttctcagaagtgtgttaaaaatgttgtttcccaatttccaattcaaaatattctgatgcaggatgtaaacacattctttattgatatgcacatagtgattctgatttggaatattaagggtcccattttgaaaaccatggtctagtttatttccatcttttgagagatgaaaaaagagaaactcacagaaattaatacattttcctgaggtcactcagataattaactatgacagaggtatgagcagaattcaggttccaaaatattaataggctagtgactcttatcaattaaatattattatccgagttggtgtgcaagatggatctagtggaatttatcaacttgtctttcttctccctcgggattcttttccctgagaaaggcagtatatctccagatggcagtggcaactatgaaataaagtcatgaattttttctttggcccattttcttcccaattgactatgatgttttggcatgttcttarcacaaaatctgttgaatactatcaagggagcca

SEQ ID NO: 1957 - DNA, 625 bp, Homo sapiens
ctataattttacagtaagtaattgattcctcagtatcatgttctaatgtagatatgagaaaactctgacacagtgagctgaggtatgatgtagttctcaacaaagcactgttatatgccacttgtttaccagtatgggccagcatttctggaggggcatggtctaaatcacttaatcgtcacaagtaccatatgagtaggtgactttcttacccccaatttaaaaaagacaagccatagacaattcaggtaattctgtggcgaggctgggatttaaccccatgaatgataatctagtgggtggtatctaaaatagagtatggcacatggtgatgtttaaaaagattaaactctctgaggatggaaaatatgatattcctagcaactaactctatacttcaaagatagtccatgtctgatttgtttttcctaaataaaggtatgtttggttaaatgaatgaatcgaagtaacttattgtctgccacactggctatgtatgacataagggatatcttcccaatgatgactggagattaggcttgtgtcaacaactggtgtactctacaaggcatgggtaaatgattttatatgtatttgcrtatataagtatatacacacacacaca

SEQ ID NO: 1958 - DNA, 578 bp, Homo sapiens
cttaagtgtgtcgtcatagataaactatgtctatatctattgtcatacagacttgaattttcttttttcaggaattcatagtcgctagtcacatgccctttgcatcttggaacttcactggtgccttgttggtgaaagcactcaaaccagtaaaaaataaacctgaatgtaaaaatattcagtttcataaaccagacaacatatttccaacacccagatgctaaatgttaaaccaaacgatttaaaaaccaggaactgggaggcttcccaaactccccaactgattgcctcattgacaagattataaacaatcattatgagaaatgacarcttggtccctgccatggctgggtatgatagaatgttactgatttcaaagaaatgtggtaaattggtaatgtggtaaatcagtaacttaaaaccaaaaaactaaaataaaatatttaatataaaatagattattatatttaacttacctgagggagtttgtagaacaaatacaagatgcctaaatgacactagtgtctacccaaatttgtaaagaacaacattcaaagcattgatctaaaatattcctt

SEQ ID NO: 1959 - DNA, 611 bp, Homo sapiens
ttaaggtgcagaatattgcaaatggggttcattcctttagaggttctctagaagactgtattaaaaacatttcagagtggcccatacaaggaatgaggaagttggagtatttatcctccaacacctgtccataattgctagagagctgctcctcaggccatgaactcctgggtacttccagcctgcccgagcacaggctgagcttgaccctgccatcagagaaagcasgcaggttgtgagtcacaggtgttaggagaaaaaaatgattcttgtgtacaaggattgtgattgctaagagaatccaaacaattcagacagtggctgtgtcaaagtcagtgagagatgggaaatatgaattgatttatttcaccagtattacccccatgtgtctcttcacatgaacatcacagcaccctgcatattattctaatgtttaagatagaaatttccataaatgcaaaaacacctactttttctgctgctcacctgagaaaataaccaactgtcccaacacttggcatttgctgagccctttcatctctaaacttttaaaaaaggcttggtagcttcagcccccctttatcatgaaatctggtgaaagaaagaagaga

SEQ ID NO: 1960 - DNA, 680 bp, Homo sapiens
taacactaaaaaaaactatcaccatcttaagaaattaaacagtacaaatacatgaaacttcctttcttaaggtaagctttattcctgagtttgatattaagatataaatgttcattctgtatgtatgaaaatataatcaaaatgaccatattgaagtatacacatgtagcttagtttggcttcatttttcaggtataaatttatgttttttttgagatactccatgcttgtatatgtagacaaggtttttttcattttcatttcagtatttcataatatatttatccattctactttgctagacatgtaggttgtttctaatgttttcaatactacagatcatctctgcattgaaaatcattgcatagggcggatcacctgaggtcaggagttcaagaccagcctggccaacatggtgaaaccccatctctactaaaaaaacaagaattagccggcagggtggcaggagccggtaattccggctactcgggaggctgaggcaggagaattgcttgaacccaggaggcggagtttgcagcsagctgaaatggtgccactgcactccagcctaggctacagagccagactccctctcaaaaaaaaaaaatcattgtgtattaccttctaatatagtatatatatgcaagctattctacagggtatattcctaggagtgagat

SEQ ID NO: 1961 - DNA, 924 bp, Homo sapiens
  misc_feature (1)...(924): n = A,T,C or G
catgcactgctcaggctctgtgtggggctgctcagggtctggggcaggtgcagagtggaagcgagaatgcagcgctctggggcgccaggtgcctgcctgaacttcctggctccaagcagttccctgcctgccaggctggaggatttgtcttctggggctgcacagatggagcctcctagactgcagggaggacaggtccctgtactggtgcaaggactcagtgcctgtgagctgtgtggcctcggggcagccccttccctcttaggggacctgttttggcccactggacactatgattgaaagcacaggttccagcttgcaggtttaagtcctggcaatgaccttgggcaaatggtttgcccctctggtcctcagcgccctgccctgccaagtggggcagcagcccctgctgtgtgagagcctgcatgctggtggcagcagctggaccctaagcaggcttcagccctggacactgcaaattgttcccttgagcttccatcacagtgctgccggaggcgcgggaaggcaacrtggtgtgttgtaacacgctgcctggtgggagcgtctctgctaggcctcgagggccctcctttgaggttggccaggaaggggcaggagagaggagagctggggccagcaaagcaggctcagagacgcctccagattcggtctgagttgaaagggctctggtcgcagtgtggagcaggtgtgccctacattgcaaatcccactgggtcttctcattgccccacagcagccccaagaagcaggtggtgtcgctccctcaagcccggagtcagaaagggacagaacagggactcgcnnnnnnnnnnnnnnnnnnnnnnnnnnnnnnnnnnnnnnnnnnnnnnnnnnnnnnnnnnnnnnnnnnnnnnnnnnnnnnnnnnnnnnnnnnnnnnnnnnnna

SEQ ID NO: 1962 - DNA, 729 bp, Homo sapiens
acccagatgtctttcagtaggtgaagagacaaatgaactgttggctcaatggctcacacctgtaatcccagcgctttgggaggccgaggcaggcggatcacctgaggtcgggggttcgagaccagcccgaccaacatggagaaaccccatctctactgaaaaaacaaaattagctgagtgtgatggcacatgcctgtaatcccagctactcaggaggctgaggcaggagaatcacttgaacccgtgaggtggaggttgcagtgagccaaaattgtgccattgtactacagcctgggcaaccagagtgaaacttcgtctcaaaaaaaaaaaaaaatagcaatgagctgtcaagccgtgaaagatgcagtagaactgtaaatgtatcttaccaggtgaaagaagacaatctgaaaagactgcacactgtgtgattgcaactctgtaactccaggaaaggcaaaactatggagacagtaagatgacgkgtggttgccaggggctcgggggaggaaggaatgaataggtggagcgcaggggacttagagaacacaaattctcatttccaatctgtgcttggttgaattggtggatgaagaacctgcggatacacagggctgactgtattgcatatgacacagtaaagatggatacatgtcattgtactaccgtcataactcacaaaaccggccaggcacagtgccttacacctgtaatcctggcaatttggga

SEQ ID NO: 1963 - DNA, 593 bp, Homo sapiens
tgaatggattaatccactcacgagggcaggatcctcatggcycagcaacttcctgaaggtcccacctctcaagacggctgcactgggaaccatgtttccaacacatgaacttttgggggacacagttaagccatactgcattgtccctgctgacattttgattctggatggctggcctctgaaactctgagggagtaaatgtctattgttttaagacacccagtttgtgggactttgtcatagcaactacaggggatgaaagcaagtcttacatgtcccaacacatattcatggaatgaatgaaccgatggatgggtggcgggggatggacaaggcagcgcattctacttctctcaggggtttgccatgaccaggtgggtgggtccccctacccgtaagtcacgcaagcccgtgagctgtgtcttctttgtctgggcgtctctgccacacagtagacccttagcacacaactgcggcatggacgcctgtggaaatctggccgcgcagtgctagtgaccacgtggcacagaatgtggcagaagttgtgccccgagcccagaggtatggtgcgaaggagcatggaaagctgttta

SEQ ID NO: 1964 - DNA, 540 bp, Homo sapiens
tgaggccctgtgctggcatttggtgacatccatatttgaagccaaactcattttctcatgcatcccctcagcccctccagccgcgtgccctccgttgccagacatgcttcttctctccacgtagcctgtgggtctcccctccgtcagcccagacccagttctggctccttctccaggtgcctggcacatgctggcttcccacagggcaccacctggctccactttgcgtgtgggtgtctggtcttgtccagactggaggctgatggagttcagggactctgcctctccttcttacctaccgatgaatcccacagtgcccagcaagctccctttaatgtgccagatactcaggacagcttcctaaatgttaaaagcaacatttttttctgcttattaaaaaaagaatccgcgctcattgtaagcaagttggagaatactcaagggtataaagaagagcaagtcaaaatgatcccataaccttcagaagamccctgcctgggaatagttcattattttttggtatttttttctgtatttaca

SEQ ID NO: 1965 - DNA, 573 bp, Homo sapiens
ctgtctgatcctcccaataaccgtctcttagttaaggagagcagatacacttattyctacactgcagatgcagaaatcaaggctcaagggagataaatggcttacccaagagtatatggctgtcaactagcagaactttaaataaaacacaaattttctgattcctaggccagtgctcttcctaccatgccatatgtttttaaagtagtatgtatttaacttctggtacttcctatgactatctcttgcctgaataaatgggaagataactatgtattccattatctcttgcattcacccatttccctgaagttttttatttaaaaccttctctacaagctttatgacctcaacagcccaatgccattctgtttcagaagtctatctttcctataccagttttacctctggtaaaattctcctgtatcactgtcatatacatgaattgagagaatttggaaaaaattttcagaatctgatcgtgaaaattgcaaacacatcaaagattagagaatcagggcataattcccctgcctagcagttcaaatttgaactccaggactcttttacatt

SEQ ID NO: 1966 - DNA, 2475 bp, Homo sapiens
atgctcttgttgcctgtcctaagatgaattccatctctatcaacatcctagaagatgtatttaaatttatatctgaaccagaaagcaaggaatgacatcatctgaggagcagagactagaaggatttcttggaggagagtaaacaaatggaatctaattaatgaagaaacctgatgatgccagttaaatgatgcccactcacaytggtgagggtggatcatgtattttactcattctatggattcaaacgtttcttcattaattagattcttcactaatcaattagagtttcatcaatttcagctaatggttcactgagagagccactaaagaagtaaaagtcatatcttagaaaaaatagagcaattggttaaacacacacactggaaatgatgagattttgaggttctccccttctcactcattaatggaatgggcagctgcagaaagttctggaaatgtgctggtgttcagaagcaaggcagagactctgaatgcccagcatccagaggaaatgaggccaggccacctgcagcccgtcctgagtgctgggtcccacaggggctgagaaactcatacccatcaagaactgtgagatccagatatttggttacagaagtgacacacacgcaagtcaccacatgtatatcagaaaccaacacaaataagtaggaatatatttgaaatttaaattaagattagtatcttcaaagagatttgagaagatgggcaggtattaaaaaggtatttttaaaaaatcaatagataggctgaaaaacagcttttaaaaaaagaacaaagcaatgcaaaaaaacaaattagtaaattgaaagaagggaaagagtttttccaagaatcaagacaaaagggcaaagaagtagaaactacagcaacaacagcaaaacaaacaaacagcaacaaaacacaaaaatgaaattagctgcagaagtcccaattgccaaaaacatcccagagggcaagaatatgacagcctaatttatcttgtccaaaggaaacctgcactcataacaatatctatttctcttcagtcagtgattgtccctcccatattaagaatcctttaggcctaaaattaagatgaggggctaaaagccttcagaaagagggccaactataaaagtttctacgtgatctcacccctgcagattgaggtctccaggactgaatcactgtcaatgcatgggcatgcagcttctgttctttccaactgtgtctttccttgcttaagagtgcccacatgacccgcagtttatctgattgaattaaggcctatgaaacccaatatagtgtaactggctattctctgcttcatgctgaacttaccagctttgtggtaaataaaagaccactggaatctctgaaagaacaaactagaaatatccattttttataaaatattctgagacaaaaggaattctgggataagatggacatgataattatgaaatcagctttaacaattttcacgaaattttttctctctcagccaggcttggactggagtaattcttgacaccttggaatattaggtgaggtgtatttagggctgttcacatcccctgtgttacttttaaagttgccttcagtctccaacatagtcatggcttcttaaaggaggaagtgaagaggtgacggatgggcgctctgtcaacaatattccaaagctgctgtattagtcaggcctctctcagaaacagaaccatctgtctcctaatatctcctgttggtctgtttcctggaggtccctgactaacttgactaacgcagcaagtttggaagatagatagatagatagatagatagatagatagatagatagatagttaaaattagttcacaaggctgtggaggctgacagggccaagatctacaattagtaggcttgaaaccaaggaagagtcaatgtttcagttcaagcctgaatacaggaaaagatacccatctcaacagtcaggcaggagttgtccctcctactcagcctttttgttccatttggaccctcaatgtgttggatgatggccactcaaatcggtgacagtggatcatgtactttactcattctatggattcaaatacttatcttagccagaaacacactcacagacatatgcggaataatatttgaccaaatatctgggcacctggagcccagtcaagctgacataaaattaaccatcatatgtactgtcttcatccatttcgtgctgctatagcagaatacataaaactgggtaatttataaagaatataaaattattctttcacaattctggaggctgggaagttcaatatgaaggtattgcagattatgacccagtttctctgcttccaaggtggcaccttgatccctgactcctttggagaggaggatcattgtgttttcacatagtagaagagtgggagagagagaactcactcctgaaagcccttgttatggcaatgctatggtttgaa

SEQ ID NO: 1967 - DNA, 2475 bp, Homo sapiens
atgctcttgttgcctgtcctaagatgaattccatctctatcaacatcctagaagatgtatttaaatttatatctgaaccagaaagcaaggaatgacatcatctgaggagcagagactagaaggatttcttggaggagagtaaacaaatggaatctaattaatgaagaaacctgatgatgccagttaaatgatgcccactcacactggtgagggtggatcatgtaytttactcattctatggattcaaacgtttcttcattaattagattcttcactaatcaattagagtttcatcaatttcagctaatggttcactgagagagccactaaagaagtaaaagtcatatcttagaaaaaatagagcaattggttaaacacacacactggaaatgatgagattttgaggttctccccttctcactcattaatggaatgggcagctgcagaaagttctggaaatgtgctggtgttcagaagcaaggcagagactctgaatgcccagcatccagaggaaatgaggccaggccacctgcagcccgtcctgagtgctgggtcccacaggggctgagaaactcatacccatcaagaactgtgagatccagatatttggttacagaagtgacacacacgcaagtcaccacatgtatatcagaaaccaacacaaataagtaggaatatatttgaaatttaaattaagattagtatcttcaaagagatttgagaagatgggcaggtattaaaaaggtatttttaaaaaatcaatagataggctgaaaaacagcttttaaaaaaagaacaaagcaatgcaaaaaaacaaattagtaaattgaaagaagggaaagagtttttccaagaatcaagacaaaagggcaaagaagtagaaactacagcaacaacagcaaaacaaacaaacagcaacaaaacacaaaaatgaaattagctgcagaagtcccaattgccaaaaacatcccagagggcaagaatatgacagcctaatttatcttgtccaaaggaaacctgcactcataacaatatctatttctcttcagtcagtgattgtccctcccatattaagaatcctttaggcctaaaattaagatgaggggctaaaagccttcagaaagagggccaactataaaagtttctacgtgatctcacccctgcagattgaggtctccaggactgaatcactgtcaatgcatgggcatgcagcttctgttctttccaactgtgtctttccttgcttaagagtgcccacatgacccgcagtttatctgattgaattaaggcctatgaaacccaatatagtgtaactggctattctctgcttcatgctgaacttaccagctttgtggtaaataaaagaccactggaatctctgaaagaacaaactagaaatatccattttttataaaatattctgagacaaaaggaattctgggataagatggacatgataattatgaaatcagctttaacaattttcacgaaattttttctctctcagccaggcttggactggagtaattcttgacaccttggaatattaggtgaggtgtatttagggctgttcacatcccctgtgttacttttaaagttgccttcagtctccaacatagtcatggcttcttaaaggaggaagtgaagaggtgacggatgggcgctctgtcaacaatattccaaagctgctgtattagtcaggcctctctcagaaacagaaccatctgtctcctaatatctcctgttggtctgtttcctggaggtccctgactaacttgactaacgcagcaagtttggaagatagatagatagatagatagatagatagatagatagatagatagttaaaattagttcacaaggctgtggaggctgacagggccaagatctacaattagtaggcttgaaaccaaggaagagtcaatgtttcagttcaagcctgaatacaggaaaagatacccatctcaacagtcaggcaggagttgtccctcctactcagcctttttgttccatttggaccctcaatgtgttggatgatggccactcaaatcggtgacagtggatcatgtactttactcattctatggattcaaatacttatcttagccagaaacacactcacagacatatgcggaataatatttgaccaaatatctgggcacctggagcccagtcaagctgacataaaattaaccatcatatgtactgtcttcatccatttcgtgctgctatagcagaatacataaaactgggtaatttataaagaatataaaattattctttcacaattctggaggctgggaagttcaatatgaaggtattgcagattatgacccagtttctctgcttccaaggtggcaccttgatccctgactcctttggagaggaggatcattgtgttttcacatagtagaagagtgggagagagagaactcactcctgaaagcccttgttatggcaatgctatggtttgaa

SEQ ID NO: 1968 - DNA, 1319 bp, Homo sapiens
tttttaatatgtattgaaatgtttaacagatttaatttttcaggagtgatccatgtctctttggataccaatccagtaatttcccctttgtacacaatatgccacattaaaatgtgccactagacccctaacccggtgaatctcactccataagttatgggacatggttattatattgtaggcatctttagaaaccagtggttctctattaaagtgcatgaccaccgcaattaaggatggaaagggaacagagtccagttgaaagtgcacaggggagctgggcagaatgtaatttaattatcagagttggaatttgtccagcactctacctgccataaggaaagtctcctgggatcttcagtgcccactagtggtcaggattccagctttacagccatccaattaaattgccaagcacatcttctgctataccataagtgacagggctggggaatccactctgctaatgaagtatctggggccttgtgtcagtttcccagaggatttttcagggtatgtggatatgtgtacaaggccaagtaaagatgaacctaataagaagtacttccattatggataatgagcaagagagactttaaccatctcttctccacctgattagtgttggacaatctctacagcataaattagaatacaattgaaaaacgaggaactctgggcagtctccaggagcctcctccactcagtttcttcattatggtcaagctcaaaatgtacacattgctttgcatagtccctcatgccctctggaggaattcaccctcgcactttacagcagatcttacttcaggatctcaatctactcttcaagatcaaactgcagggtaaaggtcctcattttcccatatttttagattaaaatatgactccaccttcttcaatttcccccttttaaggaaggacaatgatacctgtcatctcaacaaaatctcaagaatgatcactaaatatttttttccaaagtgaaaagtaggaaagccccttcaaattacctaacgcagtggttcccagacattattccattaaccaggaacactagaatcacttttaaagtttattaaaaagagagattcccaggtcccactccagatctactgaaacagaatgaccaagtattggagcggggtatttgaattctctacaagcccacaaggtcagtctgcttgtttgggacccaagactgacttcctttggaggcaaaataacaaaggcccaaggtgtgattctgaaaagaaaacttyatctatatatcacacataatgcacacaatatctttttcccttttctgtgtttatttt

SEQ ID NO: 1969 - DNA, 1272 bp, Homo sapiens
tatgcatgtatacataccatatatatgagatagttttgctatctttcttaaatatacatttaaacatgtggtctctgctctcaattatctttcttagaaaatgaataaagtccaaatatccaacattagtgagaatattaaataaattacagtactttcctactgtgaaatattatacggtcattaacatgaatgaggcacatacagtaatatggaaagatgtccatcacatgtagttgagtgaaaggagccagttacaaaacaatatgatccagcaaataaatattagaaactcatgtatgcagaagcttatgggaaaatatctggaaagatatatgtcaaacagtakagaaaaggattggaaagtggggaaaattttttttaagtttctattttattttatatctgtgaattgtctaaatgtttataatgaactcatgctatttttataataatattaaatgatatgctgactatctaatcatatttgatggtgtccattatttagctagatgccctcccatgccattatttactccatttgatttttctaattttacttcccattctctctcccattacactggattttaccttttctaaacactgcctgttttgtttaatgcttccacctcaacccagagtatctgtgtttcccctaaattccatctccaaagaaaattgtgcatatattagatttccatatacattaaaatactccataaaaggagaaaagtaaatattcaagaaattatatatatatataagatttcttttttgagacaaggtctcactctcttgcccaggctggagagcactggtgggatcaaggctcaatgaaacctcaaacactggggctcaagcaatcctcctgcctcagccttcctagtagctgggactacaggtgtgtaccaccacacctggcttttttatttatttatttactgtagaaacggggtctccttatgtttcgcaggctggtcttaaaatcctgggttcaagtggtcttcctaccttgacctcccaaagtgctgggattacaggcatgagtcacagtgcttggcctgtattttgaatcaacaagctttaatatgttttaatacattacttcctgaattgtaaggtgtcaaaaaataataaagagtagttacaaagttcttgagcagataactattttccttgtaaaaagatggcttacttaaacatcaagaatactatgatagccttgaataccttttagaatgagataggacacaaaaaaagaaaaagatg

SEQ ID NO: 1970 - DNA, 591 bp, Homo sapiens
cactgttgaaaagcttgcccactgtgttcccctggcataaagaataaatgtttttaaaaacatgcacataaaaatactccatttagatttcctaaaamaaaaatgattcaagtagaagataaatcatgctctatgattaactcttgctaacaggtagtaccaaatggcaaagagctctgcttaaaagaataattcaggtatcattcatataataaaaagatctgagaagtgcagcagagctagcacaaaaaaatatttacactattaatgtgctgtcattgccatccaaacatttgaggaggatcttcccctctatcatttccagaattatcacattatagtctctctcactcacttaaataaagacataaaatacaatcaccacccacacagcactctccaagctaaagccagtgggagtgttgactatggtaagattgcagaagctaaggtgccaaatctcatttacaatgcactccctccacatttcttcgaaaggagctgggttaggctcttaagcagaggctctgcgacattcttaatttattttccctccaatatcctttttatcagtaagtgagaatagcagta

SEQ ID NO: 1971 - DNA, 659 bp, Homo sapiens
tgccccagagaaggaccagcaaacgggggtgtgttcagatcagactggtcccgtcccatggacaagatagctctgctctgttcaggtctgacagtcaacaaaggccaaagccacctaggggagtgtggtaagccttggaggatgtgcatccctggctgtgctctactgtagtcatgctgtgccaacaccccccagttccccaaaggctggagtcttgtccctgacacttctccaagcagctctccatgccagctcggatgtatatggcggtcatggggattcctayggttaatattctagaggtccgtggtaagtccatgggccacttctcacctatttaactcactccttccaaggagtcactgggggctaggaacaagtcctggtgcttggcagtctcatgcagggttcccagcttcctcccccttcagcccagtgtctgcatgctccctttttccactcttaatgatttccttctaaagatctccttagagtatactggacttcatgatggtctggtttcaccatgggagatgcttttccttgctgtgtctagctagccatcttggctcctctcacttttttgcatgtgtatttttatgtatatgtcttctacagagaaagcaccaaatttagatgacttcactgataagtcctac

SEQ ID NO: 1972 - DNA, 663 bp, Homo sapiens
aaactttctaaattgattgagacctgtctcaaataccttttggtttacaacctcatattcagatctgcaatccacctggaaatgatttctgtatatacatgagcattttttagtttttattttattttttcttattttggctcgtttttgctatcgacctctagctcaactaaattgtggtcaagaaacattctgtatgatttcagtcctttgaattttacgaatatgcattatgactagtgtttggctaattgctattaagttctccttgagacaataaaaatgatgtgcattctgcagaattatatggtttttttttgtttgtttggtttttctgtttttttgagaaagagtctcactctgtcgcccaggctggagtttagtggcatgatctaggctcactgcaagctccacctgccgggttcacaccattctcctgcctcaacctcccaagtagctgggactacaggagcatcttttttcccgtcttctttcccatcttttttctttccaacctttctatattttgtttttacatatatctcttaaatagtgtaaaatcaagtttcgttttttgtctaggcagataacaactgtctttayttacattaaatatttttaatatttggctttaaatctacaatcttgctctacattttctat

SEQ ID NO: 1973 - DNA, 554 bp, Homo sapiens
atgtctgctcttcatcctaaatgcctcacagatctggagcctctcatttaccaaaatccccaagaagttccccaatttcctccagcccaagtgtctttactccctcctgctcagtgtctccacacttctgtaagtggaggacctaacctctttggacaaccgcttgccctattcttccaggctcctgagtcctgcctttctctgcctatgctcagactctgcatcacacaagttcctggaaccaacccggcagagacaaaatcttctcaaccagcagagaaagaaaaacagacaagcacttcaagattgcctttggcaatcttggggaaaagagaagtctagagacactgcactaaaaacttctatccactcaaacacatatttcattttatatatatatatatatatatatatatatatatatatatctttttttwattattatagtttaacttcatttaactgtcacaataatcctatgaaggcaggcaatattattacccctgttttataaatgcagaaactgcagctaggcaagattaggtaatatgccc

SEQ ID NO: 1974 - DNA, 1248 bp, Homo sapiens
aactcttgaggtcttttgtgttcttatgccccaaggctgtggtgttattactccctggagtattagttgtaggaactggttggggttcccatagtccagtccatgggcctgtttggcaggcagcttggccctgagccctgaggtatgcttgatgcttttttaggcccagatatagtaggcatgtgttctttcatgtgatgtgggttttaagaaaatgttcacttgcgtctacggccataccaccctgaacgcgcccgatctcgtctgatctcggaagctaagcagggtcgggcctggttagtacttggatgggagaaaatgttcacttgcgtttttccttgtctccttcttgccctttcttcttccctccacccaaaatactatttttrgtttttgcattaggtacaagttgtttttatatagctctttttggctcccctgtaattggggtcctgagactgctgtcctgtttgggctactgtgttatgttcctgtagttaacatccccactgttttctttgtttgtttttttgtttgtttgtttgtttttttgagacggagttttgctcttcttgcccaggctggagtgcaattgtgtgatctcggctcaccgcaacctccgcctcctgggttcaagcaattctcctgcctcaacctcccgagtagctgggattacaggcatgcaccacaatgcccagctaattttgtatttttagtagagacagggtttctccatgttggtcaggctggtctggaactcccgacctcaggtgatcgcctgccttggcctcccaaagtgctgggattacaggcatgagccactgcgtctggccccaacatccccactgttttcatgtgtgaggaagtcaggttggagtggtggctgagagcatgagacaggctcgggttcaaatccagtctttacctaattagttacttaatctctttaagctttagtttcctcatctgtaacaataacattattatggaacattcactctatgccacacattctactacatatttacctcctagggttatctgaaatagtaaaggagatggatgtacttaggaggtctagtaacctctgacatatgttaattagtcagtaagtgttagctgttgtcatcagcagtgtgctcatttatgaatgtgatacctgaaggaaggcttgatgtaatagtgagctattgacagatctcagcagtcttgttatgaaagagcagtttcgctaagctcaagaaggaa

SEQ ID NO: 1975 - DNA, 615 bp, Homo sapiens
atggcctttaggcactttatttgccatttcatccaattaacagataattaaaaatgctgcctatgagtaccttttctcccttcctttcatcaccaaagataacacagtgctttaaggatgaagtgctagatgcaggccacatcaatggcaggtctcaggagtatcaaaaacaaacgcagccaaccttccatttcacggagtctcaatcactttgtaacttgaccctctaggtttgggttttaataatctgctattctcctttaactagttaatgarttgttattgggctagtcatgttcccaaagtttcaatgtgttactagagtcatttgcatgtggattgtcatgggtggattactttttagcacaaagagtaaatcctacttatgactaaattggcagagagatccatttatagatactgggaccagtcttttccctactcagtaaggggaagaaatggacaatatctagcccaaagaatcagagcctgatttgatagaatagtcaaataaatacattttaagggattttttttcaataccaatcaagataggccattttaacatttgtaatatgaacaaccctcaaacttcaatgattccagccaggtttt

SEQ ID NO: 1976 - DNA, 596 bp, Homo sapiens
ggattgctggatcatatcatacctcaatgtttagttttctgaggaacctccaaactgttctccatagtggttgtatgaatttacattcccaacaacagtgtaagagggttcccttttctctgcacccttaccagcatttgttattacctgyattttggatataggccattttaactggggtgaagtgatatctcattgcaggtttgattgcacatatctaatgaccaatgatgttgagcaacttttggtcatgtaactatctttaaaacaaatgcagcttgatccctttttaatgtaatcagttcagcttcaaaaactggtatattgcatttgggatacaaacagtcaacatgaatcttccaactcaatttatttgtttcagctcacgaacttttcagaatccctagtggcttagtgacaaagacctttggagagaatgatcatgggttttgatcaacactgtcgcgattgcatacagacatagctagagaacaagcccagtgattattctacagaccataggaagcatctacacctcagctgtcggccgtttggttacagaaatgcgatcctgcaagttgtcaccactatacata

SEQ ID NO: 1977 - DNA, 733 bp, Homo sapiens
acagatacacagcagtgtcaaatttgccccttttataagcaatttccattccccttccatcctcaattttaaggagaaaaacacaagaccaatttatgcttaataaaagtctgcttactaaaaaaaaactggggaaattatattctagggtaycaaatttccccataataaaaattattcctgtaatattttcttattagtctttgcttaggtgacaaaataggtacctaagacagagaaattttgtgaatatagcattattcaataagtacacaaactgtgacaaaaggttaaacctgtattgagttaaaatgattggtatcattctgacaatttcctgttcttcagagaagcaagtgagatggcagtgagtaagagcactgcggtcaggaagtcaaagcaaaggtcagcactctttctagagacggtataaacagttaatggaaaaaatagtaaatgattgcttaaaataatatggtaaaaactattttatagaaaagtatagtattctacaccaaaagtgaaaatgtacatgtggcagaaattagacctaagttataacatgtatatttatttattacacatatatccacatatacatacatatttatgtacacacactcacatatatccacatacacacacaggcattatatacgcgacctatgtgtatatgtatggatgtacacacacgcacaacttctctttagattgtccatgcaaaaccctggta

SEQ ID NO: 1978 - DNA, 733 bp, Homo sapiens
acagatacacagcagtgtcaaatttgccccttttataagcaatttccattccccttccatcctcaattttaaggagaaaaacacaagaccaatttatgcttaataaaagtctgcttactaaaaaaaaactggggaaattatattctagggtaccaaatttccccataataaaaattattcctgtaatattttcttattagtctttgcttaggtgacaaaataggtacctaagacagagaaattttgtgaatatagcattattcaataagtacacaaactgtgacaaaaggttaaacctgtattgagttaaaatgattggtatcattctgacaatttcctgttcttcagagaagcaagtgagatggcagtgagtaagagcactgcggtcaggaagtcaaagcaaaggtcagcactctttctagagacggtataaacagttaatggaaaaaatagtaaatgattgcttaaaataatatggtaaaaactattttatagaaaagtatagtattctacaccaaaagtgaaaatgtacatgtggcagaaattagacctaagttataacatgtatatttatttattacacatatatccacatatacatacatatttatgtacacacactcacatatatccacatacacacacaggcattatatacgygacctatgtgtatatgtatggatgtacacacacgcacaacttctctttagattgtccatgcaaaaccctggta

SEQ ID NO: 1979 - DNA, 733 bp, Homo sapiens
acagatacacagcagtgtcaaatttgccccttttataagcaatttccattccccttccatcctcaattttaaggagaaaaacacaagaccaatttatgcttaataaaagtctgcttactaaaaaaaaactggggaaattatattctagggtaccaaatttccccataataaaaattattcctgtaatattttcttattagtctttgcttaggtgacaaaataggtacctaagacagagaaattttgtgaatatagcattattcaataagtacacaaactgtgacaaaaggttaaacctgtattgagttaaaatgattggtatcattctgacaatttcctgttcttcagagaagcaagtgagatggcagtgagtaagagcactgcggtcaggaagtcaaagcaaaggtcagcactctttctagagacggtataaacagttaatggaaaaaatagtaaatgattgcttaaaataatatggtaaaaactattttatagaaaagtatagtattctacaccaaaagtgaaaatgtacatgtggcagaaattagacctaagttataacatgtatatttatttattacacatatatccacatatacatacatatttatgtacacacactcacatatatccacatacacacacaggcattatatacgcgacctatgtgtatatgtatggatgtacacacacrcacaacttctctttagattgtccatgcaaaaccctggta

SEQ ID NO: 1980 - DNA, 813 bp, Homo sapiens
tttaaagtataaacttycccagtgtttttcattgaactttatcttcaaaaccaaatagaaaatagaaactgagttgaatgtaggagcttttccattgctagtcatagtaaaggccacatccagctgtacaatatgggaataacaaggctttaaaagctatctggggagagaaaggcaaatgggaatgaaagaataatttagttttttgttgttttaatgtttttcctctaagtcttcaatttagagagaattctgtattctaatttgaaacatggtaagaggaagtaaatgtttatattgattacagaggtgacactgggatatagcttttcttaaaataatatactttatgtaaaaagcagaaaaatcagaactaatgagatttaacaaattattgtgggaattgagtctgattctgtaacattaaatgaaatgttagattcaaaagtcattcaaaccaataatattacatgtagtgtagcactggctgaaatatatttaaaagaaaaaggaaataaaaatatccaattaaaaatcaaagaaatagtggtctcaccttatgacatttattttattttactatttttatttatttatttatttatttgagacagagtcttcctctgtctcccaggctggagtacagtggcacgatctcagctcactgcaaacctccgcctcccgggttcaagtgattgttctgtcttagcctccctagtagctgggactacaggcacctgccaccacacctggctaatttttgtatttttagtagagatggtttagtagagatgttggccaggctggttttga

SEQ ID NO: 1981 - DNA, 651 bp, Homo sapiens
taagcactttgtgcagctcgcattgctgtgtgacctcagacaagctgcttttcctctctgggcctcagtttctccattctgtgaatgggaggatggccaagccactacagtctggcatggcatcagacaaaaaacacgtcatctagagctgtgttatccactagtggaatcaccagcttaggyggctatagagtgcttgaaatgagttggactgaactgagatgccctgtaagtgtaaaacataccagatttcaaagacttggtacacacacacacacacacacacacacacacacacacacacacagagagagaatgtaggatatcccattaatacttttatattgattatatggtagtctgggtgcacatatgataataagtggcctgtaatctcagcactttgggaggctaaggcaggaggattgcttgagcccaggagtttgagaccagctagggcaacatagtaagaccccatctctacaaaaaataaaaaatcagccaggcatagaggcaggtgcctgtagtctcagctacttgggaggctgaggcaagaggattgcttgagcctgggaggttgaggctgcagtgagctggagtcacaccactgcactccagcctgggcaacagagtgagaccctgtctcaaaaa

SEQ ID NO: 1982 - DNA, 651 bp, Homo sapiens
taagcactttgtgcagctcgcattgctgtgtgacctcagacaagctgcttttcctctctgggcctcagtttctccattctgtgaatgggaggatggccaagccactacagtctggcatggcatcagacaaaaaacacgtcatctagagctgtgttatccactagtggaatcaccagcttaggtggctatagagtgcttgaaatgagttggactgaactgagatgccctgtaagtgtaaaacataccagatttcaaagacttggtacacacacacacacacacacacacacacacacacacacacacagagagagaatgtaggatatcccattaatacttttatattgattatatggtagtctgggtgcacatatgataataagtggcctgtaatctcagcactktgggaggctaaggcaggaggattgcttgagcccaggagtttgagaccagctagggcaacatagtaagaccccatctctacaaaaaataaaaaatcagccaggcatagaggcaggtgcctgtagtctcagctacttgggaggctgaggcaagaggattgcttgagcctgggaggttgaggctgcagtgagctggagtcacaccactgcactccagcctgggcaacagagtgagaccctgtctcaaaaa

SEQ ID NO: 1983 - DNA, 803 bp, Homo sapiens
tgatkgattgatgaactgattgattctttaacatttgttgagcacctactgtaggccaaattctgcatggaatggaattttaagtatgacaagtggcacatgccagcctttgtatggaaacaacatcctgggtttcatccacttcctatgataaaccttcttcaaaactcatctagggaaacttcctcccaatctatacattccataatttaccacctggttgatatttttattggttttgctccaagagagcctagttgcagttgttcaaacagttttgcttagtcagcctgcaaatgaatttttaaaaatatcttggcaagtgtacaacttgcattggagaattctgcatgactttattgtgcttttacagagggtaggagtatatagaatggaatatatcacaaaacctttgtagtagttttggaagatgggggacaaattgctttgctcaggacatataaccacactaccacctggtggtaatgttgtacctgaaacccttgaataaaggtggccctgagcccaaatttttggtgaaatttatgaattggagagagatttttcatgtatgaaattaaaagggccaagcatccatgtaaaaccatatctcagaaatctgatgaaaattcagatcaatacttcccaattatcatctttaactgccatatttatggtgaatcataactgttctcagaagcaaagtgcttttcatgtgcctgacttgagataacattactattgcttccatttcacagctgagaaaacggaggctcaaagaggccatggaactgcccagggtg

SEQ ID NO: 1984 - DNA, 803 bp, Homo sapiens
tgattgattgatgaactgattgattctttaacatttgttgagcacctactgtaggccaaattctgcatggaatggaattttaagtatgacaagtggcacatgccagcctttgtatggaaacaacatcctgggtttcatccacttcctatgataaaccttcttcaaaactcatctagggaaacttcctcccaatctatacattccataatttaycacctggttgatatttttattggttttgctccaagagagcctagttgcagttgttcaaacagttttgcttagtcagcctgcaaatgaatttttaaaaatatcttggcaagtgtacaacttgcattggagaattctgcatgactttattgtgcttttacagagggtaggagtatatagaatggaatatatcacaaaacctttgtagtagttttggaagatgggggacaaattgctttgctcaggacatataaccacactaccacctggtggtaatgttgtacctgaaacccttgaataaaggtggccctgagcccaaatttttggtgaaatttatgaattggagagagatttttcatgtatgaaattaaaagggccaagcatccatgtaaaaccatatctcagaaatctgatgaaaattcagatcaatacttcccaattatcatctttaactgccatatttatggtgaatcataactgttctcagaagcaaagtgcttttcatgtgcctgacttgagataacattactattgcttccatttcacagctgagaaaacggaggctcaaagaggccatggaactgcccagggtg

SEQ ID NO: 1985 - DNA, 652 bp, Homo sapiens
tgcagccataaaaaaggatgagttcatgtcctttgcaggacatggatgaagctggaaaccatcattctcagcaaactgtcacaagaacagaaaatcaaacactgaatgttctcactcataagtgggagttgaacaatgagaacacatggacacagggaggggaacatcacacaccagggcctgtcagcgggtgggaggctaggggagggatagcattagragaaatacctcatgtagtgatgggttgatgggtgcagcaaaccaccatggcacgtgtatacctatgtaacaaaactgcacgttctgcacatgtaccccagaacttaaagtaaaataaaaaaaatttttttgagatataaacttatatacctgtatagggcgcttaccatgaatggagcttgcaggactggaagttgctctgggtgagtcagtgagtgagtggtgagtgaatgtgaaggcctaggatattaccgtgctctactgcagaccttataaacacagtacacttaggctatgctaaatttatttttaaatttctcctttcttaaataataaattaaccttagcttattagatgacctccacagtatatttggtccattgttgactgaaggtctttatgcagcacatgatcgtataattgatatccttt

SEQ ID NO: 1986 - DNA, 652 bp, Homo sapiens
tgcagccataaaaaaggatgagttcatgtcctttgcaggacatggatgaagctggaaaccatcattctcagcaaactgtcacaagaacagaaaatcaaacactgaatgttctcactcataagtgggagttgaacaatgagaacacatggacacagggaggggaacatcacacaccagggcctgtcagcgggtgggaggctaggggagggatagcattaggagaaatacctcatgtagtgatgggttgatgggtgcagcaaaccaccatggcacgtgtatacctatgtaacaaaactgcacgttctgcacatgtaccccagaacttaaagtaaaataaaaaaaatttttttgagatataaacttatatacctgtatagggcgcttaccatgaatggagcttgcaggactggaagttgctctgggtgagtcagtgagtgagtggtgagtgaatgtgaaggcctaggatattaccrtgctctactgcagaccttataaacacagtacacttaggctatgctaaatttatttttaaatttctcctttcttaaataataaattaaccttagcttattagatgacctccacagtatatttggtccattgttgactgaaggtctttatgcagcacatgatcgtataattgatatccttt

SEQ ID NO: 1987 - DNA, 652 bp, Homo sapiens
tgcagccataaaaaaggatgagttcatgtcctttgcaggacatggatgaagctggaaaccatcattctcagcaaactgtcacaagaacagaaaatcaaacactgaatgttctcactcataagtgggagttgaacaatgagaacacatggacacagggaggggaacatcacacaccagggcctgtcagcgggtgggaggctaggggagggatagcattaggagaaatacctcatgtagtgatgggttgatgggtgcagcaaaccaccatggcacgtgtatacctatgtaacaaaactgcacgttctgcacatgtaccccagaacttaaagtaaaataaaaaaaatttttttgagatataaacttatatacctgtatagggcgcttaccatgaatggagcttgcaggactggaagttgctctgggtgagtcagtgagtgagtggtgagtgaatgtgaaggcctaggatattaccgtgctctactgcagaccttataaacacagtacacttaggctatgctaaatttatttytaaatttctcctttcttaaataataaattaaccttagcttattagatgacctccacagtatatttggtccattgttgactgaaggtctttatgcagcacatgatcgtataattgatatccttt

SEQ ID NO: 1988 - DNA, 1022 bp, Homo sapiens
gcagacactgaaagtgatgcccataatgtatcaaagggtttaaactgacttctgctagtatgagtctgtggctctgagcaatttgcatagcattgtccttcaggaacaagttccagagccaggagtagaggtgaccactttttaatagttcatccaacaatatttactgagcctgtggtgcagcagtgagtgcctcttaagatggaacatgacttcctcactttagtgcagtccccartccagcccagcatacttattctccacttgcctgtctactataagcattttcaatgacttctgacctaagttgtattttcttcaatgcttttaaagaggtatgcttttccccaaatccttgaataatacacataaatgatgcttcatggttttatgtattcctggtattctatatacacccactgggagttcacatatctcagtttgaaggcgcagctaaaggcaattttctgtctgcacaattgactctgataagagatacatggtactcttccttctagggaatacaaaggaatcccaattttcaacaacagaaaagaattcaagggactgtcgtttcccaggtcactgtaagaaagagttttaaaactataaagctaatcctcaccccaaaaaaatctcaaatcaggtgatttttaaaatttcaaatccatcctaaacatgtgtcaactctttactatcagtccactcctaaatgatgacaaagtaaagctttcaacttttaatggctttttgtttttgatattccttttctttctccttaacccaaatcacatcttgcttggcaaagactttttattattttttattttcttgattcataggtccttaatgaaagcaaaattcaaccttatattggtcttgtatgaattagggaccatgtaaacagtacttaacagttctaattgaaggtcagtaaatccccaagagattaaatgaatcctgcagggagccgtgtaaatctccctctcttttatggcagaacagccaagcccccagactgc

SEQ ID NO: 1989 - DNA, 632 bp, Homo sapiens
tgcatcttagaattacatggggaatttaaaaaaaaaataggctgatacctgaaccacactccagaccaattgaatcagtctctgagtttaagacttgggcattattcttttttaaaaagttcccaagatgattctaaaatgcagtcagggttgaaaattactaagctgtgtgaattatttttggaaaaaagtagagattaattgagctggggagtgccagatcttcattgttgagcactgagaatggaccccctgagtgccttcctgggatgggtcagagaaagagggaagaatagggtagacagggacagaattaaattcagatgttttctatcaccattgaggtcaaaccagcttgcactgtctgaaatccacccrtcattgtacttcattaatttgaactcaaggtgggaatttataaatactctcaaactatgaggaaatggctttgtttaacaagggaaatatataaacatgactgtcagtgacctcctttggcctgcttaagggaataagccctacaaacacacacacacgcacactcacatgcacacggacacatgccaatggcgggcatgttaatgatacatcagattttagtcattaaagtagatctgtggggacctctattt

SEQ ID NO: 1990 - DNA, 1329 bp, Homo sapiens
catgctgtgttggcctcaagacactcataatgcaattgtgatctccatggaggcgggaagtacagccaggtttacaggtacgggcgatggatgagatgaacaatgcagtagaatatcacgcttggaggctaaggagctctgggaagtgaggagacagccagccccagatgacccgagggcttggagaccggggctgacaaaagccaaccacccgggactgcctacgtggagtgagagaagtgggttggaggtggatggagatgaaaatgtcctttgaggtacctgtggaacatgcaactggacatgttcagctgtgggactctacagagctttgagcaagttatttaacttctagtcccagacaactaaagaagcaggcctgccttcccttatttttgctcatctgtggactaatatagaggagctagggaggacgaagcctaaatatagaaggagcccatgtccccatcaccatgtggaagtcatctatcgaccaggatctcttgccttagactaaataatggaagtgagaaaataagtttttatcatgtgaagacactgacattttagtgtgtgttttacacaacagccagaattaactcactcatacacagagttttcacatgtgaatcctatatataaaaaggatctgcaagatgggaaactcagagcttccttcaagaggaaacttctgtcttctaagagcaactcgtctaagcaaggcagaaagaatcccatcttcctctagatgagacttggctgtagccaggctgaggccaggtgaggctaggctggaaagccatttagacaccagaggtggggcacccaggagattagtttctctgagtgattggtgcagctgggttccctgttctccagaggtgcagaagtggctgaggcttgggcgctctataatttcatctggttttaatatcaggcctcagggtgcaatgacagtcagctggcaggaaatttatgtccaatgccgtcactttcttactgcatattgattgaagtagctcttatacagctaagtctccaatggggaggggtttttttttcccctcaaaatgaagccattttttgttaattaattgagrccatcctgcttcctccccctccactgttggccccaccactgcactcccaggatgaagccccagaagaaccagtggggcggcagccagggtttcccaaaccatggcctaattcagtgctatttgatattcctgcaaacccgggacccacacgatgtgctgggacaatgtttgtttgaaaaagacatttcctcccactttgtaatgcaagccagggaccaaatgaaatgca

SEQ ID NO: 1991 - DNA, 1263 bp, Homo sapiens
tgagaccttggaagggccaggggcagaataatatgatttcactctctgaccccacccaaatctcatgttcaattggaattcccaatgttggggaaaggacctggtgggaggtgattggatcatgrgggcagattttcccttgctgttctcatgatagtgagtaagttatcacaagaactagttgtttaaatgtgtgtagcacttcccccttttctctctctcctgttgctatgtgaagatgtgcttgattccccttcatctcccagccatgcctcccatagatcctgtgaaactgtgaatcaattaaacctcttttcttcataaactactcagtctcaggtagttcttcatagcaacatgagaacagattaatacaaaactttattaaatgtaacagggcagtgaacacattcttttagtgaaataacattaccttgatgcaaacaaatactatgacttttagaaacattcatatccatatgactttatgtagtgcagtctatgtaccagagtgtggtgaatgtatcctttcaataaaataaccctgtacttattcacccatgcaactagaattcccagaaacatcattcatacatgtgcccttctaaagtgtattaaatgtaaaaaaagtgcatattttccccaacttttttgtttaaatatagatatctatgcacatgtaaacacaaacgttaagtattatcttttaccaaaattgaaccattaatcttcagcttgcttgttcttatttaacagcttatcgaaaacatgtatctgagtcagtgtgtgtgtgtgtttatctcattcttctaaatcacttctaagtattccaatatattttatatgccagtttaaatttaaaactgatcttctaggcatttttattattttaatatattccttttatattgataatgttgcaaattatcattttgttacttattttaatgtactcatgctataatttctctagaccacttctctagaagtagaattctctagattcttctctagatgtagaataatactaccaaattactccttccataatcactatataaaatgccaatttcctcatattctaatcaacactgtatttcttttatgctttgtttaaattggctcttcttttatgaaagaaaagatggtcagcttgatcatctttttgaattttattggccatatgaattgtaattttgttatttccatgtttttttctaacaggttgtctattttttaatttataaaagaatttttgatgca

SEQ ID NO: 1992 - DNA, 1263 bp, Homo sapiens
tgagaccttggaagggccaggggcagaataatatgatttcactctctgaccccacccaaatctcatgttcaattggaattcccaatgttggggaaaggacctggtgggaggtgattggatcatgagggcagattttcccttgctgttctcatgatagtgagtaagttatcacaagaactagttgtttaaatgtgtgtagcacttcccccttttctctctctcctgttgctatgtgaagatgtgcttgattccccttcatctcccagccatgcctcccatagatcctgtgaaactgtgaatcaattaaacctcttttcttcataaactactcagtctcaggtagttcttcatagcaacatgagaacagattaatacaaaactttattaaatgtaacagggcagtgaacacattcttttagtgaaataacattaccttgatgcaaacaaatactatgacttttagaaacattcatatccatatgactttatgtagtgcagtctatgtaccagagtgtggtgaatgtatcctttcaataaaataaccctgtacttattcacccatgcaactagaattcccagaaacatcattcatacatgtgcccttctaaagtgtattaaatgtaaaaaaagtgcatattttccccaacttttttgtttaaatatagatatctatgcacatgtaaacacaaacgttaagtattatcttttaccaaaattgaaccattaatcttcagcttgcttgttcttatttaacagcttatcgaaaacatgtatctgagtcagtgtgtgtgtgtgtttatctcattcttctaaatcacttctaagtattccaatatattttatatgccagtttaaatttaaaactgatctkctaggcatttttattattttaatatattccttttatattgataatgttgcaaattatcattttgttacttattttaatgtactcatgctataatttctctagaccacttctctagaagtagaattctctagattcttctctagatgtagaataatactaccaaattactccttccataatcactatataaaatgccaatttcctcatattctaatcaacactgtatttcttttatgctttgtttaaattggctcttcttttatgaaagaaaagatggtcagcttgatcatctttttgaattttattggccatatgaattgtaattttgttatttccatgtttttttctaacaggttgtctattttttaatttataaaagaatttttgatgca

SEQ ID NO: 1993 - DNA, 1263 bp, Homo sapiens
tgagaccttggaagggccaggggcagaataatatgatttcactctctgaccccacccaaatctcatgttcaattggaattcccaatgttggggaaaggacctggtgggaggtgattggatcatgagggcagattttcccttgctgttctcatgatagtgagtaagttatcacaagaactagttgtttaaatgtgtgtagcacttcccccttttctctctctcctgttgctatgtgaagatgtgcttgattccccttcatctcccagccatgcctcccatagatcctgtgaaactgtgaatcaattaaacctcttttcttcataaactactcagtctcaggtagttcttcatagcaacatgagaacagattaatacaaaactttattaaatgtaacagggcagtgaacacattcttttagtgaaataacattaccttgatgcaaacaaatactatgacttttagaaacattcatatccatatgactttatgtagtgcagtctatgtaccagagtgtggtgaatgtatcctttcaataaaataaccctgtacttattcacccatgcaactagaattcccagaaacatcattcatacatgtgcccttctaaagtgtattaaatgtaaaaaaagtgcatattttccccaacttttttgtttaaatatagatatctatgcacatgtaaacacaaacgttaagtattatcttttaccaaaattgaaccattaatcttcagcttgcttgttcttatttaacagcttatcgaaaacatgtatctgagtcagtgtgtgtgtgtgtttatctcattcttctaaatcacttctaagtattccaatatattttatatgccagtttaaatttaaaactgatcttmtaggcatttttattattttaatatattccttttatattgataatgttgcaaattatcattttgttacttattttaatgtactcatgctataatttctctagaccacttctctagaagtagaattctctagattcttctctagatgtagaataatactaccaaattactccttccataatcactatataaaatgccaatttcctcatattctaatcaacactgtatttcttttatgctttgtttaaattggctcttcttttatgaaagaaaagatggtcagcttgatcatctttttgaattttattggccatatgaattgtaattttgttatttccatgtttttttctaacaggttgtctattttttaatttataaaagaatttttgatgca

SEQ ID NO: 1994 - DNA, 1232 bp, Homo sapiens
tgcatatacatgtatatatacacccaggtatacacacacacacacacacacacacacacactgcctgccttttttggtaatcaatatatttagttaaagccattagcttctgttcagctcttattcaataaacaaataatacatacacaaacccattcatgcaacacaatatcttaaaacattttccaagtggcagagttagaatagtgcaaatttagcatggttataaatgtggatacaccatatatactgtgctagaccttcatccttcccatttgaaggtgattttcaatgaacaagcacttgtttccgttttgatgactatcaaatgaagtcatcaaatggttgaagatgggttaatttccataaatgattatcatcaatgcaggtggcagagccagcctatgccacaggcaacgttgaattcctgcctgaattgagatattcatcactgtgttctgcctgttcatgtctctgtcaacaaatgaaggtcatgatartccctccaatttgtactaacagaaaatgtgcatacaacaagcaatctgaaagataaatatgaaatgtgaggaagcacgtcaggtgcactattgcaggattgaaatctaattctgccacttttatctctggttaatttatggaaaagagagtgaagggaaggaaggtggttggagactctcttttattgaatacttactatggccagattccttaaataataatttcacatatattttcttactaattcatcacaacatcccttaaataaggcaatattttttataatgcaagtgttttttatttcaatagttttgggggtacaggtggttttcagttacatagataagctgtttagtggtgatttaggagattttagtgcacctgtcatgtaagcagtgtaccctgtacccaatatgtagtgtcttatcctcaccccactcccagccttcctgtctgagtccccaaagcccattgtatcattcttatgcttttgcatcctcatagcttaactcctgcttacaagtgagaatatacaatatttgcattttcactcctgagttacttcacttagaataatggcctctagctccatccaatttattgcaaaagacattatttcattcctttttaatagctgagtagtgttccatgcagtatatataccacattttctctatccactcattggttgatgggcacttaagttggtccatatctttgcaattgtgaac

SEQ ID NO: 1995 - DNA, 1232 bp, Homo sapiens
tgcatatacatgtatatatacacccaggtatacacacacacacacacacacacacacacactgcctgccttttttggtaatcaatatatttagttaaagccattagcttctgttcagctcttattcaataaacaaataatacatacacaaacccattcatgcaacacaatatcttaaaacattttccaagtggcagagttagaatagtgcaaatttagcatggttataaatgtggatacaccatatatactgtgctagaccttcatccttcccatttgaaggtgattttcaatgaacaagcacttgtttccgttttgatgactatcaaatgaagtcatcaaatggttgaagatgggttaatttccataaatgattatcatcaatgcaggtggcagagccagcctatgccacaggcaacgttgaattcctgcctgaattgagatattcatcactgtgttctgcctgttcatgtctctgtcaacaaatgaaggtcatgataatccctccaatttgtactaacagaaaatgtgcatacaacaagcaatctgaaagataaataygaaatgtgaggaagcacgtcaggtgcactattgcaggattgaaatctaattctgccacttttatctctggttaatttatggaaaagagagtgaagggaaggaaggtggttggagactctcttttattgaatacttactatggccagattccttaaataataatttcacatatattttcttactaattcatcacaacatcccttaaataaggcaatattttttataatgcaagtgttttttatttcaatagttttgggggtacaggtggttttcagttacatagataagctgtttagtggtgatttaggagattttagtgcacctgtcatgtaagcagtgtaccctgtacccaatatgtagtgtcttatcctcaccccactcccagccttcctgtctgagtccccaaagcccattgtatcattcttatgcttttgcatcctcatagcttaactcctgcttacaagtgagaatatacaatatttgcattttcactcctgagttacttcacttagaataatggcctctagctccatccaatttattgcaaaagacattatttcattcctttttaatagctgagtagtgttccatgcagtatatataccacattttctctatccactcattggttgatgggcacttaagttggtccatatctttgcaattgtgaac

SEQ ID NO: 1996 - DNA, 1232 bp, Homo sapiens
tgcatatacatgtatatatacacccaggtatacacacacacacacacacacacacacacactgcctgccttttttggtaatcaatatatttagttaaagccattagcttctgttcagctcttattcaataaacaaataatacatacacaaacccattcatgcaacacaatatcttaaaacattttccaagtggcagagttagaatagtgcaaatttagcatggttataaatgtggatacaccatatatactgtgctagaccttcatccttcccatttgaaggtgattttcaatgaacaagcacttgtttccgttttgatgactatcaaatgaagtcatcaaatggttgaagatgggttaatttccataaatgattatcatcaatgcaggtggcagagccagcctatgccacaggcaacgttgaattcctgcctgaattgagatattcatcactgtgttctgcctgttcatgtctctgtcaacaaatgaaggtcatgataatccctccaatttgtactaacagaaaatgtgcatacaacaagcaatctgaaagataaatatgaaatgtgaggaagcacgtcaggtgcactattgcaggatygaaatctaattctgccacttttatctctggttaatttatggaaaagagagtgaagggaaggaaggtggttggagactctcttttattgaatacttactatggccagattccttaaataataatttcacatatattttcttactaattcatcacaacatcccttaaataaggcaatattttttataatgcaagtgttttttatttcaatagttttgggggtacaggtggttttcagttacatagataagctgtttagtggtgatttaggagattttagtgcacctgtcatgtaagcagtgtaccctgtacccaatatgtagtgtcttatcctcaccccactcccagccttcctgtctgagtccccaaagcccattgtatcattcttatgcttttgcatcctcatagcttaactcctgcttacaagtgagaatatacaatatttgcattttcactcctgagttacttcacttagaataatggcctctagctccatccaatttattgcaaaagacattatttcattcctttttaatagctgagtagtgttccatgcagtatatataccacattttctctatccactcattggttgatgggcacttaagttggtccatatctttgcaattgtgaac

SEQ ID NO: 1997 - DNA, 1542 bp, Homo sapiens
  misc_feature (1)...(1542): n = A,T,C or G
ggaagaattttcatgctatgtgtatcatacctgtggtcatgtgtgacatttaattaattttattgtatatctattttattaaacattgtaagtattaaactcagatcaaaagatcagagtccttagcattaagatgcagagtaaggggaatcccttttgtccctatggtccaggagcatttcaaagagttagaagcaggagattatactccaaagagtaatgaaagttagactaaggaaaggtgaaaactgtgactttaagggtcttgtaagtgacatctggtcattatattcacctctttctcatcaaaagttttcagctcagttagttgaggcaattttataataaaagttaatggacaattaaaaatagctttagagttactcttgcagctcacaggtagagttttgaataaacatgttaagaatatattattcttagctcaaagattcttaacttagggttcatgaatggtcttcagaagttccatggactacctcattgttgggaagattaaatttatttgtccccatgtacattttttctggagctattgtttttatttcatttttaaagaggtctttagtcaaaaaaagaaccaccatcttaaactctcttccaaagttttttgaaaaatattattcaggtctgattagcctgaatttttatttctttgacaagttttttttttttatttttacacaggggaacagaaaaataactgtttattattattgngacatacaaattttgtgcaattttctgcactttgatgtatgtttccaataaaggacacgaagaagcccaggggttaaagaaaatggcaaatccttgctattaaaaattctgttttggtatttataatgcagatgtagcatttgtcagatcagtatggtgcaatggtgacagtgccaggctgagagtcagacgtgctggtatcttggcccgtttattgttgactagctgtgaggcatgaggctcagatagtttaccttttctagacctaagtttttccatctatgaaatgagaagatatttctttatmtttaatgttccctccagctctatcattgtatgattcagtatttcctcttcagagggcttcagttacaataaatatgtttactctgatcacaaccgtactaaatgcttgttaaagcaaatttgtcagggattgctatagacaacattttgttaatatcttcagcaagtttgtatttaaaataactgcccatttattttataatgtgcagacagctgcttgtgaatatgtatttgaattggtgatgttttattatatttttcaagcattgtttggaatactcacatataaagaattattcagttaaacagaatatgcagatgaaaatgggtgatacatagggcccttcatcagcattcagttctcttttaggatagctttgtctaatagaattttctgggttgatgaaaatgttctgtgtctgctccatccagaatggtggccactggctgcatggggctagtgagcacctgatatgtggcttatgtgactgagaaact

SEQ ID NO: 1998 - DNA, 761 bp, Homo sapiens
tgcatttatgtgtgttatattcaagtaccaccttctatgttacttatctcttttctagggtggctatgattctggttttctatatcactgtgagttccccccttgtgatgaaagcagtgatttcaaagaacaaaaagatgaacctattgatgtccgttatcttgcggatacagaggacaatcccatccaaactatcactttcaagtgagcagtatttcaaaaagctttaaaaaaaccatatcctgttagtgtctatgcttttgtycatcatggatattgtcaatttttaaagatccatccaaatgaaggggtactcaaaaaatatttggttaaataaatcaaatgaataaataaaatcaaagctaatactgaaattatatttaaatacccccaccaaatattctgtcagtatttttgtttatcgcacaattgaattgtatggatttacattctgctacctaggaggatgctacttacatagtcagaaatgaaggttcagggttacagttattctggagaaatcacaaatgaatcattagccctttaataattgagaactaggcaaatatgccagttattcttctgacgacccaatataatagcttcaaatttcaaattggccttttttctctattcttttgtattagtttgctagggctgccacaataaaacaccacagactaggtggcttatacagcagaattttttttctcacagttctggaggctagagttccaagatcaaggtgtcagcaggttggt

SEQ ID NO: 1999 - DNA, 1302 bp, Homo sapiens
tgcatgcagcccacaggctatgggatggacaagcttggtctacaccattgatattttagtcaccaattcctttgtgaaaccttattattcaatgataaggtatatttaactttttaaatgtatagttttttctccttgagagactactttgtactgcttatttaatccactacagtgcctagaaaagatagaaacaatgagtatttgttgactaacttcaaaaagcattttgtagataatactaatatattttatggcccttttatttagaaaagcttaaagtggattaccaacgttactccaataatcctgatggcacttctatgcaattcatcagtattatcatcttggcacctggcacagcacttggtttagacagtcaatcaatatttagatgactgaattctcatatgctcacatttagtaaaactggagacattaaaagagattagtaatcaataccgaattaccaattgctaagaaagaagaaataaaaggatagaagagaaaatagatgtggattgagggcagaggagaagtaaagagataaagatgaggaaaagtacattcagaccttagaattcagcttctgattgttagagagactgactgatccaggtgaaagcatttcgacatgctgtgcctgtggccaaaagtcccgttggagcaaagcctgatataaccctggtttttgagagaagatcatggtcaactaataagcccacggaagagaaaggaggcagtgaggagagagcaaggctcctgagtgatgctctacgggccaaccccagcagcagccacctgagctttctgttgccgcatccctgaccctcactgcaggaaccaggagtgggctaaaaattccacctgctattttctatctacaagatagtttcactatgtagtaattgagattcaaacaggaagacaaataataatgacttacatgagacatgggagaccacattaactgacacacaggtccaggagtattaatataaccaatcggcttataatccctttccacttcaaagaagaaaacagtttgatctttactctaaggaaaaagagacacaccgacgaaatatatattactatgaaatctagcctatagatcacaaaaaagcatktaataacataacgctatctctatctacaatggtcatatatcccagattattctaggagaattcttatttctaaaacttgctcaattttccccattagagcatttggaaaaccatgtgtttcagtatgtggttctgaaaatatgatcaccatactttcagaaattcacacaaa

SEQ ID NO: 2000 - DNA, 1302 bp, Homo sapiens
tgcatgcagcccacaggctatgggatggacaagcttggtctacaccattgatattttagtcaccaattcctttgtgaaaccttattattcaatgataaggtatatttaactttttaaatgtatagttttttctccttgagagactactttgtactgcttatttaatccactacagtgcctagaaaagatagaaacaatgagtatttgttgactaacttcaaaaagcattttgtagataatactaatatattttatggcccttttatttagaaaagcttaaagtggattaccaacgttactccaataatcctgatggcacttctatgcaattcatcagtattatcatcttggcacctggcacagcacttggtttagacagtcaatcaatatttagatgactgaattctcatatgctcacatttagtaaaactggagacattaaaagagattagtaatcaataccgaattaccaattgctaagaaagaagaaataaaaggatagaagagaaaatagatgtggattgagggcagaggagaagtaaagagataaagatgaggaaaagtacattcagaccttagaattcagcttctgattgttagagagactgactgatccaggtgaaagcatttcgacatgctgtgcctgtggccaaaagtcccgttggagcaaagcctgatataaccctggtttttgagagaagatcatggtcaactaataagcccacggaagagaaaggaggcagtgaggagagagcaaggctcctgagtgatgctctacgggccaaccccagcagcagccacctgagctttctgttgccgcatccctgaccctcactgcaggaaccaggagtgggctaaaaattccacctgctattttctatctacaagatagtttcactatgtagtaattgagattcaaacaggaagacaaataataatgacttacatgagacatgggagaccacattaactgacacacaggtccaggagtattaatataaccaatcggcttataatccctttccacttcaaagaagaaaacagtttgatctttactctaaggaaaaagagacacaccgacgaaatatatattactatgaaatctagcctatagatcacaaaaaagcatgtaataacataacgctatctctatctacaatggtcatatatcccagattattctaggagaattcttatttctaaaacttgctcaattttccccattagarcatttggaaaaccatgtgtttcagtatgtggttctgaaaatatgatcaccatactttcagaaattcacacaaa

SEQ ID NO: 2001 - DNA, 560 bp, Homo sapiens
tattactcctcaaatgagtttgcagagcacaaacttaaacctgtaagtggtggtacacatgttggattttcaaaggatcccagtctctacaaaaaaaaagacattatcagaaactcgtcatcttagcccttttgtaccacagtaaaagacatgaggtagaattgggaaattacaaagaggctttaggagttattacattttggggatttataagatctttttgaaagcctctccatgagtgagagggaaccctaatttgcttgattcccrtggcatgggtacatcttacagcaaatgaaatctaagattatgctggccaaagagctttctcttaatttatgttaatctgggagtccagcttcaggtggatgggtcctgttagctttaatacataatgatgaagcttatgtgaatatgtctaaggaggcttcttcctttggtccactgcatcccttaaacagagacgttgcaaatttaccaacattgaaataaaagatgcacatatccattgactaagcaattctacttttaagaatttatcctgaaaatatacttacatg

SEQ ID NO: 2002 - DNA, 262 bp, Homo sapiens
ttatttctgccactcttttcttctgagaatggtttattaaagtctcctactactagtatgtttctatttctctttgcattttgtttaagtatatttaattgttcagagttaaatacttcctttcttataaaagtgattcttgtgttttttggtccatgktttttggaacataagtgttatatcttcattgtgatttataacttttagcattataaagtatgctttgtcacatttaataccttttgacttcatttctacttca

SEQ ID NO: 2003 - DNA, 1311 bp, Homo sapiens
tgcctttagataatttagttcttgcgttttccttccctgcctctgtatctcttttccctccctttgcagcagtgtttcttttaggaatggtcttcagacctgcctcagattccagttgggtggatgctaaaaatgttgtttcttagcctctaccacagacttaccaaatatatttagggttggaactatctgtgttttttaacaagatctttcctgcacactaaagtttgagaaacagaacttgatagtcatatctttctactgttgcctcattaacatagtcatcatctcctcaactggctgataaagatgctatctaagaactgcacaccgccctttgtgatcagcttcctgcctccaggctgcacacttggtaaggtgacagattaaaaccgtgctaaactgctcatgctgtactgcctctatttataatgagcatctatatttataatggcacctttactgatcgtatatttacctcctctctctcccacctggggatccatctctcacataaaacatgcacagtctcttgttaggcttttcattttatattctgcttttcccattttgctcttctttttttctctcttggtcttgcctaggactgagcatgtatatgtttgcatgtgaatacagaaatgggtgtcatctctgtatgtatgtatttctaagtgtgtagacatgatggaggtgacccataggtaaccaagccctctgttttctttctgccttgggtaaggcattcacagacatgcactatctcctagaagggatcattaaataggtcagaccttctatggagttggtgaacagtggtgatagtgatgagtcactgatggatgggagaggctatcatggctgaggaggcaggcactaaaagggcatctctgcttccatattttccatgttctaaacttggctgaggagcttgtcagggcgtgcagaggtgagggagccatagttcatggtgttaatatcccaatcaccactcattaattcagccaacatttattgagtccctactatatatcagaatccgtggactcacaaaggtaagtaagacatagtccctgttttccagaagtattgtttgagagtgaactccacacgcaagcaatgaattctcaagaaagaawgttgtgggatctcagaggtagccatgattttttggaaagatcagggacggcttctctgaggaaatgactttcaagtgggctttgatgagtatgttgtaaagttccaggtagacaagagtgtgagagtcgctgaaaataggacatgaggtatggacacctacagaggtaatgt

SEQ ID NO: 2004 - DNA, 476 bp, Homo sapiens
aatrgtgacaggaaaagattagcaatccatttattgtactgaaataaagataagtaaccctggtaagatccatcaggacctgagtattgaacttgaaataaaaagacatttcttcatcagcaaatgacttgaaaaaatgtgaggaagagaaatgattacagttgccttttaaaataaaataatcatgattcaactgcttttaatttttttaatacattttgttgacttgctattctggaagacatctaaaagaataagtttttgaaatggataattattacatgagtcattaaacaattattgccaaacatttccgatagacctacaatgtattctacttactgattctaatgtgaataatatgatgatttttttaaatttcagaagaaaatttagctttgaaagaaagaactaaaatttaaggaacaatctaacatttggaatattgtattataaatgtaacaattcaaacggtc

SEQ ID NO: 2005 - DNA, 568 bp, Homo sapiens
atggtttgttgttggggaatgccccacgtatcataggatgtttatcaacatccctggtgtctacctgctggatgcctgcagtatgtctcctatactttgcctgagctgtgacaatccaaatttccttcagatatttccaaatggactaatgagacatttggcaaaatcaacccacttgagagccactgctataaacttttacccaccttctgaattagtgtctttttctttaacttatacatttaacaaatctattcagatgtcaataaatatcccaacttcaacttttcctatattatgtatactctccagctatggtcatatttgaagatcttgctactycctagaatggagaattctgctctgtgtccccatatcctgaatgaaatatattaaaactaaccttctggtctttcacaacactttcccacctcttccatttttcctttataaaatacctccaatttgcaggttaacaagttatcatcatacctctctctctctacctcctaatttcaaaatcacttctttgcattcattaagtgatttgacagttagctctccacct

SEQ ID NO: 2006 - DNA, 641 bp, Homo sapiens
atgatatcaacatcataaagactgatagggaaaagtggaaattaaattttataaggttttcatactataygtaaaatagtgtaatagtacattgatatagaccatagtaagtaaaagataaatgcaataaaccctaaagcagccaataaaatgacaaaacagtgacatatagctaataaaccaacaaaggagataaaatgtgatcattaaaaaaattttaaaaaaatggaaacagatgggacaaatagaaaacaaataaaatataaatgttctaaagatcccaattataagacatgcactttaaatataatgatacaaacacattagatgtaaatggagggataaaggcataccacccaaacactaaagaaaaataagttggaaggattgtgataatagacagagtagattttaacacaaaagatattatcagggatttaaaagagctttcataacagagccatcaagaggacataataattctaaacatgcacttaataatagaaatgcttgaagtgaatattacaacttcttgccatataatttcttgtccataaatcaagtatcaatacatttaaatgtatccaagtcatacaaagtatgttctctgaatattacggaattaaattagaaatcactat

SEQ ID NO: 2007 - DNA, 641 bp, Homo sapiens
atgatatcaacatcataaagactgatagggaaaagtggaaattaaattttataaggttttcatactatatgtaaaatagtgtaatagtacattgatatagaccatagtaagtaaaagataaatgcaataaaccctaaagcagccaataaaatgacaaaacagtgacatatagctaataaaccaacaaaggagataaaatgtgatcattaaaaaaattttaaaaaaatggaaacagatgggacaaatagaaaacaaataaaatataaatgttctaaagatcccaattataagacatgcactttaaatataatgatacaaacacattagatgtaaatggagggataaaggcataccacccaaacactaawgaaaaataagttggaaggattgtgataatagacagagtagattttaacacaaaagatattatcagggatttaaaagagctttcataacagagccatcaagaggacataataattctaaacatgcacttaataatagaaatgcttgaagtgaatattacaacttcttgccatataatttcttgtccataaatcaagtatcaatacatttaaatgtatccaagtcatacaaagtatgttctctgaatattacggaattaaattagaaatcactat

SEQ ID NO: 2008 - DNA, 641 bp, Homo sapiens
atgatatcaacatcataaagactgatagggaaaagtggaaattaaattttataaggttttcatactatatgtaaaatagtgtaatagtacattgatatagaccatagtaagtaaaagataaatgcaataaaccctaaagcagccaataaaatgacaaaacagtgacatatagctaataaaccaacaaaggagataaaatgtgatcattaaaaaaattttaaaaaaatggaaacagatgggacaaatagaaaacaaataaaatataaatgttctaaagatcccaattataagacatgcactttaaatataatgatacaaacacattagatgtaaatggagggataaaggcataccacccaaacactaaagaaaaataagttggaaggattgtgataatagacagagtagattttaacacaaargatattatcagggatttaaaagagctttcataacagagccatcaagaggacataataattctaaacatgcacttaataatagaaatgcttgaagtgaatattacaacttcttgccatataatttcttgtccataaatcaagtatcaatacatttaaatgtatccaagtcatacaaagtatgttctctgaatattacggaattaaattagaaatcactat

SEQ ID NO: 2009 - DNA, 538 bp, Homo sapiens
tcctggacttaagtaattctcctaccccagcctccccaaatgctgagattataaaaggcatggagtcactgcacccagcctaacgtttaatgtttaaaaacaagattttattctgtttattttcatttataggtcatgacattcaaacaatgacggcataaaaattccttctgctttgggcaaaacaaggtattttgaaattcttttttttttttgacattkaattctaaagttttatggccaattcctcaaacaagaccattcaaaaagctacagaaattctctctattcaacgccttttaaaatgctatttttcagtgtagctaaatgagaatgatattttgtaagcactgctattattagagactaagaatacatttgagattattattagaattttactttttcattttccaaaaaaaataataccaggttccaaaaagctgcaccttgagattataggtaactattcctcatgaaaaaaaattacaggttggatgaaatttgcgtgaattagttaagaccagtatttataatc

SEQ ID NO: 2010 - DNA, 612 bp, Homo sapiens
tataacagagatggatagacactgagggaaagagaatacaaggcagagggacacagaagaaaatccacagaagtacaagtaaagaaaagtagaaatccagaaacctacagagaggggcaacagcctggatgcctttgaccttcctattcacccggcctgagaacatcagagcaggtgagtggctgctctaaccacccttcagtactcctatgacctctgcaccatttggaaatcatcctttctccaagacaaaaataattgttctccttttatttacaaatttaaaatggagaattttkaaagacttgttctacttaggaattaaaattcactgaaggctgagatcaactccagaggccccaggttccccagacctgttgtctggggctcttggatatgcagtgtttcccctccactgtttgttgttgttgcctttgttattgctctaatgaccactgcctacatatttgagtaaaatccttctctcgagatctacatgtgagacctaaatgtataatttggcccctttatgcttgtgtttcttcagaatcctgcatattgcaatcccctctctagctgcagatgaacataacagacctagacaggatatgg

SEQ ID NO: 2011 - DNA, 650 bp, Homo sapiens
aatgaaagaagaaaaagaaaacgggaaggatggtgcttttgaaagatttgcctgtgcttttaactaatttcaaaccccagcttcaaatgcagtgagttgtttcatttgatcagcaataagtcatatcctgcaaaaggcagctccctgaaggggaagtggctccaacactgtttccatggctccctgctgtaacagtattttttactgaactaagccttactaattttagccatggattatctggaaagcaaggaagaaatagatgaaaggcaatyttaccttagccacactgagcccctaagaaccttttactaagaaagttgctgctagaaaaggcaaccatataattgcaacaacttggggatgtttgtcaactgttgtccatcagcacttggatataggagggagatcctgtttttctaaggaggaaatagaaactcggcagtgaaatgatttgattttgatcattacagcctttataagacaactgaatatcaccccagacaccttaattctaaccgtagcctctgtctgatccaaggcccttccattaatgaaatgatattagatttgaggattaggttattttggatgctagtttctataattggatgctagtttctataagctgcttcagtgatgcatcttga

SEQ ID NO: 2012 - DNA, 1041 bp, Homo sapiens
acccctcacccttgatgctgccttaaataaggataaatgttctctgagtttgtataaataaatgaaagagaggcagagagagaaaaagatatgggaaagaagagagaaataaaataatatgggaatttaagcaaattcttcggggaaagaaaatctattccagtattgactccttcattgaagtaaccaatcgatatatacaagaagtccaaaaatatttttaacatattggaaatattgctggatgttttagatgaactgtttacatataggaaactggtaaaatacaggtgtcctcatacacgtcttcttttatcatcatggttactcttacttaaatttattagcatggatggacacttagtaatgtgctcacatggaagaggctacatgtgtttacacagtatggtgactgctcaccaatttttttcccaattgatcaaagtgacaccaatttttctttcctattttttttttcttttaataaaggaaacacatcaagtgtttctcttgtgtttgagatggagtctcactctgtcgctcaggctagagtgcagtggtgcgatcttggctaactgcaacctctgcctcctgggttcaagcgattctcctgcctccgcctcctgggtagctgggattacagtcgcatgacatcacgcccagctttttttttttttttttttttgtatttttagtagagacagagtttcaccatgctggccaggctggtcttgaactcctgacctcaggtgatccgcccaccttggcctcccaaagtgctggaattacaggcatgagccactgtgcccagccatcaagtgttttctgaagacattctgttccatcccaaaggagctccgcaataatgttcttttatcattaattgctggatgttctgaaatgttttctcccctgaagtcataagtcrcaagtttctgatgttttatcttctctctctctctctctctctgtctctctctcagcatcctggttctctgaagacaagtgtcatggaaatacttttggataggcaaaaatgca

SEQ ID NO: 2013 - DNA, 568 bp, Homo sapiens
caatctcatgcccacccaactcccacagcatcactaccagtcattggaagaaacaccactaatatatgtataataagtgtgtgcatgtgtgtgtgtgtcactttttcaaattctgctacaaagttgcctacattgtttatgtcaataatgccaagcccattcgtttagatgttcctactaatgttaaccagaaatcccctcattgaagttggagccttattgttatggcacagaattatttataatacagtcagccccccatattcatgggttctgcatctgcrtattcaactaacatggattgagaatatttgaccaataaaaaatggatgatttgtactgaacatatacagactttttaagacaatgaggtataacaacaatttacatagaatttacattatattaggtacataaacaatctagagatgagttaaagtatatgggaggttgtgaataggttatgtgcaaatagtcagccatcctgatctacagataccatatttatagattcgacccaacatggatggaaaacacagtatttatgggatgtgaaacccataaatac

SEQ ID NO: 2014 - DNA, 568 bp, Homo sapiens
caatctcatgcccacccaactcccacagcatcactaccagtcattggaagaaacaccactaatatatgtataataagtgtgtgcatgtgtgtgtgtgtcactttttcaaattctgctacaaagttgcctacattgtttatgtcaataatgccaagcccattcgtttagatgttcctactaatgttaaccagaaatcccctcattgaagttggagccttattgttatggcacagaattatttataatacagtcagccccccatattcatgggttctgcatctgcatattcaactaacatggattgagaatatttgaccaataaaaaatggatgatttgtactgaacatatacagactttttaagacaatgaggtataacaacaatttacatagaatttacattatattaggtacataaacaatctagagatgagttaaagtatatgggaggttgtgmataggttatgtgcaaatagtcagccatcctgatctacagataccatatttatagattcgacccaacatggatggaaaacacagtatttatgggatgtgaaacccataaatac

SEQ ID NO: 2015 - DNA, 1416 bp, Homo sapiens
gggctgcacaacgctacacggtggctggctgagtgctgctaccacttcctatccactactaacaagtagtagttaatacctggaacttaaaacgacattataatggaagatcactaatctccaggaaataattacagactctgaaaaaggcagaagtgggactatttcccagcagaactgaaaaaaattatcccayttagctctgcctttgattgtggtgagtgaacttcccccttccatatttatcacacaggctttaatattggcagtactgagctgttgctatagctctctccgcttcttgagatttcttaaagggtaatagaggagtggattgagagaaataggttatagctttgtgaaaagatggttaaacaaatgcacaggacattggaaaaatttgggaactactgtgaccccttcctcagccaaagactgcgtcaggaaagaagagatctcttattcttctaggtaatcatagaaaaaaatcacaaaatattttcctaacttacttgagagaaaaagtgcatttaatttataaagttatgctatttcattgatgatcataaaccattttttgtaagactcataattattttacattccacttaaggaggcaaaaaaagacaactaaattggctgacactatgaattttaaggcacaacctaatttcagagatgttaaaatgtggaaaaatgtgtgccttagaatcaataaaatacagcattttaaaccattgcctctcctgctgtaatgaagccccatcactggcagaaaatggaatctagttaggtacttgaaatgtatgactcctagcaatactttctccctagcaattcaattctgatattttaaaatactgacctttagacaaagttgggacaggtttgtgagaggaacttgtgttctgggcattgcattgcatagaaagcccaggaatgtataaccatataaatcctgcacacagcctgctttgtggaacatcttggcattttttttcttgtgcaaggctgacatctgctggacaaacaacacttaagcaaagtgttgcattttagagtaaattcaattcttggcaagaacctacttgtggagtatatactacacattttctgaggagaagttgcatgtaattcttatctttgtttttttataggtaaggtgttttttccttctggcttctttatgatttttccctttacttgtgattttctgtagtttaaaaattataagcttaggtgtagatttttgcgtttttttgtgcgtgtgtttattcttttcggtgttctctgagctctctggatctgtggtttggtatctgacattcatttgggggaattctcaattattattgtttcagatatttcttttatttctttctctctttcttctccttctggaatttccattatgca

SEQ ID NO: 2016 - DNA, 1416 bp, Homo sapiens
gggctgcacaacgctacacggtggctggctgagtgctgctaccacttcctatccactactaacaagtagtagttaatacctggaacttaaaacgacattataatggaagatcactaatctccaggaaataattacagactctgaaaaaggcagaagtgggactatttcccagcagaactgaaaaaaattatcccatttagctctgcctttgattgtggtgagtgaacttcccccttccatatttatcacacaggctttaatattggcagtactgagctgttgctatagctctctccgcttcttgagatttcttaaagggtaatagaggagtggattgagagaaataggttatagctttgtgaaaagatggttaaacaaatgcacaggacattggaaaaatttgggaactactgtgaccccttcctcagccaaagactgcgtcaggaaagaagagatctcttattcttctaggtaatcatagaaaaaaatcacaaaatattttcctaacttacttgagagaaaaagtgcatttaatttataaagttatgctatttcattgatgatcataaaccattttttgtaagactcataattattttacattccacttaaggaggcaaaaaaagacaactaaattggctgacactatgaattttaaggcacaacctaatttcagagatgttaaaatgtggaaaaatgtgtgccttagaatcaataaaatacagcattttaaaccattgcctctcctgctgtaatgaagccccatcactggcagaaaatggaatctagttaggtacttgaaatgtatgactcctagcaatactttctccctagcaattcaattctgatattttaaaatactgacctttagacaaagttgggacaggtttgtgagaggaacttgtgttctgggcattgcattgcatagaaagcccaggaatgtataaccatataaatcctgcacacagcctgctttgtggaacatcttggcattttttttcttgtgcaaggctgacatctgctggacaaacaacacttaagcaaagtgttgcattttagagtaaattcaattcttggcaagaacctacttgtggagtatatactacacattttctgaggagaagttgcatgtaattcttatctttgtttttttataggtaaggtgttttttccttctggcttctttatgatttttccctttacttgtgattttctgtagtttaaaaattataagcttaggtgtagatttttgcgtttttttgtgcgtgtgtttattcttttyggtgttctctgagctctctggatctgtggtttggtatctgacattcatttgggggaattctcaattattattgtttcagatatttcttttatttctttctctctttcttctccttctggaatttccattatgca

SEQ ID NO: 2017 - DNA, 1416 bp, Homo sapiens
gggctgcacaacgctacacggtggctggctgagtgctgctaccacttcctatccactactaacaagtagtagttaatacctggaacttaaaacgacattataatggaagatcactaatctccaggaaataattacagactctgaaaaaggcagaagtgggactatttcccagcagaactgaaaaaaattatcccatttagctctgcctttgattgtggtgagtgaacttcccccttccatatttatcacacaggctttaatattggcagtactgagctgttgctatagctctctccgcttcttgagatttcttaaagggtaatagaggagtggattgagagaaataggttatagctttgtgaaaagatggttaaacaaatgcacaggacattggaaaaatttgggaactactgtgaccccttcctcagccaaagactgcgtcaggaaagaagagatctcttattcttctaggtaatcatagaaaaaaatcacaaaatattttcctaacttacttgagagaaaaagtgcatttaatttataaagttatgctatttcattgatgatcataaaccattttttgtaagactcataattattttacattccacttaaggaggcaaaaaaagacaactaaattggctgacactatgaattttaaggcacaacctaatttcagagatgttaaaatgtggaaaaatgtgtgccttagaatcaataaaatacagcattttaaaccattgcctctcctgctgtaatgaagccccatcactggcagaaaatggaatctagttaggtacttgaaatgtatgactcctagcaatactttctccctagcaattcaattctgatattttaaaatactgacctttagacaaagttgggacaggtttgtgagaggaacttgtgttctgggcattgcattgcatagaaagcccaggaatgtataaccatataaatcctgcacacagcctgctttgtggaacatcttggcattttttttcttgtgcaaggctgacatctgctggacaaacaacacttaagcaaagtgttgcattttagagtaaattcaattcttggcaagaacctacttgtggagtatatactacacattttctgaggagaagttgcatgtaattcttatctttgtttttttataggtaaggtgttttttccttctggcttctttatgatttttccctttacttgtgattttctgtagtttaaaaattataagcttaggtgtagatttttgcgtttttttgtgcgtgtgtttattcttttcggtgttctctgagctytctggatctgtggtttggtatctgacattcatttgggggaattctcaattattattgtttcagatatttcttttatttctttctctctttcttctccttctggaatttccattatgca

SEQ ID NO: 2018 - DNA, 564 bp, Homo sapiens
taaccccatttcatttaatcataggtataaaagtaattcatcttgtttaatattttcggggaaatatgcaaaatatagaaaaaaatgaaatacacttctgccacccagagataaacattattaatattgtggtataattggtcaattttttctattcaaataygcgcttcaccctactaattgatttttcaaaacagggatcataatttgtattttgttatctatcttaatagataaggagtatttttccacataatttagtaatttcccaaagctatgattttaattgttacataaagatatggcatagttattgtattataattttcatatgtttctcctccttgatgtagtttattttcttgtttttcagattcccaaattttcttagttttctttataacaacctgtcaagttctttctcatctcttttattagctacttattagatactcaagtttttaacgtgagagttaaggttaactctgttctctgattactctcactctcctggtgatctcatggttttaaatactatctctattctgatgtctaactgtgtat

SEQ ID NO: 2019 - DNA, 617 bp, Homo sapiens
cctttgaatttttgagcttagtaattttaaactgcatataataactatatataatatttgattagctaaatgagtaagagggcctacactttatcattttaatgctaagtagtaatggagtgggaataaagtatccaaattgagagataattaatagtcagttttggataattgtttactcaatcagcagataatgaaggagcataccagtttccttcccrtaggccagggaggatatgctggtggataataggacagggcttttgctctcccagagctctctaacgggataagcccgagataggctacactagttgaataggaaagataggatcttggtagaaagagactctatcgagtgagattgtgagccgtgagatcagacagattggggtttaaatcctcgtctctattataaacaatcaaaaaatttagctggacgtggtggcgccttcctgtggtctcagctactctggaggctgaggttggaggatcacttgatcccaggagttcaagactacagtgagctatgatgtccctcactgcactccagcctggatgacagagtgagaacctgtctctaaaataagtctttttagaaatgagctttagtaagt

SEQ ID NO: 2020 - DNA, 557 bp, Homo sapiens
acatcagcagttacaataacaccaggtataaagagartccgaaactattcattttgtttatggaatgtaccttaagctagggggaaacattccttcacacattagtgtaatttctaaaatggagaaaaattatctacacaaaaagaactgtcaagtttaccttactctatcaagaagcattacttttggggaaagtgtactgatcacttatttgaaatttcttgtaattatacagagcaccagatttccaaagcatttgttcttgagaaaggaaccactaatacccaggaaagaaatgttgaacaggaaatgtttgaccaatgttgcatcacaagatatcaaaagaatttcactttggctacttcagcgaatcaagtcaggacatttttaattttctttatagtctttaagcttctacaaaataaggtttccaaaaaattggtgatattaaaatttttctagaagttttgatacatgaaataaagtaaaaatcttctcctagaatgaaatgtaaaaagtattagtgctgagagtagataaacaacattagtgatctg

SEQ ID NO: 2021 - DNA, 736 bp, Homo sapiens
gttccttaacagtccagtaaatcaagcttttccattctaagaccaggtagaatcagcagagacacaaaccggctaatgccattgaaatggtacttacaggcttactccacccactctattctctgttcagtatctccgatacacatgcttctttttttccactttttcttcacaatctgacatatatctgcagtgtacaaaattccaccaaatcagattttagtgtttttacctatgtttctcctctgtttaytacacagcaaagagatttatccttccctccctttctttctttctttctttctttctttctttctttctttctttctttctttctctttctttctttctttctttttttctttctttctttcttttctatctctttttctttccttcttctttctctctgttttttcctgtctttcttctttctctccttcatttcctccttctttccttccctccttccttcgttctttctttcttccacttctttctccctaccttcactctttccttacattctcctccctctaccaaaaacaacagaacaaaatccactcaaacatattttatccatcttaccttcagcctttattgtcctcctccatcttatctgatctattctcccttttcctttaggtctcaacgtagacctgccttcatctgggaagttttatatataccctcttggtcctcttccttcacccccatccctggtccaggcaggtgc

SEQ ID NO: 2022 - DNA, 601 bp, Homo sapiens
tgaaactccctctcaaaaaaaaagtaatgtttcatttcctttttaagattaccttttcctgtatcaaattggtactacaaataataagagtataaggaaaatagaaaaggaaattaacaatttgtccatagtgccaccattcaaagacaaccaacatgtcttaacattttggtagaaacacctagttcttgcactccttggaagcagtgtgtggtttttgactgatacaccttcttaaagcattaatggaggcccagtaaaatcagtggaaggatgccagtttaattgagcattattagaacktgggactcaccagctgacttcttcaatgaatacacagccttttgattaataaaagaaaacatgatgaacttagagtttcgagttggtaaagcagagatgaacctgagtacacatgatgcctagtctcagccattcttttccaaaactcagccattctccactgcttgcttcccaccccttcccgcactgcccactgatggaaaagatgaatgaaattaccatttttttccacttacctggtatatatcactttaaaaaaaaataatgcagcatcctctgttttgcagctggtggatga

SEQ ID NO: 2023 - DNA, 560 bp, Homo sapiens
ttaggatagcggttctagtgggggagtggtggctggaagaggaatgatggggcttctggggtgctggcaaagttctgtttcttaatacaggtatgatccatttgtgaaaaccatcaagtgatacagttatgaccggtgcccttctctgtgggtatgctgtgcttcaataagatgctttaataaatggctctgcctgcttcatcccatttccactccacaggcctgtgtcctttcacctctgaatgaagcagaccccagctgacctcctcaacacccacaccaccctgccaaccgctgcccaccagactgacctggaactgatcagctactgacagtgccctgctgctgcacagtgccctcctctgtgaagsagtaccttcactcctttacctgcctctcacatacagtgaccccatctataaccccatctcctctcaggcactccccactccccaccaacttctgtaaaacttgaaataaaaaccacatcatttggacttcattatgactgtcatatactgattgctaataggaccaaacacctactcttatctccccaa

SEQ ID NO: 2024 - DNA, 560 bp, Homo sapiens
ttaggatagcggttctagtgggggagtggtggctggaagaggaatgatggggcttctggggtgctggcaaagttctgtttcttaatacaggtatgatccatttgtgaaaaccatcaagtgatacagttatgaccggtgcccttctctgtgggtatgctgtgcttcaataagatgctttaataaatggctctgcctgcttcatcccatttccactccacaggcctgtgtcctttcacctctgaatgaagcagaccccagctgacctcctcaacacccacaccaccctgccaaccgctgcccaccagactgacctggaactgatcagctactgacagtgccctgctgctgcacagtgccctcctctgtgaaggwgtaccttcactcctttacctgcctctcacatacagtgaccccatctataaccccatctcctctcaggcactccccactccccaccaacttctgtaaaacttgaaataaaaaccacatcatttggacttcattatgactgtcatatactgattgctaataggaccaaacacctactcttatctccccaa

SEQ ID NO: 2025 - DNA, 560 bp, Homo sapiens
ttaggatagcggttctagtgggggagtggtggctggaagaggaatgatggggcttctggggtgctggcaaagttctgtttcttaatacaggtatgatccatttgtgaaaaccatcaagtgatacagttatgaccggtgcccttctctgtgggtatgctgtgcttcaataagatgctttaataaatggctctgcctgcttcatcccatttccactccacaggcctgtgtcctttcacctctgaatgaagcagaccccagctgacctcctcaacacccacaccaccctgccaaccgctgcccaccagactgacctggaactgatcagctactgacagtgccctgctgctgcacagtgccctcctctgtgaaggastaccttcactcctttacctgcctctcacatacagtgaccccatctataaccccatctcctctcaggcactccccactccccaccaacttctgtaaaacttgaaataaaaaccacatcatttggacttcattatgactgtcatatactgattgctaataggaccaaacacctactcttatctccccaa

SEQ ID NO: 2026 - DNA, 583 bp, Homo sapiens
ctctctgggtctcttcagtaatgcctttcatggacactcagtatgtttttgttgatggacagagagcatgcttatggattcatggaggacccaaaggtaggaaggaacaggacacagtggtcagagcaggactggggtcccccattctgtgctgcctactgyatgataggcatggacccagcaatgggttgtctatgtcacattgtcatcattgtcctcctcctcaccacaagcaatggcaatagaggccttttcatatgccagacaccctgctgagggcttcaaatgctcaacccactcagcaatgttgtcaggaactcttatctcctcacagaagaggaaacctaggcacagaaagcacagatttgcccacagagctagtgaccttaagaaccagggcagaagcacaaaaaccaagaacgttctcccccaaacagaggtcccaaagggaagtggcagacatgcaaaatggccctagaaatggtcttgtgccagtttttctaattgaggttaaaactggatcccttgggcagcgaaagattttctgacctgatcctgcaccaaacagggcatttgtttaaat

SEQ ID NO: 2027 - DNA, 583 bp, Homo sapiens
ctctctgggtctcttcagtaatgcctttcatggacactcagtatgtttttgttgatggacagagagcatgcttatggattcatggaggacccaaaggtaggaaggaacaggacacagtggtcagagcaggactggggtcccccattctgtgctgcctactgtatgataggcatggacccagcaatgggttgtctatgtcacattgtcatcattgtcctcctcctcaccacaagcaatggcaatagaggccttttcatatgccagacaccctgctgagggcttcaaatgctcaacccactcagcaatgttgtcaggaactcttatctcctcacagaagaggaaacctaggcacagaaagcacagatttgcccacagagctagtgaccttaagaaccagggcagaagcacaaaaaccaagaacgttctcccccaaacagaggtcccaaagggaagtggcagacatgcaaaatggccctagaaatggtcttgtgccagtttttctaattgaggttaaaactggatcccttgggcagsgaaagattttctgacctgatcctgcaccaaacagggcatttgtttaaat

SEQ ID NO: 2028 - DNA, 1963 bp, Homo sapiens
catccagtacaataaatgcttttattaaccataaatttgagactgctttagggatttgaagtgttgggtttcatgctgaaaaaatgtaatgttatccacagaccatcagtgagtaacaaaaacagaggcacaggttatgctactttgatcaaattatggcaaaaaattgtcttttgcatttaaaatagtagttgcattcagggcatatcttcaaggagcaccacaataatttaatcatatgttttggagagtttcatggaaattcatcctgagtgcaaatttatagaaccagcagcttctgttaaacagataggaagctcaaaagtgttatgaggctaagagggctgagaaatcaaaatactaagatgggacccctaaatcagggtttctcagtctcagcgctatttacattttaggccaggtaattttttgtcatggaggactgacttgtgcatttcaagatgtttagcaacatccctgagcccttcccrttgactgccaggagcagcctaccccagctgtgacaaccaaaaatgtctccagaaattccccaaatcaaggttaaggctgcaagtaagctgtgatcacaccactgcactcaagcctggttgatagagaccctgtctcaaaacaaacaaacaaacaaaaaagaaatcccccaaattcccccaatcaaaaaccactgctctcaatcaaagtctaggcttgtttagcaaatgctgcctatgtttgcttcatccgaaggaaatgtcagagcctggggagctgcgcagcctcagtactggaaacccagtgcctccttttcccaagaatgggtagccctgagtggtttctgaaatcaaaagccaccttgcactcccttttccacagaattaaaggtagcatagccatagaaccgagaactctctcggctgtgaccagagcaaacgagaccaagccaagggcaagctgccccccgccccccaccaaagcataccctcacccgacctttgtgtccagcatgcattccagcccaggagctccggcccgctgggcagaggctgcacaccattcctgccagcatctaaatcgctgctttctggcctttcactgtcaggccacagaggggactgtggacttggtgccagaaaagaaaatgaaaagcaaagttgaatctctgcggaccattctctggatgctgaatgtcccactattacgacacggcatgacatttcatggcagcaggggaggaggcccagtcctgaaagctgaacaaacgcccggcacacaggcctgcctgcgccctcgtagtctctctggacttatgaataaaagatggaggttttgtctctgttgtttccctggtaccctgtaagaataacaacttgttgctttttgacattttaacttactttgaaaaatgaccaatattaactttacatgtcttggcccttaaatctggagtggggtaaaatgaaagagacaaaagccatgtaattaggtagaagataataattcaagttaaactaatgaaactgtctgtaacggactctaataaaataatgtaggtaacatgcaatcacagaactaaaaggctagaaactgacttggaggatacgtttttagtaaagtagcctttactggaaataaagttcaatgttttcttagcacaaaggaaagaaatggctgaattttggtgtgaggaagcagtcaaccgtaaacctgccccggccaaacacaggtctttaataggaactcattccccgtctctgagggcgacatctataactgcaacaagcccatgtgaatagcaaaagccttgagcattattgagaaacagcactcctcattttgagacagtgtggttgatttcaaataatctttaaggaaaaagtttattacaggatagcacaaatgacatcctgcatttccttagactctcaataaagtaaaagggaaggcttaatgtgaaacactgcatttt

SEQ ID NO: 2029 - DNA, 572 bp, Homo sapiens
ctaggtataaatgaaatttattaatatgggaaagttaaacacaattaactgagaagagtagattataaaacagctaatggtgcagcttctatagaaaaacagtacggaagttccttaaaaaattaaaaatatatttaccatatgatccggcaattccacttctgtggtatagacacaaaataattcaggccaggcccagtggctcacgcctgtaatcccagaactgtgggaagccgaggtgggtggatcacctgaggtcaggaatttgagaccagccggatcaacatggtgaaacccatctctactaaaaatacaaaaattagccgggcgtggtggtgggcgcctgtaatcccagctactttgggggccgaggcaggagaatcacttgaacctgggagggagaggttgcagtgagccaagatcacgccactgcactccagctctgggcaacagagtgaatctgtttcaaaaaaaatagaagacytcaaagtagggactcaaacaaacatttgcacacccgtgttcataccagcattattcacaatacgcaaaaggtggaagcaactcaagcg

SEQ ID NO: 2030 - DNA, 1218 bp, Homo sapiens
catctctctgtaacagtgaccccatttgttgtagggctttctttttggttccgctaaaagccgggttcttgtcaaacggccgtgaaagatgaggctcgcagacaccttgaagggtgagaaaaataaaattcactgggcgaaaagaaaaaataaaaaaggaaaacagggactctcagcaaagcgagagtcctgctagccggttgcctgcctcccagatggaatccccagttccacyccagaacaggagaggccaggctcctccttcctgcaaatgacgcgaacttcccgaggccgtaccccagcgcgcactcctcccaatgagcaggccggacggagcttcttccgggagccctttttacttggctgtctcatgttcatcctcaccagctagcgaaatacaaaatacacacagtacagagcaaattgtgagatgagtatcagtgaataaactgctgtgcagacatttcttgtatttgaaatgtttatttgttatgaacccaattcaagctggcttaagctagaaaacaaacacacacccacacaagaatatgttaactgtcataactggaaaggagtacattggcttcagaaatggcttcgttgaggtactcaaggggcctcatcaggattttgttccccaaagtctttatcccacagacatttatgagcatctcccaagtgacattcttggtagcagagacacagcattgcacatagaaagtctgtattcctcaagccaagattctagttgacggtgagagaggcctggagtccatcctaggttcacgtgctcagccctactattttctgtgacagatacatttttagctaggttctctccgtgtggtggtaccctacctttccaagctcatatccttccagcaatacatgtaattaaaaagagaccttatttccacagttctattaacgttctgggacatccctggcttagaatttaactgatccttattctcagctttgaacagattacaatgcaaaacgatgaaattcactaatttcttagacctgacactggggctgctctctgagcagaggaaggcattggccccacctaaacacatggatggagagtgggcaagagagacattcccacagggaatttgggtgccagtagcagaaggaacaacctttccagggcaggcagaagcaatagttaactgcagcattgaaattatttccttaggatatatttttaga

SEQ ID NO: 2031 - DNA, 1218 bp, Homo sapiens
catctctctgtaacagtgaccccatttgttgtagggctttctttttggttccgctaaaagccgggttcttgtcaaacggccgtgaaagatgaggctcgcagacaccttgaagggtgagaaaaataaaattcactgggcgaaaagaaaaaataaaaaaggaaaacagggactctcagcaaagcgagagtcctgctagccggttgcctgcctcccagatggaatccccagttccactccagaacaggagaggccaggctcctccttcctgcaaatgacgcgaayttcccgaggccgtaccccagcgcgcactcctcccaatgagcaggccggacggagcttcttccgggagccctttttacttggctgtctcatgttcatcctcaccagctagcgaaatacaaaatacacacagtacagagcaaattgtgagatgagtatcagtgaataaactgctgtgcagacatttcttgtatttgaaatgtttatttgttatgaacccaattcaagctggcttaagctagaaaacaaacacacacccacacaagaatatgttaactgtcataactggaaaggagtacattggcttcagaaatggcttcgttgaggtactcaaggggcctcatcaggattttgttccccaaagtctttatcccacagacatttatgagcatctcccaagtgacattcttggtagcagagacacagcattgcacatagaaagtctgtattcctcaagccaagattctagttgacggtgagagaggcctggagtccatcctaggttcacgtgctcagccctactattttctgtgacagatacatttttagctaggttctctccgtgtggtggtaccctacctttccaagctcatatccttccagcaatacatgtaattaaaaagagaccttatttccacagttctattaacgttctgggacatccctggcttagaatttaactgatccttattctcagctttgaacagattacaatgcaaaacgatgaaattcactaatttcttagacctgacactggggctgctctctgagcagaggaaggcattggccccacctaaacacatggatggagagtgggcaagagagacattcccacagggaatttgggtgccagtagcagaaggaacaacctttccagggcaggcagaagcaatagttaactgcagcattgaaattatttccttaggatatatttttaga

SEQ ID NO: 2032 - DNA, 1218 bp, Homo sapiens
catctctctgtaacagtgaccccatttgttgtagggctttctttttggttccgctaaaagccgggttcttgtcaaacggccgtgaaagatgaggctcgcagacaccttgaagggtgagaaaaataaaattcactgggcgaaaagaaaaaataaaaaaggaaaacagggactctcagcaaagcgagagtcctgctagccggttgcctgcctcccagatggaatccccagttccactccagaacaggagaggccaggctcctccttcctgcaaatgacgcgaacttcccgaggccgyaccccagcgcgcactcctcccaatgagcaggccggacggagcttcttccgggagccctttttacttggctgtctcatgttcatcctcaccagctagcgaaatacaaaatacacacagtacagagcaaattgtgagatgagtatcagtgaataaactgctgtgcagacatttcttgtatttgaaatgtttatttgttatgaacccaattcaagctggcttaagctagaaaacaaacacacacccacacaagaatatgttaactgtcataactggaaaggagtacattggcttcagaaatggcttcgttgaggtactcaaggggcctcatcaggattttgttccccaaagtctttatcccacagacatttatgagcatctcccaagtgacattcttggtagcagagacacagcattgcacatagaaagtctgtattcctcaagccaagattctagttgacggtgagagaggcctggagtccatcctaggttcacgtgctcagccctactattttctgtgacagatacatttttagctaggttctctccgtgtggtggtaccctacctttccaagctcatatccttccagcaatacatgtaattaaaaagagaccttatttccacagttctattaacgttctgggacatccctggcttagaatttaactgatccttattctcagctttgaacagattacaatgcaaaacgatgaaattcactaatttcttagacctgacactggggctgctctctgagcagaggaaggcattggccccacctaaacacatggatggagagtgggcaagagagacattcccacagggaatttgggtgccagtagcagaaggaacaacctttccagggcaggcagaagcaatagttaactgcagcattgaaattatttccttaggatatatttttaga

SEQ ID NO: 2033 - DNA, 1218 bp, Homo sapiens
catctctctgtaacagtgaccccatttgttgtagggctttctttttggttccgctaaaagccgggttcttgtcaaacggccgtgaaagatgaggctcgcagacaccttgaagggtgagaaaaataaaattcactgggcgaaaagaaaaaataaaaaaggaaaacagggactctcagcaaagcgagagtcctgctagccggttgcctgcctcccagatggaatccccagttccactccagaacaggagaggccaggctcctccttcctgcaaatgacgcgaacttcccgaggccgtaccccagcgcgcactcctcccaatgagcaggccggacggagcttcttccgggagccctttttacttggctgtctcatgttcatcctcaccagctagcgaaatacaaaatacacacagtacagagcaaattgtgagatgagtatcagtgaataaactgctgtgcagacatttcttgtatttgaaatgtttatttgttatgaacccaattcaagctggcttaagctagaaaacaaacacacacccacacaagaatatgttaactgtcataactggaaaggagtacattggcttcagaaatggcttcgttgaggtactcaaggggcctcatcaggattttgttccccaaagtctttatcccacagacatttatgagcatctcccaagtgacattcttggtagcagagacacagcattgcacatagaaagtctgtmttcctcaagccaagattctagttgacggtgagagaggcctggagtccatcctaggttcacgtgctcagccctactattttctgtgacagatacatttttagctaggttctctccgtgtggtggtaccctacctttccaagctcatatccttccagcaatacatgtaattaaaaagagaccttatttccacagttctattaacgttctgggacatccctggcttagaatttaactgatccttattctcagctttgaacagattacaatgcaaaacgatgaaattcactaatttcttagacctgacactggggctgctctctgagcagaggaaggcattggccccacctaaacacatggatggagagtgggcaagagagacattcccacagggaatttgggtgccagtagcagaaggaacaacctttccagggcaggcagaagcaatagttaactgcagcattgaaattatttccttaggatatatttttaga

SEQ ID NO: 2034 - DNA, 1218 bp, Homo sapiens
catctctctgtaacagtgaccccatttgttgtagggctttctttttggttccgctaaaagccgggttcttgtcaaacggccgtgaaagatgaggctcgcagacaccttgaagggtgagaaaaataaaattcactgggcgaaaagaaaaaataaaaaaggaaaacagggactctcagcaaagcgagagtcctgctagccggttgcctgcctcccagatggaatccccagttccactccagaacaggagaggccaggctcctccttcctgcaaatgacgcgaacttcccgaggccgtaccccagcgcgcactcctcccaatgagcaggccggacggagcttcttccgggagccctttttacttggctgtctcatgttcatcctcaccagctagcgaaatacaaaatacacacagtacagagcaaattgtgagatgagtatcagtgaataaactgctgtgcagacatttcttgtatttgaaatgtttatttgttatgaacccaattcaagctggcttaagctagaaaacaaacacacacccacacaagaatatgttaactgtcataactggaaaggagtacattggcttcagaaatggcttcgttgaggtactcaaggggcctcatcaggattttgttccccaaagtctttatcccacagacatttatgagcatctcccaagtgacattcttggtagcagagacacagcattgcacatagaaagtctgtattcctcaagccaagattctagttgacggtgagagaggcctggagtccatcctaggttcacgtgctcagccctactattttctgtgacagatacatttttagctaggttctctccgtgtggtggtaccctacctttccaagctcatatccttccagcaatacatgtaattaaaaagagaccttatttccacagttctattaacgttctgggacatccctggcttaraatttaactgatccttattctcagctttgaacagattacaatgcaaaacgatgaaattcactaatttcttagacctgacactggggctgctctctgagcagaggaaggcattggccccacctaaacacatggatggagagtgggcaagagagacattcccacagggaatttgggtgccagtagcagaaggaacaacctttccagggcaggcagaagcaatagttaactgcagcattgaaattatttccttaggatatatttttaga

SEQ ID NO: 2035 - DNA, 1218 bp, Homo sapiens
catctctctgtaacagtgaccccatttgttgtagggctttctttttggttccgctaaaagccgggttcttgtcaaacggccgtgaaagatgaggctcgcagacaccttgaagggtgagaaaaataaaattcactgggcgaaaagaaaaaataaaaaaggaaaacagggactctcagcaaagcgagagtcctgctagccggttgcctgcctcccagatggaatccccagttccactccagaacaggagaggccaggctcctccttcctgcaaatgacgcgaacttcccgaggccgtaccccagcgcgcactcctcccaatgagcaggccggacggagcttcttccgggagccctttttacttggctgtctcatgttcatcctcaccagctagcgaaatacaaaatacacacagtacagagcaaattgtgagatgagtatcagtgaataaactgctgtgcagacatttcttgtatttgaaatgtttatttgttatgaacccaattcaagctggcttaagctagaaaacaaacacacacccacacaagaatatgttaactgtcataactggaaaggagtacattggcttcagaaatggcttcgttgaggtactcaaggggcctcatcaggattttgttccccaaagtctttatcccacagacatttatgagcatctcccaagtgacattcttggtagcagagacacagcattgcacatagaaagtctgtattcctcaagccaagattctagttgacggtgagagaggcctggagtccatcctaggttcacgtgctcagccctactattttctgtgacagatacatttttagctaggttctctccgtgtggtggtaccctacctttccaagctcatatccttccagcaatacatgtaattaaaaagagaccttatttccacagttctattaacgttctgggacatccctggcttagaatttaactgatccttattctcagctttgaacagattacaatgcaaaacgatgaaattcactaatttcttagacctgacactggggctgctctctgagcagaggaaggcattggccccacctaaacacatggatggagagtgggcaagagagacattcccamagggaatttgggtgccagtagcagaaggaacaacctttccagggcaggcagaagcaatagttaactgcagcattgaaattatttccttaggatatatttttaga

SEQ ID NO: 2036 - DNA, 1155 bp, Homo sapiens
tggatgaattagtgagtgaatgaagcacctacagagaaagttgaggagattttactcatagtgaattttatttagtacaaccaacataataaagaatttctgacaaatttgttttaaaagagttagaattttactagtgaatgacccagaatagttggtgatgactctagatctttgattttccaatgagattactctaaaactaacaatgactttaactggaaagtaagccagggaaagtttaaaatatgcttggtgtgtataaagagaasctaaggattgagttatataaaaacaatatggaatgaagcccccttctcacctcccctgctgtgtcagttgcatgtttgtcctcactttgcttgtagcatccaggatgctaagactctggaaaatcatagtcgaacccctgcagcaatccggttacatttgcttgcagcagagagaattgatttgagtgttctagcatccttaagacttgggctctttcaccaggtctcctccaaatctgttgtactgctttggacaattactctcagcctttaaaaactcccctgccatgaaggtcactgcaggacagcttcctatagactatctgttattgtgtgctgtttccacggaaaatgggtaaaacataactgatattattagaaatatgatcctgaccacaaaaagggccaatttcctttggtgatgactctctgattcaattcagatgactacatttgcatcatcgtaagcttggacatgtcactgattcccccagcaaagtctgttctttcacaagctattttagaagtaaaaagcctttatggacctctttccaaaactttgattcagggaaattggcaatgactgagcaaaaaaacaccaaaggtcattgttacgtcattccggaggacagaagttgggatggaaacctctcttgcccgtcccacgtggatatcaatgcattctctctgcaccttgctctttctgtttctagctcacagagttgtatgtggaaatggaacctcacaagccactgctccttgctctgtgactgcaggcacttgggagttgaacacagggttaggaggagggatggctggtgttacatgtcctgcctggtctcagagcttggaaaccagtggactagaggctggctggccacgt

SEQ ID NO: 2037 - DNA, 601 bp, Homo sapiens
tgctaggacctgggtgcagtgccatctcccatttatttaatgtgtccaatctattgaagtactatctttattaaatttattaaattcagtcccattttgagtgtaccatgtgtttcctgtgaggacccaactaataaactaataataataataataataataactaacacttactttgcactctttacatgccaggttctacggggtgcattcacacacaagctggttcactttgtcctcacagtgactgaacgagattggcactctttctgtaattcccattttgcagatgaagaaactgatcctcagagagcacccctgactcccaccaggtcatacagctagtagctagcagaaccagcgtttaaacctccttggcttgcatataggatccatgcttcagcccatcygtggggttccaagttatgacatgagaatggctcaggctggtgactttcctaagcaaaatgttggcagtgggatccatgacactatttagcttttattattcatcattaattgtaagagtgcatgttcaatgtcactagctgaggttctcaagcttgcacagggagactttcaattaatccactaaaaaagc

SEQ ID NO: 2038 - DNA, 619 bp, Homo sapiens
tggttgttttttttttttttttttttttgacggagtctcactctgtcgcccaggctggagtgcaatggcacgatcttggctcactgcaacctctgcctcccaggttcaagtgatcctcctgcctcagcctcctgagtaggtgggactgcaggagtgtgccaccatacccagctaatctttgtatttttagtagagacgagtttcaccatgttcgtcagtctggtctcgaactcctgacctcaggtgaataacctgccttggcctcccaaagtgctagaattacaggcatgaaccactgtgcttggcctcatgttctttatgtgatttgagttaggagggaaatctaaatagtttaatcacatgaaacatggtaacacctgatattctgacttaccaggtcagctttcttcaagtagwtcaccttttaaaagaaggcctaggctaagccaaaggaattaatctctgacagtagaatacccaggcatgtttactagcattgaagaaacttttctctccttctgtataccagcttgtctacagtagacaagtttatttcctccaaaaggacaaaagttgataaatggcctgcaagttggatctatattttatcattgaatat

SEQ ID NO: 2039 - DNA, 641 bp, Homo sapiens
tgtgaaaatacagagattctgtcagttggctggcattaataatgaccccagatattaatggttcagcagtttttacccctagttgtgctccagaatcaatcagtgtatataattattgtaaatataaatgtgcaagtgtaaaccttggagtttctgacatagttggtctatcttgaggccctagaatttgtgttttaataaagttctaccaatatcatcatacaaacagtaacaacaacaattttagctmacatataatcacttaacaaagcggtctcagtgccagacaatgtctaaggcttgtagacaggataactcatttaaacctccaaagaaccctatcatctaagtactattacaatgcaatttctagatgaggaaactgagacagagagagtgtaggtgattgagtcaaggtcacaaaggcagagtgtaaagctaggatttaaccaccactatcatggacctctgtgatcttaagcaatacattactcaatttcaccaaatctcttctttggggagaaaaaaaattagaaagatggaatcttaataaatattatgcctattcatagattaaatagaaaaaactaaatgtcttttcctagttacaaaactagtgagagactgaatatgctactcca

SEQ ID NO: 2040 - DNA, 1158 bp, Homo sapiens
tatatctggtttccatagccttattgcctgaagatacttcctagatatttcataattcattttaactttttaaaattggcctacatttcaggtgttttgtttgggcagacgtgtcagtccaagcattagattcaagtatatctattctttccttgatgaagttattttcatgcacaatgccttgctctcttcatttatctttttataaataacaaaaaaatatcatgacaattccaagacagggatctatactcagagtagcaccattttaaataaatgtagattttaatatatattcaattcacaattatttccccagccttctttaattcatgacataagccagacaataaggctgaaacaaacttaaaaattctgcaatatataagctatatgtgtttgtgtgtgtgtgtttatatatataaaaatttaaacttaaaaaaatatatatatgccttgttggtgtataaactactttttccctgaaaagtggtaggaatacatttagagttggttcaattttctttcttttcttttctttctttctttctttctttctttctttttttttttttttttgatacggagtctcactctgttgcccaggctggagtgcagtggcgtgatctcggctcactgcaacctccacctcctggggttcaagctattctgctgcctcagcctcccgagtagctgggactacaggcgcccgccaccccgcccggctaattttttccatttttagtagagacagggtttcaccatattagccaggatggtctcgatctccttatccgactgcctcggcctctcaaagtgctgggattacaggcgtgagccactgctcccggccaattcttaattttttaagtaatcacttttgttctctcactactttaaagtacattatgacaaatctcaaaatacattatgttttccattgataaacaaagcatttcatgtaaccttttaagggtggtttgcactggtgacttccttcagaaaagtatggaaaggggagaatatgtggctttatagtggagaaacgtgacacacactacctcagccaggtgatcaaagttaatactatgatatgtcatgttgatagtacatgcccttgrtatgatgtcatgagattggcatttatttacttttata

SEQ ID NO: 2041 - DNA, 547 bp, Homo sapiens
tccaccttggtgagactgtgccatacaaacagggcttcagggaaagatagtagtgttatcagagtatggctcagtctctttcatgggctcataaatttcttcccattacaatacaacaacacaaaacttcagggtggtgttagcttttactgaaaatttagaataaacaaaaatgaattagagtgtatttttaagacatatatctgatttattaccccttatctacacttggaaaaagtcagttgccacytactggagctcagtcaaatttagataggaaacttccttgtgttcatttttagtgaggtatgtatgtgttgggacaatgcaaggtggagagaggcaggagacactggacataaagcaaagatgaaagaaaggtagaaaagatgtatcctttggttaagagttaatgcataaactattaatgttaaagggtgtaaccctatgctaaaacacctatacataacaaatttgtgtgtttctcctcctctttggaaggcatatcaaataccagcagatcaaaatgataaaataaacagggtgg

SEQ ID NO: 2042 - DNA, 1148 bp, Homo sapiens
aaatattcattttgtgggtgggaaaaggagggctcaactcttttctagaatgtaatagctytaccctcccctcatttattgttttatttctaacttatattttcaataagagtaatattgttgtttaaggtacagattaattatatgtacagacctccttgtttttaaatctatattggaattcaatttttgttgcaggtctaatgtgataatatttttaacatgcttaatgtcatctctagcacctaattgatactatggtgctaaacaaataaaatgtggtcatattaattttcatgtaatgtcttcatctaatgtactatctatgttatgatttaatttttcctagggtcactgggtttctattagtgacctttatgtctttgttttatcacaagcttatattgccagaaatagaaatataaaatttgtaagagaaaatatcaaataaacatgtttataattaatctttcatgaaatattttaagtcaatttaattgtttctggtttgatttaggctgcaaactcagcaaagaaaagcattgatgttttgacattcaataaaagtggaatccatttgtattaatgagcataatcatattatgcctttaatttaattctgtgtcattcattcttttagaaatgactgtgagatttaaatcatatgtacctttgtgtgtgaagaatgggtcattacttttaaccatgccactaacaacttcttgctcttggccagcgaatataaccttctgaatctaagttttttcttctgtgaaatgagtaaattgaattaattattttctgatttccttctaggtatgagagtctattgttctatactgtgatgaaatattatcagggatatatgagacttcagagttatcatagaatgtcaatagcaacatggagaaattttttcagggtaattttccccttgatagatatgctctactatggcaacattcaccatttaaattgacatctgcaagctcaatgcttaattaaaagtgatgagaggcacattataaaaaattataagtctatatgtatccacatttgaagaaaaataattcttcaagactagattaagtccatattgcaaattcctatttacttctacttaaagtattttggtgtaaggggcaaca

SEQ ID NO: 2043 - DNA, 1148 bp, Homo sapiens
aaatattcattttgtgggtgggaaaaggagggctcaactcttttctagaatgtaatagctttaccctcccctcatttattgttttatytctaacttatattttcaataagagtaatattgttgtttaaggtacagattaattatatgtacagacctccttgtttttaaatctatattggaattcaatttttgttgcaggtctaatgtgataatatttttaacatgcttaatgtcatctctagcacctaattgatactatggtgctaaacaaataaaatgtggtcatattaattttcatgtaatgtcttcatctaatgtactatctatgttatgatttaatttttcctagggtcactgggtttctattagtgacctttatgtctttgttttatcacaagcttatattgccagaaatagaaatataaaatttgtaagagaaaatatcaaataaacatgtttataattaatctttcatgaaatattttaagtcaatttaattgtttctggtttgatttaggctgcaaactcagcaaagaaaagcattgatgttttgacattcaataaaagtggaatccatttgtattaatgagcataatcatattatgcctttaatttaattctgtgtcattcattcttttagaaatgactgtgagatttaaatcatatgtacctttgtgtgtgaagaatgggtcattacttttaaccatgccactaacaacttcttgctcttggccagcgaatataaccttctgaatctaagttttttcttctgtgaaatgagtaaattgaattaattattttctgatttccttctaggtatgagagtctattgttctatactgtgatgaaatattatcagggatatatgagacttcagagttatcatagaatgtcaatagcaacatggagaaattttttcagggtaattttccccttgatagatatgctctactatggcaacattcaccatttaaattgacatctgcaagctcaatgcttaattaaaagtgatgagaggcacattataaaaaattataagtctatatgtatccacatttgaagaaaaataattcttcaagactagattaagtccatattgcaaattcctatttacttctacttaaagtattttggtgtaaggggcaaca

SEQ ID NO: 2044 - DNA, 1682 bp, Homo sapiens
tttgagagttaattaattgctaatagtttagcttcttatgagacataatttcttcagtttgggtagagaggataaaaaactaaaacaataatttggaatgataaaatctagtaattgactgaaataaataccgataatttcataggggactgttgtgataatttatgttcttgaacatcattgctggaataacttccagaccattttctgcttgagaaaaaagatgcttcaagctgtagcagatgactggtcaacacttagccagggcctacttgtctacatagccatttaaaattctctcctcttaaaatttattcgaaggagagagtagataatttgttaattacatgacttgctctttagtgtgttctgctagaacacttactgaataaaaatgggatatttatgtggtatatttacttcagtttagtccaagaaagtgtataagaataaattctgttgttagcaggaaatgacaattactttattcttcagaaaacrcaaactctacatcttgtaagtctgcttccaaatccaattgtcattggtttttctggatgctctctgagtttttgctatagttttaaaatgtctgagaattattttggcattttctccattaaactaaaaagacatatatcagtacaaatcagttttatatttaatgactaaatgttcaactaccacaagacatccttatttgatgcactgtagaatttggataattacattgaagtgtacagcagtttagaagttcaaaatttggcaggtgcaggtttcattagcagcggtaaccctgaaaggccaaagaatagacctgtaattgttagttgtatctttaagcaataaagcatggggtcattctacccttaactcacaatcaacaattgctgtgtaagttgagtgtgtatgaaatgattgcccctgcacctaactgtggatgaaaagaaaaattaattgatatattttagaattgtctctacctaggaacttttgttttgttgttgttattggtctaccttagattagaatttgtaaatatagattgtcttatacataaagagcttttattcatggatattgaggagtggagagtgtgtccatctactcattcatgaaattgtcaagatgactcctactcaactggatccctagttaggtgatgttcgtcttcattctaaacaaaataaagcatggaattatttaacttacttttaaatcctctatgaggtaaaattacttgatattcatttgtttctattcattgttaaatttcactcccaaatttattgctgttgagaaatagaaataatggtgtgtgtttttttcttttattaattaattccttttttttcttttgatacgtgtgtggttttgatgtcagagttatcctggcttcataaaataaattgaaaagtgtcccatcctcatctattttgtgtatatctttgtgaaggaatactgttaattcctcttaaatatttgggaatcttcagtggtaattttactgaagaaaatttggagtgtttttgtgttttgttttgctttcactaattcaagctcattaggtgttataggtttatgcaggttttccgtttcttcttcagacagtttccatatttttgtctttctagtgtttgctcaattcaactaaagttatagaatgtgttggcatacagttg

SEQ ID NO: 2045 - DNA, 1183 bp, Homo sapiens
agcatttacaactgagtttcctgctctagcctaacctgccctgcagacccctgtaagkcctccccaagtatttctggacttcctctaagttctcccacaggaactcataagtcagactattagatataatcacatgtggaatttgccttattctttctctttctccccctctccctcctcagcatcctctactcacaacaccttctgaaggagcctcagtcctgccatgactggcagaacctatcacgagcatcgccggcatccatgccaacagctcacctgcaaggctttcaactctgctgaccttcagagtgtcagagcagtgccgaagcccaggacatggctgtcatcccttattcctcctagctcaaatcaccctcaatatcctgataggaaccaaataccaggccatcccgccatttcagtctctgtcccaaggactcctcattaaattccatcatcatccttcagctaacaaccaaaagccttcctgaaacacagcctcatgcaaataggtactgagaaaacttcctagcccctagttctgcaaacactcacctacgcagtttagaatcagctaggttacgtgcctgtgcatttatatatgcagataaataatacagcagctatactacaagtaggtgtctcttcagcctgtttactttaattttacatattaggctcatctctgaatgcccaaaagaggatgtaactgatatattctcctggcaaaagagtcaggagtcatttcccagctgaggggatgggttgatgctcttccattttctcttaaccctgtgcaaatggtgctgggccataagaggacatctgggattcaactcccactgtgtatggctaagaatcagaacaaagtatgatgtccacagaggaccttgagctcacaggctccattccagagagtaatacagggatagtaaaccactggaagcaaagactccctgtggaatagctgcagtcatcccccatgctggcccagccacctgagaagagacagtcttgttaggttgacttaactattggtcacctgaatttaatttggcttactgaattatggatgaaggagacaataatccccaagagttggccaatctttgtcatcaggggttttcttatgttggtgagagtgttctagtaccttaataggcagcttgagtttgatgca

SEQ ID NO: 2046 - DNA, 607 bp, Homo sapiens
attttatatattttactctgtgggtaagatgtgtcaatgaacagcaagtgaacagatctgccacacacagtagcagaggttgcacamtccataaccctgaggtaccattcatggtaacttatgatggacatgactccctttggcttgtgagtgcactcgtttatgcacttctgaggttagtcaagtaatatgaagtgtctgcaaaaaagcttttgacattattttcaccaagtagatattcatggaaattcataaaatccaagagtaaatgaacatgtcaatgactataagcaactctcttgaaagaaaatatgtaaggtcattgttgcccttctgaccaaacaaacaatgcaaactcaagtaatctcaaagtatcattttatactatcaagttagcaaatattactactaataattatgaattaatgttccattccacatcaaatggactggcaatctattttttagatattttttttctgagataccaggttgctaggttgaagctgcttcagatttcttgagatagagtaaattactctatctctatcaactactgataatattttacctccaaacaacatttttggaatataatacatactga

SEQ ID NO: 2047 - DNA, 335 bp, Homo sapiens
tatatagcacccaagcaaactaatatagtcgctcaagccaagaaagacaggccttaatagtgatgctgaaacctggggccactgacatctctcaggaactctctgcaaggctcaacactgacaacttcccgagcgccgatgctcttcaaggccatcgcaagcactgttcccttaggcaaggacagtcaatcctgcttccagtgtctcactttcctcatcctttgataagaaagcacaggggccaggcctgtaatgagcactcaggaaatgggggtgacctctactcactgttcagccgcatttgggtcragagaatcagtttcagtgggtgtttc

SEQ ID NO: 2048 - DNA, 1313 bp, Homo sapiens
aatacctaggtgatgggttgataggtgcggcaaaccaccatgacacatgtttacctacrtaacaaaactgcatgtcctgcacatgtatcctagaacttaaaatatttttttttaaaaaaaagagcataaattggtcctgagaccaaaaaagtttaagagcctctgatgtaaaacaaagtatgtattttcaatttccaggcaaatgacttgcatgataaactgaactttcttactccttataaactcccagttcttcaggggcaaaaaagagaaaaagccttagagaatctagtgattcctatctggctcctttaaagataggaagatcttcaacattaattcccattcattcattaatggaattaataattattgagcgtctgtcctgtgttgacattgtgtttaagcactaaggttagaaaaatgagcaataacgactgttcttacaagtctccattttacattagaaaagaaaaattaataatatcgtgaatattagcaaattaactcttatcgtatcagattattttaacgagttttaatgcacgaaagttattcctcccattggaactgtaagagaagacttcttcttcatctctttctcagactcttttggttactaacaaagacttgctctttttaggactttatcattataaagcaaaacagtttgtaggaaactataaagacaaaacactgattggtagtctgggtctaggggtagtggtgggcaagcttcaattgtaaagggccaggaggaaactttttaggataaggaacctcttctgtgtctaggttatggtggtggctacatgattttgtacagttaccaaaatccatcaaaagaataccttaggatgggtgcagtggctcaagcctgtaatcccagcactttgggaggcctaggaggggatcacctgaggtcaagagttcgagaccagcctggccaacacggcgaaaccccatctctactaaaaatacaaaattagccaggtgtggtgctgcacgcctgtaatcccagctagtcaggaggctgcagcaagagaatcacttgaacctgggaggtggaggttgcagtgagccgagatcacaccactgcactccagcctgggtgacaagaacgagactctgtctcaaaaaaaaaaaaagaaaaaaaaaagaacaccttaataaacaaaataatagaggggaaagcaggtctcaactttactagcagaaatggagaaagggaaaaatagattttactttttaaaaattaagtaaggagcatgggacatttttctttgacaggctcagtggtctattctggaagc

SEQ ID NO: 2049 - DNA, 1165 bp, Homo sapiens
tgcattctctaactttgcaaagagaaaatggtgaattgaaagaaattttacactgctaccaattctcaattctccaggtatttggtttggaacagtccattcagagtgacatggtcttgtactgtaataaatgctcctgtcattattacttgtatattaaatagctcttatgtgttagacatgactctagatgcttggtggaaaggaaagatggtgtccctgtttccatggagyttatatcgaccaatggacaataaagttcactgttaacttcattagccatcagaaatcaaacaggcttattagagagcagttaaacctctctcagtggaatgtagaaggttctgaaattcagaagactggtttaacaaaatacaattcattattttttgtttaaaaagatcaagagagaaagttattagatttagtcaaagactctagaagctcatttttggctagtttgccttgagggaagtagctcactatcttcttagcaggctaaaagccatcacggcagatggtcctcagctgcatgtgccagccacagaacatgtgcctggtgtgtttgaatatggtcttgctctggtctaagcagcagtatatccaggtagaatattttctggtgctctccaacagaggatggggataaggaagagcccatgggagtaggtccagaagtagttttctctcatttctggtcctctgcaagtaggctcatgacttggcaagctcgaggcagaatgaagggataaacagaatccaagaagcccatggcaattgcagagcccaggacacagcatctgctaggcatatttattggcaatggatcttctgactgtccctgcatctctgatatctgtctcacctgaggtctagctaagcatttaaatctcaaaccactgtacagtcattgtttatgcctgacaactcagcattaccacgcagcttctgtttaaaacctagcctcttgcctattccactggacctgtactacaagacttaatttaataataaattaaactattatttttctctataatattattgactgcttctgattctgatttcagtctcaattgttcttgtttgatttaagctcttcacttaagtacactgaacttcagtgtccacatctataaaattggaagaaaaaagcctttctcat

SEQ ID NO: 2050 - DNA, 1165 bp, Homo sapiens
tgcattctctaactttgcaaagagaaaatggtgaattgaaagaaattttacactgctaccaattctcaattctccaggtatttggtttggaacagtccattcagagtgacatggtcttgtactgtaataaatgctcctgtcattattacttgtatattaaatagctcttatgtgttagacatgactctagatgcttggtggaaaggaaagatggtgtccctgtttccatggagtttatatsgaccaatggacaataaagttcactgttaacttcattagccatcagaaatcaaacaggcttattagagagcagttaaacctctctcagtggaatgtagaaggttctgaaattcagaagactggtttaacaaaatacaattcattattttttgtttaaaaagatcaagagagaaagttattagatttagtcaaagactctagaagctcatttttggctagtttgccttgagggaagtagctcactatcttcttagcaggctaaaagccatcacggcagatggtcctcagctgcatgtgccagccacagaacatgtgcctggtgtgtttgaatatggtcttgctctggtctaagcagcagtatatccaggtagaatattttctggtgctctccaacagaggatggggataaggaagagcccatgggagtaggtccagaagtagttttctctcatttctggtcctctgcaagtaggctcatgacttggcaagctcgaggcagaatgaagggataaacagaatccaagaagcccatggcaattgcagagcccaggacacagcatctgctaggcatatttattggcaatggatcttctgactgtccctgcatctctgatatctgtctcacctgaggtctagctaagcatttaaatctcaaaccactgtacagtcattgtttatgcctgacaactcagcattaccacgcagcttctgtttaaaacctagcctcttgcctattccactggacctgtactacaagacttaatttaataataaattaaactattatttttctctataatattattgactgcttctgattctgatttcagtctcaattgttcttgtttgatttaagctcttcacttaagtacactgaacttcagtgtccacatctataaaattggaagaaaaaagcctttctcat

SEQ ID NO: 2051 - DNA, 1307 bp, Homo sapiens
tgcatgtaggagattgcgtacaggttggtcctttttcaaatgatcatgcaagggacttttgacaaaatttttttatatttgtacatatctctatcaacagatttgaggtataaytgaaatgtaatgattgcgtatgaagcatagaattttctagattttgccactcttcaaaccatcatgaaaatcaacacagtgaatgtatataccagccccaaaagttgtccctttgaattgacacccttcttcctatccccttccctaggcaaccaatgatctgttttctggcactataaatttaggtggcattttctggggtgcagctaaatcttaaaatatatttctaaactgcaattactgtgaacatattaccaatgccaattaagtaacagacattttttaattgtttccaaagaatccacatcaactcacttcttcagcaagaagtacacaaaagtttgttttggggcatctgatatggtttggttctgtgttctcatccagatctccccttgaattgtaatcctcataagccccatgtgtcaagggcaggacgaggtgaaggtaattagatcatgggggcattttctcccatggtgttctccagatagtaagtgagttctcacaagatctgacggttttgtaagcatctggcatttcccctgctggtactcattctttctcctgctgccctgtgaagacgtgccttctgccatgattgtaagtttcctgagggctccccagccatgcagaactgtgagtcaattaaacttttctttataaattacgcagtcttgagtatttcttcatagcagtgtgagaacgaactaatacagcattgttgccgaaactgggtttcattaaacttttatttactaaaaggaagaagaaacaattatcttgctgttattttaacttgtttttattgaattataaatgaaaagagattttgtttcatgcttattgataatgtttatatttttgtaaaactttcctattaatatcatttctttagttttttatggggctacactattttattaataagagcacttttattttgcaaaattaagctcttttgttctctacgatctaactgcttttgttcttttcttctggcaaaattaaaagtttaaacaaagatataaatatttaaagtctagtagatatgatattataccaatttagtgagaacaaaagtattcgttctataagtaactgaaacatattctacaaataaaatgtataaacacataagtaggaaagttttattcaataactctttggacttccacaaaaataatgtccat

SEQ ID NO: 2052 - DNA, 608 bp, Homo sapiens
cagatttcatatacttttgttatgcttgtgcttctgtacctgacagtcctggaaagtcttcctttgcttgtctgcctggtaaactacatatttccccttcaagattcatgcaaggatcacccatcaaggaagccttcctgcaactgttcttgcactttgaggggtaaagtgttccttcctgtctgcgaacacacagttcaactatttacttgtgtgtctcccttagtagcttcyttccaaccaagtgcagataccttccattaatctttgctttctgtgtgtttaaagaaggacctggtgaatttgaatacaatgcattaaagaatggtaggtatgatgcatagagtgtgactaatatggcagtttggatgagaagctcaggtcaagtattctgaggagcttttataaaatagaacttaagtaaaagaggtgtaaaagatacagaaattatccttgtttctttctctttgtaagtacccttagtaaaaggaaaatcagtttaagactagcagaatttataaaaagttatcataagcacttcaggctcattccacattcactttatgcctcactttatatatcactttcctcatctgtaaaatgaaata

SEQ ID NO: 2053 - DNA, 608 bp, Homo sapiens
cagatttcatatacttttgttatgcttgtgcttctgtacctgacagtcctggaaagtcttcctttgcttgtctgcctggtaaactacatatttccccttcaagattcatgcaaggatcacccatcaaggaagccttcctgcaactgttcttgcactttgaggggtaaagtgttccttcctgtctgcgaacacacagttcaactatttacttgtgtgtctcccttagtagcttccttccaaccaagtgcagataccttccattaatctttgctttctgtgtgtttaaagaaggacctggtgaatttgaatacaatgcattaaagaatggtaggtatgatgcatagagtgtgactaatatggcagtttggatgagaagctcaggtcaagtattctgrggagcttttataaaatagaacttaagtaaaagaggtgtaaaagatacagaaattatccttgtttctttctctttgtaagtacccttagtaaaaggaaaatcagtttaagactagcagaatttataaaaagttatcataagcacttcaggctcattccacattcactttatgcctcactttatatatcactttcctcatctgtaaaatgaaata

SEQ ID NO: 2054 - DNA, 1696 bp, Homo sapiens
taaggtaggctaggtgtggtggttcagatctgtaaccccaacactttgggaggctgggcagattgctygagcccaggagcttgagaccagcctagtaagcatggcaaaaccccatctgcacaaagaatacaaaacctagccgggtgtggtggcgcacacctgtagtccccactacttggaagactgagtacgagggtcacttgagcccgggaggtggaggctgcagtgagccgagatcgtgccaccacactccagtctaggtaacagagcaagaccctgttaaaaaaaaaaaaaaaaaaaagagagagagagaaagaaaaaaaagtatgcagtagtctccataccgctgaactgtcattgacaaatcatggtaataactcagaatgggcagcctaatccagtgctaaagtcagaaactgcccatcatggtcaccctttatttcaaccaagcacactttttccttcccatcattcttttgcctgaaaagaggtcttcaagtagccatacacatcaaaacatcttgcatctgactttaggtttgatatgagtgttaggaaacacccatgtttatatctgttccagaatttgttggtattctccatgtttataaccttgttgtcacagagattaaaatttaattgggggaaataaacactctcctgtcagactttaaaggacacagacatactctatataagagcccaaacatgatgtaaaagaataaaacaggaagcatggacaggccagttgatgtggcagttgtcagggaggaaacagtgggggttagtatttggtcacaagtaatcacccctctcctctccttgagaattactccgtcacactctccagccatgtagctctgatctgcctgccaatcatagcaatcattcacatatacaaataatacacacagctactgaagatttgagtgccaagataaagcacttggtgtatatttaataggcaggaaggaacccgtttaaaaaatatatatatatatatatatatatatatatatatatatatatctcatcattatatgcatcctgtagattcttaaaatactgacatagtaaggatagtgttttaaaaagatttgggtatcagaataattcatgcttttcactgggtgggcttaaaagcagatttgaccaccccaccaataaatgacctgtgggaaaatatcaaaagatctaacacaggtataattggagtcccagaaagaggtaagatggagacagatcacaaaatattcaaataatagtctaaattttccaaacttgatgagaaatgtgaatttccacattaaagaagtttagtcagtcctaagcaggataaatacaaataaaccacaccttagcaaaccacactcaggtgctaaaaatccaagttaaagagaaatcttgaaagcggctagaaaaagaaatcttatatgtagaacaaaattaggaattgttgttggcttgtcatcagaaacagtggaggcaaaaagtcaagtgtaatgacatctttaaagtgttggggttggaggtagcagggaaacccagtcaacccagaattctatatacagccaaaacatctttcaagaatgaaggcaaaataaagacattttcagataaacaaaacctaagaaaattgccagtagacctattctacaagaaatgctaaaaattcttcacactgaaggaaaaatca

SEQ ID NO: 2055 - DNA, 1640 bp, Homo sapiens
ctttcatatatactgcaastatgtggaacaaaaaattcgaagtagaggtcagtttaatttttttttaaggacaccatcattcttttttttttttttttttttgcacatagacctctagcaaaagtttgaatagtgccatatctaagaaactctgaatcttgctatttttgagatacattttattacatcttgtcataagattttatcatggcaatttttcttctgctgtggagaagtcaactgtgatttttttcaataaccatttacagggcaccaggtgccaacagggcattatgccagctatcatgtctgatgtagagttgtttaaaatactgtttgtgcccttgagaagctaaaatagttgaatagataaagaatttaagtttatatgactgagagcaatatgtactaagtatcatttgactgtcataaacaaagatttacagggatagagaaaacaaaagagtattctgaaagaaaacatgaaagactttgaaaaaattattaagatctaataggtgggaatggtgttgtaatttccttttgtacctgtaatacattgcaactaacttcatggcttaaaataatacgtatatattatagctctggagatcagaagtccaaaataggtgtcaatgagctaaaatcaatttgtcagcaggactgctccttttggaggccctgaagttaatctctcttcttatcttttccagtttctagaggctgaccatatttcttggctcatgacacccttccatcatcaaagccagcaataactggtcaagtgtttctcactttgaatcactctgacaccaacccctccacctttctttctcatatttaaggaacccatgtgattacattgggtccactggataaaccacaataatttccttaaagtcagtcaagtgataaccttaattctacctgcaaacttaactcacctttgtcacataatatagcatatttagaggttccagggattaggatatagacatcattgggtggagcgttaacctgcctttcacaagtgacaaaaattattaagactggaaagagagaattgctgaggaaatgtgtttacattaaataatgtataggattttgagattgtgttgaaagagataatattggaaaggtaaacgtggatttggaaacttatttataggcaattgaaatgacattaaaattgtttgaggaacacagtgttacaatcgtagatcacctctaggtagattaactagaaatgcagcatgacttgaatgagggagtctagaggggaaagaccctgcctggattgctcatcactgtagccccagggtcaaagacagtgctgacaaataaatatttgatggcctgctctgcttaccacagagacaggccatcaggattaaagagattatataaatataataaaactttaaaatttttatgataaaaataatgtgatttattactgttggcaaggtatttatctttttcaaactttgatttttacattaatgaaatatagataaaataataaataccttgtaggaatgctgaaaggcttataagatgttttatagtcaaacacgcgcacagcaactgccacgtgggatgcactcaataaatcctaaatgttttagttaatctatgca

SEQ ID NO: 2056 - DNA, 1640 bp, Homo sapiens
ctttcatatatactgcaactatgtggaacaaaaaattcgaagtagaggtcagtttaayttttttttaaggacaccatcattcttttttttttttttttttttgcacatagacctctagcaaaagtttgaatagtgccatatctaagaaactctgaatcttgctatttttgagatacattttattacatcttgtcataagattttatcatggcaatttttcttctgctgtggagaagtcaactgtgatttttttcaataaccatttacagggcaccaggtgccaacagggcattatgccagctatcatgtctgatgtagagttgtttaaaatactgtttgtgcccttgagaagctaaaatagttgaatagataaagaatttaagtttatatgactgagagcaatatgtactaagtatcatttgactgtcataaacaaagatttacagggatagagaaaacaaaagagtattctgaaagaaaacatgaaagactttgaaaaaattattaagatctaataggtgggaatggtgttgtaatttccttttgtacctgtaatacattgcaactaacttcatggcttaaaataatacgtatatattatagctctggagatcagaagtccaaaataggtgtcaatgagctaaaatcaatttgtcagcaggactgctccttttggaggccctgaagttaatctctcttcttatcttttccagtttctagaggctgaccatatttcttggctcatgacacccttccatcatcaaagccagcaataactggtcaagtgtttctcactttgaatcactctgacaccaacccctccacctttctttctcatatttaaggaacccatgtgattacattgggtccactggataaaccacaataatttccttaaagtcagtcaagtgataaccttaattctacctgcaaacttaactcacctttgtcacataatatagcatatttagaggttccagggattaggatatagacatcattgggtggagcgttaacctgcctttcacaagtgacaaaaattattaagactggaaagagagaattgctgaggaaatgtgtttacattaaataatgtataggattttgagattgtgttgaaagagataatattggaaaggtaaacgtggatttggaaacttatttataggcaattgaaatgacattaaaattgtttgaggaacacagtgttacaatcgtagatcacctctaggtagattaactagaaatgcagcatgacttgaatgagggagtctagaggggaaagaccctgcctggattgctcatcactgtagccccagggtcaaagacagtgctgacaaataaatatttgatggcctgctctgcttaccacagagacaggccatcaggattaaagagattatataaatataataaaactttaaaatttttatgataaaaataatgtgatttattactgttggcaaggtatttatctttttcaaactttgatttttacattaatgaaatatagataaaataataaataccttgtaggaatgctgaaaggcttataagatgttttatagtcaaacacgcgcacagcaactgccacgtgggatgcactcaataaatcctaaatgttttagttaatctatgca

SEQ ID NO: 2057 - DNA, 1640 bp, Homo sapiens
ctttcatatatactgcaactatgtggaacaaaaaattcgaagtagaggtcagtttaatttttttttaaggacaccatcattcttttttttttttttttttttgcacatagacctctagcaaaagtttgaatagtgccatatctaagaaactctgaatcttgctatttttgagatacattttattacatcttgtcataagattttatcatggcaatttttcttctgctgtggagaagtcaactgtgatttttttcaataaccatttacagggcaccaggtgccaacagggcattatgccagctatcatgtctgatgtagagttgtttaaaatactgtttgtgcccttgagaagctaaaatagttgaatagataaagaatttaagtttatatgactgagagcaatatgtactaagtatcatttgactgtcataaacaaagatttacagggatagagaaaacaaaagagtattctgaaagaaaacatgaaagactttgaaaaaattattaagatctaataggtgggaatggtgttgtaatttccttttgtacctgtaatacattgcaactaacttcatggcttaaaataatacgtatatattatagctctggagatcagaagtccaaaataggtgtcaatgagctaaaatcaatttgtcagcaggactgctccttttggaggccctgaagttaatctctcttcttatcttttccagtttctagaggctgaccatatttcttggctcatgacacccttccatcatcaaagccagcaataactggtcaagtgtttctcactttgaatcactctgacaccaacccctccacctttctttctcatatttaaggaacccatgtgattacattgggtccactggataaaccacaataatttccttaaagtcagtcaagtgataaccttaattctacctgcaaacttaactcacctttgtcacataatatagcatatttagaggttccagggattaggatatagacatcattgggtggagcgttaacctgcctttcacaagtgacaaaaattattaagactggaaagagagaattgctgaggaaatgtgtttacattaaataatgtataggattttgagattgtgttgaaagagataatattggaaaggtaaacgtggatttggaaacttatttataggcaattgaaatgacattaaaattgtttgaggaacacagtgttacaatcgtagatcacctctaggtagattaactagaaatgcagcatgacttgaatgagggagtctagaggggaaagaccctgcctggattgctcatcactgtagccccagggtcaaagacagtgctgacaaataaatatttgatggcctgctctgcttaccacagagacaggccatcaggattaaagagattatataaatataataaaactttaaaatttttatgataaaaataatgtgatttattactgttggcaaggtatttatctttttcaaactttgatttttacattaatgaaatatagataaaataataaataccttgtaggaatgctgaaaggcttataagatgttttatagtcaaacacgcrcacagcaactgccacgtgggatgcactcaataaatcctaaatgttttagttaatctatgca

SEQ ID NO: 2058 - DNA, 1220 bp, Homo sapiens
cacatttaagtaatgtcttaaatatttcatgccattattattgtgtacactggctactcgggctctcatcatcaggtgatggcattgtagattaaaagaattaatttttccacatagttttaaagattatgtttataacacagaaaagactctattaagtattaatttctaggtttaacatacctctttttccacttatatttgtttgagaaactatcagcctctttctatttagcaaggagggttgtttttttttttctaattcaagaagatctatcggaagctattcaagagtgagtgcaggctagggttaagatttgacaagaagtaactaaagccagtctcatcagattgttctgctcctattcaaagccacacatataaaatgctcaggagggattcctgtatttcagccacactcctatacacacaccacttgtacatttctcagaagtctctaataaagcagtttctttttaacagtaatgcaactttgtgaagatgggttaccttttttatggggtgaggtaccagacagacaaaagactgatatctaaaagcaagaaaactcccatttctagtgatgggagaagtggaaagcagttatagatgtagtgaagaataaccactgtgtgcatagttaaactttgaattctttttaagcaaacatggagaaaaagttggatcattttgtcctcaaagaaactacctcagaacagtgaagttcctcttttgaaccaaaggaagactattgctgacaattggtaaaagagacacaatgaaccagttgtcagacgtgcctactgaatgccaatttgtaaaataaaaccctttgaacaaccagaggatgttttaaaagaagctgctgattcaaaatgaataacttcactttgctgtgttttctgctcttgtatagatcatcwttactatttttattttctattttcaccagaaatttgagttaaccttttgttccatctgtagcccgccttctcaagcagcaccacctccttttcattattcctttcaaaagcactgaaatttgcaaaaatgtgctgtttctctccctcactctgtggaggagtagcagagctggcttttcaagcatgaagattactaataatcaaaggaacttgaggatgaaaatgagtatgcagaacgggtaatacccaaaatcagagcaggtgtgattggagagtcaatgaaaatccttttgcctt

SEQ ID NO: 2059 - DNA, 1036 bp, Homo sapiens
aaaaaaataatgaagcgtagaaaactaacatcaaatacttaggtcaccccctggaaaaggagacatacaagcttcatttgtttgatccagctctgaaagggytctgcacacccctgggatgtgaggaatgctgtgctggataactgacccaccctctccaggaggaacgttttattccagttggggttcagtgtctgccctggggctctgacagctcatttatggaacctgcaaagattttagagggaaatatcagttaggtcaatgtttcattccctttgagaatgctcagtggggagagataagggtgtcggattaattacaccagatgctgtatcgggagacatccagcttctgtgcattgccaaaaaaaaaaaaatccttatggtggccttgaatacaaatatacaaatatcacgttcatggtaataacactgtatttacagtgcatttaagaggtgttcaaaggcttctcatagacttgagaacatttggtcttgagagaagtcattctgaacagagtccagacttaagagttcggtccaaaggaagaagctgggacacgacttcttcagtttcagttctgacaccatccctgatatgtgacccggggaaaattacttccattttctgaatttctattttctcactgctgaatagagatattgtgagcaaaagagacagtaatacactgagtgcctagcatggtggtgggaacattgtgagccctatctaaaaggccgctgttatcacaagttagtatgtcccaacctgcacagccatgcagtgagacttgctgtctgaaacccagtgcttccatcatggcaggctttcttttagaaaagtttattgtttataggtttgatggggggaaaatcacactaaagattggtaatattgcataaaacacctaatgatttggacaatgacttctcatccaggattcaaagaaaaagaaaacaaaataattttatcacatcctgatcttaactttgagttgaattaagttgaattgaccaggagcaaagtaaactac

SEQ ID NO: 2060 - DNA, 597 bp, Homo sapiens
taaaattacaggaaaatatttgagatgcttacatacaaacagactttgtgcagctttctatgtgtactttttttatttttaattttaatttttaatttttgtgggagcatagtaggtttatrtatttacggattatatgagatatgttaatccaggtatatatgtttaacaatcatatcatgtaaaatagggtatccaccacctcaaacatttattctttgtgttacatataatccaattacactctattagttattttaaaatatataattaaatttttttaactatagtcacctgttgtgctagcaaatactaggtcttatttattctgtctaaatatttttgtacccatttatcacttccactatctctcacccccctgcatcattcatagcctctagtaaccatccttcttctctgtttctccatgggctcaattacttaaatttttagtttccaaaaataagtaagaacttgtgaagtttgtctttctgtgcctggcttatttcacttaacataatgacttccagttccatccacgttgttacaaatgacagaatctcattcttttttaaaattaaaagatttttgaaaaga

SEQ ID NO: 2061 - DNA, 597 bp, Homo sapiens
taaaattacaggaaaatatttgagatgcttacatacaaacagactttgtgcagctttctatgtgtactttttttatttttaattttaatttttaatttttgtgggagcatagtaggtttatgtatttacggattatatgagatatgttaatccaggtatatatgtttaacaatcatatcatgtaaaatagggtatccaccacctcaaacatttattctttgtgttacatataatccaattacactctattagttattttaaaatatataattaaatttttttaactatagtcacctgttgtgctagcaaatactaggtcttatttattctgtctaaatatttttgtacccatttatcacttccactatctctcacccccctgcatcattcatagcctctagtaaccatccttcttctctgtttctccatgggctcaattayttaaatttttagtttccaaaaataagtaagaacttgtgaagtttgtctttctgtgcctggcttatttcacttaacataatgacttccagttccatccacgttgttacaaatgacagaatctcattcttttttaaaattaaaagatttttgaaaaga

SEQ ID NO: 2062 - DNA, 1262 bp, Homo sapiens
tttaattctgaaatactacagagggtttttaaaaataagaagctacacagagatatttttgttaatattgtggaacacaaacatttggcttcaaataaaaaagcataacactaataaatcaagcaatatgtttatcttaaatcccattctttttgtagtgactaacaaaaataagtataatttgaatctccrtaccctacatatatttgtttttaatgtttcttgattatcaataaattgttcctaaaattatagctctgagaaacatacttttgataatgttaggaagatttaaagatgacaagaagagactatatctatatttaatataaaagacataaccacgatgtgctgctattgacacagtacagaataaaatcacactaaatattaaatgatacctatgattcaaaactcattggtaagctgaccagacctcagttaaccaggttgtcaatccctcttaccgttaataaagaccaatgtatttcacctgagatccaaataaatgaaatacttttaaattcaagtgatttgctttacttattttttacataaagatgagtatgtatctaaaaggagacatatttgtaattctgtttttgcattttctgagagatctcaaatatatttgttgccacaactcaaaaaagtgaacatattttaatgaatgcaataggcattcattaacgtacttttcctgtgacttcacaacattgcgagaagaaaagataagaagatctaggagacatgaggcaacaatctgattagacagtaagtttggctgaaaagaaagtgtgggaaaatcttctcttctgaaagaacaactttgcctgtaatcccagccagcactataggaggctgaggcaggcggatcacgaggtcaggagttcaagaccagcctgaccaacatggtgaaaccccatttctactaaaaatacaaaaattagtcgggcatggtggcgtctgcctgtaatcccagctactcaggagactggggcaggaaaatcgcttgaacccaggaggcggaggttgcagtgagctgaggtcacgccactgcactccagcctgggcaacagagcgagactttgtcaaaacaaacaaacaaaaaaaaaactttatcaaaaagtacaatgcagacaattctacttccaattatgtgtgtgtttataaatttaattttaaaatgcaaagatgctatgtaagcataatctcacaactcttaaatttactctacctgtaattagggttatgctggtaaa

SEQ ID NO: 2063 - DNA, 1262 bp, Homo sapiens
tttaattctgaaatactacagagggtttttaaaaataagaagctacacagagatatttttgttaatattgtggaacacaaacatttggcttcaaataaaaaagcataacactaataaatcaagcaatatgtttatcttaaatcccattctttttgtagtgactaacaaaaataagtataatttgaatctccgtaccctacatatatttgtttttaatgtttcttgattatcaataaattgttcctaaaattatagctctgagaaacatacttttgataatgttaggaagatttamagatgacaagaagagactatatctatatttaatataaaagacataaccacgatgtgctgctattgacacagtacagaataaaatcacactaaatattaaatgatacctatgattcaaaactcattggtaagctgaccagacctcagttaaccaggttgtcaatccctcttaccgttaataaagaccaatgtatttcacctgagatccaaataaatgaaatacttttaaattcaagtgatttgctttacttattttttacataaagatgagtatgtatctaaaaggagacatatttgtaattctgtttttgcattttctgagagatctcaaatatatttgttgccacaactcaaaaaagtgaacatattttaatgaatgcaataggcattcattaacgtacttttcctgtgacttcacaacattgcgagaagaaaagataagaagatctaggagacatgaggcaacaatctgattagacagtaagtttggctgaaaagaaagtgtgggaaaatcttctcttctgaaagaacaactttgcctgtaatcccagccagcactataggaggctgaggcaggcggatcacgaggtcaggagttcaagaccagcctgaccaacatggtgaaaccccatttctactaaaaatacaaaaattagtcgggcatggtggcgtctgcctgtaatcccagctactcaggagactggggcaggaaaatcgcttgaacccaggaggcggaggttgcagtgagctgaggtcacgccactgcactccagcctgggcaacagagcgagactttgtcaaaacaaacaaacaaaaaaaaaactttatcaaaaagtacaatgcagacaattctacttccaattatgtgtgtgtttataaatttaattttaaaatgcaaagatgctatgtaagcataatctcacaactcttaaatttactctacctgtaattagggttatgctggtaaa

SEQ ID NO: 2064 - DNA, 1124 bp, Homo sapiens
aaataatatataaatactaaaatatcaatttaaaataccatgtcaaaatcaagcaaataattacatattttaagtttgaaattatgaaaccatcattccaattcactaggaattccaaatgtaatatattttatttcacttaagttctttagtgtctgcatctacaaacaaaatttccctgataattttatttttgtaagaacaatcaatatggtgaatccaaaagctttgccaaatgtttcaatactgtttatattagtaagaaatttaaaatcaaatatctgtttcaagtactcaactgcacatttgatattgtacctttaaaactcactctctgctgggcatgggggctcatgcctgtaatcccagcactttgggaggccaaggagggtggatcacctgaggtcaggagttcaagtccagcctggccaacatggagaaaccttgtctctactaaaaatacaaaaattagccaggtrtggtggggtgcatctgtagtgccagagttattcaggaggctgaggcaggagaattgcttgaactgggagggggaggttgcagtgagctgagatcccaccactgctcttcagcctgggtgacagagtgagactctatctcaaaaaacaaaatgaaactttctctcataagtgaagttctcttaaatattacaagtatgtagatttccaacacagattggttcctttccaatgccaaacaatctttactaggatttcaaatttttaaaatatttctatgcttaatcggaaatcctgctgaggctaaggagatgtgtacacattatgaaagcaatgactatctggtaactgaagatactcacaataccaaatacttaattctaaatcttactgctgaggaagataatgtcatcctacaggactatgatttattatgaccagaaatctttgccaggattttgactgatctttttagattgtattttttctgagctactaataaaaacttatgtagaacttttgtgtcggagaccctcagacctcaaggaggaagttacacaactcattccctggagttacttggaacagattttctaattctcctgtctaatcacagaactctgccctcccacctacattggtcctttg

SEQ ID NO: 2065 - DNA, 1583 bp, Homo sapiens
ctttgctaatagttgtctttttgaaacagtagtagatgtttccaggtgtgcacaggtatgtgcgaatatcagagattaaaatagaaactgaaccaacaagctgtgctrtcattgaaaatgtatttgtttaaagactatgtgacacttaggaggcattttaatgcagtattttatgtatgcgattatttacataggtttaagtgttttttatttgacttccataaaatttagatttgttgcaatcttatttttacccttgagggaagagagaccctctcatattgttttatattgttttatactcagtacctgttttaagaaaaaaacaaggaagtgaaatcaaagacaggcagcccggtgccaggcccaaaaccagacccaaaaccaggcctgggcctgtctggcctaaacctagtagttaaaaatcaactcatgacttagaacccgatgttacccatagatttcaggcattgtatggaagaacattgtgaaactccctgctctgttctgtttcactctgaccaccggtgcatgcagcccctgtcacataccccttgcttgctcaaatcaatcacgaccctttcttgtgaaatcttcagtgttgtgagcccttaaaagggacagaaattgtgcactcagggagctcggattttaaggcagtaacttgctgatgctccccgctgaataaagcccttccttctacaactcggtgtctgaggggttttgtctgtggctcgtcctgctacacccttaatagtttctgagtcttggaaaggaaagggagggaatatccaaatatcttcaacggggttcttggacttctaataaacagttaaaatcttacacacaaggtatttaaagcatacagatgattctacatttgtcctaacagatcatagtgccatgaatatttgtccattaacgaacatcccttacgtgtaagaacattttgccactgtgcttttagtcatctcctcttttcacatactgtgccctggaatagtctctcccttttcgtttgtaaggggtcttcttgagcctaaagcttttattgggcctcactttttgctgctttgttccttcaccagttctgggcctttttgctgagttgactacaggttgaaaaagggagaaagcacaaccccaaagcttctgacctatgagtaacaagattactgaatttcccttagtcctgctgagggctgatcctctactctgtaaagaccatggctggagaagacctaacattgactccagctcacttggatttttcagtctttgatgatggaagcctgaaatgcagagcttacaccctaaccaattcttcatcgtccaaaaaaaaaaaaaaaaaaaaaaaaacccacaccaaaaaaccaacccaaaccaaaccaaaacaaaaaaacactgccacctctttatgaccaaccatagttttggtttaagccttccagaagcacttatctacttaatccacaattatattttagtatcatgctaagcatggagttaatatcaaggagcaaatggcctctggccttttggaatccacattatcttggaactatgtgaagattgtcttcgga

SEQ ID NO: 2066 - DNA, 3063 bp, Homo sapiens
tgcatttttccaatggaaggaactggagcttagataaattatatacctctaaaaataacaccacacggatttttaaaaaagtctttaagcatttatttacctacttatttatttggctaacgggaaaaaaaaaagcttccagtcacaaatatccccagtcacaaacatcacgatccatgatgatagagcaaaatcaaatatgctaaaaattagccaaatatattgcatacagtaggtcatcaatacatgcttattgaattaattaaaatccaacttgaaaaggaaattgaacctgtcaaatatttgtatattttatctcatcaaatttagttgtgcgtgagccaaagaaaacatataaaaagtgttttattttgtagggacagatgtataaaataccaaattttaatatactaaaggcatagttacagttttcctttaaatatcattttgatcttaatgatatggcttactattttactctccaaaaatagtatactttataattataattgctggaacatgccactttctagaattatgacaaataattcattacatataaaggctttattttagaatgaatatatgaatgttggctgtcatcctaatttgtgcctcccaaaagattggtttcctacctctacatagagataaaataaaatttaatctttaagaattcacatttcttgtttggcaagagtttgtattgctactaattagctaaattagaaattaaagaatcttggctacattgaactgggctttgaatctgtctaaaactgtttcctcagaagagaactggtgaggtgattgcatcgagtcactgggctatactgctgaaagggggatgactggaaacaatattgtatccttaaaatttccattgaggagcacaatgtctacatatacacatttgattgcatcgagtcactcggtgatattgctgaaagacagatgactggaaacaatattgtatccttaaaatttccattgaggagcataatgtctacatatacactattatcagtttcccttcagaattttctctatatttggttttaattatcccaaattcatttatccccaatatttaagttccccctccctcttcccctatatttccccttgaaccttttatcttttctgtgtccattgcagagagatcacttccttgtaactgaacacagatctgaatgcttaccacttgcagagtccaattcacaagagcgaggtctcgtataaagaaagtgattttactaaccaaaactagtaaaggggatgtggccggattcccatctaaaccaaccacttcaattttgggggtgagggcaggggtttaaaagtggaaacattgataaggaaggcatgcaagaattgtgctgagtacaatgtctgtgtgtcttgctctggtggctattttgggtctcagtccacctgaatcacgggctggcagcatctcaacaatggcggggttgttaactagccagccaccttgaagtgatcgcgggaattttgcagctgagtctccaagcttcctttgtcagactcaagattagcccctgcaacttctaagaaggcacacagatgatagcatacaattagataaatgtgaagggagtatacatggtaggaaagggagggatatggagtctattttatagctaacagaaaaggcttccgcagttttcttcaaggttatatcttgaaacccaaggttaaaaaacaataaaatgcattttgaagttaagctatctggttacttaatgaggattatagctctgggggtcttctcttttctaaatatccccaagccctaggatgtattttgggcaatattttgtactaaatatgtgagttcaaaatgagatatttatttaccttgtactttatgttgcaaatttcctaaaactgtaattttaacaatctacacgtttatatttatgtgatggttttgttaatttcatttcaacacttttctccaacaagtggatttatacaaaactgacaatgtgaagcttcttcagcgtcccccttcaacatcttaataggataaaattaatcataatttkaaactacatttcttaatttaaagaaaaaaattatgtggacatattcacattcaaggtgagcatccagcaaacagtaaatcaggcaggtggttatatttagaaatagtagcaaaacatttacaattgatgccatatggctttcagcctagtagggccaactagctgtgttcaatgactctggggaaattaggctgtttgaaggtcatgaatgctaactctaaacctctgggacagtgacaggaagttggcagcaatatgcagggaaatcatacctccagctgagtggataagcctccttcataagtggaccgaggattgttcatgttgagcctgtgctccgatttgcagacaaagaaccaggtataaccactattgctgcatatacacagcaggcagtaacgtatattctggtcccgtcattgtctttcttaaactagccaggagtccttatcataattataaagttcaaatccccttccattatcttcctgtttgagcttacctgataccactgtcctctggactaagccccaggcacattaagtttcgaagttgacatttttattaagttttaaagacatacttggagaattttttaatgcacaagtatctacagatgtccaacttaaataattccactttcaatgtgctttccagggtttcttgaatgccattgagaaattacaatacatataaagaaaatagaaaagaaatagtaatcactgaatcactgattagaaaaaaaaatagcaaaagctaaagcttttcagcaattaagtttaccaattttcaacaaataactcaagtgaaaaaaataatttatctaattgaaaatggctaatgcagagtcaaagattaaaatgttggaaataaattttcttcttacatgccaacctttaaggaaaatattattgaacttttctggaacacaaaatctttgcaaccagcattattatgtatcttattcacttacattaaactaaaactatatatg

SEQ ID NO: 2067 - DNA, 716 bp, Homo sapiens
ttccccttcaccttctaccatgtttataagttctctgaggcctccccagccatgcttcctgtagagccagcagaactgtgagccaattaagcctcttttctttataaattaccaagtctcagatagctccttatttcagtgtgagaacagactaatacagtttatattttcagccccaatctttcctttgagttcagctccccttctccagcttcctaccgggtatttgcacttgaatttcctattattrtcaaaatccaaatggcaataccccatgtaattttcgctgttctctctgaatcccagccccataaccattaacaccttctgtttccattaatggtcctccattttccaaagctcttaggtacggaaatcttaggcactatctcaccttacctagccaatccatcacaagtccccttggttttaattgcagaatctcttaccctttcattccactgttactcctaccaccctagtcaggttcctcttacttcatacctaggtaagtgtgatcgcattctaactgaagtccctttccagctctccagatcatcctgtaccttagtataagactgaccttcctaaaatacatttccaacatgtcgtatgtctgagttgacatttgcctccactcctataattttacctgctgtctatctggtctagtcccgcatttgcactggctattccatgggtccctgaaacccagc

SEQ ID NO: 2068 - DNA, 716 bp, Homo sapiens
ttccccttcaccttctaccatgtttataagttctctgaggcctccccagccatgcttcctgtagagccagcagaactgtgagccaattaagcctcttttctttataaattaccaagtctcagatagctccttatttcagtgtgagaacagactaatacagtttatattttcagccccaatctttcctttgagttcagctccccttctccagcttcctaccgggtatttgcacttgaatttcctattattgtcaaaatccaaatggcaataccccatgtaattttcgctgttctctctgaatcccagycccataaccattaacaccttctgtttccattaatggtcctccattttccaaagctcttaggtacggaaatcttaggcactatctcaccttacctagccaatccatcacaagtccccttggttttaattgcagaatctcttaccctttcattccactgttactcctaccaccctagtcaggttcctcttacttcatacctaggtaagtgtgatcgcattctaactgaagtccctttccagctctccagatcatcctgtaccttagtataagactgaccttcctaaaatacatttccaacatgtcgtatgtctgagttgacatttgcctccactcctataattttacctgctgtctatctggtctagtcccgcatttgcactggctattccatgggtccctgaaacccagc

SEQ ID NO: 2069 - DNA, 716 bp, Homo sapiens
ttccccttcaccttctaccatgtttataagttctctgaggcctccccagccatgcttcctgtagagccagcagaactgtgagccaattaagcctcttttctttataaattaccaagtctcagatagctccttatttcagtgtgagaacagactaatacagtttatattttcagccccaatctttcctttgagttcagctccccttctccagcttcctaccgggtatttgcacttgaatttcctattattgtcaaaatccaaatggcaataccccatgtaattttcgctgttctctctgaatcccagccccataaccattaacaccttctgtttccattaatggtcctccattttccaaagctcttaggtacggaaatcttaggcactatctcaccttacctagccaatccatcacaagtccccttggttttaattgcagaatctcttaccctttcattccactgttactcctaccaccctagtcaggttcctcttacttcatacctaggtaagtgtgatygcattctaactgaagtccctttccagctctccagatcatcctgtaccttagtataagactgaccttcctaaaatacatttccaacatgtcgtatgtctgagttgacatttgcctccactcctataattttacctgctgtctatctggtctagtcccgcatttgcactggctattccatgggtccctgaaacccagc

SEQ ID NO: 2070 - DNA, 716 bp, Homo sapiens
ttccccttcaccttctaccatgtttataagttctctgaggcctccccagccatgcttcctgtagagccagcagaactgtgagccaattaagcctcttttctttataaattaccaagtctcagatagctccttatttcagtgtgagaacagactaatacagtttatattttcagccccaatctttcctttgagttcagctccccttctccagcttcctaccgggtatttgcacttgaatttcctattattgtcaaaatccaaatggcaataccccatgtaattttcgctgttctctctgaatcccagccccataaccattaacaccttctgtttccattaatggtcctccattttccaaagctcttaggtacggaaatcttaggcactatctcaccttacctagccaatccatcacaagtccccttggttttaattgcagaatctcttaccctttcattccactgttactcctaccaccctagtcaggttcctcttacttcatacctaggtaagtgtgatcgcattctaactgaagtccctttccagctctccagatcatcctgtaccttagtataagactgaccttcctaaaayacatttccaacatgtcgtatgtctgagttgacatttgcctccactcctataattttacctgctgtctatctggtctagtcccgcatttgcactggctattccatgggtccctgaaacccagc

SEQ ID NO: 2071 - DNA, 716 bp, Homo sapiens
ttccccttcaccttctaccatgtttataagttctctgaggcctccccagccatgcttcctgtagagccagcagaactgtgagccaattaagcctcttttctttataaattaccaagtctcagatagctccttatttcagtgtgagaacagactaatacagtttatattttcagccccaatctttcctttgagttcagctccccttctccagcttcctaccgggtatttgcacttgaatttcctattattgtcaaaatccaaatggcaataccccatgtaattttcgctgttctctctgaatcccagccccataaccattaacaccttctgtttccattaatggtcctccattttccaaagctcttaggtacggaaatcttaggcactatctcaccttacctagccaatccatcacaagtccccttggttttaattgcagaatctcttaccctttcattccactgttactcctaccaccctagtcaggttcctcttacttcatacctaggtaagtgtgatcgcattctaactgaagtccctttccagctctccagatcatcctgtaccttagtataagactgaccttcctaaaatacatttccaacatgtcgtatgtctgagttgacatttgcctccactcctataattttacctrctgtctatctggtctagtcccgcatttgcactggctattccatgggtccctgaaacccagc

SEQ ID NO: 2072 - DNA, 1049 bp, Homo sapiens
taattaatatataatgagtagtgaggacttccagaggccactgtcatctccatcttggttttggtaggttttgaccagcttctttatcacaccctgttttatcaacagggtgtttatgacctgttatcttgtaatacaattcttgccaacctcctatctcgttcgtgactaagaatccctaacctcctgggaatagagcccagtaagtctcagtctcattttacccagcccctattcaagatggagtagctcttgtttgaacacctctgacattaccaaaatttagttgattttcttaagtaaatgtttcttcatttgttgtatgcccttaggaaaattgccagaaacttaaaatggtgactttttaaaatataaattttcatgtgttatactttctcaagttgtggctgtttcttgggggcactgggccacagaactcctcatgccacaattcgaaaagtaaaattacatcagatcttttttatatcaaacatgtgttttgataacttaatatttaatttttccatgtattcatttaaccattcagtagatattttagggaaataattgagaatggttctaaatgagggactacccatgacagaaaaattatcaatatctgaatccayctaagcatatataatgttttcataagatagcaagtaaataatatttaggaaatcatttctcattaatataatcccactcaaattactgttagcataaggaaaaattcctaggaagtacagaatggaggttaagaacagagatattgtcgtaagagtctgttttgaattcaggtctagtacttaatggcaagttagtagacctttccctacctctgttaccctattggtaaaaaaagataattgtgagttaaaagtatggcaaaagccacaattacttttgcaccaacctaataatatatacaaaaatcttctagagtagttactggcataaagtaatttttatatgaatgttttctattttaaaaataataatgaaaattacattgaatacatggatggaattcaattcatgtatacaaa

SEQ ID NO: 2073 - DNA, 958 bp, Homo sapiens
tgggtgggtaaggaaggcactggaaccagaatcagaatgccatcatgcccagaagagttatttaaatacagttgacatccatagtaagaaataaaataagatttttattcactttatgatcttttgataaatgttgaatatttcattaaaacttaacatgcagtttgggaaataataataggtagttagtaaatgagaatttctttccccttctgtgctcttgcaaagttagtttttaaattaatatcctatgaatttttgattcctggtcattcctgtgacccatgattttataatattaaatcatsaaccataactttaaaaaaacagaaaagagaattacacatccaaattcttcttatgaagtttcaaaatctaaaccttattcagtgcactaaggatttttctattactgattttaatgattacccacaggatgtataagatgcaagatgcaatgtagtggaaggtctttccacaaaacactttctaggagatttgaatggcatgaaactacatttaaggtgctgccttgttccctgagataaaattcagcattgccatttcctggtctttggccaacagtggcagagttaggtgatagaaaccatatattgggtgggggaataggaaaggagaggaggcttgtatgctatctttcatttggagctttgagaggaggagtgctccatgaccacgtggagtgatgctattagatagaaacagtgacattgtgtgagtgggaaaagaacaagcctggattaatgctccccattcccatttactgttcatggtatgtgggaaattcagtcatttctggagctccagtgatgaacacagaagtgctgagagagctggtgactagaatgagcctgaggtctggaggaaagagatgcagagtgtggggaggctgtgacttgtggccattgccagaaccataggtatttgtatagatgta

SEQ ID NO: 2074 - DNA, 454 bp, Homo sapiens
gaatgtgctgtttttctatttcaggggcattggctcaagtttatccatgtattatgtgtgtgtacatacacccatacaacacacatacatatacacatatatgtatatatatacacaccaatgattcatgaagtaatactcacccttactcgtctgtgagacactctaatatgttattcttttttcttttttgagacagtttcatttttgttgcccaggtttgagtgcaatggcgtgatctcagstcactgcaacctctgcctcccaggttcaagtgattctcctgcctcagcctcctgagtagctgggattacaggcgcccgttaccatgcccagctaatttttgtatttttagtagagacggggtttcaccatgttggccaggctggtcttgaactcttgacctaaggagatccactcacctcaacttcccgaagttctgggattataggcg

SEQ ID NO: 2075 - DNA, 1313 bp, Homo sapiens
cagataacccatgtacacaatttggcatatatgaagtcttgccctaatagtggcatttacagtcttttttctatgtacttaaatcagcagaagaggtaatgtcacagtakgtagtcagacagcagcagggcaggagagggcccccttcccccaccaccaggaatgtcaggcgaccatcaggtgatgctcaggaggttgttaaactctctctctaaattaataattggttgcagctggcaccagggaaagtcagtcttccaatagatgggaaaatcctgaaactcgttatcagtggcttcccaataagatctcaggagttgagcacgtggcctcaagcatacgcactaagaagcaaaatggtggtgtttaactggtatatgaccttcctctaggaactctcaaatggtaggggggaaaacagctcaagtgagtacgtgcacacaatttgactttataaaatttagatgcctaaaaaagtcattatattttcgagactcaatttactattttatcaattttactgaatttattttatcgatttatgtaatatttttaaatattaccaaatattttgaccaataaccataaatatgtagtatgtgaaactttctttctatagatctaaaaataattgtctgagtcttggtcattaataaaagcaaaagctttacttaaactcttatggtacttcagagctttttacaaagaatcccacttgtgaacattactttcagtagagttgtaaaaggaagatacatatactgacttcatcatttatacagaaaatgacaagattatatttatttttaactcttgagtttttctattttctacttctacctctagttttcagtaaaacaccttatattggtcaatcatttattttaaatgtaagtagttaacatttacaaattaaaacatacacataccttcagcatagaccaagtacatggttaaaaggaagaagaacatgtacacatttttatattaaaaattaccaggttatttttctatgtaaataatatatactgagatattaaatatctatatttcagaagattaaaggcaattatattgtgttatggtacatgatgtcatagaaaatttagatagccttgtcactgaaatgaagttagacacaaattacacttagtttttgtagacccctaatgaaatttaaaataattatttctaaagcattacttcaactgtttgattagaatatttaaatgatataaagacctaagtataatgcatactttataatttaactctaatagcataaatggcaataaaccaaacagattaatgag

SEQ ID NO: 2076 - DNA, 724 bp, Homo sapiens
tcacatataaggacttgaagtggaagctgcaacatcatgtcccaaacctagtcacatggttggcagccatgccagctgcaaagggacattggacatatggtctctagctggcattgtatgcccagccgagactttcctcctaaaaggaagaagcagggactggcttcagcaggaactggcaggaagctcttctaaagtgatgagaggcctgttctctaagcagattggtctttagtttcccaacagactggtggctcgagggtcctcgccaatgctggtgctatgtgtccagcagagcagagcatgccctgacacagagcagaagctggttccggacaggcccttactgccctgggtcctgcagccaggctagttgggggaccatgccctgaagcacacaagctgggtgctcccgcctgtctgcaccctctggcarggtgggcatgggccctgagccctgctctgctcctgcagcttgtgccctgcctagtcccatcacatgtggataccaggtccaggcacctcccttctcagtgcccaaccccaccgccaccccgtgaccacccaggaggccaccatggttgtgccctgccaggcccttcctcagcaaactgagaaaatagctcctcctggggtgaggggagctggaaggtttacctcaccgcccaactggccggggtgtgagccaggcaggaatttggacagtcttgacacatgaagcaga

SEQ ID NO: 2077 - DNA, 590 bp, Homo sapiens
tttcttcccaaacttccctgcttttcatcaaagtttgaaacatatctgtaatggataaggcagctctttgactttaagttttaaggtgtcaaggaccgaacaaggaattgagagtcaaaacccagagttttaatctccctctacctctgaccttgggcaagccacgttccctctccagaccttgctttcctcttctgaaacatgagaagttggactggttgaccttccactcagctgggaaccaaaacacagaaagaagaaatatattgacgcccacttttgaatgctagtaaaaactcatcaggcttcaccttgggaacaatattaaaatgtatttagctcttcgttatccataaacatagactgcacatgatttaggatccagcctgaattaaatattcccaagtgcctgtctcctgcatcagacatagatwggggatggatagaaaagaaacaaaaaccgttgaataaacattgaacaagtaaatatattaacacgatgctgaaactccaagtatgagtatgtcttatataatagctctagaaaatgttgcctgcctgttatctatctattcactcaacaattcata

SEQ ID NO: 2078 - DNA, 1274 bp, Homo sapiens
caaagcagggtatttagaatatccattgattgaacatttatcatttctctgtgttgggaatacttcgaatctcttctagctattttgaaatacagaatatgtcaactacagccacgctactgtgctactgaacactagaactcatcccttctaactgtatggttgaacccactaaccaacctctctttacgccccaacccacctcctccccagcctctgtaactatcactctcttctctacctccatgagatcaacttttttagctcccacatatgagtgagaacacgggagctcctgtaatatttgtctttatttctctaaatcttgatctaatcttacacaattatttcaaattctaatgcccaacaatattaaaagttttaataaaaagttctgggcctggcrtggtggctcactcctgtaattccaacacgttgggaggccgaggcaggcagatgacgaggtcacgagtttgagaccagcctggccaacatggtgaaaccctgtctttactaaaaatacaaaaattagccaggtgtggtggcagctgcctgtagtcccagctacttgggaggctgaggcaggagaattgcttgaaaccggaaggcagaggttgcagtgagccgagattgcgccattgcactccagcatgggcaacaagagcgaaactccgtctcaaaaaaaatacaaaagttctgagttttgttgttgtttttgtgttttaaagccattctgagtagaaaactgctactttctttcaattaacctcacctacaggaaacctacttatttggatcacaaagcaagaacaaacatctacagcagtaaatcctacttgtacacaaagtacccagaagagatggctttctaaaagttggctctgcaaattcaaagttctaaagagacagtaagcttcataccattctatcctacttttgctgtctgaatgtgtggcaggagcttaggtataggtttgaactaaaattcttcatctaactattcctttctaaactgtccactacctccatcagtcacaatggccactaaatctaaatttatcaccatagggaaggatcaccaaggacaaacttgtgaggaagattgttggggtcacatgaggaagaatcagtgagtatctgaattgttcctggcttgttgttctggcttagctccagtttcttccaactagttctccagcccctacagtcctcgtaaccttgacagttatcacatgattaagtatatacgaaagctggtgcaacattctcacaca

SEQ ID NO: 2079 - DNA, 662 bp, Homo sapiens
cacaaggtcccacaacatgtggtctgcaggctgaggagcaagaaatgcctgtctgagttccaaaactgaagaacytggagtatgacgttcgagggcaggagccttctagcatgggagaaagatgtaggccagtctctcttttcacatttttctgcctgcgttttattctagccaagctagcagctgattagattgtgctcacccagattaagggtaggtctgcctttcccatcccactgactcaaatgttaatctcctttggcaacaccctcacagacacacccaggatcaataatttgtatccttcaatcctatcaagctgacactcagtattaacatcatagatgttaagtttgtggaaaaatgatgtgaaaagtagcaattgacaactttattctgcaaaggagattaaaacctgttgtatgacagtttatttacacttcattggctctttttttattgaatttggttcattttcctttgtatttctcttattatttcacctgcttgacatttctatttgttgttatccgtaaaaaatatgattcattaaatatatcaaagcattttcaggtatagagttgaaatgagactgtgttcctttttcagctttttcataataaattatctttcatcttaattcttttggatctcagtaatgt

SEQ ID NO: 2080 - DNA, 647 bp, Homo sapiens
atagcgcttaagtatcaccaaagtacatttttaaagtaattagtaacaacactaaaatcattagagttcaattggccaaactaacatgagagaggatgtcacatttctgaaactgcattgccacccatcactgaaggtggactgaaggcacaagccttttgcgctgggcttgcttattccatagtgtgctgcggttttcgaactgcaaaacttttactggtacagggagcccaggctgtgctggcaaatgtgaaaacagaactgcagtgcaggacgtgattggaaagcaatcatccacatctcccataagatgcttatattttcactttcatcaaaatttaaaccaatttttaatcttgtaaagaattcagaggctttccagattgtgtcacaatagtctagctggggaaactctgtaatcacagacctgtaaggaccttcaagatttaacaatccattctgctcaaatttaaccttgtgggaatcstagaaacatccactgcagggcatggatctaccaccagagggaaacagagagccatcgtggtaaagaagtggtggcaatagcgacagcctcctccctgttggcaaagagctacttgggccaagctgcacggccattctcccccatggatcctaaaacagtt

SEQ ID NO: 2081 - DNA, 1293 bp, Homo sapiens
catccacgacgtatgttaaataaaatgtctttaaacataaacacacacttagaaaagggtatatattgatggcttgatgaaaatgttgtgatcagcgattcacgggaacctaaccctgtatttcccccaggagccaagcttcagtatttgctaattcagtgttcatagcaaatgtataaaccataactaccacgcataacgataataagctgtactttagtttttgatagtttgcaattcagagaaaagatgacctattctgatttttaaacttataatggaaaagtctacactctccttaggaaacctctctaatttcmaacttcagctataatccacaaagatggtttatgatatggtttggatttgtgtccccacccaaatctcatgttgaattgtaatccccaatgttggaggaggggcctggtgggaggcgatttcatcatgggggcagatttcccccttcctgttctcatgatagtgaatgagttctcgtgagatctcattgtttaaaagtgcatagcatctcccccctgctctctcttcctcctgctccaatcgtgtaagacacgcctgcttccccttcaccttctaccatgtttataagttctctgaggcctccccagccatgcttcctgtagagccagcagaactgtgagccaattaagcctcttttctttataaattaccaagtctcagatagctccttatttcagtgtgagaacagactaatacagtttatattttcagccccaatctttcctttgagttcagctccccttctccagcttcctaccgggtatttgcacttgaatttcctattattgtcaaaatccaaatggcaataccccatgtaattttcgctgttctctctgaatcccagccccataaccattaacaccttctgtttccattaatggtcctccattttccaaagctcttaggtacggaaatcttaggcactatctcaccttacctagccaatccatcacaagtccccttggttttaattgcagaatctcttaccctttcattccactgttactcctaccaccctagtcaggttcctcttacttcatacctaggtaagtgtgatcgcattctaactgaagtccctttccagctctccagatcatcctgtaccttagtataagactgaccttcctaaaatacatttccaacatgtcgtatgtctgagttgacatttgcctccactcctataattttacctgctgtctatctggtctagtcccgcatttgcactggctattccatgggtccctgaaacccagc

SEQ ID NO: 2082 - DNA, 1293 bp, Homo sapiens
catccacgacgtatgttaaataaaatgtctttaaacataaacacacacttagaaaagggtatatattgatggcttgatgaaaatgttgtgatcagcgattcacgggaacctaaccctgtatttcccccaggagccaagcttcagtatttgctaattcagtgttcatagcaaatgtataaaccataactaccacgcataacgataataagctgtactttagtttttgatagtttgcaattcagagaaaagatgacctattctgatttttaaacttataatggaaaagtctacactctccttaggaaacctctctaatttccaacttcagctataatccacaaagatggtttatgatatggtttggatttgtgtccccacccaaatctcatgttgaattgtaatccccaatgttggaggaggggcctggtgggaggcgatttsatcatgggggcagatttcccccttcctgttctcatgatagtgaatgagttctcgtgagatctcattgtttaaaagtgcatagcatctcccccctgctctctcttcctcctgctccaatcgtgtaagacacgcctgcttccccttcaccttctaccatgtttataagttctctgaggcctccccagccatgcttcctgtagagccagcagaactgtgagccaattaagcctcttttctttataaattaccaagtctcagatagctccttatttcagtgtgagaacagactaatacagtttatattttcagccccaatctttcctttgagttcagctccccttctccagcttcctaccgggtatttgcacttgaatttcctattattgtcaaaatccaaatggcaataccccatgtaattttcgctgttctctctgaatcccagccccataaccattaacaccttctgtttccattaatggtcctccattttccaaagctcttaggtacggaaatcttaggcactatctcaccttacctagccaatccatcacaagtccccttggttttaattgcagaatctcttaccctttcattccactgttactcctaccaccctagtcaggttcctcttacttcatacctaggtaagtgtgatcgcattctaactgaagtccctttccagctctccagatcatcctgtaccttagtataagactgaccttcctaaaatacatttccaacatgtcgtatgtctgagttgacatttgcctccactcctataattttacctgctgtctatctggtctagtcccgcatttgcactggctattccatgggtccctgaaacccagc

SEQ ID NO: 2083 - DNA, 1293 bp, Homo sapiens
catccacgacgtatgttaaataaaatgtctttaaacataaacacacacttagaaaagggtatatattgatggcttgatgaaaatgttgtgatcagcgattcacgggaacctaaccctgtatttcccccaggagccaagcttcagtatttgctaattcagtgttcatagcaaatgtataaaccataactaccacgcataacgataataagctgtactttagtttttgatagtttgcaattcagagaaaagatgacctattctgatttttaaacttataatggaaaagtctacactctccttaggaaacctctctaatttccaacttcagctataatccacaaagatggtttatgatatggtttggatttgtgtccccacccaaatctcatgttgaattgtaatccccaatgttggaggaggggcctggtgggaggcgatttcatcatgggggcagatttcccccttcctgttctcatgatagtgaatgagttctcgtgagatctcattgtttaaaagtgcatagcatctcccccctgctctctcttcctcctgctccaatcgtgtaagacacgcctgcttccccttcaccttctaccatgtttataagttctctgaggcctccccagccatgcttcctgtagagccagcagaactgtgagccaattaagcctcttttctttataaattaccaagtctcagatagctccttatttcagtgtgagaacagactaatacagtttatattttcagccccaatctttcctttgagttcagctccccttctccagcttcctaccgggtatttgcacttgaatttcctattattgtcaaaatccaaatggcaataccccatgtaattttcgctgttctctctgaatcccagccccataaccattaacaccttctgtttccattaatggtcctccattttccaaagctcttaggtacggaaatcttaggcactatctcaccttacctagccaatccatcacaagtccccttggttttaattgcagaatctcttaccctttcattccactgttactcctaccaccctagtcaggttcctcttacttcatacctaggtaagtgtgatcgcattctaactgaagtccctttccagctctccagatcatcctgtaccttagtataagactgaccttcctaaaayacatttccaacatgtcgtatgtctgagttgacatttgcctccactcctataattttacctgctgtctatctggtctagtcccgcatttgcactggctattccatgggtccctgaaacccagc

SEQ ID NO: 2084 - DNA, 1293 bp, Homo sapiens
catccacgacgtatgttaaataaaatgtctttaaacataaacacacacttagaaaagggtatatattgatggcttgatgaaaatgttgtgatcagcgattcacgggaacctaaccctgtatttcccccaggagccaagcttcagtatttgctaattcagtgttcatagcaaatgtataaaccataactaccacgcataacgataataagctgtactttagtttttgatagtttgcaattcagagaaaagatgacctattctgatttttaaacttataatggaaaagtctacactctccttaggaaacctctctaatttccaacttcagctataatccacaaagatggtttatgatatggtttggatttgtgtccccacccaaatctcatgttgaattgtaatccccaatgttggaggaggggcctggtgggaggcgatttcatcatgggggcagatttcccccttcctgttctcatgatagtgaatgagttctcgtgagatctcattgtttaaaagtgcatagcatctcccccctgctctctcttcctcctgctccaatcgtgtaagacacgcctgcttccccttcaccttctaccatgtttataagttctctgaggcctccccagccatgcttcctgtagagccagcagaactgtgagccaattaagcctcttttctttataaattaccaagtctcagatagctccttatttcagtgtgagaacagactaatacagtttatattttcagccccaatctttcctttgagttcagctccccttctccagcttcctaccgggtatttgcacttgaatttcctattattgtcaaaatccaaatggcaataccccatgtaattttcgctgttctctctgaatcccagccccataaccattaacaccttctgtttccattaatggtcctccattttccaaagctcttaggtacggaaatcttaggcactatctcaccttacctagccaatccatcacaagtccccttggttttaattgcagaatctcttaccctttcattccactgttactcctaccaccctagtcaggttcctcttacttcatacctaggtaagtgtgatcgcattctaactgaagtccctttccagctctccagatcatcctgtaccttagtataagactgaccttcctaaaatacatttccaacatgtcgtatgtctgagttgacatttgcctccactcctataattttacctrctgtctatctggtctagtcccgcatttgcactggctattccatgggtccctgaaacccagc

SEQ ID NO: 2085 - DNA, 747 bp, Homo sapiens
gtaagacgtgtttagtgacagagagtggctcggagagtggcgctccactgcaggacataaggcccacccctcaagcttccttaacatgcgaccactctgtagtaccaagggttctgtggcctctctggtataaacggcttgaaaatcccatgcaggataagtgggtagacaggcttcccatgacacggcaggtccattccaacactgcgaggagaatccacttcagccccatcctgcacccgcttttccccgcaacggggcaagcttccaggagccctcctcctcacggtgatctcttacatcattcacggtagcaagtctagtgctttatatgtgtgaaaatttaagagctaactcattttaccagaagcccaagaggctgtccggtccacccaggtggggaccggagcccaccccgatctcaggtccaatatttgctcacgttcaggcarcaaaaaacatccttccactatgttccggtgagccagcagttcaccactgaagaaataaaaacaacaacaacaacagatccagccagttgaaacacttgttgatgctaagtgccactttagtgtgtgccgttcccggaaggctcagaacaaagcaagctgtccgttgaaacaaagctcccctgcaacagcggagatgcaaaaccagggactctatttccctgctgatatgccgggcagaatttggcccgcatcaccaaagtacggtcagctcacctgtgtaggggtggctcaggaa

SEQ ID NO: 2086 - DNA, 1302 bp, Homo sapiens
tttcatgattaaacattgattttgccaccatcatcaccaccccgtaggaagaatcttttaagccaatgatatatctgttgatacaattcacaacaaaaaaatttatatcgagatagtctttacagtttttctgtgtaaagcacagcccctggctttgccagcatgaccagcccgtgatccttccgtaatgaatattatgttgataaccacatacattcattctaaaactgtttaggtaaagctcttagaagtaaaacactcattcctaataccttaagaaacaaaagagtttgtgcaaatggactttatcccaagtgagcaaacctcctgctgatgttgtgtggatggagtgggagggggtggtgttttcctaggatgttcttccaagctgcttaaaaatgaaagtgcattaagtaatttgtctgcttttacagagttaatattttatgtctgaggaagtcaaatctgtctgaaagttttgcaagcaatggaacccaaagtgaattgaaaaaaattagtttgaaaccaatgaaactgggtcactgtcttcccattttccttggaagcagttaagattctaagatccccatgctccagaggagatgctgaacatagtgagagtgtccagtaattgctgtgtttctttttctacagcctctcatctcactggtattccacttcattccaggtttctaatgcctgacttcagcaagtatatttctgtcattggtattgatcgatactacttttcgaaatacattatgttaactagtttcttggcatctaacacgtcattttagttacaatgttgacagggtcaaagcaggtgtcactaaaaagagaagagaatgaaaatagttctgagccatcatgtttgttttcttcttctggtttcttcttctaaacagaatcgggattgttttatttccaaaaatagtctgtacaaaacaaaatgaagtgtacacgtttatattacagaaggccatgactgtcactaactttagtgatttgaagaaatgtggttctgctaatgaaatatttaacagcctcagccactcttccctcccagtaccactctcagtggttctgctgctrttgggcttttccagctccatgagtgcgtaccaaaggaaacggaaggaagtcaaagtctgaatttgcagtgaggagctaggagcatgctcatacacctcccatcccctgaggtaggatgctgagggaaacagagaatgaacacacatgtctgatgggatttcatataggaaagataataagcagagcagaggcaagtgaaatcctatt

SEQ ID NO: 2087 - DNA, 1005 bp, Homo sapiens
catcccatggatttagcccctgcccccctctccgatggtctcctaacatcctccccccatctcctgctacatcacagagtctacaccacgctcagccacactgacctcccttctgctcctagaacatgccaggctcattctggccacagaggctttgcactaaccattccccctgctgggactgctctttctccttcccatctttcagagctcaacttaaaataycatcatcacagagaggccttccctgaccaccggggtgaagtagcccccagtcactttctgttctagcacaccatttgactctctgcctagaactcattcccatccaatatttttcttatttgtttattgcctgtctcctgctcagtggaatgtgatctccatgagagtaaggccatgttctgttttatttgccactggacttcgcgcagggtctggtacacagctggaggtcaataactgtttgttgaacaactatgtgaaggagcaggaggagtcaagtgctctgccaggtgccttgcacatgtggtctctaagccttacattagccattcaaggaaggtttgattatccacattttacagatgaggaaactgagacttagagggattaagtgcacagctgagccagaatgtaaacccaggtctgactccaaagtccaggctgatttttatactatttgatgcaggagtgacagtgaaggaggtggggatgacagagttggggaagagtaaagttgatggaatggtgattaggacttcggacatcttttggtttccattttgctgttggtcactggagtgggctctcaggccctttcagccccgatgttcctgaagctggccctcaggccctgtccataataccagacccacagggaaagcaagctagactcaagctccaaagaggatcacccgcagaggtgggaacgggaggtccctgaaaataggtgtttcattgggtgatttggacccgaaatatagaattgctgaatcatatgca

SEQ ID NO: 2088 - DNA, 1005 bp, Homo sapiens
catcccatggatttagcccctgcccccctctccgatggtctcctaacatcctccccccatctcctgctacatcacagagtctacaccacgctcagccacactgacctcccttctgctcctagaacatgccaggctcattctggccacagaggctttgcactaaccattccccctgctgggactgctctttctccttcccatctttcagagctcaacttaaaataccatcatcacagagaggccttccctgaccaccggggtgaagtagcccccagtcactttctgttctagcacaccatttgactctctgcctagaactcattcccatccaatatttttcttatttgtttattgcctgtctcctgctcagtggaatgtgatctccatgagagtaaggccatgttctgttttatttgccactggacttcgcgcagggtctggtacacagctggaggtcaataactgtttgttgaacaactatgtgaaggagcaggaggagtcaagtgctctgccaggtgccttgcacatrtggtctctaagccttacattagccattcaaggaaggtttgattatccacattttacagatgaggaaactgagacttagagggattaagtgcacagctgagccagaatgtaaacccaggtctgactccaaagtccaggctgatttttatactatttgatgcaggagtgacagtgaaggaggtggggatgacagagttggggaagagtaaagttgatggaatggtgattaggacttcggacatcttttggtttccattttgctgttggtcactggagtgggctctcaggccctttcagccccgatgttcctgaagctggccctcaggccctgtccataataccagacccacagggaaagcaagctagactcaagctccaaagaggatcacccgcagaggtgggaacgggaggtccctgaaaataggtgtttcattgggtgatttggacccgaaatatagaattgctgaatcatatgca

SEQ ID NO: 2089 - DNA, 634 bp, Homo sapiens
tggctgctagggtcctggggtgtttgtccccagtgcacacttgactgccctgggagaagcgccccatgcagggcctggggtgtgctggggtgcaggagggggtcattgagttctatatggaaaggctgatacatccctggcacacaaatccatcaatatccttggtcagatcccagcaccagcctgggctcagtttatggaagagcaagaaggatacatgttccttgtcaggtcccatgtggtcagcccacctttttttgaggatrtgcctggggctcggggctgaggctccactttttgccctccagcagctttggttaccccttttgccacctcttggttaagaagtggccaggcaaagggtgtgggcatggaaggggcattctcctccaatcaaccaccagagaaggcagaaaagatgcctccggctctgtggaccccaggaatgacagggtgcacaggagttgctcagttgcgtgtagcgaatgaatgaatgaatgaataagcaaatgaacagatgaggccatattggttgcttaggaagcaacagtgcttcctacgggtacccaaaaggcccctttctcttccccaatccctctccacccagctgcctgcccactgcataccttgtagt

SEQ ID NO: 2090 - DNA, 1014 bp, Homo sapiens
ccccttttagcaaatgttgtgttaaaaagcctatccttgcttcacatgccacatccttctaggagactctgccttcctgctactctgctcagccccactttggctgtttggactgcagggccttatcccccactgtgtcccccacccaggatggacccctgggcagggggaactgcatctgggaggctgaggggccccaggtctctcctkagagatggtggacttgaaggcagagactgatcagatgttggggcctgagctgaaaggatgggcagagcctggatagagctgctattttcagtcttgtggatactgataaagaagcagaaaaagatgatctgcagagaggaggatgggacatgcagagagaagcagagaggagaccacgtggccccagacagggagagactgagctgtttctctgcagtcttggaatcacccccttaattatttacatcagccctggtgggcttctgtcactcaaagcaaacctcctctgcatagcttcaactatttaatcaataaggtaggtggtaggtggggggaacatccctgccctgtttcacctactggtagaatgaaaagacacaatggtataacagtttataaactgcaaagtgctctaaaggcctaaggaattataattgttattattatcattaatattattcattacagtctaactggttggaaagagcacatgtgactataatttaggacactttaaaaaaacaaaaaaagaaaaagaatctttcagcatgagcaacacagcgagaccgtgcctctaccaaagaaacaaaaattagccgggtgtagtggcgcacgcttatagtcccagctactcgggaggctgagatgggaggatcgcttgaggccaggcgcggaggttacagtgtgctgagatccactgcactcctgcctgggcaacacagcaagactctgtctaaaaaaaaaaaaaaaaaaaaacccggaaagaaaatcttttcgaaaatctgacctccccccttgctagta

SEQ ID NO: 2091 - DNA, 1225 bp, Homo sapiens
tgcattttaaagtttaatgtattcctgaaattctgtcctgaatcttctgtacttctgactctttctcattcattcctaaataacaccccccctgagtgacttcatatacattcaagatctcaactgcttcttctaggagcaacatctcccgaattgatttctagctaaaaacaatttgaagtcctacagagcatcagcttcacaaaagagrcagtcttgtctagtggtgaacaaatacaggcttgaagatacatagaactgtagtaacgtttgactctggcacttaacaaatggagcaaattaacttctctgagacttcatcctcaaaataaaaaagaataataccacattacatggcttttgtgatgattaacataaggagggtctggtagagtttctgacatttaattaacccacaatatttttactcaacatagataccttaaacgtaactgtttccaattgtaaattacttttcctgtatttccatttgccaaaggagaaatccttactcttttttaacttccacattgaatacctatatgttctaattctaattctattttggttctgacctttccttccattctcagtgtttctgccttagtttgggcctttatcactccttacctggattactgcaatagcctcaaactgtgtctctctacctcccctctccccacttccctaaattcctactaaaagaactaatcacttacatgaaaaaaaactaatcacttacatttcacaaactcatattggcttcatttgactttgagaataaaattcaaactgtttagtctacaaggtttatggtctggtttctgctttcttctttagccccatcaccactccacctgatgaactctaatcttcatttttcactcaccttgtagcaggcattctccatcacctccaaagatagtgaagcgcctcttcctctatgttcctacatcactggagctcacctctgtcgtagtatgtatcacattattgtaattatttgctctgtgtctggccagatgtactgagtccatatgaaatatttaataaacatttgtttttcaaaggaatgactgatgtatgaatttgtcttgcaatatgaaagacagcagctactgtctttggtgtgtaactgtgctttactagcctgtattgcctatctctttctactatgctgggcaagttaaattggtttattcatacctgaagtttagaaagaaaa

SEQ ID NO: 2092 - DNA, 1077 bp, Homo sapiens
ctttaagagttgtagttttctttgccacgaaggcttgccagcacagcctggtgcagtagaagggtccagcttttgcatctagataagtctggattcaaatccagatgcttactwtgtgaacacaagcaagtcatttaattgctttcagtggcctcatctataaactgccagtattaacacttgtctcaaacagctttgtgggattcagttgcagggtttctttacatcaatactattcagatttggggctgtgtaattctttgttgtggtaggggcactgtcctacgcattgtaggatgtttagcaaacactagattcatggcagtctgcagacattgccaaatgttccccaggaggtgggtgggaagtgattacacctggttgagaaccaaattatatatgttataatatttatgatatgcccagaatatagtagatgtttcatgaatctccttctcctttccttccctattggggctaatgaaattccatacttatattttcttggaaaaatacttatatataataataagcaccttcctgtcaatgcttagtctgagatgtgtgatatatttttcagccttacctggctcttcacagcagctttactcagaaaaatttaattatcagtacaaagtgatggtctgaattttccagtgatgaagctggggttctaataagtggtttttgtgaagatggaaaatatgtacttcttttagttggagaggaaagagaaggaaaagcaacagaaactacaaagctgaaataatttgaggctgtaggtgtcatggcaatgcaagttgagagacgatcgattcccctagattctgagtggcacattctgtgcacggagtgctggctgacgtcaatcggattaagtggcctcaatgcgagcactgcatgcaagatgagtgcaacgcaggccccaggatttgtcattgcctccaaaggaaggttcctacttcatagcaagaataaggacagtctgtgaatgagtaatgagaagaggcacgttcttgcttaaggaaaagctctcctggtttgtaaaattgttgcaatgcaggtgaaatctgaaaa

SEQ ID NO: 2093 - DNA, 829 bp, Homo sapiens
cttttaatatctgtagctgccttctccaagcttggaacctctgtggagttctgtctggcagggcgcggttggctcacgcactgtaatcccagcactttgggaggctgaggtgggcggatcacaaagtcaggagctcaagaacgtcttggccaacatggtgaaaccctgtctctactaaaaatacaaaaattagtcgggtgtggtggcrcgcacttggtgtagtcccagctactcaggaggctgacacatgagaatcgcttgaacccaggagacagaggttatagtgagctgagattgtgccattgcactcaagcctgggcaacaagagcaacacttcatctcaaaaataaaataaaataaataacttccacctctataatgcttgtgtgctgttgaactgcaacttcctccattctggttcatttttcaatgaaatacaaattgcttttagcctcacagaaattattcaaattctcctgccttgtgttagcttaccccttcctcttattgttggagcttctatgtatttcttctcttccgagtattttaactgtggttccaatgggatgtgggagggaaggaaggaagcatatttacagaggctgtgattttgtcttcaatggcaactttaggtaccttattttaacattttgtagtactagaattagtcactatatccgttaggcatgggttaagctgcaagtaataaaaagtattagttgatgggtgaaataaaggtataattttgaatataggaaatttgaaaataagtaatcctagatgtcacacatttccccttgtgtcataaaaggcctatcctcaagacatc

SEQ ID NO: 2094 - DNA, 647 bp, Homo sapiens
tgatagccaaactcaaatttatctgagtttaaaagaatggactgaaccaaggtacactgtactactgacgaaaaataaataaaaagtaaaaaacaaaaacttcggcttcagttsagattggttctgacaacagatggcaagtttaaagctgcatcttatgatcaaacagctcttgctgtgggaaacctgatcctaaaagcctgatatggacgacagtttgttgtctaacacaaagggctttaaaatcaagcagcaacatcttcttgttcagaccatcagtagtagttttcataatttcctctctgtgaccattgttaaggacctctggaatctcatggaatctattggaattgtatttgtatattctgtagtttgtactatcatcatggtcactgtatttctcaccacaatatttcataaaggaattgtcctgacttaatgtttagggaagatttaatgattggtatcatccactagattgcttccttttcaacatattataaattgtttgttgatatctgtattgtcaagggcgtattgtagttagtgttgctggggtttctatgccttatttggagtatcactagaaatatttcctccccatctcactgtaattaatattacatggcatatttggctcttctgta

SEQ ID NO: 2095 - DNA, 1296 bp, Homo sapiens
tgcatagcaactctgtgatccaaagcagcttgcttaccccataatgtgatacaaagtgggtaagagtcaggagtcttgagaaatgagtcagaagatattactcttttggttttgagttgcggaagctctgctggcatccactgcctgcaaagctgtttctgtcccagatagaggtgagatacatgaatgtggagaaggacacaaaacaaagcatggcgttggtactaatctgatcaattaatctggtaaagggtgccgtctgactctagagctgtccggcaggaaatgtgtaaaagccccacagtgaaaaacatgatttctgttaatctcctgctttcatcatgctgatcccttgaggcagccatgctggcttatgaaaggcttgtcactggctcaactgctgcctaatgtccttcctgggaggaatctggccctcagatttacctaaagtatgaaacaccattaactgctctcttattaatccagtgtgtgactgggagtcagggttttctaatatttccccttctgttttcagtcagtccttggctactcaacatatgtgtctgtcagtcccctgctctaacaataatcatgtttgaaaatcagaaaaagaatgatgtaaccttgagtrtgggccacattgctattcattacttgctggaaatgaaaaaaaatgcaaacaagaattactcttcataaacttggtttaattcttgtgagcaagtttgtgagtcattttatgaatggctcccgcttcaaattagggctcctgtttccgcttccaatgagcctctagtattacatctaatattgtttcctctcagcaattgaaatgtacatccctgctgggttggtaagaatagaatttctttccggaattctttcttctttctgaattgcttcattttacttcccccaaaactaaaataatttgtacttaagaccagacaaaattaacctcatggcttgttctcctttcactttgcaacctgactgcttggcaaagaaggctgctttcactcatgctccacttcctcacctctgtgaggtggcaaatgaactcaaaggacatgagagctcacctctgtggaagcagatatagatgaagggctaggacagagcaatagggtggcacggatagcatagccctgtgctacaaagcaatagggtggcacatgtggcacaggtaccacagggctatactacctgggccacatgtgctggccacaaagcaccttagggatttgtccctgggagaggcttcactgtccttaggtccatctacagagaccagca

SEQ ID NO: 2096 - DNA, 1670 bp, Homo sapiens
ttcaacctggtttacattgaaaatgttaataaataatcatgctggggacctagcctagattatwttaatcagaatatgaaacctcagagcctgaggttaaaaaatatttttaatgtgatttaggtgattattatgtgcatccagggttaagaactaactagtctagatgttataatgcacctgggaggctcttaagatattttgggttaggtcatatagcaggccattttgaaatcatgaatagcaatggagactccatctatttttttttttttttaccccaagagtgttttaagacaaacaccaaagaagattcattgtaagaaagcaaaggtattctttcttgtacaggaagaaagagttgttatcgtcatgaccttgaataatcttttatagatgggtgtgggagtatgatttattttctcaaactcagagaagtaaaagcatctgtgtactgatctaaaagaatgtgtggaaaacataggatgaggagaagaattactacatagcttggatcagaaatgtcaaggcgggcagacgtgggatggtggaaaaggagtgtgtcatgaatacatcctaagtgggcccctccttcacatttgttagcatcatttataataggatgaataatagtgttaagatgtatgctccatgatgtgcccctttatccagacaaatacaaagcagctccaataaaggtattaaccaaggtcagcatatgcaaactagagatagggtgctagtgatttcagccccagtcccagtgggagggcaattcatagaaataactgcctcagttccccaactttattctgaagatggagacttataaacaaggcattgattcttccaatcgttatgcctattaattctatttcctagggtcactttctagaagggcattaaattaagggactgatgttatgtgcagaaataggggctgtggctagagaaggatgctttgaccaatttaaacacgtaaaaatataaccaaattatgtcaaaggccaccaagctcaagaaagccttactgtgaaacagccaccataatatcatttatattattatgtaaacataatttacataattatacaaattatataattatatgttataattatataattatataaatataatcctcaagttaaaggaaacactcaaattgttagtgttagtgaactaaagaccagtctccatagatattggtgatagatattagtgtaaactgtctactttgttctgaaaaagaatatcttcattatgttaaccaaaactatcaaggatcctagaatttttctctaacagcatcaaaatagtggcctaattcatgataatgtgtaaggaaccatgacgtggtaaaaagaatgtagatttttgactcagaattgtttgaattcaattttggtttctactaacaatctattcttgggcaagtaacttagtgtattagaacctaatactttttatctgtgaaatgagaataatatttaccatttaggtttattctgaggcttatagatagtatctgtgaagcagcaagtacaatatatctagaaattattccatcgataatgatcattattctattatattttcattgttggaagtcaactcactctcctaacatcttgtcaaggacctgtgctttcatatcctggaactcagcc

SEQ ID NO: 2097 - DNA, 1670 bp, Homo sapiens
ttcaacctggtttacattgaaaatgttaataaataatcatgctggggacctagcctagattattttaatcagaatatgaaacctcagagcctgaggttaaaaaatatttttaatgtgatttaggtgattattatgtgcatccagggttaagaactaactagtctagatgttataatgcacctgggaggctcttaagatattttgggttaggtcatatagcaggccattttgaaatcatgaatagcaatggagactccatctatttttttttttttttaccccaagagtgttttaagacaaacaccaaagaagattcattgtaagaaagcaaaggtattctttcttgyacaggaagaaagagttgttatcgtcatgaccttgaataatcttttatagatgggtgtgggagtatgatttattttctcaaactcagagaagtaaaagcatctgtgtactgatctaaaagaatgtgtggaaaacataggatgaggagaagaattactacatagcttggatcagaaatgtcaaggcgggcagacgtgggatggtggaaaaggagtgtgtcatgaatacatcctaagtgggcccctccttcacatttgttagcatcatttataataggatgaataatagtgttaagatgtatgctccatgatgtgcccctttatccagacaaatacaaagcagctccaataaaggtattaaccaaggtcagcatatgcaaactagagatagggtgctagtgatttcagccccagtcccagtgggagggcaattcatagaaataactgcctcagttccccaactttattctgaagatggagacttataaacaaggcattgattcttccaatcgttatgcctattaattctatttcctagggtcactttctagaagggcattaaattaagggactgatgttatgtgcagaaataggggctgtggctagagaaggatgctttgaccaatttaaacacgtaaaaatataaccaaattatgtcaaaggccaccaagctcaagaaagccttactgtgaaacagccaccataatatcatttatattattatgtaaacataatttacataattatacaaattatataattatatgttataattatataattatataaatataatcctcaagttaaaggaaacactcaaattgttagtgttagtgaactaaagaccagtctccatagatattggtgatagatattagtgtaaactgtctactttgttctgaaaaagaatatcttcattatgttaaccaaaactatcaaggatcctagaatttttctctaacagcatcaaaatagtggcctaattcatgataatgtgtaaggaaccatgacgtggtaaaaagaatgtagatttttgactcagaattgtttgaattcaattttggtttctactaacaatctattcttgggcaagtaacttagtgtattagaacctaatactttttatctgtgaaatgagaataatatttaccatttaggtttattctgaggcttatagatagtatctgtgaagcagcaagtacaatatatctagaaattattccatcgataatgatcattattctattatattttcattgttggaagtcaactcactctcctaacatcttgtcaaggacctgtgctttcatatcctggaactcagcc

SEQ ID NO: 2098 - DNA, 1670 bp, Homo sapiens
ttcaacctggtttacattgaaaatgttaataaataatcatgctggggacctagcctagattattttaatcagaatatgaaacctcagagcctgaggttaaaaaatatttttaatgtgatttaggtgattattatgtgcatccagggttaagaactaactagtctagatgttataatgcacctgggaggctcttaagatattttgggttaggtcatatagcaggccattttgaaatcatgaatagcaatggagactccatctatttttttttttttttaccccaagagtgttttaagacaaacaccaaagaagattcattgtaagaaagcaaaggtattctttcttgtacaggaagaaagagttgttatcgtcatgaccttgaataatcttttatagatgggtgtgggagtatgatttattttctcaaactcagagaagtaaaagcatctgtgtactgatctaaaagaatgtgtggaaaacataggatgaggagaagaattactacatagcttggatcagaaatgtcaaggcgggcagacgtgggatggtggaaaaggagtgtgtcatgaatacatcctaagtgggcccctccttcacatttgttagcatcatttataataggatgaataatagtgttaagatgtatgctccatgatgtgcccctttatccagacaaatacaaagcagctccaataaaggtattaaccaaggtcagcatatgcaaactagagatagggtgctagtgatttcagccccagtcccagtgggagggcaattcatagaaataactgcctcagttccccaactttattctgaagatggagacttataaacaaggcattgattcttccaatcgttatgcctattaattctatttcctagggtcactttctagaagggcattaaattaagggactgatgttatgtgcagaaataggggctgtggctagagaaggatgctttgaccaatttaaacacgtaaaaatataaccaaattatgtcaaaggccaccaagctcaagaaagccttactgtgaaacagccaccataatatcatttatattattatgtaaacataatttacataattatacaaattatataattatatgttataattatataattatataaatataatcctcaagttaaaggaaacactcaaattgttagtgttagtgaactaaagaccagtctccatagatattggtgatagatattagtgtaaactgtctactttgttctgaaaaagaatatcttcattatgttaaccaaaactatcaaggatcctagaatttttctctaacagcatcaaaatagtggcctaattcatgataatgtgtaaggaaccatgacgtggtaaaaagaatrtagatttttgactcagaattgtttgaattcaattttggtttctactaacaatctattcttgggcaagtaacttagtgtattagaacctaatactttttatctgtgaaatgagaataatatttaccatttaggtttattctgaggcttatagatagtatctgtgaagcagcaagtacaatatatctagaaattattccatcgataatgatcattattctattatattttcattgttggaagtcaactcactctcctaacatcttgtcaaggacctgtgctttcatatcctggaactcagcc

SEQ ID NO: 2099 - DNA, 625 bp, Homo sapiens
attgtgttgtacacaataaatacacttttgtcacttacwgtatacacttttgtcacttttgtatacacttttttgttaattaaaattaattaaaaatagtaaagtaaaaaataagatatataattgcatcattagaaagaaaacttccacctattccattttaatccacaagaacatattaagggtcaatagtatatcaggtaccgtattagtccattctcacgctgctaataaagacttacctgagactgggtaattaataaaggaaagaagtttaattgactcacattttcacaaggctggggaggccttaggaaaattacaatcatgccagaaggacatatttattgctttttgtgtgatgagaacacttaaaatctactctattagtgattttcaagaatacaacacattgtcattaactgtagtcaccatgttgtattcttgaatggaatctcttgaacttattcctttcatctaaatggcttattttgcttaaaataatgtccttctggttcactcatgttgtctcaagtgacagacagaatgacaggatttccttcttttgtaaggctgaatagtattccattgtatatataccatattttatttatctcttcattca

SEQ ID NO: 2100 - DNA, 625 bp, Homo sapiens
attgtgttgtacacaataaatacacttttgtcacttactgtawacacttttgtcacttttgtatacacttttttgttaattaaaattaattaaaaatagtaaagtaaaaaataagatatataattgcatcattagaaagaaaacttccacctattccattttaatccacaagaacatattaagggtcaatagtatatcaggtaccgtattagtccattctcacgctgctaataaagacttacctgagactgggtaattaataaaggaaagaagtttaattgactcacattttcacaaggctggggaggccttaggaaaattacaatcatgccagaaggacatatttattgctttttgtgtgatgagaacacttaaaatctactctattagtgattttcaagaatacaacacattgtcattaactgtagtcaccatgttgtattcttgaatggaatctcttgaacttattcctttcatctaaatggcttattttgcttaaaataatgtccttctggttcactcatgttgtctcaagtgacagacagaatgacaggatttccttcttttgtaaggctgaatagtattccattgtatatataccatattttatttatctcttcattca

SEQ ID NO: 2101 - DNA, 625 bp, Homo sapiens
attgtgttgtacacaataaatacacttttgtcacttactgtatacacttttgtcacttttgtatacacttttttgttaattaaaattaattaaaaatagtaaagtaaaaaataagatatataattgcatcattagaaagaaaacttccacctattccattttaatccacaagaacatattaagggtcaatagtatatcaggtaccgtattagtccattctcacgctgctaataaagacttacctgagactgggtaattaataaaggaaagaagtttaattgactcacattttcacaaggctggggaggccttaggaaaattacaatcatgccagaaggacatatttattgctttttgtgtgatgagaacacttaaaatctactctattagtgattttcaagaatacaacacattgtcattaactgtagtcaccatgttgtattcttgaatggaatctcttgaacttattcctttyatctaaatggcttattttgcttaaaataatgtccttctggttcactcatgttgtctcaagtgacagacagaatgacaggatttccttcttttgtaaggctgaatagtattccattgtatatataccatattttatttatctcttcattca

SEQ ID NO: 2102 - DNA, 1219 bp, Homo sapiens
tgtaacttttctctgtgtctttttatgscttgatagctcattccttttttagcatcgaactatcctgcttttaaataaaaattatccggacactttgtttcccataacacagccacatgaggtcctatggctatatcatacttttctgatgattatcaggtgaaagggtgttgtaattaaagcattatacaacagaggggaaacaatttatccacttgagatgactttttccaggaagaaaaactataagtggtttcactcaaaaaaaaaaaaaaagtccctttgggcaaattgtagatgataacctagccctctgcccttttttctttctcaattccctttaaaaagtgttccttttggccgggtatggtggctcatgcctgtaatcctagcactttgggagatcacaggggccagatcacgaggtcaagagatcgagaccatcctggcaaacatggtgaaaccccgtctctactaaaaatacaaaaattagctagacgtggtggcgcatgcctgtagtcccagctactctggaggctgaggcaggagaattacttgaacccgggaggcagaggttgcagtgagccgagatagcaccattgtactacaacctggcaacagagtgagaccccgtctcaaaaaaaaaaaaaaaaaaaaaaaaaaaaaaagtgctccttttgtattacctatagtgtgtaaaaaggagtgctcacttataactataggtgggcctagttatatgccataaatttcacaagcgaattagtgctttaccttaatatagaaacatattatttcttttacctatcccccatatccccactattaaaatgtgcctttgcaggcttattgggaataagaaatgaacccagttacaagccttacacagttattagtggtcatttgtttacctacacagaaacctagctaaaaatgttgatttgtacaaataatagatcctgtaaattcttagtaagcacatcatcctttttaggttatttagaaaaagatatgggaattctttcattcttctccttaaacatgcacaattgcaaaatgattgctttgaactttcatcttcacaaacttttcaccacaatttagatttcaaatggaaaataattaaatatggtatgtcaagaaagaaataacaatagagatttttacctaaatttatccaaacaggtactttagtattttcaggatgcaaataaaataa

SEQ ID NO: 2103 - DNA, 1219 bp, Homo sapiens
tgtaacttttctctgtgtctttttatggcttgatagctcattccttttttagcatcgaactatcctgcttttaaataaaaattatccggacactttgtttcccataacacagccacatgaggtcctatggctatatcatacttttctgatgattatcaggtgaaagggtgttgtaattaaagcattatacaacagaggggaaacaatttatccacttgagatgactttttccaggaagaaaaactataagtggtttcactcaaaaaaaaaaaaaaagtccctttgggcaaattgtagatgataacctagccctctgcccttttttctttctcaattccctttaaaaagtgttccttttggccgggtatggtggctcatgcctgtaatcctagcactttgggagatcacaggggccagatcacgaggtcaagagatcgagaccatcctggcaaacatggtgaaaccccgtctctactaaaaatacaaaaattagctagacgtggtggcgcatgcctgtagtcccagctactctggaggctgaggcaggagaattacttgaacccgggaggcagaggttgcagtgagccgagatagcaccattgtactacaacctggcaacagagtgagaccccgtctcaaaaaaaaaaaaaaaaaaaaaaaaaaaaaaagtgctccttttgtattacctatagtgtgtaaaaaggagtgctcacttataactataggtgggcctagttatatgccataaatttcacaagcgaattagtgctttaccttaatatagaaacatattatttcttttacctatcccccatatccccactattaaaatgtgcctttgcaggcttattgggaataagaaatgaacccarttacaagccttacacagttattagtggtcatttgtttacctacacagaaacctagctaaaaatgttgatttgtacaaataatagatcctgtaaattcttagtaagcacatcatcctttttaggttatttagaaaaagatatgggaattctttcattcttctccttaaacatgcacaattgcaaaatgattgctttgaactttcatcttcacaaacttttcaccacaatttagatttcaaatggaaaataattaaatatggtatgtcaagaaagaaataacaatagagatttttacctaaatttatccaaacaggtactttagtattttcaggatgcaaataaaataa

SEQ ID NO: 2104 - DNA, 1219 bp, Homo sapiens
tgtaacttttctctgtgtctttttatggcttgatagctcattccttttttagcatcgaactatcctgcttttaaataaaaattatccggacactttgtttcccataacacagccacatgaggtcctatggctatatcatacttttctgatgattatcaggtgaaagggtgttgtaattaaagcattatacaacagaggggaaacaatttatccacttgagatgactttttccaggaagaaaaactataagtggtttcactcaaaaaaaaaaaaaaagtccctttgggcaaattgtagatgataacctagccctctgcccttttttctttctcaattccctttaaaaagtgttccttttggccgggtatggtggctcatgcctgtaatcctagcactttgggagatcacaggggccagatcacgaggtcaagagatcgagaccatcctggcaaacatggtgaaaccccgtctctactaaaaatacaaaaattagctagacgtggtggcgcatgcctgtagtcccagctactctggaggctgaggcaggagaattacttgaacccgggaggcagaggttgcagtgagccgagatagcaccattgtactacaacctggcaacagagtgagaccccgtctcaaaaaaaaaaaaaaaaaaaaaaaaaaaaaaagtgctccttttgtattacctatagtgtgtaaaaaggagtgctcacttataactataggtgggcctagttatatgccataaatttcacaagcgaattagtgctttaccttaatatagaaacatattatttcttttacctatcccccatatccccactattaaaatgtgcctttgcaggcttattgggaataagaaatgaacccagttacaagccttacacagttattagtggtcatttgtttacctacacagaaaccwagctaaaaatgttgatttgtacaaataatagatcctgtaaattcttagtaagcacatcatcctttttaggttatttagaaaaagatatgggaattctttcattcttctccttaaacatgcacaattgcaaaatgattgctttgaactttcatcttcacaaacttttcaccacaatttagatttcaaatggaaaataattaaatatggtatgtcaagaaagaaataacaatagagatttttacctaaatttatccaaacaggtactttagtattttcaggatgcaaataaaataa

SEQ ID NO: 2105 - DNA, 1021 bp, Homo sapiens
tgcattgaaatttaaattgagtgaatttggaacttcaatgtacacataatccatcaactgtaggaattgcaatctctattcaaactctaattattcacctcctcaacccacaatgtctgaaagaggccaaaagctgtctttcttgtgggtatttaataacataatactcttggtttccacctgacattagacattttctttctctctttctctgattcttgattcattacaggtaagtcttgtttagctgccagcatagtgctaccaccgtcagccagcatatccaaatgtgtctgtgatgttccttccccagccccaatgcactccaggggtgcccctgccccatgaaactatcagaagtagaaatgatgtgtgatgtcctttccagtattctccatggcataagggaagacacatccagagttgagacaaatcatgttcatgttgaacacattgcactagtgaatctaaaaaagaagattttattttatttcgtaattcacagcttctctctctagatagaagtccatgtgggctgggtcttgggccaatctgagaatcatcctttcttttcaacactcccagaatgatttactctctagtccgttatgacataaattttcccaggaagctcgatgttcccttaaataatctcctgaggaacccacccttatatgcactctacacatgattatatgggtctgcattttcacatgaatatmcatcagattaagctaaagcttctactaattatatatatatgtttaaattttagtctggatgcttctcttagaatattaaatatattttaagacatatatgagttgatgacaagctagataagatatcttaactactatccttattcttctgtaatttaacgttagtggactaattgagttagtagcctgaaggaagagattagaaatatttatcttctttttagtgctcattgcagtgggtatgccttctatgtaaataacttctattcaaaacctaggggagaaaaaagtaggtatgc

SEQ ID NO: 2106 - DNA, 610 bp, Homo sapiens
cccagttttttacaatttaattttaatacttaatctttcacattttttcttagatctatatttctatccatatccatcatttctctatttggagcttaaatctaaatataatgcatttgcaaaatataaatataacaaaacatttactaaagtctcctacatatgaaaaaaatctctattgtatatgtataattattttttatcttaaatttactaccctgcagtacatttttatttataataactgctataagtaattttcaatttggattcttttaacagtctagacttagttctacaaacttattaaacaatctttcaaacttatttggataatagaaaaatatgttaaatggtaccatagtgaaaaatgaatactacctrgtttatctttttaatgagtttctactctctctaagtcaaattcgatagtgatacattagtcaatgtatctagtatagcaaataaatttcttcttatatggtaaatctgagtaatttgtggatccctgcaatgtgtcctgtgaaaccaaatccagcctctgaaggaaagattgtcataattgattagttatgtctgtcatggatgtgcatcaggtgatcaagttctt

SEQ ID NO: 2107 - DNA, 1288 bp, Homo sapiens
gaggtggttgctttattttttttccaccctacccagtttctctattaaaagctgatgcttacactggtctctgtctctgactttcagtgtttttctctattttttgccctctaaaaatgtcctgcaaaagctgccaagtcccaatgcctttatgatgagttttcacctaaggatttctggcagtattcctgtttatgggggaagaaatttgagcagcctgaaccataatcttaaaactcatgtctttctaaagggatacaagccatttttctcttcataattatacaaagctataagatttataagaattacattaaagaacgattttttaaaaaagtatagtgtggaaatttataatagacaattttaccagattttaaaatggtgaatagctctctacccagttgcatttctatgaaattttcccaagaaaataataggaacmatgtataaaggaaaacagaggaggaaagtgatcactggtgtttactatgggttccagaaacatcccactggacacaaactaaaacttcatcagtaagaaattggttcataaaacagaatacaggcaagcactgaaaaactacaaagctattaaaaattataatttgggccgggcacagtggttcatgcctgtaatcccagcacttgggaggccaaggcagatggattgcttgagcccaggaattcgagaccagcctgggcaatatggcaaaacaccatctctgcaaaaaattagccaggtatggcagtgcatgcctgtagtcccagatactcaggaagctgaggtgggagcatcacctgagtccaaaagtttgaggttgtagtgagccatgatcatggtactgcactccagcctaggtgacagagtgagaccatatctaaaaacaaaaattaatttaaaaaattaaaaataaaatgataatgtgagaatacacatgtatcaacataaaaaagagaataaataaaatttggttataaaagagtataatatgatcccatttctacaaaatacataaaattttgtatatgtcatgtgtgagtttacacatagaagtccggaaaaatatacaacaaatgtttattttattcttcatccttttacctatatattcataatccatatgtcaatacatctctacacatagagatatctttcacaatatatagctttataaattatgtaaatttttcacagtatatagcttctataattaaaaataccacaaaaatgtgtttccctttatttgaaaacatggcccactgcttaccattttgttctaagaga

SEQ ID NO: 2108 - DNA, 646 bp, Homo sapiens
gcttgtggataggagacaacaatgcatgtcttgtttcttctcgtatttgtaactgatttgcttttaagactgtcttgtctgaattgccttctgctgttggtgtaataagaaaaagcatgtggtgtatttaaccaatgggggaaaatatttcttatatatagagatgaaatagacatgtagctagagaataggcgagaatagacatgtagcttgtttgatggcccatgtcatttctcagatttactgctgtgtttttcttaacagctggttacaaaaacaagtggcactaaaggaaaagaccatattttcttttatcrtggccacaggtgtttatttttatttatttttatgagtatataaaatgaaaagtattcagattaaccggttattcagagaggtgatatcaggtggggagtagtgggattaaaaaaaaataccctcccatgccacctgcattctgattgccaatgcatccgtgattggtgccttgctcagcatctcccaggtgccatcacttcagaagtttcccagattttgctctttcttagaaggcagcagggagggccaggcacgatggctcacacctgtaatcccagcactttgggaggccgaggccggtggatcacgaggtcaggagttcaagacc

SEQ ID NO: 2109 - DNA, 1131 bp, Homo sapiens
catcatcttyggtctgcctacccctagacttcttgtacatggggaaaataagctcatatttggctaagccacttctgtctgttgtgtaacattcaacacagtaatctaaccccttgggaggaacagaaggacatatttttttctttataaattggatggtccattattgtaattatatgtggcataaaatgccagccagtgcttgttcattatattatgcttaggtgtggaagagcatatttcaggttcaagagttagtatgcaaaaagatgaatggaattcagactatttattctaaacagcatgtttcaggattagccaaaagctcatccatacatactatttaaagaaacaaactttggaaaaacaaggtaattgtgtatgggtcctaaggtcatagattagtatcataagagattgatgttcagaatgtgattcaatatcttaagtatatagtctaataattcttgaggtggcaagaggggatatggggtagaaagggagagtaggggagtgtcagagttcatgggagaatatgcagtgtgaaaaaattaaaattataatgatttttgatcaatgtacttaattttctttgaaagtgaataatgataatagtaatagacatatatgatactctgagcaatatactaggcatgtaaaagaattataacattaacttgtcacaataatactttgcagtagctattcttagtatctgcatttaaaagatggggaaactcaaatacagaagtgtaagatcacatatctggtaagtgctcataattcaaacccaaatacgtctgattccaggatctaggttcctcccaatttcactgaagtgtttttttgctaaataactaaaggaaggtatagcactcctattttatcaaaagtcactttacaaaagggattttttaaaagttgagtaatactgtcatattcctaatgaaaaatgaaaaggtatgttcctacccaccaataggagtaaaccacattgctaaatgacataattttgtaaatacatataacagtttagactgacatttaatttgcttgagtccgtgacctcagaccattcaatatcactaaggcatgttttctcaatcaaaccataaaaaatgaaatatattt

SEQ ID NO: 2110 - DNA, 1131 bp, Homo sapiens
catcatcttcggtctgcctacccctagacttcttgtacatggggaaaatragctcatatttggctaagccacttctgtctgttgtgtaacattcaacacagtaatctaaccccttgggaggaacagaaggacatatttttttctttataaattggatggtccattattgtaattatatgtggcataaaatgccagccagtgcttgttcattatattatgcttaggtgtggaagagcatatttcaggttcaagagttagtatgcaaaaagatgaatggaattcagactatttattctaaacagcatgtttcaggattagccaaaagctcatccatacatactatttaaagaaacaaactttggaaaaacaaggtaattgtgtatgggtcctaaggtcatagattagtatcataagagattgatgttcagaatgtgattcaatatcttaagtatatagtctaataattcttgaggtggcaagaggggatatggggtagaaagggagagtaggggagtgtcagagttcatgggagaatatgcagtgtgaaaaaattaaaattataatgatttttgatcaatgtacttaattttctttgaaagtgaataatgataatagtaatagacatatatgatactctgagcaatatactaggcatgtaaaagaattataacattaacttgtcacaataatactttgcagtagctattcttagtatctgcatttaaaagatggggaaactcaaatacagaagtgtaagatcacatatctggtaagtgctcataattcaaacccaaatacgtctgattccaggatctaggttcctcccaatttcactgaagtgtttttttgctaaataactaaaggaaggtatagcactcctattttatcaaaagtcactttacaaaagggattttttaaaagttgagtaatactgtcatattcctaatgaaaaatgaaaaggtatgttcctacccaccaataggagtaaaccacattgctaaatgacataattttgtaaatacatataacagtttagactgacatttaatttgcttgagtccgtgacctcagaccattcaatatcactaaggcatgttttctcaatcaaaccataaaaaatgaaatatattt

SEQ ID NO: 2111 - DNA, 1131 bp, Homo sapiens
catcatcttcggtctgcctacccctagacttcttgtacatggggaaaataagctcatatttggctaagccacttctgtctgttgtgtaacattcaacacagtaatctaaccccttgggaggaacagaaggacatatttttttctttataaattggatggtccattattgtaattatatgtggcataaaatgccagccagtgcttgttcattatattatgcttaggtgtggaagagcatatttcaggttcaagagttagtatgcaaaaagatgaatggaattcagactatttattctaaacagcatgtttcaggattagccaaaagctcatccatacatactatttaaagaaacaaactttggaaaaacaaggtaattgtgtatgggtcctaaggtcatagattagtatcataagagattgatgttcagaatgtgattcaatatcttaagtatatagtctaataattcttgaggtggcaagaggggatatggggtagaaagggagagtaggggagtgtcagagttcatgggagaatatgcagtgtgaaaaaattaaaattataatgatttttgatcaatgtacttaattttctttgaaagtgaataatgataatagtaatagrcatatatgatactctgagcaatatactaggcatgtaaaagaattataacattaacttgtcacaataatactttgcagtagctattcttagtatctgcatttaaaagatggggaaactcaaatacagaagtgtaagatcacatatctggtaagtgctcataattcaaacccaaatacgtctgattccaggatctaggttcctcccaatttcactgaagtgtttttttgctaaataactaaaggaaggtatagcactcctattttatcaaaagtcactttacaaaagggattttttaaaagttgagtaatactgtcatattcctaatgaaaaatgaaaaggtatgttcctacccaccaataggagtaaaccacattgctaaatgacataattttgtaaatacatataacagtttagactgacatttaatttgcttgagtccgtgacctcagaccattcaatatcactaaggcatgttttctcaatcaaaccataaaaaatgaaatatattt

SEQ ID NO: 2112 - DNA, 1131 bp, Homo sapiens
catcatcttcggtctgcctacccctagacttcttgtacatggggaaaataagctcatatttggctaagccacttctgtctgttgtgtaacattcaacacagtaatctaaccccttgggaggaacagaaggacatatttttttctttataaattggatggtccattattgtaattatatgtggcataaaatgccagccagtgcttgttcattatattatgcttaggtgtggaagagcatatttcaggttcaagagttagtatgcaaaaagatgaatggaattcagactatttattctaaacagcatgtttcaggattagccaaaagctcatccatacatactatttaaagaaacaaactttggaaaaacaaggtaattgtgtatgggtcctaaggtcatagattagtatcataagagattgatgttcagaatgtgattcaatatcttaagtatatagtctaataattcttgaggtggcaagaggggatatggggtagaaagggagagtaggggagtgtcagagttcatgggagaatatgcagtgtgaaaaaattaaaattataatgatttttgatcaatgtacttaattttctttgaaagtgaataatgataatagtaatagacatatatgatactctgagcaatatactaggcatgtaaaagaattataacattaacttgtcacaataatactttgcagtagctattcttagtatctgcatttaaaagatggggaaactcaaatacagaagtgtaagatcacatatctggtaagtgctcataattcaaacccaaatacgtctgattccaggatctaggttcctcccaatttcactgaagtgtttttttrctaaataactaaaggaaggtatagcactcctattttatcaaaagtcactttacaaaagggattttttaaaagttgagtaatactgtcatattcctaatgaaaaatgaaaaggtatgttcctacccaccaataggagtaaaccacattgctaaatgacataattttgtaaatacatataacagtttagactgacatttaatttgcttgagtccgtgacctcagaccattcaatatcactaaggcatgttttctcaatcaaaccataaaaaatgaaatatattt

SEQ ID NO: 2113 - DNA, 1273 bp, Homo sapiens
tcagcctctgatcctttttgttgttgttgcttaattccggaatggcctttcgtttcatttgtttacttcactcatattacttaggtttattgagcagctgcagcatgctaggccctggggttaaggcatgactgtggccctttaagaactcacagtcaaaactgtctttaaaaatcctacccatccctttaagttcagttgaaaattacctcttatataaagcttctgctaatccctccatttcccagccccagaggggactgttttttccaaaggggacttttttctgaacccccataatgttttatgcttcttatatggtgtttatataattttgcattgtattggaatcatttaggtaattgtcttatcttcattgctagagtgtaagctctttaaggtagagacagtgttattcagtttattatctccccaaatacctaatatagcatcttaggcctatctagtagatactcaaaaaatatatatcctaataaatgtgattaagctatcacatttagtgcctatggtaggcactaaatcaaggttaagcaaaggaaggaagcattatgttctatacaaaccctgaaatacggagttagatagatctgaatttatttttaagtaattatttattgattgatctgaatttaaatgtggctttgtcacatattagctgtgtgaccagcgccaggtgtcttaggctttctgaccttgaatttttcatcttaaagtactgatatattggcccagcgcggtggctcatgcctgtaatcccagcactttgggaggctgaggcgggcggatcagaggtcaggagttcgagaccagcctggccaacatagtgaaacccagtccctactaaaaatacaaaaaaattagctgggcgtggtggtgggcacctgtaatcccagctacttggaaggctgaggcgaggaacctgggaracagaggctgcagtgagccgagatctgccactggactccagcccaggcgacagtgcgagattccatttcaaaaaaaaaaaaaaaaagtactgatatattttgtcgaattattttgaggattggtaatgtttataatcacatatcagcctgtatattggctgtttttctcttatttaaaaaaaacattgtgggccgggcactgtggctcaacgcttgtaattccagcactttgggaggccgaggtgggcagatcacctgaggtcaggagttcgagaccagtctggccaacgtggtaaccctgtctctattaaaaaatataaaattag

SEQ ID NO: 2114 - DNA, 1224 bp, Homo sapiens
tgcatgcagatctacctctgtaggctaagatataatactttcccctttctagaacatatactctagaagaacctggagtcttggaagagtttgacatattaaaatgtaaacagagcaacaacactttgtacatgtccacagtagaaataacatggagttgtcacaagctgaggttgttgataggttttaaaattctggcttccttttctactgctttcaacaagaaattaaacaaaaaaacggtctacattttaaaattaagaaacagatacatactcatcatgaacaatggtgggaccatcccttgttaaggcctcttccttgatgacgttgataagttcaaaggtactacttatgggggcatctgggttaggccatttgggacactgaaagtgccgaacttctaagacatagtcatcctgtaaccaatacaacatgggtcaaatcccttcctttatttcacatatctacaatctaatgactagaacttgctcctgagaaagccatgtgttataggtaactctcaacaatgttgtgttaaccaaaccacagctggaaagaagaaaaataccaggaaggttttttttttttgtttttttgttttttaaaaaaagcatggctaggcatagtggttcatgcctgtaattcagtactttgggaggccaaggtgggaggattgcttgaggccaggagttcaagacccacctgggcaacacagggagatctgtctctaaaaaaattaaaaaaaaaaaaaaattaacyagtcatatggtacatgcctatagtctttgctattcgggaggctgatgtgaaaggatcgcttgagcccaggagtttggggttacactgagctttgatgatgccactgtgagtgagaccttgtctcaaaacaaacaaccaagtaggtcatgctagtgaaacaattcatttggcttagtcaaaaatttcaagtgacaataaattattaaagaccttatatcctactctattttcttatttataaaattaaaggaaaacaaggaaggggctcatcctttaaattactaatataagagcccccccatgcttactcatcccacaagaaggcagcaaaatatttacttaaaaaaacttagtattatcatctgtgcaacacattgcaaagcttacatttctgatggcaaagaaaatattgagttctagtatattgtttttataattaggtcaacagacctatttgtatgc

SEQ ID NO: 2115 - DNA, 552 bp, Homo sapiens
agttcctaaaaaaaactttttaaaatttctggctgttctctaatttgttgacctagaggaagatgaatagaatataaatcaagcacatacctaaacacttgaccttgacattttgccccacataatgctatttcagtggcagacaaagctctaaatccattctgtttgaagatgacattcttaaaattgagactgcatcttctctagtaaagtgcctagtctttagttacttaataaagtaccacaaatagtcaaattaatagccactaagaatgaatagctgtgtattcataagaaaattctaatttaaaataatgtcaaagcatttctttagctccacacaaaagaaacaagcagttgattgctgaaatttataccttattgtatcttttttgacatcagtagaagctgtgtatctacaagaggaaaagtttgttcccaattcctgagccaaaatttgtcaatgccttcagcaaygacttcctaaaatgtttttgactgcaagccacattaagaaatctatttcaactgtgacttgccacaaacagacat

SEQ ID NO: 2116 - DNA, 552 bp, Homo sapiens
agttcctaaaaaaaactttttaaaatttctggctgttctctaatttgttgacctagaggaagatgaatagaatataaatcaagcacatacctaaacacttgaccttgacattttgccccacataatgctatttcagtggcagacaaagctctaaatccattctgtttgaagatgacattcttaaaattgagactgcatcttctctagtaaagtgcctagtctttagttacttaataaagtaccacaaatagtcaaattaatagccactaagaatgaatagctgtgtattcataagaaaattctaatttaaaataatgtcaaagcatttctttagctccacacaaaagaaacaagcagttgattgctgaaatttataccttattgtatcttttttgacatcagtagaagctgtgtatctacaagaggaaaagtttgttcccaattcctgagccaaaatttgtcaatgccttcagcaatgacttcctaaaatgtttttgactgcaasccacattaagaaatctatttcaactgtgacttgccacaaacagacat

SEQ ID NO: 2117 - DNA, 1247 bp, Homo sapiens
  misc_feature (1)...(1247): n = A,T,C or G
ttcctgtgttgaattttacagagcagattttttttctgttgattcaataaaacgtttagtagtcttagtaccagctgcttgtttgtttttaattctgattaaggttagagtctagaaagagaagacaatatgaaatatgttgggtttacctaattcatagtattcttagatgtatctggcatgctgaataaaaatgtgtttaattgcatcctttcattttatacattattacatcttaagttttcttttctcttctgagagaaccaatggattaaggtactaaaataatcaaatgttgcaaagctgaggacatgtggtagaagtaactttaaatgtttttattctttatgacagctttgattaaagatgacttccttgtttgctcaagaaattcgcctttctaaaagacatgaagaaatgtaagtttttttaaagggatgattcagatatagaaattggactggctttgttagtgaaatattgtatacacaggatgacttaaaaatttgcaagcatgtcattttaattttctgacacttaagaggttttagtgttagggaatttcattgtttcttatgaataagcaagattaaaaggtatgttctatgtatttttactctttgtaagtaatatatagataaatttgcccctcctcccaccctttctaggctccacattggcatttaatgggcttctctaaacctcttacacagggctggcttcttgggtatgtgacttatatacagtcacaggtcctgcatttggtttaatgctctcatgccattgtcttgcatcattttggactggaccctgcaaattgtgtagccagtcctgctctttgctttgtattattcactcttttcctcctctgtttgtgggctttcaggttttccttttctttaattaattaccagacgttctttccttggctcctaagatactttccttaccaaaaaattgactgttcatagacctgagattttaattccacctttaagacagcctgatgaaacacagtgtttcttgagaacctccacaactatttgggaaacagtttgactgttatgtataccaacgtatgtatcttttaatcatcttacatattgtcctaaaaagaacaaaaacatataaaataagcatttgaccagcaagaaacttttaaagtatattatatgtaacgaagtagtttgaagatgtttacttgtaatttttacatctttcttcawtactgttttaccctgtgngag

SEQ ID NO: 2118 - DNA, 1247 bp, Homo sapiens
  misc_feature (1)...(1247): n = A,T,C or G
ttcctgtgttgaattttacagagcagattttttttctgttgattcaataaaacgtttagtagtcttagtaccagctgcttgtttgtttttaattctgattaaggttagagtctagaaagagaagacaatatgaaatatgttgggtttacctaattcatagtattcttagatgtatctggcatgctgaataaaaatgtgtttaattgcatcctttcattttatacattattacatcttaagttttcttttctcttctgagagaaccaatggattaaggtactaaaataatcaaatgttgcaaagctgaggacatgtggtagaagtaactttaaatgtttttattctttatgacagctttgattaaagatgacttccttgtttgctcaagaaattcgcctttctaaaagacatgaagaaatgtaagtttttttaaagggatgattcagatatagaaattggactggctttgttagtgaaatattgtatacacaggatgacttaaaaatttgcaagcatgtcattttaattttctgacacttaagaggttttagtgttagggaatttcattgtttcttatgaataagcaagattaaaaggtatgttctatgtatttttactctttgtaagtaatatatagataaatttgcccctcctcccaccctttctaggctccacattggcatttaatgggcttctctaaacctcttacacagggctggcttcttgggtatgtgacttatatacagtcacaggtcctgcatttggtttaatgctctcatgccattgtcttgcatcattttggactggaccctgcaaattgtgtagccagtcctgctctttgctttgtattattcactcttttcctcctctgtttgtgggctttcaggttttccttttctttaattaattaccagacgttctttccttggctcctaagatactttccttaccaaaaaattgactgttcatagacctgagattttaattccacctttaagacagcctgatgaaacacagtgtttcttgagaacctccacaactatttgggaaacagtttgactgttatgtataccaacgtatgtatcttttaatcatcttacatattgtcctaaaaagaacaaaaacatataaaataagcatttgaccagcaagaaacttttaaagtatattatatgtaacgaagtagtttgaagatgtttacttgtaatttttacatctttcttcattwctgttttaccctgtgngag

SEQ ID NO: 2119 - DNA, 607 bp, Homo sapiens
gttatagctagtatatgtagcgaccagtacatgtagcgacttgtaaagaggttaggttatccaccgtggagcaggtcccatcatttgtgtatccaaatcaaggaaataggtaatttaaagaatgaaggatgactgagtcagaacctcccagagctgttagctccttggcaaaaatgaatctgtgacttcatgggaacatgctcttggattaccatttaaattgagtaattaccctttgttcggtaattgatctcccaccctaaggaaatggtatcaccttggaatatgtttattttctctatccctcccactcactctttaatggtatacatatttcaagcatagagacgagaatagaaaaaatgtaataatcactaatgcacttactagctttattaaataatattcttccataatgctgtagattatttttttaaaaaaaattacagatgtggatgagtctccttgtatcatcatttccctcccttcttctaaagtgggaatccccatcatgatttagcattttactttcttatgcatgtttttatacttctaatctawacgtttgcatccatcaacataaacattgtacagtattactttgtag

SEQ ID NO: 2120 - DNA, 1304 bp, Homo sapiens
tgcattacagttcctgccatttaatatgtccttaagtgaaatagttttctagttattctagttttatttttctgttttaactttttttcttataacctcagtagtgcctgttcaaaagtaaagcaaaccatatataataacgtgatgcctgcaaattcgaacttgcgatgggatccagacttcatgatggattttattgagaatccctcagcccgcagcatcaactactcaatgctgggcaagatcctcagtgacaaygcggccaatcgctacagctttgtctgcaatacactcatgaatgtatgtatgggccatcaggatgctggcaggtgagatgggttaccctggaattcatgattaaccaaagagttgttgccttggtgcttctttgaaattgatgtcgttagtaagtgtctggactcacatttggctatcatttgctttttctaaatcttcttttattccttaatttacctctgcactatcttttaatttccttaacctgagagacagtgctttcttatttattactctggcatgagatgttttcaatatggccaacaattacatgatttattttcaaaaacatataataaaaatataaataagaatgcctgtattttgaaaaaaaccgtatttgggtccacctaaattacatgatgtctataaattttttgatgcccttaaaaatgtaaatcgtagctcagatttattcacgaaactaaaaatattctaattcgtgtatgtactgattattgtttgttgcttaacagcattgtcaaaaatatttgaagccattgttatcttcttctcaaggttctactaagttatttgacaaatgagtattttatctgtgaatctaagaaaatgacttgtttgatgttagtgaaatatatgttaattaagtatatcacaggtgagtatttctcttttgtacaaggttactttctgtgtcttctttttcttttctaggattaacgacatagccaatttctcctctgagcttacggcttgctgcactgttcttagttcagaatggctgggggttctgaaggctctttgttgttcttcaaatcacgtgtgggggtttaatgatgtactttgcactgtagatgtaagttttctttttcatttaaaaattgaactgtgcaattaaatatttagttagtgggtaatctttttgcttttggcttttatttaattgattcaactgaaatgttataaaatattttttctttctctgtccaaaagcagtaaaccacaatgacattgccagggattaaatacatgaaaaaaaatagaaa

SEQ ID NO: 2121 - DNA, 1275 bp, Homo sapiens
tgcatttttttttttaactcagacaaccttaaggtataaattactattatccacttttacagctgagcaaactgaggcttaacaagcataacagtagggagcacagctctgaccttgaaccactgcccacagtcaaccacgctgtatttgctgttacctctttttgtgggtagtttcatatgtaamatgatatagacttattgtatatttaccatatactagtaccatagtatagactacagtagataaatggccaacttgggtgcatgatcccctgcaatcaagttggagctattttaacttggtagttttcccaaaggaggcatcaggtgctaatcagcacatgaataccaaacttctgtgcaggcagtagcagagcggtagttaggagcacagcactgagatgggcttacgttctgttcaaatccaggctctgcccctcattagtggtgttaatgagggcaagctctagcactccagcgacagcacatatctgctcaaagaacaaataacatgtgcaaatagcccaagtatattgtattccaagtattctctctaagcctcaggttttttcatctgaaaaactagagtactaattcttactacccactcaagtagcatgtcaatactgagttattactacatgtcaagtttgaataaaaggtctatgctatggtaatacttcattcaaaacaatcttatgagggctgttttacagaagaaggcggcacagaggggttgggtaacctgcccaagtaagtggcaaacctgtaatgtgaatccaaagtccttttaataaattaaaatatacataggtaatttagaacacttctaggcacacaataatactagccagcatttggggagctcttttactgttgttgtatgtagcaagatagacacttagacttctcaagctcccagaaagggttttgccctgtagcctgaacaggctctcaggtcaaagatattactgtctcttgaccaccagagaaactctctggaggacatataacaaagtgaaactttgttttccaagtccttgagtctagagggtaccctttactgactatatcaagattcggaatgcctccaaagcaaaggccagtataccaaaagggcagcagaaacaaaatgatctgaagtccctgtactaaaggagcttatgatctagttaagaaagaaaaaagttaacagaatacttggactgtttgcacatactagagtatgaagctctgtggctctcaggctgagaactaaaaagagagatccaag

SEQ ID NO: 2122 - DNA, 1409 bp, Homo sapiens
tcatcctaagacccagaaatgctaawatgtactcaatccttcacagagtcatgctggatcttaccatggtctgtttatatccagtttacagtctatatgaaattgcaaataagacaggcactaaacaactggccagtgcggaactcagtttgagtgctcaaagttgcaggcacctgaaatataaatgtcatggtacactacttcttgctctgatggcttccccatcctggaagatgctctcagcaaaataactgtctcacagccagggtggcaaagccaaacaactctacccttaaagtttttccccaccccagctcctatctagagatggtacatttcccatactgcctccctttcctcttctgtcaattacaacctgattaacttcaagccaactaagctctccttccaatgtactcatataattatttatttataatctttctggttccaacaacaacaaaaataaggtgttttatggagatgcttaatatgaaattaattcaaatgaacttaaatttaaacaaatgaagcctgggaaaaagaatggtgggaaattaaaaaccatatgagaaattagttcaccaaatgcattcatccctatcagatggtgttgggccttaaggtggatctcaactccaacaggaaaacaagaaggcataatgatttggtgttgataaattcatagctggcctacagaacaccattcttattatgtagagtagaaataactttctcccatgagtcttaacataaagaaccaatgttgtattgaacacccaaagagtaggcacagtgaaaagggctgaatgcttgaagacaccaactcaaagcttaatccaggcaaagccattttacagaggcaggataagacaacataatggggtccaggcatgtggctcactttaaatattttcatcttactgctgtttcttcataattgttctatggaaacctttctgcctccttctccccagtgtactttattctaattatgaaaatttcataagtgttagacatactagctgtcttttattagcatactggtactgttgtttcttcttatacctggctgactttcctcactgacataacctgtggggctgctgctggcatttgaatttgcagccctccactttagctcccccaactttacagtgagctattcagaaatgtcagcaggcccagcgtttgattagcctcctaatggtttgatcaggccttcttcctggtcttcagccatgccttacacaggtcaatggccaattcctactcttgtctcacccctccctgggttgtacatttcacttcagaaggcagaaaaaaaattgttaaaataaaaacaaaaactgacatatgccttccaaaatgaattagtcagagaggaggccatatccatgactgcctaa

SEQ ID NO: 2123 - DNA, 1211 bp, Homo sapiens
ctgaacatctgctgtgctcaggggactggactggccccagagacatcccagtgtatgaggcatcccagagcctcctgtttgagacttccagggaaaccctgcctgggacccttaatacctttctaatgggaagtcagtggaattaaaaaacaatgcctattgtctattttgtgggagaaagaaacaccaagctaatatctattcatcccatgttaaaaacttctctgtccagaaatcaggcctacttgttttttttttttttttttgtttgagatgaaatttcgctcttgttgcccaggctggagtgcagtggtgtgatctcggctcactgcaacctccacctcccaggttcaagcaattctcctgactcagcctcctgagtagctgggattacaggcctgagcgaccacacccagctaattttttgtatttttagtagagatggggttttgccatgttggccaggcagatcttgaactcctgatctcaggtgatccacccgcctagaaataacaggtagtaaaataagaatgaaaccctctgaactctacctttgccttgcaatttcaaatttattacaatcaaaagaatacaaagcaagtgttatcacacacaaaactccatctatcacatacaaaagcatgggaacttgaacgtgcatgtgtgtgtttggtgggaggggtcagtggtctgggggctcccagaaggagaaatcaatgtggactggcagagtctcagaaaaccctggaggaagccatggggaagaggggtggttccagagaaaagtgggccatctggctttcctctacacacagtgaccacagagtcctcagagtttggcacagggcctggcccagagcagggctcagtgaatgtttgtggawtgaatgacccacgggctcgggtgattgatcagagaagcagaggctctgtgtggtagcggtggctggcacactgggcatagaacacagaggacccactgcaataatcccggggcctgcaagggcatcccaggctgacgatagacaagtctgggggagaaaagactctgaagtatggtacagagacatgagagtaggccctgcttaggagtctcactcagacagcctgtttgaaaaaggcctggctttcctgtggtagctgccacaatcatagtcacatgtgtgaacgctcataccagttatattgtgctaagtgctcactcttcccac

SEQ ID NO: 2124 - DNA, 984 bp, Homo sapiens
tattattttcttatttgtttgcaggaactctttgcatgtcatagatattactcttagtctataatataaattatagataattatttctagtaaatttgtgtgtcttttaaatttatttgattccttttgctgcacagaaatctttcatttttatagagttggtttatagagtttgagttggattttctttctttttctttttttttgagacagactctcgctctgtcgtctaggctggagtacagtggcatgatctcagctcactgcaacctctgcctcttgggttcaagcgattctcccaccttagcctcctgagtaactgggattacaggtgtgcaccactgtgcccaactactattttgtattcttagtagaaacggggttttgccatgttgtccagtctggtcttgagcttctgtcctcaaacaatccacccccctcagcctcccaaagagctgggattacaggcatgaaccaccgtgcctggccgagttggattttcttgataacttctgagttcttgcaaaagcctgttatggagcaaagataataaccctttcagtaaaggtgggtcttgctctctgagcatcatctgaagctgcaagtggtttgaggtcctgagactgcagccgaaggaggctacctggcatggggaggggagcgcctcagagggtaatgatggaggcagcaggggccccagtgatattttttgaacaaaacaagctgaactcctgggaacagttccctttggaggggcaaagcttcttaagaggccccatgggggaacctgagaggagctgccctgtgatacttggctgtctgggagcctgtaggagaagccgcctgtacctgcaactatcagtctctgcccttattctggctttggcagcatacactcatagccacrtgcagccattcccacccaaaagcatgcacatgtgaaacacacgagacaatgcacacacccacatgggcatacatgca

SEQ ID NO: 2125 - DNA, 481 bp, Homo sapiens
tgggcagccatgacaaatgagattgaagctcccaacactatttaaaacctcctctgctgattcttggtctttgaaaacagacaattattctcttaaaaaaaatcaaatttggacttacctggaacacagacacaygcaccccaactgccccccacccacccaggtaacatatatggtgcacatgcatgcacatacatgtgaacacacatgttggcacccatgatcatccatggctcacttgtgtatccccagtcttcagcccaggagccaacgcaaggtgagcaacacttagttcttcttgactgggtgactgtatcttgatcttggaaacaggtggaagtttctgcaagaatcccaagcatgacggctagagaggggcaggtcctgcatcctgcctctagctcagaagccagtgacaagggggctatggctactgcacgtactttccagcaaggagcagggatttggagtcacccagttg

SEQ ID NO: 2126 - DNA, 1309 bp, Homo sapiens
accatcagaacaagacttcaaaattcactttcctttgaaacattataggctgtgttgaaatttgtaaccctcttaggaaaatataaaaacaattgtctgttctgagaaagggagttgggttttaaattttctctcctgaggtttgacacttattcactataacataaatttgaaaaccatttagaaaggaaagtgactttgtgatttttaaaaataaaacccttgaaatttctcataaatattactggaagcctttaatgccatagtaagagggaatataaaatgcttaaactggaaagtgatatgtcaacatattaaaatggtccattcgatactacattagggaccagctttagtgatttatgaaggagcatttaggtctcaaagtaattcccatagttgggtaaggctagaagccaggcctcttggtagattcttcacagtatgagagcagtgcaaaggacattccagaggcagtttttatagacacattctgcaaaatcatccagaccaaaacaaaataaataatttagaacaatttcaagagtatgagattatccagccagtagtccttcttctataaccttccattttagggcctgcatacttgactctcacttctttttcttaaaaatgggctcaaaagcaaataatcagtcttgggtcacatggccaggagaagtaagaagagtgaaggttattgaaggttacagaaaatgcaggaagagtcgagggtgtggcagagtacagagactaactcctcaagtcccttagcccatagagatgccttagaattctgatgtgcctgaaagttgtgaatctttaggatatcaacatccatgtagatgattcatccaatgccatagcttcttaatttatctaacttttcttttctgatgatcttgtcctgtgtcctgcctcagccacccactcatgatcacaaccgaaacaggaattcacagatttcagtgtgaatttgaatttgagggatttctgaaacttggatggtaaaaaattacattataattttcatgaatttctaactgaaatttggcattttaaaatatatgaatttaggtcacatattactctgtcaccaataacaatcaaacatattctcatatatttcagctgttgaagtattacttcaataatacatttcttaaatctgctcctagatcctgttatttaatgtgttaataagcatactatttgaatgtgttagtaacttacatttggtttcttgatacttttataaatgaatttcaawacaataggtttttaaaaaactctatgtattatattttat

SEQ ID NO: 2127 - DNA, 641 bp, Homo sapiens
agataatgagaggtaaggggaaaatcagaaagttgagattcactcaaattctcatttttttttaattagaaagagaagataggatttcaccttgcaagacaatagagatgatgtcatctgtatttactctgttccctttcttagctttagatcacttgatgtgctcaatttatggtaggtggcagagactgggaatttaggatatttttcccccttttagttggaagagttgaggaggagagaactggccatagctcattggacatttatagactgagaacaggctggaggaaaaagagaaagctttgatacccaggaatatttattgaagagaattactttgtaaaaagatcactgaaacatgactgtttattatgtgcaaggcactgcatgcagtaacgcaatgaacattctctgaaagaagaaaccatctttgtaattcaaactstactgcagtcaagtttaatgaagtgactcttatttaagtccctattacatgatccatgtaggaaatttctgttaggatttggtactagcattaactgtgtcttctttgagaagcatcacctgtcttttccttttatagaataatactagataacatccttagacatctcccatgtgccaggcactatgcccaa

SEQ ID NO: 2128 - DNA, 608 bp, Homo sapiens
cttttatctttatttatttwtttttttttgagacagggtctcaccccatcacccaggctggagtacagtggtgcaatctcagctcactgcaacctctgcctcccaagttcaagtgattctcatgcctcagcctcccaggtagctgggattacaggtgctcaccaccacgcctggctaatttttgtatttacattagagatggggtttcactatgttggccaggctgttctcgaactcctgacctcaactgatccgcccaccttggcctcctaaagtgctgggattacaggtgtgagctactgcgcctggcctatttttttgtttatttttagaaacagggtctcgttatgtcacccaggctgtagtgcagtggctatgaacagcctcaatcattgggcactgcagccttgaactccttagctcaagagatcctcttgcctcagcagaactacaatacaagcatccgtcgctgcacctggccactttattttaatagagtttcaagctgttattctctagtgctgcagaaaaaagtctcagagaaagatgttctcagacctaaaaatgctccagtagttagctgctgggaacaggcccccaaatctggc

SEQ ID NO: 2129 - DNA, 706 bp, Homo sapiens
tttgagctgcagggctgtggtagccaaaagcaaatgcaaggtctgatctttcagaatgccaatttataatctcagtagactttagagtttcactaagcacaagataaggaatttcttaagaaactttcagaccctgagaattcaaaaaattttatatgagagaattgtaaggacattgactattccaaaccacagtcccctgtgagtctcacttgtcttctaaacctgatttattctcttgctaaaagatgttctaattttctaaaatgagaaaaataccgtccagaaagaataaaagcaaattatccttatggcacacgtttcctattctttgactttgtctttttttcccctagaaatataattaaagtyatatttcagcatgcgctgtgttcatttacaaagtcaaacctaagatatatgacacataattaaatacttttaattaatatcagccaaaatttggataatacatggtagaaatcaattcttagaaaaagccaaatacacaaaaatatagttttagttgcagctatgaagataaatatatgggtacactgatatttattgaattgaatgtagtagtttatacagctgacactgttcctataatttccccagatgggcactaaagtgatgcaaactaagtgatttttagattatatatattcctgaaataatgtatagataagtatgaaatcttacc

SEQ ID NO: 2130 - DNA, 1411 bp, Homo sapiens
tgagtctcacacagtttaaacaacttgatgaactagatggcagacatttcattttaggcagctttatttgattccaaagctcaatttcattaggctgcccccatttcctaagatgaggtgcttctatcatcaagcttatgagttttcccgaacaaggtatataggttctatatcatgtctttctttcaaataactccctgcacatccacatttacattctacctctatctagcagttggggaaagaaatatctttagcaattctaatatttcaggactctgtattagtcagaagtgaaagttgaaataattaaatctagatgacraagaggaagaggaggagaaaaaaggaggaagaggaggaggaggagcagaaggaggaggaagagagttgggggaggagagagaaaagccaataaaaattaaaatttccaaaatgtaaaatctatttctgccttttttttaaacacttgtgtggctgtgggcaagtgatttaattgttttcaaacagtattagcatatttaaattgaataggattgcgtagttaacctcagaactcttaatttttaaatcccaaaattaagtatttctcaaacaataccacaatgtgtggatacaaatcatttagcccttccaaatgcttgaaataactccctttgctcaaaatgtgttatgactaaaaatgcaaactgcaaacaacccagaacaaactgagccagggttttactcccagaaattcaaatcatctatgtattgacacagaaaatatggagctaggtaatcagaaacctaaagaagcaatctattactgtctatgtgtctaaatccagaattatttttatttctagcctcctaaatatctgattatttcatatttctttaatttcataggattttcttttatattttcaatacatttttattaacttgttgtaagcaaagatacactaacattaccagtgcatataacaattagaaattctgtgaattgagtataaattccttatttttattattttagtctttactcaatatcagcatcaggaataaacttccacttatcctcattattgccccaccattcagaaagatgctctttctaatacaggtacattttctttcaatatctgtctgagttgtcctaggatactatttaaatgctattttaatactctcttgatcatatttcagaatatgttatcatgtatttgcatagtgtaattttcagcatatagtaaaaaaatcagcttacagtggaaaaatattaagtgacaatagaaaattaaaataaaagcagtattaatcacaagaacctttacacgtgaaactttttttttattattatactttaagttctgggatacatgtacagaacgtgcaggttttttatgtaggtatacatgtgccatcg

SEQ ID NO: 2131 - DNA, 1411 bp, Homo sapiens
tgagtctcacacagtttaaacaacttgatgaactagatggcagacatttcattttaggcagctttatttgattccaaagctcaatttcattaggctgcccccatttcctaagatgaggtgcttctatcatcaagcttatgagttttcccgaacaaggtatataggttctatatcatgtctttctttcaaataactccctgcacatccacatttacattctacctctatctagcagttggggaaagaaatatctttagcaattctaatatttcaggactctgtattagtcagaagtgaaagttgaaataattaaatctagatgacgaagaggaagaggaggagaaaaaaggaggaagaggaggaggaggagcagaaggaggaggaagagagttgggggaggagagagaaaagccaataaaaattaaaatttccaaaatgtaaaatctatttctgccttttttttaaacacttgtgtggctgtgggcaagtgatttaattgttttcaaacagtattagcatatttaaattgaataggattgcgtagttaacctcagaactcttaatttttaaatcccaaaattaagtatttctcaaacaataccacaatgtgtggatacaaatcatttagcccttccaaatgcttgaaataactccctttgctcaaaatgtgttatgactaaaaatgcaaactgcaaacaacccagaacaaactgagccagggttttactcccagaaattcaaatcatctatgtattgacacagaaaatatggagctaggtaatcagaaacctaaagaagcaatctattactgtctatgtgtctaaatccagaattatttttatttctagcctcctaaatatctgattatttcatatttctttaatttcataggattttcttttatattttcaatacatttttattaacttgttgtaagcaaagatacactaacattaccagtgcatataacaattagaaattctgtgaattgagtataaattccttatttttattattttagtctttactcaatatcagcatcaggaataaacttccacttatcctcattattgccccaccattcagaaagatgctctttctaatacaggtacattttctttcaatatctgtctgagttgtcctaggatactatttaaatgctattttaatactctcttgatcatatttcagaatatgttatcatgtatttgcatagtgtaattttcagcatatagtaaaaaaatcagcttacagtggaaaaatattragtgacaatagaaaattaaaataaaagcagtattaatcacaagaacctttacacgtgaaactttttttttattattatactttaagttctgggatacatgtacagaacgtgcaggttttttatgtaggtatacatgtgccatcg

SEQ ID NO: 2132 - DNA, 1273 bp, Homo sapiens
caagaagtagtaggatatctaactccagagcctaagtgtccttaaccactgagcagcactgccttctttataatcagtatccgctaagctacagttaagataaatagccctgtaggaaagttaagaaccctaacaaggacacatgactagttcttgttttaggatgtgaccacccacagtgaagctctaggtctcttaagtctaccccacgtcagaattgtagccctaaagtgaacttaggaccttaggagccaggggaaggagtagaagttgcaggaatagtcacaccctgtagccttgatggcagctccatgggtgatttccaccagcctagctgcatgtatttcactactttagagacttatgttgcagtgatatgtcatcagtggactgttaggtgctggtttcatgttgtggtgtctgactacttagtagggagctaccaatgacttacagttagatgaatgagatgtgacaaataatcattttactttcyctttggttaaagctgaaggaattgaagaatctgcagcagcaatacttacagattaatcaagagatcactgagttacatccactgaaggctcaacttcaggagtatcaagataagacaaaagcatttcagattatgcaagaagagctcaggcaggaaaacctctcctggcagcatgagctgcatcagctcaggtactatatataatccctccttttcaactcttttcattttaactttttattttgaaataattgtagatttgggaaaatagtgcagagagcttctatgtacccttcacccagtttcttccagtggtgacatcttacataactgtagcacagtatcaaaaccaggaaactgccattggtacaattcgcggaccacattcagattccaccagttttacatgcactgatttgactatctgtgtgtgtggttctatgcaattttgtgacatgtatatttaagcaccaccaaaaccaaaatacagagctactccatcaccacaaatacgtcctttgtgctactagtttatagtcacattcctcccttccctaccttcctcacatccttaacccctagcaaccactaatctgtgttcaattttgtcattttgagaatgttttctaactggaatcttgcagtatataaccctttgaaattggcttttttcatgtgccataatgcccttgagatccatcagttttgttgtatgtatcaatagttcattcttttcagtataaataatgtttcatattatgaatataccactgtatt

SEQ ID NO: 2133 - DNA, 994 bp, Homo sapiens
tcctaaagaattcatctgtttttttttttttctataacagtttaatctttagccatttacatttaggtttttaatatattagatttccaatttctaactaatttgcctaaatagaaaaactgattgtttattcttcccatgtgaaactgtcattcccttccattctccagcaatgcacaatgtcatgtctgacatacttcgcattcatcttcaaggtcagcagtgtcttcactgtatctgagccatattttttccatataaaatttgggaatctacttgtcaatatcctcagagaaaccttaaaaaaacacacaaaacaaagaaaaaacctcccttgttgggagtttggtattttgttgaattatagaacaatttaaagatgagttcattacggtgttcagtatttcctccacgattctgcgatttatgtttctagttttatggcagcactagagatctagtgtaatgtgaagtggtaagagatagtgctcttgtcatatttccagtgtttaagcatctcaattttatcatttttcctttgagtatgattttgccaaaaagttttttggacttaccttttgtaaggtaacggatgctcattttattactggtttgcaaatggactatttatttatttattatttacttttggagacagagtcgcactctgtcacccaggctagagtgcagtgrcactatctcagctcactgcaacctccgcctcctgggttcaagcagttctcctacctcagcctctcaagtagctggaattacagatgcctgccaccacgtccagctaagttttgtattttttagtagagatggggtttcaccatgttggccaggctgctctcaaactcctgacctcaagtgatccacctgcctcggcctcccaaagtgctgggatgacaggcatgagccatctcacccagcccaaatgagctttttaaactttgaatgaatattaaattgtatcaagcctatgattcttttt

SEQ ID NO: 2134 - DNA, 572 bp, Homo sapiens
  misc_feature (1)...(572): n = A,T,C or G
gcaagataaatgtatgcaacatttaacaaktggctacaaacttttaataacaccttgttcatatgttcataattttattttggtgcctgaccagcacattttttttttttttaagacagagtctttctctgttgcccaggctggagtgcagtggcgtgatcttggctcactgcaacctccacctcccgggttcaagcgattctcctgtctcagcctcccaagtaactgggactacaggcacgcaccaccacgccctgctaatttgtgtatttttagcagagacatggtttcaccatgttggccaggctggtctcaaactcctgacctcaggtgatctgcccgcctcggcctcccaaatgctgngatataggagtgagccactgcgcctggccctgaccagtacttgacacacggtgagcattattagtatttgctgaatctgttcagtatgaaagataaatctggaatttccaattttgctttaagtctttgcataaatgatcttgaagttactaaaccccaggcaaaaatgatatagttcatggtctgttcattttgaaaaaacaaacaag

SEQ ID NO: 2135 - DNA, 991 bp, Homo sapiens
aggaaaaaaataaccacatatacaagatgtggagaacataggagaatatagtacaaagttctaacattggcatgccaggaagcagtggataagagcgtagggtagagcttgagaattttttgtaactgataagacaccaattcacagatttaagactcrgtcaattccatgcagaaaagaatgaaactcatgcttagacaactggttatgaaagtgcagaaacctaagataaagagaaaatcttaaaacagtcagagaaaattctcttcaaaggagcaactaacaataggctgcttaacagcgtgtcagtaaagggtagaccgatacaggtttaatatggtcaaagaaaattagtgctaacctagaatttacaataacaacaaagagtgccactcaagaacaaatttggtccctgttcttagtctgtgatcccctataaagttctggacactctgggagaggcttgaaaaatccacgttgcttgcattttaagagtaatggataaggtcataagttaatcagacccatgtttgagaaagttgtagaacaaggccctgctatggcacacagagttggtgaaaagggatgagagggtacctgagaggtgggaggtggctgacagagaccatccagccctaccttaaaatcttccctgctgcgaatatagcttgttggtggaaaatacctgctttctcctttccttgactcctcatcacttggtacatcaaggaccagttccttatcccttaccggcagggttgacattcaaaatatttaataatgctaagtaccagtacgtatcaatcagaaaagacacctaatgtaagtccagatcctggctgctgcataggatcaagatcctgggggccccctgtggtataaattgttaaacactttagtagctggattgtggaaaagccccagaggaggaacctgatccgctaggataatgcagatattcaaggcagaggctatttagcaacaagtattt

SEQ ID NO: 2136 - DNA, 2515 bp, Homo sapiens
acaacaatgactgtctgtgacttgaaagcagcaaaagatctttcttgtgctatcctgtcaccatgaagtgtgctctccatttttaaattcagactcacagtaaacacattaggttgtagtccagccttgattatttggctccttagagttaaatgtcagaggttttggggtctttttcacgcttacctatttcacttccagggtttggcctctcagatgtgccactggtagcttctaatgaaaagaaatgaaaacaatatttgtgtaaaggtattcaactgcattcaataaacttataatatcygaattccaaagtatgacacatctaaacctccagagtaacttctatcatctctgctgccttaaatagaactatatggatttatattgcctctgtaggtactggggtaatagcttgaatgttaaaaggggaatatttctggactctgagcctctttttctataattttagtataaggtttggccccaggataaatgatacaatttttataaatacaagctttgtttaacaaatatctctatgaaaaggcaaaagcccaatgtagatttgtgggaactcaggagttgccaattctttggccaggcgcagtggctcacgcctgttatcccagaacattgggaggccaaagcaggcagatcacttgaggcccggagttcaagaccagcttggccaacacagtgaaaccccatctctactaaaaatacaaaaaaaaaaaaaaaatagctgggtgtggtggtgcacacctgtaatcccagctacttaggtggctgaggtaagagaattgcttgaaccctggaggtggaatttgcagtaggctgagatcacaccactgcactccagcctcggcaacagagtgagactgtctcaagaaaaaaattatatatatatatatttgttatttttttctcatttctcattttttctcatgtatgttaatatatgcatatatatttatgtgtgtgggtatatatatatatatatatatatatatatttgccaattccactttcattggttatgcttccttccatggaagttatatcttctgagaataaaaaggaagaaagtagtgagggctaacagaaaatcatcaaaagatataatgtaccattgctgcagttagcccccaaccaaaaaaaaaaaaaaaccaacagcatctgtttcctcattgactcacctgtgttgaaactgctaggtgagatggtgttgccagagaccactccagtagtacctaaaaacaaaatggaagggtactactatatcaattttattcttataataaaagcacattctataatagaatgaggcaacctcagaattcttcattatgcaaaaagaacattttcagggatagcttgttccaaagttagtttctgtgtttgcaaatgtaatgctccattctcactataaacttggtgggggaagggtgcaatgtgaggtggtggtggagtctcaatgagaacgtctctttttctgggctcaatgtcagtaaaacaaaggtactttatttacctagttgaatgctagtgacttggctacctgatacccctagaagaaggaacaaagcaggactgattacctgttgaattttcatttgggcaaaatattggtgttgtagaaattgtagtgttctagatgagttgaggcatgacaaaagagtgtagtggtatagtgtagtggtgatttagtatcatggttaagaggatggattttgaagccagagcgcctgagttgaaatctgttgtttaatcgctgcgtgatcttcattcagttagtgaatatcttcgagccataggttttctcacctggaaagtctgtgagaacaatagtgcttacctcacaatttgggatgagggataaaagaaataataatgagaaaaatgtgtagtagtgcctggaacatagttcatgctagaaagtgttagctactattgcttttattttaagtgaaaagtgagcaggttaggaagcttgtgtgctcacctgtattcattccacttcctgtggtcccagtgcctctaaaggacgtcgtagcttcttagagaggaaaggtaggaaaatatgaggtgagaggaattagcattgtgaggaaagtgaaggatgcactattcttaataacagagccatgggaggcactttactactaaactgttctgtggaggactctcaccagctggctggctcacctgtatttgaactcccaggtttagatgtgttgccagaagctaccctagtctctctctgtcacccaggctggagtgcaatggtgctatctctcactgcaacctccatccaggttcaagtgatcctcctgcctcagcctcctgaatagctggaattacaggtttatgccaccacagctggctaatttttgtatttttagtagagaagaggtttcaccacgttggtcagactggtctcaaactcctgacctcaggtgattcacccacctcagcctcccaaagtgctggaattacaggtgtgagccaccat

SEQ ID NO: 2137 - DNA, 2515 bp, Homo sapiens
acaacaatgactgtctgtgacttgaaagcagcaaaagatctttcttgtgctatcctgtcaccatgaagtgtgctctccatttttaaattcagactcacagtaaacacattaggttgtagtccagccttgattatttggctccttagagttaaatgtcagaggttttggggtctttttcacgcttacctatttcacttccagggtttggcctctcagatgtgccactggtagcttctaatgaaaagaaatgaaaacaatatttgtgtaaaggtattcaactgcattcaataaacttataatatccgaattccaaagtatgacacatctaaacctccagagtaacttctatcatctctgctgccttaaatagaactatatggatttatattgcctctgtaggtactggggtaatagcttgaatgttaaaaggggaatatttctggactctgagcctctttttctataattttagtataaggtttggccccaggataaatgatacaatttttataaatacaagctttgtttaacaaatatctctatgaaaaggcaaaagcccaatgtagatttgtgggaactcaggagttgccaattctttggccaggcgcagtggctcacgcctgttatcccagaacattgggaggccaaagcaggcagatcacttgaggccmggagttcaagaccagcttggccaacacagtgaaaccccatctctactaaaaatacaaaaaaaaaaaaaaaatagctgggtgtggtggtgcacacctgtaatcccagctacttaggtggctgaggtaagagaattgcttgaaccctggaggtggaatttgcagtaggctgagatcacaccactgcactccagcctcggcaacagagtgagactgtctcaagaaaaaaattatatatatatatatttgttatttttttctcatttctcattttttctcatgtatgttaatatatgcatatatatttatgtgtgtgggtatatatatatatatatatatatatatatttgccaattccactttcattggttatgcttccttccatggaagttatatcttctgagaataaaaaggaagaaagtagtgagggctaacagaaaatcatcaaaagatataatgtaccattgctgcagttagcccccaaccaaaaaaaaaaaaaaaccaacagcatctgtttcctcattgactcacctgtgttgaaactgctaggtgagatggtgttgccagagaccactccagtagtacctaaaaacaaaatggaagggtactactatatcaattttattcttataataaaagcacattctataatagaatgaggcaacctcagaattcttcattatgcaaaaagaacattttcagggatagcttgttccaaagttagtttctgtgtttgcaaatgtaatgctccattctcactataaacttggtgggggaagggtgcaatgtgaggtggtggtggagtctcaatgagaacgtctctttttctgggctcaatgtcagtaaaacaaaggtactttatttacctagttgaatgctagtgacttggctacctgatacccctagaagaaggaacaaagcaggactgattacctgttgaattttcatttgggcaaaatattggtgttgtagaaattgtagtgttctagatgagttgaggcatgacaaaagagtgtagtggtatagtgtagtggtgatttagtatcatggttaagaggatggattttgaagccagagcgcctgagttgaaatctgttgtttaatcgctgcgtgatcttcattcagttagtgaatatcttcgagccataggttttctcacctggaaagtctgtgagaacaatagtgcttacctcacaatttgggatgagggataaaagaaataataatgagaaaaatgtgtagtagtgcctggaacatagttcatgctagaaagtgttagctactattgcttttattttaagtgaaaagtgagcaggttaggaagcttgtgtgctcacctgtattcattccacttcctgtggtcccagtgcctctaaaggacgtcgtagcttcttagagaggaaaggtaggaaaatatgaggtgagaggaattagcattgtgaggaaagtgaaggatgcactattcttaataacagagccatgggaggcactttactactaaactgttctgtggaggactctcaccagctggctggctcacctgtatttgaactcccaggtttagatgtgttgccagaagctaccctagtctctctctgtcacccaggctggagtgcaatggtgctatctctcactgcaacctccatccaggttcaagtgatcctcctgcctcagcctcctgaatagctggaattacaggtttatgccaccacagctggctaatttttgtatttttagtagagaagaggtttcaccacgttggtcagactggtctcaaactcctgacctcaggtgattcacccacctcagcctcccaaagtgctggaattacaggtgtgagccaccat

SEQ ID NO: 2138 - DNA, 2515 bp, Homo sapiens
acaacaatgactgtctgtgacttgaaagcagcaaaagatctttcttgtgctatcctgtcaccatgaagtgtgctctccatttttaaattcagactcacagtaaacacattaggttgtagtccagccttgattatttggctccttagagttaaatgtcagaggttttggggtctttttcacgcttacctatttcacttccagggtttggcctctcagatgtgccactggtagcttctaatgaaaagaaatgaaaacaatatttgtgtaaaggtattcaactgcattcaataaacttataatatccgaattccaaagtatgacacatctaaacctccagagtaacttctatcatctctgctgccttaaatagaactatatggatttatattgcctctgtaggtactggggtaatagcttgaatgttaaaaggggaatatttctggactctgagcctctttttctataattttagtataaggtttggccccaggataaatgatacaatttttataaatacaagctttgtttaacaaatatctctatgaaaaggcaaaagcccaatgtagatttgtgggaactcaggagttgccaattctttggccaggcgcagtggctcacgcctgttatcccagaacattgggaggccaaagcaggcagatcacttgaggcccggagttcaagaccagcttggccaacacagtgaaaccccatctctactaaaaatacaaaaaaaaaaaaaaaatagctgggtgtggtggtgcacacctgtaatcccagctacttaggtggctgaggtaagagaattgcttgaaccctggaggtggaatttgcagtaggctgagatcacaccactgcactccagcctcggcaacagagtgagactgtctcaagaaaaaaattatatatatatatatttgttatttttttctcatttctcattttttctcatgtatgttaatatatgcatatatatttatgtgtgtgggtatatatatatatatatatatatatatatttgccaattccactttcattggttatgcttccttccatggaagttatatcttctgagaataaaaaggaagaaagtagtgagggctaacagaaaatcatcaaaagatataatgtaccattgctgcagttagcccccaaccaaaaaaaaaaaaaaaccaacagcatctgtttcctcattgactcacctgtgttgaaactgctaggtgagatggtgttgccagagaccactccagtagtacctaaaaacaaaatggaagggtactactatatcaattttattcttataataaaagcacattctataatagaatgaggcaacctcagaattcttcattatgcaaaaagaacattttcagggatagcttgttccaaagttagtttctgtgtttgcaaatgtaatgctccattctcactataaacttggtgggggaagggtgcaatgtgaggtggtggtggagtctcaatgagaacgtctctttttctgggctcaatgtcagtaaaacaaaggtactttatttacctagttgaatgctagtgacttggctacctgatacccctagaagaaggaacaaagcaggactgattacctgttgaattttcatttgggcaaaatattggtgttgtagaaattgtagtgttctagatgagttgaggcatgacaaaagagtgtagtggtatagtgtagtggtgatttagtatcatggttaagaggatggattttgaagccagagcgcctgagttgaaatctgttgtttaatcgctgcgtgatcttcattcagttagtgaatatcttcgagccataggttttctcacctggaaagtctgtgagaacaatagtgcttacctcacaatttgggatgagggataaaagaaataataatgagaaaaatgtgtagtagtgcctggaacatagttcatgctagaaagtgttagctactattgcttttattttaagtgaaaagtgagcaggttaggaagcttgtgtgctcacctgtattcattccacttcctgtggtcccagtgcctctaaaggacgtcgtagcttcttagagaggaaaggtaggaaaatatgaggtgagaggaattagcattgtgaggaaagtgaaggatgcactattcttaataacagagccatgggaggcactttactactaaactgttctgtggaggactctcaccagctggctggctcacctgtatttgaactcccaggtttagatgtgttgccagaagctaccctagtctctctctgtcacccaggctggagtgcaatggtgctatctctcactgcaacctccatccaggttcaagtgatcctcctgcctcagcctcctgaatagctggaattacaggtttatgccaccacagctggctaatttttgtatttttagtagagaagaggtttcaccacgttsgtcagactggtctcaaactcctgacctcaggtgattcacccacctcagcctcccaaagtgctggaattacaggtgtgagccaccat

SEQ ID NO: 2139 - DNA, 2515 bp, Homo sapiens
acaacaatgactgtctgtgacttgaaagcagcaaaagatctttcttgtgctatcctgtcaccatgaagtgtgctctccatttttaaattcagactcacagtaaacacattaggttgtagtccagccttgattatttggctccttagagttaaatgtcagaggttttggggtctttttcacgcttacctatttcacttccagggtttggcctctcagatgtgccactggtagcttctaatgaaaagaaatgaaaacaatatttgtgtaaaggtattcaactgcattcaataaacttataatatccgaattccaaagtatgacacatctaaacctccagagtaacttctatcatctctgctgccttaaatagaactatatggatttatattgcctctgtaggtactggggtaatagcttgaatgttaaaaggggaatatttctggactctgagcctctttttctataattttagtataaggtttggccccaggataaatgatacaatttttataaatacaagctttgtttaacaaatatctctatgaaaaggcaaaagcccaatgtagatttgtgggaactcaggagttgccaattctttggccaggcgcagtggctcacgcctgttatcccagaacattgggaggccaaagcaggcagatcacttgaggcccggagttcaagaccagcttggccaacacagtgaaaccccatctctactaaaaatacaaaaaaaaaaaaaaaatagctgggtgtggtggtgcacacctgtaatcccagctacttaggtggctgaggtaagagaattgcttgaaccctggaggtggaatttgcagtaggctgagatcacaccactgcactccagcctcggcaacagagtgagactgtctcaagaaaaaaattatatatatatatatttgttatttttttctcatttctcattttttctcatgtatgttaatatatgcatatatatttatgtgtgtgggtatatatatatatatatatatatatatatttgccaattccactttcattggttatgcttccttccatggaagttatatcttctgagaataaaaaggaagaaagtagtgagggctaacagaaaatcatcaaaagatataatgtaccattgctgcagttagcccccaaccaaaaaaaaaaaaaaaccaacagcatctgtttcctcattgactcacctgtgttgaaactgctaggtgagatggtgttgccagagaccactccagtagtacctaaaaacaaaatggaagggtactactatatcaattttattcttataataaaagcacattctataatagaatgaggcaacctcagaattcttcattatgcaaaaagaacattttcagggatagcttgttccaaagttagtttctgtgtttgcaaatgtaatgctccattctcactataaacttggtgggggaagggtgcaatgtgaggtggtggtggagtctcaatgagaacgtctctttttctgggctcaatgtcagtaaaacaaaggtactttatttacctagttgaatgctagtgacttggctacctgatacccctagaagaaggaacaaagcaggactgattacctgttgaattttcatttgggcaaaatattggtgttgtagaaattgtagtgttctagatgagttgaggcatgacaaaagagtgtagtggtatagtgtagtggtgatttagtatcatggttaagaggatggattttgaagccagagcgcctgagttgaaatctgttgtttaatcgctgcgtgatcttcattcagttagtgaatatcttcgagccataggttttctcacctggaaagtctgtgagaacaatagtgcttacctcacaatttgggatgagggataaaagaaataataatgagaaaaatgtgtagtagtgcctggaacatagttcatgctagaaagtgttagctactattgcttttattttaagtgaaaagtgagcaggttaggaagcttgtgtgctcacctgtattcattccacttcctgtggtcccagtgcctctaaaggacgtcgtagcttcttagagaggaaaggtaggaaaatatgaggtgagaggaattagcattgtgaggaaagtgaaggatgcactattcttaataacagagccatgggaggcactttactactaaactgttctgtggaggactctcaccagctggctggctcacctgtatttgaactcccaggtttagatgtgttgccagaagctaccctagtctctctctgtcacccaggctggagtgcaatggtgctatctctcactgcaacctccatccaggttcaagtgatcctcctgcctcagcctcctgaatagctggaattacaggtttatgccaccacagctggctaatttttgtatttttagtagagaagaggtttcaccacgttggtcagrctggtctcaaactcctgacctcaggtgattcacccacctcagcctcccaaagtgctggaattacaggtgtgagccaccat

SEQ ID NO: 2140 - DNA, 533 bp, Homo sapiens
tcagactgcattcagtaagtcagttagtagccataagattgattgaccactgcctggagaaattaagaattatcctttgcggaggattgtaaaaataggatatgcctgttgggaacagtttgcttgaagcaggtggacgtgattttattcaccttarggcaacataaaatcttctataattcagtcactctgaaatcctaatgccaattacagtactggccacctggtggttatctataaataacagatggttatattttgccaaatttaattaccatttatcatttatgtcaacggtttgtcacggtccattgggagaagagaaatctgtaagtacacagttttgctctactttaatccaaatttgctctcattcctgtatttgaatagaagtctaaacttggtttgtttatgtagcctggagacatatggactgccaattgccacagaggtacctgtactgatgcaaagactatagactgtaaacctgaggagtgcccttctccacccacatgcaaaaccggcgagaagct

SEQ ID NO: 2141 - DNA, 588 bp, Homo sapiens
tcaaatcactccaccttcccagcacattgtttgtcaataatcatttacaaactgactgatagagaaatgccttccctgttgctgggatgaggcacatgacaygcccctttgaaagtcaattccatggacagttagcatttgctcttcactcctgcacccatggcgtggctgggcttaggctgatctagtctggccttgactccaggctaaggatgggaaccatgcctgctccacacgcctctcatcccacagccagagccgccgttccctggggcacgtgcatctcgtggggaaaatcaagagccttagagggcaggcctggcagtgcccacacattccaggcttctgtttgtgccgtgtctgtgaaaatctcgttggcagaagcaagtcacccagccacgagcaacacctatgggatggataagtccatccaccctccctcaggccctggcaaggttgtggctatgtcatactcttacggggggagtgaaaaattgaggcccaacattaaatcacccaggcaagaaatgtcagcctctgtccccacgctggaatcatttttcaccagcgggtttgcctgaattccct

SEQ ID NO: 2142 - DNA, 315 bp, Homo sapiens
aatggtttgtgttctttgcaatataatgtggggaaatcgcacaggctttgctccttcttgacctttgtgagcctcaattttcacagctataaaatggagataatcctaaaccctgtaaatttgtcatgagaattagaaccgacagatgtacagactcagctcactgcttggcaacacatcactggcactaagtaaagaatggcagctattatayatatattttagtctttgtgctgtgtgagaaaaaccacaaattggaactaaaatcatttaacgccctttttgcatgaaaatgtagctactgacccaccaact

SEQ ID NO: 2143 - DNA, 652 bp, Homo sapiens
tgaccaaggtcacatagaccatgagggkcagagacagcactgaagcttaagggtctcctttagatctcatacacataactttcctgctatgctggttgtcatacacttaccatcttaccagtcagaattctcagtaaacagctttctgagtacctgatagaaaatgttagtacagagccaggttggtgcagtccttggacaccatcctcacccttcctagtgtccccagtctctaactctaccggaggtcttcctccctgagaagctatactctcagaaactctccatctgcccagtccttcattccaactggtaccttctaactgggacaatggtctccattagagaataggtaaaggttaatcttatcaaagttattcacacacatgtgaattctaggttattcatgtgtgtgagtgacttcgtaggataactctatcagagagtacttgcatttcagaagagggttttgttaactcaaatgaatcatacaggaaaggattttgttgttatttggttgcttttgtggtgcctgtggtataaagagcacagcatatggagtcagaaagaagctgaaatcctagctctgtcaatatcaggtatgtaaaattgtgcaaataactcaatattctgaatctctggttcctcatct

SEQ ID NO: 2144 - DNA, 538 bp, Homo sapiens
tgtcataacaacaactcttaaataacagtggcttctttatggcaacaatttaattctgagtcactctatatattaaatgtgaatcaaaagacagttcttggtcatcatgtcatttaaagtccagctgatgaagattccatcacaataattatttccacagtctccgtagtagtggtaaaagaacaaggcaaattatgttccgactcttaaagcttccacctatgtataacacatatcacctctgcttatacttcattggccaaagcaagtcacgtcacattggtcatgtctaatttttaaacggatggggaagaacagatctaacatgtatggagaagatgaaccagaatacttataagtggtgctmatgacctacatagaatatggtcagtggttgaaatgttggggtgcaatgtaatttcctttcccttttgacattattgcatatcctagtcttggttaaataacttttacaaattgtcatcatcatcatgattatcatgttgtaatgaggtattactctacgctaggtactgtc

SEQ ID NO: 2145 - DNA, 664 bp, Homo sapiens
ggttaataattagaggggatgccagcatgcacacagctcctccaagatagccagttaagatgatgtgtgagtaatagaaaaatcatttctatttttggaatggtttatataatttttcaacagaaaattacaggattagaaggaacctaaaaggatgatatggtccagtaccctgacgtcaataaatgagtggctatttttcctgatttgctcttttcataaaattgttgcagaaatgaaaactgcttgccttctctttttgccattccattattttaaccatctgtgggtcaaggagttattcttaattattactacgtttagtttctttgttgaaatagagaagagttatagttagtatcttttaaattaaacattttttgagtactagctcttactctagtttcttggtaccatatctttcagctttctctcaaaaggtattttcattcttatcaatgcttttcctatcattctggatacttcgttaagtttatcttcatttctctaagaagtgtaaggtgtagtggaagtattaatttagtatwcttgtggtttctatttgcctgttttccctttgagagcagtacactccttttatttctgaatactctgcatcagagccccttgtctggcatgtagaatatgttcaataaatgtttat

SEQ ID NO: 2146 - DNA, 611 bp, Homo sapiens
cttccctgattttatggaaacttaacagctgtgcaccacagcctacttttctttggtgtgtgacatggtttggctctgtgtccccacccaaatctcaccttgaattgtagcccccgtaatccccatgtatcaaggaggtaattggatcatgggggcggtttcccccatgctgttctcatgataatgagtgaatctcacgagatctgatggttttatatgtgtctggcattactcctgcttgcactcactctctgttgccaccctgtgaaaaaggtgcctacttctcctttgccttccaccatgattgtaagtttcctgaggcctccccascaatgcagaactgtgagtcaattaaacctctttcctttttaaattacccagtctcgggtatttcttcatagttgtgtgagaacagattaatacagtgggaatatattagacattgtattagtgtgaaaaattactagtgtgattagaatgaaatgaaaaattactattcctttccttaactgtgggagaaaaccaacagaagttaagaaaaacaggtagatttaaaatctgctttcaatggtatattctaagaaatatacttactgcctttttatgcactt

SEQ ID NO: 2147 - DNA, 623 bp, Homo sapiens
gctatcttttaatactcagacatttagaaagttcatttagacaaagttataaaaacttgccttcctttctgcctatatcacctaaaaatcctaatttaagaggtaataacactttttatttgatatacaatttatcaacacaataaaaatctaacaattatcatgtgcagagtgtgaaaatctcatcagattaaggaacacaaagacatctttctcctattttgaatgtaaaactgttttggaaacttattttcagaaacagttaaaaacattttttcattagtttttcatgtaaaattgtgacaaccagcatgaaataactgtcatcacagaagcatggtatattcgattccgaaacatattctttgtaagttttaatatatttatgtattatttatacttaattgtaacccataatgtacagatattatttttccttcaactcttaagaatattcttaaataataaaattaaaattaatgaattataatttttgttggttgggaaaaagacacacacgtgacagtgcatcacttcacctcatcatttcatttcatctcatcatttcatctcatcattttatytcatcatttcatcttatcccatctcatctcatcatttca

SEQ ID NO: 2148 - DNA, 660 bp, Homo sapiens
aaccaggtgaagtgacatgtatatttttactatttaaatacatttaattaaaagctgttctttgtgaaacaagaaaatcaaatcataaggcaataactaaacaatgggaacaccttttacttttttaaaaaagtcttccttacagaaaaaaaaaaaaaacctgtaaatagtaatccacatcctcaaaactaaagatgtgtaaaatttttattttccacacactgataacagattttcagtgtaaagtgaggaaggaagctctgtggagacaagstggttggtggaggcatgcaagagtggtgctcaaatccaaggaactaaaattgcttatttgccggtcatcgttctttgacaagaaaattgtatacaagcccctttccactcaccagtagtcacttttagtaaaaaacagctgactttgccaaatgagtcactttctcactgtcagaacagacttaaacagcagtgccaacagttgtaaatcatcaagacaagcaaagcacatttgaaaaacatacaaacaactgaactttttgtggcagacattataacagcaatttatggaaatgtgttgatgtttgtattttatatttagtcttacaccagtttgttatcattgattgagatactgaatgtagaagctttagaatctaaaagggc

SEQ ID NO: 2149 - DNA, 660 bp, Homo sapiens
aaccaggtgaagtgacatgtatatttttactatttaaatacatttaattaaaagctgttctttgtgaaacaagaaaatcaaatcataaggcaataactaaacaatgggaacaccttttacttttttaaaaaagtcttccttacagaaaaaaaaaaaaaacctgtaaatagtaatccacatcctcaaaactaaagatgtgtaaaatttttattttccacacactgataacagattttcagtgtaaagtgaggaaggaagctctgtggagacaaggtggttggtggaggcatgcaagagtggtgctcaaatccaaggaactaaaattgcttatttgccggtcatcgttctttgacaagaaaattgtatacaagcccctttccactcaccagtaktcacttttagtaaaaaacagctgactttgccaaatgagtcactttctcactgtcagaacagacttaaacagcagtgccaacagttgtaaatcatcaagacaagcaaagcacatttgaaaaacatacaaacaactgaactttttgtggcagacattataacagcaatttatggaaatgtgttgatgtttgtattttatatttagtcttacaccagtttgttatcattgattgagatactgaatgtagaagctttagaatctaaaagggc

SEQ ID NO: 2150 - DNA, 1175 bp, Homo sapiens
acagtggagggctgatatggtttggctgtgtccccacccaaatctcttcatgagttgtagtttccataatccgcatgtgtggtgagagggacctggtgggaggtaattgaatcatgggggtggttsccccctgctattcttgtgatagtaagctctcacaagatttgatggttttataaggggcttctctttttgcttggttctcattcttctctctcctcctgctgtgtgaagaagaacttatttgcttctccttctgccatgattaaagtttcctgaggcctccccagccatgtggaactatgagtcaattaaaactctttcttttataaattacccagtctcaggcagttctttatagcagtgtgagaacagactaatataggggcgctaagtaacttggctgctctcatcatcagtttggctgttgcctaaaaaagggggtatgcagtcaagaaccaaaccactgagtcacttgacctgttttgtactttgttctttctcttgagtctcccagtacatatcttcacagttcatttgacaggttctggaaacacccttccaccttgtcacatattggaaatgaatatatggccaccatttccccctgggaacttcttcacagcatttagcctaacaaaacttgagctgggttcctggacagactctgactgtgtagccactcacccttaactttggctgagggtgggaaggaaaatgaaggaacaggggcatctttccctctgactataggaagcttgattttgtgttcctatctacttccttcttctgttattaccctcttcccaatctatcattgcaatcattttaatgccactaaaaaaatagcttctttttttctgcctgcagattgcataaacaatatcttggtctgctctctacctgtaattcattgagtaacccaaggcaggctctaattttttttttctgttagcatgtattacttgagaacattgctatcctttgagctcataaaagaacaaggttgaggttctttaataagagggaataaggaggcatgagaaacatatacttatgggtgcaagtcaattggtagacactggctctttcaagtcacaatgatgtcatttgctgcccgaaattagtggttgccaaatcatcagtgcttattaaaaacaaagattcttgggtac

SEQ ID NO: 2151 - DNA, 1074 bp, Homo sapiens
atacacatacatcatgcacacatgcagtcatatatatgtatatatgtatatatgtgtatatatatacacttgtacatatatccagtcattttctaaaaagcagaacaaggaatttcaaaatagattttaaatgtcacgtttagatgtttgcttattccactatttaaacatatgcaggccagtacataaaaattagctacaaattagrccaatttttaaactgagctgaaaacaactgggaacattatgggtacataggttaaataagtaatttatgcttattttgtttttttatcatgccctgtgttaattttaattaaacatatatcatggccaggtgcagtggctcacgcctgtaatctcagcactttgggaggccaagacaggtgcatcacctgaggtcaggagttcgagaccagcctggccaacatggtgaaaccctgtctctaccaaaaaaaaaacaaaacttagttgggcatggtggcacatgctgtaatcccagctcctcgggaagctgaggcaggagaattgctggaacccaggaggcggaggttgcagtgagccgaaattgcgccactgcactccagcctgggcgacagagtgagacttcatctcaaaaaaacaaacaacaaaatttaattaaacataaatcaaaataaacaaggaattagcggaagttacaggttagataaagtgagtttaacaaataattatgagtagcttttttcttattttctgcagggcaccattataaactggcagtcctgaaggaccttgtcttagagttgcttatgggaataaaaatgctttattgtgtgtgtttgtatgtttctaaaggaaaaaagatctatccccttttcttgactggaaaaacctgggtttaagccaacctgattttactctataaatatttaaatctcctttcttttctctagtcatttctgataattcctctactttatactgatagtgtggtagactctgaagacacatgtcgtaggtgcatctggtggtgaccggggtgcaatttaaattcacaagagcaaccccaaatggagtgggcgagtggccaaa

SEQ ID NO: 2152 - DNA, 1074 bp, Homo sapiens
atacacatacatcatgcacacatgcagtcatatatatgtatatatgtatatatgtgtatatatatacacttgtacatatatccagtcattttctaaaaagcagaacaaggaatttcaaaatagattttaaatgtcacgtttagatgtttgcttattccactatttaaacatatgcaggccagtacataaaaattagctacaaattagaccaatttttaaactgagctgaaaacaactgggaacattatgggtacataggttaaataagtaatttatgcttattttgtttttttatcatgccctgtgttaattttaattaaacatatatcatggccaggtgcagtggctcacgcctgtaatctcagcactttgggaggccaagacaggtgcatcacctgaggtcaggagttcgagaccagcctggccaacatggtgaaaccctgtctctaccaaaaaaaamacaaaacttagttgggcatggtggcacatgctgtaatcccagctcctcgggaagctgaggcaggagaattgctggaacccaggaggcggaggttgcagtgagccgaaattgcgccactgcactccagcctgggcgacagagtgagacttcatctcaaaaaaacaaacaacaaaatttaattaaacataaatcaaaataaacaaggaattagcggaagttacaggttagataaagtgagtttaacaaataattatgagtagcttttttcttattttctgcagggcaccattataaactggcagtcctgaaggaccttgtcttagagttgcttatgggaataaaaatgctttattgtgtgtgtttgtatgtttctaaaggaaaaaagatctatccccttttcttgactggaaaaacctgggtttaagccaacctgattttactctataaatatttaaatctcctttcttttctctagtcatttctgataattcctctactttatactgatagtgtggtagactctgaagacacatgtcgtaggtgcatctggtggtgaccggggtgcaatttaaattcacaagagcaaccccaaatggagtgggcgagtggccaaa

SEQ ID NO: 2153 - DNA, 1074 bp, Homo sapiens
atacacatacatcatgcacacatgcagtcatatatatgtatatatgtatatatgtgtatatatatacacttgtacatatatccagtcattttctaaaaagcagaacaaggaatttcaaaatagattttaaatgtcacgtttagatgtttgcttattccactatttaaacatatgcaggccagtacataaaaattagctacaaattagaccaatttttaaactgagctgaaaacaactgggaacattatgggtacataggttaaataagtaatttatgcttattttgtttttttatcatgccctgtgttaattttaattaaacatatatcatggccaggtgcagtggctcacgcctgtaatctcagcactttgggaggccaagacaggtgcatcacctgaggtcaggagttcgagaccagcctggccaacatggtgaaaccctgtctctaccaaaaaaaaamcaaaacttagttgggcatggtggcacatgctgtaatcccagctcctcgggaagctgaggcaggagaattgctggaacccaggaggcggaggttgcagtgagccgaaattgcgccactgcactccagcctgggcgacagagtgagacttcatctcaaaaaaacaaacaacaaaatttaattaaacataaatcaaaataaacaaggaattagcggaagttacaggttagataaagtgagtttaacaaataattatgagtagcttttttcttattttctgcagggcaccattataaactggcagtcctgaaggaccttgtcttagagttgcttatgggaataaaaatgctttattgtgtgtgtttgtatgtttctaaaggaaaaaagatctatccccttttcttgactggaaaaacctgggtttaagccaacctgattttactctataaatatttaaatctcctttcttttctctagtcatttctgataattcctctactttatactgatagtgtggtagactctgaagacacatgtcgtaggtgcatctggtggtgaccggggtgcaatttaaattcacaagagcaaccccaaatggagtgggcgagtggccaaa

SEQ ID NO: 2154 - DNA, 985 bp, Homo sapiens
aaatatcaaaaaggtgtcccatcaggtttccttgaatggagaggtaaaagtcatttgtaattaccagtagaccttttgctgtaaattattaaagttctaaattcttaaaaaaaaaaaaaaaaamcaggaaattttcttcactaacttaaaagctttttatttggtattttctcataattgcttaagaaaacttttcatcataacaagtacaaagataaaattcatcctggctaaacatggtttgtagcactttttttttttttttttttgagacagagtcttgctctgtcgcccaggctggagtgcagtgacacaatcttgggcttattgcaacctctgccttccaggttcaagcgattcttctgtctcagcttcccatgtagctgggattacaggcgtgtgccaccacatccagctaattttgtatttttcagtagagacaggatttcactatgttagccaggctagtctgcaacttttggcctcaagttatcagcctgcctccacctcccaaagtgctgggattacaggcataagccaccatgcctggccatgtagtatttttaattgctaaagtatattaatgttaatttaatgtaggaaagaacaagtcataggtaaatatgatattttaaataaatgatttgttttttgtactcaaagtgtgacccttccaagtgtatcacccagagtaagaatctgcagcagttattcagttatcttctttcatttaaaatacctatttccatattaatattttattgcattgattgtgacagtttaatgctatactgtacagatgtcatctcagaaagtgtaaacactgaatgaattaaatgcagaagaaggcctcattctgtccaaattgaagcatatcacaagttactactatatttatgacagattttcacctcataccaaacactttatttttagaagttcaagaaaacacagccattctccactttgagaacattttccgact

SEQ ID NO: 2155 - DNA, 1171 bp, Homo sapiens
ttcatagtgtcagctaaaagttaaagtcacagccattggccagaaaaaaagagagctgtgatactggctaagagatcaactgtgactcccaatgagagaaattcctctagagatctctaaacactgtcctctgggaaacataggatgtagagaatagctgtgcactcagggacatcaatttataggcaggaagctttgcttatgagacttagaagtttctgcaagttatagattgatggtcaggactttggctgctgctgggagaggagaaaggcaatgagattccagaagctgactgggaaatcaactgtttatgccttttaaatctactggaaaatccaaatgtccctttcaagggacttacttcaagacatcccttacaaggcaccttctcccatagccctgcattatgaaagtatgtaagtcccatttgcaggaaatcttacacccagaaacacactctcattgatctctatctttgaaatataggttcacacacaacatgtgcctcaaagacataaaagacctggcaacccccatggccaaggttaaggtcactatcttctaaaagaagttagtttagagattagtcacacatcatgcaggataacctttgccattccctgcccaccttctttatggttaatttcacaacaatccctttccttttcaaaagttttgagaaaaaaaaatcctctgcctaatttacatgtatgattatattagcctttgcaagagttctaaaatgtgtctgaagcttatagctggacatttgctttattaaatgatcagctggaatacctaagatccttgcttactcctgattacatttctaaatgcaaggacaggaatatgggaccttcaacttttaagtggtccatattaccttttaggttccggaaatgagatggccctggatctgcatatctcctctaagggtgttaacaattgaactggagaattataagccttaaagtgttgaccttttttttctaaaatgtgtgaacaaatttcatggagttgaactggatracaaatggcaaatattggactatatgttgagtcatgcacacatgagaactgacaattgttagccatgtctgtggggtatcatcattgcaatttggaaatcacttattcaatgtgagggcaaaaaataaattaattaaaa

SEQ ID NO: 2156 - DNA, 746 bp, Homo sapiens
cttaatcctaaatggtggcttacatcactgcttacaaactctcaccttccgtattagatagcaaactcctttaaaaacttctaccactcaacaaattmaatgctatgtatacagcagttacttgataagctgaattttacacagacaagtagataattagttgacatttttggcctgaatcttagcgattgtttaattattccctctgtccaaaaaaacaaaagagggggaggggtgattaaactctaataccgcacagtttgacaacttcctataaagttaaatataaacttaaaatatgacccagcaatcacaacctagttattgatccaagttaactgaaaaccaggttcacataaaaacctgtacacaaatatttatagcagctttgtgtataagcatccaaaactggaagcaacaacgtcttttgacaggtgactgaataaagaaactgtggtataccatagaatggacgattagtcaacaacaaaaagcaacaagccattgattcttgcaacaatatgagtgaatcttaaatacattttgctaggtgaaagactacaaattatatgattccactcacgtgacattttggaaaaggcaaaactacagggatgaaaaacagattactagttatcagggtttgcagtggaaggtgtttgactacagggagatgcacagggaaacttttaggataacggaattattctatgtgttactagggtggaacatacgttactctatgc

SEQ ID NO: 2157 - DNA, 598 bp, Homo sapiens
ctgcagtatatttttagctttggaagacaggrctacttgtaagaaattgtgagaattaacaaacaaatggctcaaaatatcatacacatatgaaaattcctaaagggagaaaactctccattggcaaaatatgtcttggggaaattatggtttttttcttcccctgtaaaatctttgaagccatggaaaattccaaacaacaggtgagaaaactaaaaagtagccactttactaccataagaagatattgatgaaaggtagtaacgtcagcatacacttcaacattatcagcaaggaaacttttttcccaagaaataatagaaatagagatgaagaagggttatgttataaatcatattttgaattgtgaattttttcaggtgactagactgaagggtagaagatgctaagccatttgccatttaatccatttcatttaaaggatcactagctatatttaatgacatccaaaaataaactcttcagatgctgaaatactagactgggaaggcaggcaggggaagcaggaaggttattctggctttatttcattttcttgaagggcaaaggcggcttctcattcataagaagaaactga

SEQ ID NO: 2158 - DNA, 1431 bp, Homo sapiens
tgcatttattcaaatatttatcagacacaactaagtgctagggataacatggtgaaaaaattaaaaaacagagaaggacattgctttcatggagattacattctggtctgtctctacttacacattttggtgatttagctctctgcccttcaacyacaataaaatcttggtttcaaaggatccttataaggcactggtccaagtgctggttcttcacattaacatacccactaatgaaagaatgctgcagttgtgcaataggacaatgtgttggttaggagtgtcagctgtgggagcagagctgagtttgaggcctgactttggcacttataataaactgtgtttccttgggccaattatcaaacctgactctcaatttcttcatctgtaagacgttccccatacctgcttcccatgactgttggaacaacttgagatgatgcttgtggagccctgggcacagtgcctcagtgaatggctgctgctgtgctaatgaccattacattataataagcataaattatcatcatcggtaataattattgaattccttcattcatggagaacctatgggaatgactttagcatcttctgataagtaaggtaacaaagcacttccaaaaaattttataaaatgtaaagctccaggtgcataatctgtgttacaactagccataacagagctccctgtgacttccagccatttaactttgctccatctcttccctgatgtttgcacaatgatgattcctctagattgaagggacttcttcaactcttccttcttggagaaagtgaaaacctgcctctaccttagtaagtctcctttcaacataggtcaatcatacgaacatctaatgttcccctacaaattcatcctcaaacatcaatgaacaagttaagtacctaagatgtttgttatattggaatgcatttccagtgacacacgcctcagtaattatattctttggaccacctactggaaaagaattgttggccctcactttgttcccaatagggaggagttacacataaaattgaacatgtttcaggacactgatgaggacatatttgctaataggcagggccatcatgccttaaacaggggttggccgactatggtgtgtgggccaaattcagctatctgtttgtaaataaagttttattggaatacagctatggccttcatttaaatattatcattcaggagaatgccatctcaggagcttcaattataagagggaccaatcagttgctgccttcactctccagcagcaaagttgagtaattgtgacagagaccgtatggctcacaaaatctaaaacatttactatctgggtttttacagaaaaggtttgccaatccctgcatgccaagcttagcatgcagttagctcccacattgctgtagtggtgaactaacccgggaccc

SEQ ID NO: 2159 - DNA, 1306 bp, Homo sapiens
aaaacaaaacaaaacaaaacaaaacaaaacaaaaaaaggcctgtgcctctctagaaggttaccgtgtagaatacactttttcaaatatgcccttttctctgaagacagtgatatgaatcccacaggggccagacatttatctgactccttgattaagaatggctggtggattagggttggggagttaaaatccaacttcatagatggccaagaaaatgcctgacttcttcagggtcacacagctggtaatgatgaccctgaggctcataccaagaccttttagtctcagtcaagcacttactccacaacgtgatactgtctttctgtgagcaactaccaatacattattatctgtaaatttaccagttacattttcaggcaagacatctgtatccatcccatgactggaggggtttatgaaatgaaactgtacatgcaagattttccaaattgctattatcaaggttttctgaagtgtttactaccttagttggccgttttgctttccctagacatttttttcaggttgagtttctaaggactttttggccctagtatctgccaatagatccaggctatttcacagttccttctccccagaggggcatttatcagccagcctttcagctcaacattcacttggcatcaaatactgagggaaagtaacctgactgttcagcaagacaagctgacctgctaattgcactccttggaacttaagtttcagrggaaagtaaggagaggaggcacagaaaaaagaaaaaaggagtgttttcttttcttccaacttgctttgtaacagaataaacactatttctaggttaggtgacatttccgaggcagcatagcaagcaccagcatagccccaaaaccctgagaggactccttgccacaaatcaagtgccgaaatgcattggcctggaagtggggggtctacttggtcagtctctacactctggagtttgacagatttcaattccattcttagctctgcacttttttcacataggtgaccatgggtgagttattctatgctaaacctcagataagcttcccttttctaaatagacattagacttcagaggactattgtgagcattaaatgagattatgcatgggatgtgcttagaagaatgctcggcactcatatgacagctattgtgattctcataaccttctagccaaatatctcttgccttctcccccacacccttctcttcactttatttgagcaatatgctagctgccaaaagcaaaggttaaactgtgtcaatggagaaataaaaataaaaattcaccagcctag

SEQ ID NO: 2160 - DNA, 1306 bp, Homo sapiens
aaaacaaaacaaaacaaaacaaaacaaaacaaaaaaaggcctgtgcctctctagaaggttaccgtgtagaatacactttttcaaatatgcccttttctctgaagacagtgatatgaatcccacaggggccagacatttatctgactccttgattaagaatggctggtggattagggttggggagttaaaatccaacttcatagatggccaagaaaatgcctgacttcttcagggtcacacagctggtaatgatgaccctgaggctcataccaagaccttttagtctcagtcaagcacttactccacaacgtgatactgtctttctgtgagcaactaccaatacattattatctgtaaatttaccagttacattttcaggcaagacatctgtatccatcccatgactggaggggtttatgaaatgaaactgtacatgcaagattttccaaattgctattatcaaggttttctgaagtgtttactaccttagttggccgttttgctttccctagacatttttttcaggttgagtttctaaggactttttggccctagtatctgccaatagatccaggctatttcacagttccttctccccagaggggcatttatcagccagcctttcagctcaacattcacttggcatcaaatactgagggaaagtaacctgactgttcagcaagacaagctgacctgctaattgcactccttggaacttaagtttcagaggaaagtaaggagaggaggcacagaaaaaagaaaaaaggagtgttttcttttcttccaacttgctttgtaacagaataaacactatttctaggttaggtgacatttccgaggcagcatagcaagcaccagcatagccccaaaaccctgagaggactccttgccacaaatcaagtgccgaaatgcattggcctggaagtggggggtctacttggtcagtctctacactctggagtttgacagatttcaattccattcttagctctgmacttttttcacataggtgaccatgggtgagttattctatgctaaacctcagataagcttcccttttctaaatagacattagacttcagaggactattgtgagcattaaatgagattatgcatgggatgtgcttagaagaatgctcggcactcatatgacagctattgtgattctcataaccttctagccaaatatctcttgccttctcccccacacccttctcttcactttatttgagcaatatgctagctgccaaaagcaaaggttaaactgtgtcaatggagaaataaaaataaaaattcaccagcctag

SEQ ID NO: 2161 - DNA, 1306 bp, Homo sapiens
aaaacaaaacaaaacaaaacaaaacaaaacaaaaaaaggcctgtgcctctctagaaggttaccgtgtagaatacactttttcaaatatgcccttttctctgaagacagtgatatgaatcccacaggggccagacatttatctgactccttgattaagaatggctggtggattagggttggggagttaaaatccaacttcatagatggccaagaaaatgcctgacttcttcagggtcacacagctggtaatgatgaccctgaggctcataccaagaccttttagtctcagtcaagcacttactccacaacgtgatactgtctttctgtgagcaactaccaatacattattatctgtaaatttaccagttacattttcaggcaagacatctgtatccatcccatgactggaggggtttatgaaatgaaactgtacatgcaagattttccaaattgctattatcaaggttttctgaagtgtttactaccttagttggccgttttgctttccctagacatttttttcaggttgagtttctaaggactttttggccctagtatctgccaatagatccaggctatttcacagttccttctccccagaggggcatttatcagccagcctttcagctcaacattcacttggcatcaaatactgagggaaagtaacctgactgttcagcaagacaagctgacctgctaattgcactccttggaacttaagtttcagaggaaagtaaggagaggaggcacagaaaaaagaaaaaaggagtgttttcttttcttccaacttgctttgtaacagaataaacactatttctaggttaggtgacatttccgaggcagcatagcaagcaccagcatagccccaaaaccctgagaggactccttgccacaaatcaagtgccgaaatgcattggcctggaagtggggggtctacttggtcagtctctacactctggagtttgacagatttcaattccattcttagctctgcacttttttcacataggtgaccatgggtgagttattctatgctaaacctcagataagcttcccttttctaaatagacattagacttcagaggactattgtgarcattaaatgagattatgcatgggatgtgcttagaagaatgctcggcactcatatgacagctattgtgattctcataaccttctagccaaatatctcttgccttctcccccacacccttctcttcactttatttgagcaatatgctagctgccaaaagcaaaggttaaactgtgtcaatggagaaataaaaataaaaattcaccagcctag

SEQ ID NO: 2162 - DNA, 1289 bp, Homo sapiens
gaacatacatgcttatctttgctatctcccccaaactcacataaatcacagcaaaataataaaataggtgtgaatatacagatcaaagagaaacttaaaagagggaagagaagacaaaggaagtacaacatctgaaggatggagagtggatgaaggtaactgacttagcaaggtgaagaaagctgaaataaccatctgtgaagaggaagtgagtagagtcaataagaagaaagccataaaaccacagatcacaagaaaggtgtaaaaatatgaagcactggatactttgaagtctgaggtatgggatggggtaaaacctggtggaaagccccagagcccctgccctagcctatgcagccaggtaatccctctttttcagccaagcagaagactgggggtggactctgaagaagacaaagtatttagactctaggttaggatcaccaggtatagctgagaataagggagaggacacttactggccatcttcctacttgcatgcagaagagcccattggctttgtggtacttataagagcagatagtcaagggcctctaaatatggaggagggagagggagaaattaaaattaacaagcaaatgaatgaaaataaatcatgggaaacaagcacaatttagggaccaaaagaacacattaaaaaaacatacactcattctagagtatgaatagaatgctataatgaaggaaaaatcaaaaagcaaaaaagaactctaggaagttaatgcagtagataaatatattagttgacaaaaatactgaaagacgaagttgaaggtatcacccaaaaaataaaataaaagtcaaagaaatagaatcttggaagcctaacatatggaactgcaaatgaaagagcagaaatgaaggcaaggatgatatcaaataaattacaaaagaaaatctcttaaaactgaagggtctgagtcttcaggtggaaaaagcttacagaatgtctttctagccccatgaatgacctgtgaattaaaaaaggcgatygtcttgaagttagaactttagagacaaaaagataatcgtaacagcttctggaggaggagaagggacaataaatcccaaacaaagaaggagcatgcagaataacattggactttttaatcagccacaatggaaaaaagaagataatgaaataatgtgtgcaaaattctgaataaaaattatttccaagcttgcatttcatctccaatcaatgaagtttaagagtggaataaaaactatttcaaatatgcaagatctaaaaatttaccctcatgttg

SEQ ID NO: 2163 - DNA, 615 bp, Homo sapiens
ttttatttgtctgatatatgtagagaccaacagtctctgcttttcaacagtccattgtctcatattggtgatgaagtggtgatagaattgagttaaagtttttcagttcttctttactcatgacgttctgtattcttaacatagtcattagaggcaaagtatgtttttattttaaaaatctctctctctctctctctctctctctctctctctctctctcagtgtgtgtgtgtgtaggttgcttgtttgttttgttttaatgaagcatctaacatgtacttaatactacctcaagagagatacaaatagaaaaggataaaaaatgtaatgtttaaattaggttattcttccccactgtttataatcttgtagaatcaaggcattaatgaatgtgtaaaacattttctaaaaatctattcattccactaaggtattttcccttcacttttaagtgctctgactcattctacraattatttaaagctcagccactcaactactgagcacttatggcatgccagcagtgaacagagcaccaccactgctctccaggggttcatggtctagtgaccaacacaaagttggaaataaataattacaatccattgtgataag

SEQ ID NO: 2164 - DNA, 572 bp, Homo sapiens
  misc_feature (1)...(572): n = A,T,C or G
gcatgccattgtataaaggtaaggttggatgggacagctaggttttcagccacccccttcctccatttttccctctcttttattctttctatttgcctttaaagaccctaaaattctactctaaagtacttccccggacaatcaaataaaatcataaaatcggtaaaggctcttgaaactttagtccaaagtcaatgtgtcctgataaacagaaagtacaggatttaaaaaggagtcattacatgtgaaatattcaatagaagaaatagcaaaaaagatacttgtttaagggtccrtgcctattcacatggacaaagtatcaaaataaaggnatctgagaggtcattttaaataaatgaaatgatgcagattcaagggaaagatagattgaacctgaggcagtatctatgtttaccaaatccagcttcgtggcgagtgagctgaatagaaatgtcttaacacctttgcattgcaggatcctgcaaatggagattttttgtaacgcgttctctggagttagactgaatgggtgcagctctataatcaatgtctgcctgttaactgcataaaag

SEQ ID NO: 2165 - DNA, 644 bp, Homo sapiens
tgcatataatctaaataaaatatacaacaaatataccaataactggccgggcgcagtgcttcacgcctgtaatcccaaagtgtaaacactttgggaggycgaggcgggtagatcacgaggtcaggagattgagaacatcctagctaacatggtgaaaccccatctctactaaaaatacaaaaaattagccggggttggtggcagatgcctgtagtcccagctactcaggaagctgaggcaggagaatggcatgaacccaggaggcagagcttgcagtgagccaagattgtgccactgcactccagcctgggcaacagagcgagactccatctcaaaaaacaaacataaaaaacaaaaaacaaaaaacacccaaaaaacaaaaaaaactattatgtacagttgtagtagtcataataaccagtttctacagagagcttatggtttgccccaagctgatagatatctatatctatctctctatatatatatcaatttattcctcacaataacactgtgaggtacatgacatgactatcaccattttacagatgaggaaatagagttgcagaaagagtaaagtcatagtttagtagtaggtagtaaatgtagtagtaggtagtaggtagtagtaggtagtaaatgtt

SEQ ID NO: 2166 - DNA, 635 bp, Homo sapiens
aactgtgactcacttgttgataattctcacagtgacagaagaagcatcatcctcctggtagtattactgggtagtattaccagatgattctgatactttcactcatatctagaaagaatcactgacctgaaagaatgacattcataaatttcaggagggcctgaaattaaatctggtaattatttattctaaaacttttgctacattttgttttcacattttgctacattttgtttgttttgccacatttcattttcaataatttgtgggaattatttattccaaaatactgctatattttgttttgctacatttcrttttgtttgtagctatattttgctactttttaaattgaaaatgtcattttcaataaagtgacatttttcagaattgaatgccattgatttgtgtttgcagttgaataaagaaatactcaattatccttagcacctattatataagaatcacaaagtacaaattttcacccattagaccatgccagtaattctcaatattttatcatattgtattcttataagactttccatggctctccatttggagtgaaactcactcaatttcttaagtcccagatgttttctagctgccaacagaggatatgaaaagtaccctat

SEQ ID NO: 2167 - DNA, 475 bp, Homo sapiens
  misc_feature (1)...(475): n = A,T,C or G
ggtgggaattgaacaatgagaacacttggacacagggcaggcaacatcacacaccggggcctgtcatggagttgggggtagggggagggatagcattaagggaaatacctaatgtaaatgatgagttaatgggtgcagcaaaccaacatggcacatgtatacctatgtaacaaacctgcacrttgtgcacatgtaccctagaacttaaagtatatatatagaaaaagaattttaaaaaaagagagaaataaaataagtggatccaagcttgacagacagnaagcgtggtcacagaagcagctcagatcagcagatgggactagatacacacatattcgtgcacatgtagatgcagcacacgcacacacatacacnnnnnnnnnnnnnnnnnnnnnnnnnnnnnnnnnnnnnnnnnnnnnnnnnnnnnnnnnnnnnnnnnnnnnnnnnnnnnnnnnnnnnnnnnnnnnnnnnnnnc

SEQ ID NO: 2168 - DNA, 475 bp, Homo sapiens
  misc_feature (1)...(475): n = A,T,C or G
ggtgggaattgaacaatgagaacacttggacacagggcaggcaacatcacacaccggggcctgtcatggagttgggggtagggggagggatagcattaagggaaatacctaatgtaaatgatgagttaatgggtgcagcaaaccaacatggcacatgtatacctatgtaacaaacctgcacattgtgcacatgtaccctakaacttaaagtatatatatagaaaaagaattttaaaaaaagagagaaataaaataagtggatccaagcttgacagacagnaagcgtggtcacagaagcagctcagatcagcagatgggactagatacacacatattcgtgcacatgtagatgcagcacacgcacacacatacacnnnnnnnnnnnnnnnnnnnnnnnnnnnnnnnnnnnnnnnnnnnnnnnnnnnnnnnnnnnnnnnnnnnnnnnnnnnnnnnnnnnnnnnnnnnnnnnnnnnnc

SEQ ID NO: 2169 - DNA, 652 bp, Homo sapiens
attcctctttgtacttcgtggatttccaagaaacccttgaatagccgcctccttttctcatcactttgtgtgggttttatagctgtgtgtgtgtatgtgtgatagtgtgtaaaatatatctgctgtgtgccagtggattatggggaactggctcaatttgcctctttaatattttgtaattgctttataatgagttgtgttataagtggttttcaggaaattcaaagagacggggctaaacagagaggcaggggacacattgtcatattactttcgtgtctggagggcattgatctaagactatttcatcaaatctattccgaacgtggaacatgccatgtatttccaygtaaggtctattaggaaaaaaaggttctgcctctactgtgttttaaaatgactatcgctgtcatttattataaatgaaagattttaaaacttccttaacaagaagcaggaagataatgagttacggaatggtgtcatttgtacactctaaaattgcaaacctaggtatactttcttttttaattatacaaaattgggattctatctcagttttctaaatccacgattctctttgcagagaattaataacttttctttttttgttcttattttatgtaaacttctaggctagctcttaagccag

SEQ ID NO: 2170 - DNA, 656 bp, Homo sapiens
atcctttctcactgttttacagtcacaagggacttctgttggcttcttgaaaaaccggacttacttccacatcaccactgttttctttgtgctatcaggctttaagcctctttcttccaatatttcatggctggcctcttctcatcgcttaattttatttttctttcttttttatttttcttttttgagacagggtcccactctgttgcccaggctggagtgcagtggcgtgatctcagctcactgcaacctccccctccttggctcaggtgatcctcccacctcaacctcccgagtatctgggactagaggtgtgcaccaccaggcacagctgatttttctatttttttttttttttatagagatggggtttcgccatattgcccaatctggtctcaaactcctgagcccaagccttccacccacctcggcctcccaaagtgttgggattacaggcgtgagccaccacaccctgcagcttctccttttttctcgggtctcaacttaagcacttcctttcctgggaccatttccctcatcattctgagaacatcccacctcagctcctttttgagtcattatccatcgttatcgtcttcacagaactattgtccrtctgaaataatctcagttgtgtttatttttttaatttactt

SEQ ID NO: 2171 - DNA, 925 bp, Homo sapiens
atgattgtgtcattcactattgatccccatcacctagtgtagtgtctggcacataatatgtactctataaatatttaatgaataaacagatgttgtctttgtaggatatcaccattctagctggcctgcaggagcagagaacatactttaggaataatggggaattagtttgggtatgtagggcaggacccatgaaaaccagggagaagaaagtcawcattttaaagcaccaacatactagaggtggattattcctttagagggtttgaaaggcatttaaggaacatgcctccatgactcgctcccttccttccttttttgtccactagatctccagtcttcctatgaaactgggttgaaaaatacataaaattaacttgacaatctacttgtgccatctgaatttgccttagtttcatctggaaagaggaggtattgatgggctttcagaatccaggacaagcgatcagcctgagagtcatgtctctcttgtcatggcttctgaaatctacagactgtctgtggctttcttttgcctcccctctcttcgctgagccaagctggacaagaactggcagctttaccaggacaattggatacattcgggctttattttcttggcacactgaagacattaaccagcttccaaatgataagaaacgggaatttttagtaccaaatccaagttccttctcacagaaggggtgtttccattgtttgaaaagaggggtgctagctgctgagtgacatgttctttatccatgatgacagtccctgttggcacatcacaagcgttgtttcaataataaaattatcctagctgccagcggggccagcttctttacaaaatgaagtaacaatagcatgtttcatacgattgtcacttcttgttgatcaattaattctaaatagtacttaacaaaga

SEQ ID NO: 2172 - DNA, 925 bp, Homo sapiens
atgattgtgtcattcactattgatccccatcacctagtgtagtgtctggcacataatatgtactctataaatatttaatgaataaacagatgttgtctttgtaggatatcaccattctagctggcctgcaggagcagagaacatactttaggaataatggggaattagtttgggtatgtagggcaggacccatgaaaaccagggagaagaaagtcatcattttaaagcaccaacatactagaggtggattattcctttagagggtttgaaaggcatttaaggaacatgcctccatgactcgctcccttccttccttttttgtccactagatctccagtcttcctatgaaactgggttgaaaaatacataaaattaacttgacaatctacttgtgccatctgaatttgccttagtttcatctggaaagaggaggtattgatgggctttcagaatccaggacaagcgatcagcctgagagtcatgtcyctcttgtcatggcttctgaaatctacagactgtctgtggctttcttttgcctcccctctcttcgctgagccaagctggacaagaactggcagctttaccaggacaattggatacattcgggctttattttcttggcacactgaagacattaaccagcttccaaatgataagaaacgggaatttttagtaccaaatccaagttccttctcacagaaggggtgtttccattgtttgaaaagaggggtgctagctgctgagtgacatgttctttatccatgatgacagtccctgttggcacatcacaagcgttgtttcaataataaaattatcctagctgccagcggggccagcttctttacaaaatgaagtaacaatagcatgtttcatacgattgtcacttcttgttgatcaattaattctaaatagtacttaacaaaga

SEQ ID NO: 2173 - DNA, 883 bp, Homo sapiens
tttggatatggtgacagtgggggtgttggttgttttgctttatatttttcattttcttttttttcctttcccccaagaactgagataagctctttctgagcaggaaagctccaccgacttgttctgacaaattcccattccagtttcacactgggtcacacgcaatcagaagaacaacgtaagcaggacttcagggtgagcaaaaaggttgaggctgattgcacagaacgcttcccctctccttgcttttacggggactttgctgaagccagcttacttctttttcatgactgagataacttcccaggacaaaaaaatgtgtatttatttaatgatcctaaaagattttgttttcacatttttctttgagttgcaataataataacacaaaatgttcattttcttcttgtttacacaaaacactctctgattgctaagagaccacatagtatagtggaaaaggacaaaattaggcagctgagaagacctgggtatgatatcgggtctgtcttggccctggggaagtcacataccttccttaggctaaggttttctatctacaaaagcygactgagcatcagtggttttcaaattgtacaccgtgtatttagggtacaaatttagggaaggatacttgggtctctaggaccccactcccaccacatactttagccacaacaggtcagttcttatctgtttacatactggatttccacagagaaagggtttcatatttttatatgtttgaaaaaaatctctgtcctttccaattctcaccttccataattctgtggcttttctctgggatcacagatagcttcaatttcctgcagtacataagctcattaatgcagaccactatacaaagtggaaaactggttca

SEQ ID NO: 2174 - DNA, 1596 bp, Homo sapiens
tgctacattacttatcaatgcttcatatacagcgtatataaataaaagcatatgttttcrtcgtatgtctttatgtgttagaaatacaataacctgaaaatgtatgtaaacatctgcatggaactgtaagtgttcgtactgctgacaaccagattagattttactgtaacaacgttttcttgcatgtatacatatatgtattttgagcatgtaaacctcccttataatagcaaggctgaggagaagaaactgtgtttgtttatttatttatacctcaccctatttcaaataaaaaatatgtggctttttaaactaaggcttatgagagagcaaaataacatcaattaacagcatctgaggaaggagtaagaaaaacaatatctgggcacacttgactatctaaatctaaatgaaatgttacataaaagatgataattggctttttctctaactcagtggaaaacagaaataaaagggacctgtttcacactgtagaatgaaggctatagtttggattcaagaaatagctttctgacagtaaattgaaataggtcactatcttatttgaagatatttagaaagagaatagaatctcatctctctctgctccttgaggtttgaccccacctaagagatggcttgctaacctgtccaagccccccaccttctggccctgtaattatataattccatggagaatattgcctctctcaccttttaaagagacagtctggtaaagagaagataggaaagtgtaaaaatgagacctgtgttttcagtatttggcacactcttctctttgaggttataattatattttaattacatgtggagttataaagaaatacaattttaaacacctaagattagtattacacttatttttaagttttctctttaccattaaagaaacaaataatttagtaattatataaactgaaattagactatttagaaactatactatatctaattttatagggttgataatcattcctttatattctctttctaatttgtctttattcacattttataacagctgaaaccagaggttaagttgctaaacaattatctgaaaccagatacttcctcaggggagaatatatagtttacctgatttgttagacacccaaataattgcttctgaagacacatggcttctatttcctaccacaatagttaatggaatctgccacaggtaactgcaaaataaaagacaagctttaagaataaaaataactatatcgaaacaaaaacaaaaaacatttcccatgcgccttctgtgtgatttttattactctcattaggtgaactaaaaaaaaataattccggtcacaaaagtaaggcataggtcaaaaagatgaattcactctttcaatgccattaagaagacttggcctttaagaattttaattgcaatgcaaagagaactgccaacaaaaccatttttcttgggggaaaaaagattcgcattttgaatttgaaatagaaagtacctaatatctatacacctgagccatattgattaaagtctaaacataacttctttctacttgtttttatgttagattaagacacatttcagtggcttca

SEQ ID NO: 2175 - DNA, 1596 bp, Homo sapiens
tgctacattacttatcaatgcttcatatacagcgtatataaataaaagcatatgttttcgtcgtatgtctttatgtgttagaaatacaataacctgaaaatgtatgtaaacatctgcatggaactgtaagtgttcgtactgctgacaacyagattagattttactgtaacaacgttttcttgcatgtatacatatatgtattttgagcatgtaaacctcccttataatagcaaggctgaggagaagaaactgtgtttgtttatttatttatacctcaccctatttcaaataaaaaatatgtggctttttaaactaaggcttatgagagagcaaaataacatcaattaacagcatctgaggaaggagtaagaaaaacaatatctgggcacacttgactatctaaatctaaatgaaatgttacataaaagatgataattggctttttctctaactcagtggaaaacagaaataaaagggacctgtttcacactgtagaatgaaggctatagtttggattcaagaaatagctttctgacagtaaattgaaataggtcactatcttatttgaagatatttagaaagagaatagaatctcatctctctctgctccttgaggtttgaccccacctaagagatggcttgctaacctgtccaagccccccaccttctggccctgtaattatataattccatggagaatattgcctctctcaccttttaaagagacagtctggtaaagagaagataggaaagtgtaaaaatgagacctgtgttttcagtatttggcacactcttctctttgaggttataattatattttaattacatgtggagttataaagaaatacaattttaaacacctaagattagtattacacttatttttaagttttctctttaccattaaagaaacaaataatttagtaattatataaactgaaattagactatttagaaactatactatatctaattttatagggttgataatcattcctttatattctctttctaatttgtctttattcacattttataacagctgaaaccagaggttaagttgctaaacaattatctgaaaccagatacttcctcaggggagaatatatagtttacctgatttgttagacacccaaataattgcttctgaagacacatggcttctatttcctaccacaatagttaatggaatctgccacaggtaactgcaaaataaaagacaagctttaagaataaaaataactatatcgaaacaaaaacaaaaaacatttcccatgcgccttctgtgtgatttttattactctcattaggtgaactaaaaaaaaataattccggtcacaaaagtaaggcataggtcaaaaagatgaattcactctttcaatgccattaagaagacttggcctttaagaattttaattgcaatgcaaagagaactgccaacaaaaccatttttcttgggggaaaaaagattcgcattttgaatttgaaatagaaagtacctaatatctatacacctgagccatattgattaaagtctaaacataacttctttctacttgtttttatgttagattaagacacatttcagtggcttca

SEQ ID NO: 2176 - DNA, 1596 bp, Homo sapiens
tgctacattacttatcaatgcttcatatacagcgtatataaataaaagcatatgttttcgtcgtatgtctttatgtgttagaaatacaataacctgaaaatgtatgtaaacatctgcatggaactgtaagtgttcgtactgctgacaaccagattagattttactgtaacaacgttttcttgcatgtatacatatatgtattttgagcaygtaaacctcccttataatagcaaggctgaggagaagaaactgtgtttgtttatttatttatacctcaccctatttcaaataaaaaatatgtggctttttaaactaaggcttatgagagagcaaaataacatcaattaacagcatctgaggaaggagtaagaaaaacaatatctgggcacacttgactatctaaatctaaatgaaatgttacataaaagatgataattggctttttctctaactcagtggaaaacagaaataaaagggacctgtttcacactgtagaatgaaggctatagtttggattcaagaaatagctttctgacagtaaattgaaataggtcactatcttatttgaagatatttagaaagagaatagaatctcatctctctctgctccttgaggtttgaccccacctaagagatggcttgctaacctgtccaagccccccaccttctggccctgtaattatataattccatggagaatattgcctctctcaccttttaaagagacagtctggtaaagagaagataggaaagtgtaaaaatgagacctgtgttttcagtatttggcacactcttctctttgaggttataattatattttaattacatgtggagttataaagaaatacaattttaaacacctaagattagtattacacttatttttaagttttctctttaccattaaagaaacaaataatttagtaattatataaactgaaattagactatttagaaactatactatatctaattttatagggttgataatcattcctttatattctctttctaatttgtctttattcacattttataacagctgaaaccagaggttaagttgctaaacaattatctgaaaccagatacttcctcaggggagaatatatagtttacctgatttgttagacacccaaataattgcttctgaagacacatggcttctatttcctaccacaatagttaatggaatctgccacaggtaactgcaaaataaaagacaagctttaagaataaaaataactatatcgaaacaaaaacaaaaaacatttcccatgcgccttctgtgtgatttttattactctcattaggtgaactaaaaaaaaataattccggtcacaaaagtaaggcataggtcaaaaagatgaattcactctttcaatgccattaagaagacttggcctttaagaattttaattgcaatgcaaagagaactgccaacaaaaccatttttcttgggggaaaaaagattcgcattttgaatttgaaatagaaagtacctaatatctatacacctgagccatattgattaaagtctaaacataacttctttctacttgtttttatgttagattaagacacatttcagtggcttca

SEQ ID NO: 2177 - DNA, 687 bp, Homo sapiens
atgtgtgtgtatatgaatactactcagtcttaaaatggaaatcctgccttttgcaacaacatgagcgaacctggaggacattttgctaagtgaaataagcaagacagaaagacaaatgctacattatctcacttatatgtggaatctaaaatagtcgagctcatagaagcacagagtagattggtggttgtcaggggctggaaagtgggagaaacgggagatgtcggtcattggtacaaagtgtcagttatgcaggatagataaattctgaagacccaatgtacagcacgactatatygtatgttacaaatttgctaagaaggtagatcttgtttgcgcaccacctcccctccaaaaaaaaggtaactgagaggtgctggatatgctaaaagaaaaacaaaatgatatgtatatttcagtgttcataaatatttattaaaacagccacactaatttgtgtattgtctatggctgctttcatattgcaacagcagagctgaggagttgcagctgaggctgtatatgtatacatagtgtttgactctttacagaaaaagtttaccgactcctggtataggtgatacttacatcattttcagctttggaagggcagtgtgatggaaaattttcaaactttttttgagtctaccttttgatgttttttgtcaatttttaaaaaattctgta

SEQ ID NO: 2178 - DNA, 687 bp, Homo sapiens
atgtgtgtgtatatgaatactactcagtcttaaaatggaaatcctgccttttgcaacaacatgagcgaacctggaggacattttgctaagtgaaataagcaagacagaaagacaaatgctacattatctcacttatatgtggaatctaaaatagtcgagctcatagaagcacagagtagattggtggttgtcaggggctggaaagtgggagaaacgggagatgtcggtcattggtacaaagtgtcagttatgcaggatagataaattctgaagacccaatgtacagcacgactatatcgtatgttacaaatttgctaagaaggtagatcttgtttgcgcaccacctcccctccaaaaaaaaggyaactgagaggtgctggatatgctaaaagaaaaacaaaatgatatgtatatttcagtgttcataaatatttattaaaacagccacactaatttgtgtattgtctatggctgctttcatattgcaacagcagagctgaggagttgcagctgaggctgtatatgtatacatagtgtttgactctttacagaaaaagtttaccgactcctggtataggtgatacttacatcattttcagctttggaagggcagtgtgatggaaaattttcaaactttttttgagtctaccttttgatgttttttgtcaatttttaaaaaattctgta

SEQ ID NO: 2179 - DNA, 642 bp, Homo sapiens
gcacctcattgaatcttcccaacgattctctgggttacttatttttatccccctgttttgtagatgagagaacagagcctcagggaggttaagtygcccaagatattaagtggcatgccaggattcaaacctggagcccatacagtgacccatcaagcttcccagaagctgtgaacatctaggctgtaataacaccaccacctgcacagacgccacccttccccatcctcctgttcctgtgtacacagatttaatggtcagggaactggcatcgaaggccaacgttagctctggctgctgtacacctttgtaccaggaccttggcctctgtccagcatttaatgctcctgcaggaagttctccagccagagttggcatttgtggcctcaattaccccactttgaggcagggtcttgggtaaattggacatgaagtgactggggtgcagggcccggccccgcagagatacttcttgatagatccatctctcactggccaccatgtccaacatgggagcgccacagggctgagggaagacattggagccagcctcacagtcccattcattttctctctcttgaaactggctcctgttcccaaagttgctcccccctgggagggagatctcagaacccccataaa

SEQ ID NO: 2180 - DNA, 692 bp, Homo sapiens
tacccaatagctgactcagctgacgctatggggggctccagcattagaatgacctttcacctttgtctcaagttgagccaagaaactttatactcccatatctactattcaytggacaggccaccacaagaagggatgtgatcttaggtgagtggtttctgacagcatccttaaagaggttgacagacttcaagcttctctgccgacactaccctctacagctgagatcatcagaccttactgaagggagacttcagcagcacatcacagcatccaccacagtgcagcaagaagtaagcctgtctccgccagtgtgggaaaccaacatgcccctcacgcccaaccaagagcaatcaacatgtatccgggctggaatccgtggattcagagaaggggacttgccttctgagagccccctcgtaatccttgtctgggtgggctaactcctacaatggggtgctggcctccagttccctgtcccagctttttagttctctgctgagactacagttggttctgatatctccctgattccagaggaccataacccccggtcagccttatgagtccttactgaggcatccgccctgcttctactccaccacaagtggttgaagcatagatccccacccactcccagcatccaacttctctactgtgttgtcccttgtcagacaacaaggcctgcttag

SEQ ID NO: 2181 - DNA, 1135 bp, Homo sapiens
ttgtattttatgacataccagtaacaggaggacagaaagcattaggaaggaatcttaaacatttcctactgctgctgtgtggaggggtgggacaaggacgcataaaaagccactaagctttcctaccactttgacggaggctttttattgattgggtattttcatggttgccataaacctttttccagagctcctgtatgctttgttcagccattttctgttttttgttgctgtggaagaatggcagcttgcagcttcctagtctgccatctgtggacacgtcatgtattttttaagaaactttttaacacacctttattgatgcttcctcataccacgtaatatactaagtgctggagatgtcagtgccaaatttttgcctaaagctcatagtctagtcagattgactcaaacaaatcgctgatttaatgtgataagaataagaacaaatgagtacaaaagggacaagtaagttgtctagggccagccttgggaaaggaaagggcaatgtttgaacatctctgctttcctgttttcctggcagcagattcctgaaataattagcctacaggtttttacttcataatgatgagggaataaatattatcatttcctygttcatagttcatgttttaatttgtaaactgatgacctttttatcttttaagggcctgacatggaagcttttcaacaggaactggctctgcttaagatagaggatgagcctggagatggtcctgatgtcagggaggggattatgcccacttttgatctcactaaagtgctggaagcaggtttgttattcatttaagatgcaaactattgtatttctattttcacagtattttgtgtgacacagaggtaaaattactgctactttaatatcatacttcacgtctgaaggttctttgaatgtagttcagaccccaaatggctgccttacacactatcagggatagagggccaggtgtggtggctcatgctgttaattccagcactttgggaggccgagacagaaagatcacttgaggccaggacttccagagatggagaaaaattgggtcaaagctaattggattacgatatgaaagatatgaaacatgctaaaacagtagatttcaagtgtcttcacagc

SEQ ID NO: 2182 - DNA, 1135 bp, Homo sapiens
ttgtattttatgacataccagtaacaggaggacagaaagcattaggaaggaatcttaaacatttcctactgctgctgtgtggaggggtgggacaaggacgcataaaaagccactaagctttcctaccactttgacggaggctttttattgattgggtattttcatggttgccataaacctttttccagagctcctgtatgctttgttcagccattttctgttttttgttgctgtggaagaatggcagcttgcagcttcctagtctgccatctgtggacacgtcatgtattttttaagaaactttttaacacacctttattgatgcttcctcataccacgtaatatactaagtgctggagatgtcagtgccaaatttttgcctaaagctcatagtctagtcagattgactcaaacaaatcgctgatttaatgtgataagaataagaacaaatgagtacaaaagggacaagtaagttgtctagggccagccttgggaaaggaaagggcaatgtttgaacatctctgctttcctgttttcctggcagcagattcctgaaataattagcctacaggtttttacttcataatgatgagggaataaatattatcatttccttgttcatagttcatgttttaatttgtaaaytgatgacctttttatcttttaagggcctgacatggaagcttttcaacaggaactggctctgcttaagatagaggatgagcctggagatggtcctgatgtcagggaggggattatgcccacttttgatctcactaaagtgctggaagcaggtttgttattcatttaagatgcaaactattgtatttctattttcacagtattttgtgtgacacagaggtaaaattactgctactttaatatcatacttcacgtctgaaggttctttgaatgtagttcagaccccaaatggctgccttacacactatcagggatagagggccaggtgtggtggctcatgctgttaattccagcactttgggaggccgagacagaaagatcacttgaggccaggacttccagagatggagaaaaattgggtcaaagctaattggattacgatatgaaagatatgaaacatgctaaaacagtagatttcaagtgtcttcacagc

SEQ ID NO: 2183 - DNA, 1135 bp, Homo sapiens
ttgtattttatgacataccagtaacaggaggacagaaagcattaggaaggaatcttaaacatttcctactgctgctgtgtggaggggtgggacaaggacgcataaaaagccactaagctttcctaccactttgacggaggctttttattgattgggtattttcatggttgccataaacctttttccagagctcctgtatgctttgttcagccattttctgttttttgttgctgtggaagaatggcagcttgcagcttcctagtctgccatctgtggacacgtcatgtattttttaagaaactttttaacacacctttattgatgcttcctcataccacgtaatatactaagtgctggagatgtcagtgccaaatttttgcctaaagctcatagtctagtcagattgactcaaacaaatcgctgatttaatgtgataagaataagaacaaatgagtacaaaagggacaagtaagttgtctagggccagccttgggaaaggaaagggcaatgtttgaacatctctgctttcctgttttcctggcagcagattcctgaaataattagcctacaggtttttacttcataatgatgagggaataaatattatcatttccttgttcatagttcatgttttaatttgtaaactgatgacctttttatcttttaagggcctgacatggaagcttttcaacaggaactggctctgcttaagatagaggatgagcctggagatggtcctgatgtcagggagggkattatgcccacttttgatctcactaaagtgctggaagcaggtttgttattcatttaagatgcaaactattgtatttctattttcacagtattttgtgtgacacagaggtaaaattactgctactttaatatcatacttcacgtctgaaggttctttgaatgtagttcagaccccaaatggctgccttacacactatcagggatagagggccaggtgtggtggctcatgctgttaattccagcactttgggaggccgagacagaaagatcacttgaggccaggacttccagagatggagaaaaattgggtcaaagctaattggattacgatatgaaagatatgaaacatgctaaaacagtagatttcaagtgtcttcacagc

SEQ ID NO: 2184 - DNA, 1582 bp, Homo sapiens
ccttgctcattgtgttagtagggatgattctgaatgaaagtaacagaatattcctacytaaactgtttcaagccacgaagcaattcctattcattaacaaaaaatgagtgggttttgttggtacaggtattggaggggcctacaaagagttccaatgagatatcagtagatatctattacagcagctgaattggctattataaatgagagcaaatgtccacaaaaagacttgttcatagaagctttgtttgtaatagcccaaatcttagagccaacatgtccatcaagaggtgaatggataaagaaaccatggcatatccataccatggaatgctaatcagcaacttttgatacacacaacaaactgtatggaccttgagggcattatgctgaatggaaaaggccaaccccaaaaggacacatattgcatgattcttttttaagtaacagtcttaaaatgaaatgattagagagatggagaacagttgagttattacctgagcttagagatggtgctgggatggtggtgagtgtgactacaaagggatagcatgagaaagatctttatggtgatgaaacagttttgtaatttgattggattggtgattacacatatctccacatatgataaaatgacacaactacatacacattgttccaatgtcaatttcctgattttgatactatactatagttatgtaagctataaactgtcttgggggaaacaaggtgaagggtgtattatctttgcaacttcttgtgcatctataatttcaaaataaaaagtgaacacaaacacacacacacaagtatatttcaacagacctagtgcttctgggatccaatcaataaagtgaaatgaaaccatttaaaaaacaggaaatcagaaacactgcgtagatgctttataccttattgtcaacatggtaagggaggaaagactgaaacctaaggagggaaaatgacagcttgcaccatgaaaacaatattaccaagagtatagaatcattgctacccggttgccattgccaaaaagcaactgcttccagcatatgccagggtgatgctaaaatactggaggacagatgctgatgccacaattggattgaattgccagctgatgtgattctttgtcataagactggatgctgttactcctcctgaccatgttttcaaaaggattccactcaagcagttggtaatgttgacgttcatgaccccatttattttgatcttcctttacctgaggatggtagtctcaagagtttttctgcttatgtttataggagcctctgaaatgatgcttctgtttcaggcttctgttttgggttcttcttctttctttcctgtgccctttcttgtaggagagtaggctggatagttccaggattgagcatcaagttattgagttcttgtgttaggttatcccaggaagaatgggaggttactttcttcctggttgagatcccagaagtgtttcccatatacccctggcagcagtggcattcacatttgaatctcttctgatctgtatcacgtgagaaggaggcttttgcttttctgtcaacctgataaggtgcca

SEQ ID NO: 2185 - DNA, 679 bp, Homo sapiens
aggtgcacatgcaaatacattattaccacatatcaactttttaattctttcattcatcaaatgcttatagaagtctttctttaagccagtctctatgccagaaacctagaatataataatgtgaaaattgtggtcctgccttcaaagatttggataattttgggagaagacatcaggtaataaatataatacaaataaacatcagtttttaaactgtcgttaagtatwatgaggaaaaagcaagtactatttatgaataggacatgacctagtttgggctgaaaaagaagtgacgttatccacacacaagtgacttcaattgacagctgttttcccaagttgtaaaacaagttaggagaaggaagagaagacgaaaaacagctttgatggagacttagctaaaactatattcttgataatgccgataagtgaaaataaataatttatgggggaaaatctatatatgtaacctttactcactttacccagcgagtttcattttaaagtcttctggtattttaagtgagctggtctttattttcacttaacacacactcacttagaagattgaatattgagtgaccattttaataatcagtttagataaaggaaatcaattagcaaaatgtttctagaatttctttgacagtctcctaaatgttagacaaacttatccaaa

SEQ ID NO: 2186 - DNA, 821 bp, Homo sapiens
agttcaagttcagcctaggcaacatggtaaaaccccatttttaaaaaattagctgggcatggtggtatgtgcctgttggtcccagctacctggggggtgaagcaggaggatcccttgagcccaaaaagtcaaggctgcagtgagctgtgtttgcccccctgccctttagcttaggcaatgaagtgagacctgtttccaaaaaaaaaaaaaaaaaaaaaaaaaaaggcaggttgcaagatatatatagtatgacacaataaaactacgtatgtgtgcgtgtgttcatgggtatgaagtagcttacggaagttaatttggggaggggatagtagaattttgaaatatgttatttttctgaatcatatcctttataattacatttatgtaattaaagtatcatagaaaaggttattacaatatgtatttgtgacctacttaagtttactcaaaaaagtgccacttcattaacattgtaaaattaagctcttttgattttaacaggcaagaataaaggcatctatccaatctaaaactttttcatatttgagtgcatgaattatacccctgatttaataatgttgaacctgctataaccttcaacatacaccttcatttagccatctccgtatcctttgttttcacatgttcaatagtgttgcttttccttcactcaaattgtaaggggaaaaaactaaataaaatattgtctgtgtaataaagcattgttttaaaagctttgatcagtgccaagtcctagcacctgaagctatgctgaccatcytggcctcatttgctctttgccactgcataaaaccagtgca

SEQ ID NO: 2187 - DNA, 624 bp, Homo sapiens
actttgggatgaacttagtttatagtttaaaacaaagacgataatagccctttcacaaaacaaacctccctcttgactggggactagactgcctttgtaagaccaagaaattagccacaagattagaaattatgatttaggagtcatgcagctggaagctacaagattctgaccctctgtaacctgctcctaagatcaatgcttgagatattttgcagatcctgcacttgacggattagctggcaccagccagwttgataaactggctcatctgaccttgtggcccccacccaggaactgactcagcacaagatgacagcttcagctccctattatttcatctctgacctgaccaatcagcactcctggctcactggcttccctccacccaccaagttgtccttaaaaactctgatccctgaatgctcggggagactggtttgagtaataataaaactcctctgaaaagaaaaagttacaaaaattaaagaaataaaaattataataagagttgcaaaattgctatagtaaaagtttatgagtcaaaacgaatcactgctacttttctggctctgatgaagaacatttttcactgaacagcaaagcttcaagcgtccagtattt

SEQ ID NO: 2188 - DNA, 585 bp, Homo sapiens
tgctaaggccaattgcacgcaattatctccagattcaaagaaaccttaattgaggattggaggaatcagtaaaatggacatttcctctagcagaattttcttccatgttgatttcaggtttttgagagtcctaggctggtcatttgacacatgtgtgcagtttcttgttctatattccatgaaagtaggaggagcgtcaaatctgggctttacttaaaagtaacttgactgatttgggaccaattattgagttctgagcagaatttccacacmtatctgtcttgatctattttataaaggagaagacagctcatgttttatatcaccccagggaaaaataaattctttaattgcttgggagattcaaaattgcatccatggctgagcactgtccagccttttggcttgtttctggtaggcctgtcttaggtaatgcggctttatttaatttggcataacattctgttgttgctgaacaagagggaagtcaggtttctgataaaaaatatcatattatattctgggaatattcaaatatcagtgaaaaagaagaaacgtaggtggtgttaacagtaaaaatcctca

SEQ ID NO: 2189 - DNA, 585 bp, Homo sapiens
tgctaaggccaattgcacgcaattatctccagattcaaagaaaccttaattgaggattggaggaatcagtaaaatggacatttcctctagcagaattttcttccatgttgatttcaggtttttgagagtcctaggctggtcatttgacacatgtgtgcagtttcttgttctatattccatgaaagtaggaggagcgtcaaatctgggctttacttaaaagtaacttgactgatttgggaccaattattgagttctgagcagaatttccacacakatctgtcttgatctattttataaaggagaagacagctcatgttttatatcaccccagggaaaaataaattctttaattgcttgggagattcaaaattgcatccatggctgagcactgtccagccttttggcttgtttctggtaggcctgtcttaggtaatgcggctttatttaatttggcataacattctgttgttgctgaacaagagggaagtcaggtttctgataaaaaatatcatattatattctgggaatattcaaatatcagtgaaaaagaagaaacgtaggtggtgttaacagtaaaaatcctca

SEQ ID NO: 2190 - DNA, 401 bp, Homo sapiens
tatgcagctataaaaataatgcggtctgtccataygtactaatatatgtgctgatacagaaaatgaaaaaagtatagaacagcctgttcagtgtgattctctctgagctaaaacacatgtgcatacacgcacaagtgaatacacacaggcacacatatccgtacatgcaggcacgcagacacaatatacacacacctgtgagtgcacagaatttctaggaggtcatacgacaggaataagaagggatggggtgtggtggcacacgcctgtaatcccagctctttgggaggctgagctgggtgggtcacttgagtccaggagttcaagaccagcctgggtaacatggcgacaccccatctctacaaaaatcacaaaaaactaggcaggcgtggtggtgcatg

SEQ ID NO: 2191 - DNA, 903 bp, Homo sapiens
aacaatagctacttctcagtaattaagcttttagaattttctacataagcatgtccaattttccaatgggggagaatggggccaggaggaaaagttaagaaaaaagaggaattaagatggttcagaaaaatctagattttaggacatatgttgcaacatgataagaaacaagagaaggatgcttggcttggagccctggaaagttatatattgttacacgaaactctattgcatttgtgcactatgagagaaaataatatgatgagttaattaatttktcttttctctccctggagtactgttctactccaaaggctacccacactcctaagcagtatctattgcaaaagttagcagcacaaatcacaaaatgtgcccattcagatcattggcttttgtaagaatgatgggggccatcacgggtgaggaagcttttcttaaggcctgtgtggagagaggcacagagctgatgtttagtgctaagggtcacagcatgccagctccaaatgtgggattccgagtaacacaagtgcccacggtttctttaatatgtttatttccgcatgtatgactgtgagatgctgagacctcaactatgggcccaggcctaaggccagcactattctaagacacactgcttttcaaacctgtactgttaacagtcaagataaagtcactcaatcttcatgaaaagtaaaattaaatattggctatagtagggccaagattataacagttatttccctgttaataaaatttgtttgtaactctttcagaatatattttaagccagcgagccggtgactttgtgtgccatgtggttaaacaagagagtaaaagcttactgccatgaaagtaaatatccctggccggcactacttcagtaatttacctagcctaagg

SEQ ID NO: 2192 - DNA, 613 bp, Homo sapiens
ctgagtcactatagaattattttgttaatttttcagaaatagtcaaaagttatctatttgtgtataaattgcattgaaaaataaggatgctttatatagttttctatctagtaatgtttagattcaatagttttaaacttcactgtttcatggcaggcatatataagtaatgatttctggtagagcaaaaactacccaagttcagaacagttctttgaaaattaaatgatgtttttgttaaaacaaaaaataaaacccagaagtgagtttagagaaatgtgttttccaaatacttttctaaaactcaactttgaaatgtaggagtaactctacattattctaatccakccatctttttctcctgtttgcttgcgaaataaaaatctaaatacaaattgactttcaaatagcatgctttttgaagagatacgtttgtatttatctacctattatattcttataaatatttcactgtatacgtagtggtgagaaaaattataaataaggtgttttttactgattggattcatattattcaagatatcaattttaaagcttgcagttacttgtctcagctccatggtggagccaaaggcatgatctttacattttc

SEQ ID NO: 2193 - DNA, 637 bp, Homo sapiens
tttacataggcagaatgaaatcagaaaagcatgctgatagtgagatctcatttattagttaatcacttatgataaaatttatcttgtaaatcacagtaagaattgcatgtaatttataaatttagaaaaaaacattaactgtgtgatacatttgtaaaattattttgtgaaaatttaattactaaatctaagtattaactacccataaacatgtattctattattctttattttataaactcaccaattttataatcaaaacataaaaaccttgagtttatcatgtgtaaagtttgcttttagtaacaaatggaaactaatgccataaataatgtaccactattctattttgaatagtccctaagagctacgtctactctattatagtaagtacacatatgttaatttaagagcattggataaaataaagatgttggtttgagaattccattcctagtgcttataaataaaaaaagaattgcatgtaatgtaatagtcagtctattccccaaaatagaggagaaaagtcctctctaatctaatctgatggtgacatttaccctcagctaaactcaaagtatcttgatccaagacattaagcctttaaaaccactactarattattaatgattaaagt

SEQ ID NO: 2194 - DNA, 694 bp, Homo sapiens
taattgaagtaaatgtaagttaaaggcaccatactgtcatccagtatgggctaaatgagttaagaaaaaggacaactattgaaatggatcagaaaataccagttacattagaaactaaaacccatgaatagggatgatgtaatccactcatttttcagtgcatatctaaggagcactctacttgcatggtggtgtctggctcatggaacacactaaagatgaagacagatatactctggctcaacacaaagttataatttactgtgaragacagctgtgaatctatcattcaaacaccttgtacaatggattattcgtacaggcattcaatttgttctaatgtactgaattcgcccatatgcccccaggcaagaagagagaaaaaaagttatttctgtccccttaaatttttctactagcaagtataaatttggcctacatatttctagacacaggaagaccaaaactcaaaggcacaaggaaaagaaggaggtggatgtgtgtttttttgtgtgtccatgagttaagttttatcaattaataaggtatttaataattttcaacagtaattttaaggtcccttagtcttgcatacagatgccgctatctgcctttgaagtaagatattaataaaatactgtgattataattatattggatactttaaaaataagaataagttattataaatgca

SEQ ID NO: 2195 - DNA, 694 bp, Homo sapiens
taattgaagtaaatgtaagttaaaggcaccatactgtcatccagtatgggctaaatgagttaagaaaaaggacaactattgaaatggatcagaaaataccagttacattagaaactaaaacccatgaatagggatgatgtaatccactcatttttcagtgcatatctaaggagcactctacttgcatggtggtgtctggctcatggaacacactaaagatgaagacagatatactctggctcaacacaaagttataatttactgtgagagacagctgtgaatctatcattcaaacaccttgtacaatggattattcgtacaggcattcaatttgttctaatgtactgaattcgcccatatgcccccmggcaagaagagagaaaaaaagttatttctgtccccttaaatttttctactagcaagtataaatttggcctacatatttctagacacaggaagaccaaaactcaaaggcacaaggaaaagaaggaggtggatgtgtgtttttttgtgtgtccatgagttaagttttatcaattaataaggtatttaataattttcaacagtaattttaaggtcccttagtcttgcatacagatgccgctatctgcctttgaagtaagatattaataaaatactgtgattataattatattggatactttaaaaataagaataagttattataaatgca

SEQ ID NO: 2196 - DNA, 696 bp, Homo sapiens
  misc_feature (1)...(696): n = A,T,C or G
ttnnnnnnnnnnnnnnnnnnnnnnnnnnnnnnnnnnnnnnnnnnnnnnnnnnnnnnnnnnnnnnnnnnnnnnnnnnnnnnnnnnnnnnnnnnnnnnnnnnnnatttttcccatataagtattccctgtatatgggcatggttagtgtgggtgtatgtaacagattaattctcctgtgattaattctaccaacaaccttcagtgtgttaagactcacctttttcccagggaattgccctttgttcagaaaattattatgtacatttttaacagttaatttcttgttgttgtttctttttttaataagaagacattcatgaatggggcagaggtgagaatatggattagtctgaaggcacttcatccaaataaaggaaaataaaataagcagcttgctgtaaacatttaacgtttcctaccatgtattggtggtttaaaaaaagagaaagtcatgataacagctttataaatgttttgcaaatatatatacccaaaatatatatacrcacgtttgtgtgtatttgtatacatattatatatatgtataaaatatctgcacagtagataactttttgattgctaaaccaacaaagcttgccacatgctcctgccaatgctactttcttatgctacttctttatacaaaatttcatcaagaaaaaatgccagcattcaccaaaagcaaatatactttgga

SEQ ID NO: 2197 - DNA, 1184 bp, Homo sapiens
tttgaatattaagtctcttcgaaccatgcttatcaaactttaatgtttatacaaagtacctggtgattgtcttaaaacgcagattctgcttcagtaaaaagagaatagtcctgagagtcatttctagcaggtacttgagttataaaattgctgcctaatttcaggatatatgttgaataatgtgtgaatctctaaaagacattagtcaggatcataacaattttagatctacctaaaattatttaaaacatgtttgtaaaagatttggcttcattataaaaaaaattgtaacagagcatttataaaatatgcatagctagctatatcaagacactaactaaaattaagttgaaacccagacattaatgacagctaaattttcttttaatgatattgtgaaagggccaatttatacccaggttctataggtggctactaagtgctaattaaaataatgaagaacatctgtaacatttttagatcagatttgtcaaaatacgttgaagcacatgtacaataaatgagcaacatgtgtttcatatgaaccaaatgaaactggagcctctcagaatgctttgccagagacaacagcagctgtgggtatcacctctactttcattctgctttaaaatgcctcattttcttctttcagtttataggtgaaatgtataataagtcttttgcagaaaaaytaattaaacgttgacctcttcataaaggagatggtgattcattccacatattgtaccaaacactagcttttaaaataaaaatttaagttcagcaaagtattctataaattgaagctgttattctgatgatcatgtccattttcattagctaacttttagaaaactcagtgaaatattttaagaaacttaggacacaatgatttgaaattctcaactgaattatatttaaaagtgaaaatatgaaaaaagtgtataaagcataatcttggtgaaacagcttgtcttcttaggacaagtaatatttcgtggtaaatgactttataaatatggatagagtttccacgtagaatcgggataatacacccaccagctcatggagatgttctgaggaacagattagattacatataggaaaatgttttgaaaattacagtgaactttacaaagttaggataatcttttactaagactggtcaatgtgtaatgtttatc

SEQ ID NO: 2198 - DNA, 1184 bp, Homo sapiens
tttgaatattaagtctcttcgaaccatgcttatcaaactttaatgtttatacaaagtacctggtgattgtcttaaaacgcagattctgcttcagtaaaaagagaatagtcctgagagtcatttctagcaggtacttgagttataaaattgctgcctaatttcaggatatatgttgaataatgtgtgaatctctaaaagacattagtcaggatcataacaattttagatctacctaaaattatttaaaacatgtttgtaaaagatttggcttcattataaaaaaaattgtaacagagcatttataaaatatgcatagctagctatatcaagacactaactaaaattaagttgaaacccagacattaatgacagctaaattttcttttaatgatattgtgaaagggccaatttatacccaggttctataggtggctactaagtgctaattaaaataatgaagaacatctgtaacatttttagatcagatttgtcaaaatacgttgaagcacatgtacaataaatgagcaacatgtgtttcatatgaaccaaatgaaactggagcctctcagaatgctttgccagagacaacagcagctgtgggtatcacctctactttcattctgctttaaaatgcctcattttcttctttcagtttataggtgaaatgtataataagtcttttgcagaaaaactaattaaacgttgacctcttcataaaggagatggtgattcattccacatattgtaccaaacactagcttttaaaataaaaatttaagttcagcaaagtattctataaattgaagcygttattctgatgatcatgtccattttcattagctaacttttagaaaactcagtgaaatattttaagaaacttaggacacaatgatttgaaattctcaactgaattatatttaaaagtgaaaatatgaaaaaagtgtataaagcataatcttggtgaaacagcttgtcttcttaggacaagtaatatttcgtggtaaatgactttataaatatggatagagtttccacgtagaatcgggataatacacccaccagctcatggagatgttctgaggaacagattagattacatataggaaaatgttttgaaaattacagtgaactttacaaagttaggataatcttttactaagactggtcaatgtgtaatgtttatc

SEQ ID NO: 2199 - DNA, 1184 bp, Homo sapiens
tttgaatattaagtctcttcgaaccatgcttatcaaactttaatgtttatacaaagtacctggtgattgtcttaaaacgcagattctgcttcagtaaaaagagaatagtcctgagagtcatttctagcaggtacttgagttataaaattgctgcctaatttcaggatatatgttgaataatgtgtgaatctctaaaagacattagtcaggatcataacaattttagatctacctaaaattatttaaaacatgtttgtaaaagatttggcttcattataaaaaaaattgtaacagagcatttataaaatatgcatagctagctatatcaagacactaactaaaattaagttgaaacccagacattaatgacagctaaattttcttttaatgatattgtgaaagggccaatttatacccaggttctataggtggctactaagtgctaattaaaataatgaagaacatctgtaacatttttagatcagatttgtcaaaatacgttgaagcacatgtacaataaatgagcaacatgtgtttcatatgaaccaaatgaaactggagcctctcagaatgctttgccagagacaacagcagctgtgggtatcacctctactttcattctgctttaaaatgcctcattttcttctttcagtttataggtgaaatgtataataagtcttttgcagaaaaactaattaaacgttgacctcttcataaaggagatggtgattcattccacatattgtaccaaacactagcttttaaaataaaaatttaagttcagcaaagtattctataaattgaagctgttattctgatgatcatgtccattttcattagctaacttttagaaaactcagtgaaatattttaagaaacttaggacacaatgatttgaaattctcaactgaattatatttaaaagtgaaaatatgaaaaaagtgtataaagcataatcttggtgaaacagcttgtcttcttaggacaagtaatatttcgtggtaaatgactttataaatatggatagagtttcyacgtagaatcgggataatacacccaccagctcatggagatgttctgaggaacagattagattacatataggaaaatgttttgaaaattacagtgaactttacaaagttaggataatcttttactaagactggtcaatgtgtaatgtttatc

SEQ ID NO: 2200 - DNA, 1225 bp, Homo sapiens
catagaaaactatcagaaaaccctatttgtttagaagttgttaattcagactttaagatcctacgacctaagcagaattttgctttttctctgtctggaaaaggaagatttgatgagcaaaataagagcacagccaaagccataagtatctccttcatttgtgtagtcattcagccaacacctaactgagggcttagcaattgccaggatctgggctggggactggggactgggattgacacaggccctgtgtgcacagtccaaggtaaaagatcccgttagtaagtaaatgcgatgcaagtgttgcagcaggtgtgacagaagccagttctaagaggaggagagaatggcctatgctcacctggaagcaaaaattgcctaagaagaaaatggtttaaaaatggggcaagtaattgcaaatgtgcttttcatctgttatggctgttgcagagaaataatttaagttaaaattgtccatcttcagagagrtaaacacttttttaaaatttggagagcactgcagaactcttgtagctgaacagtgcaccccaggctgtatccataaaaagaaaaattgcaaaaccttattctgaactaaatacagaaacgcaaacagtggaagtatttctgagaatgttaatatttgggaacttgtttgggggactttaaaacattgaaaagggtaggtctgcatgagagttagtgaatgcactaaaataatattcataaaaatacgtcgtgagaagccaacatttattttaaaaagaggcataaaatatctgtaatattgtgctttattttattaggtactattatatagggaaaatccataatttttagaaacagactgacatatttaggggtggaatgtcttgatgtccaactttaaaaatacttcagaaataaaaggtgagaaaatatgacacatttattaaattttcgtaatgggcttgtgggcattcattatatgcttctccttttctgtatatttgaaaatgtccacaatttaaagtcagaaagtctgtgtctatactatttactgaataacttctatgtgctggacagttatacttggtactcatttctaaatttcacaacaaccctgcaaaatcagtaactatccccctttaaagatggcagaactgaagctcagggtcaccagttggcaggagtcagagtccctctctgaatctggatttgtttaatgcaagacacacccgatgca

SEQ ID NO: 2201 - DNA, 785 bp, Homo sapiens
ttaaagacagagaatataaaagaagccggaatatttcatgacgtgctaaagtgtatgaacttcaaatatcagtgaccacaaataaagttttattggaacactttattcattgcttattcatttatgtattgtctatagctgcttttgtactacagtggctatgttgagttgctgtgacaaagacctgcaaagcctaaagtatttgttatctagacttttacagaaaaagtttgcttaaccctaatttagtcactcatctgatatcaaccaggagagctgcctggaaatcactgttaaacgcatacatgccattttctcgatgtaggcacttgttttcccaggaaggtctgccagcttgattaattgcatcagtagatattcatactggacaatctggctcacatttgcctgtgmtcctgacaagctgtctatgttgcttagtaatggttgtgtgtcaccagtgaccttaaggaaataatggaatagaaatagaaataaatgtaatggaagttgataacattattagttctataatataatttttctgccctttatacagttttgtaactgagtttagaaaccattataaataatgaaagacagaataaagcaagacagacagatataattcccatccattagcaaaatgtaaacaaatgaaaacccagagaaattaaacaagtttcttatcatatagctactgaatggcaaaactaggactagacaccaggtatcccaataccttatttcattattttgcttcttagtaatgagactgccatgca

SEQ ID NO: 2202 - DNA, 785 bp, Homo sapiens
ttaaagacagagaatataaaagaagccggaatatttcatgacgtgctaaagtgtatgaacttcaaatatcagtgaccacaaataaagttttattggaacactttattcattgcttattcatttatgtattgtctatagctgcttttgtactacagtggctatgttgagttgctgtgacaaagacctgcaaagcctaaagtatttgttatctagacttttacagaaaaagtttgcttaaccctaatttagtcactcatctgatatcaaccaggagagctgcctggaaatcactgttaaacgcatacatgccattttctcgatgtaggcacttgttttcccaggaaggtctgccagcttgattaattgcatcagtagatattcatactggacaatctggctcacatttgcctgtgatcctgmcaagctgtctatgttgcttagtaatggttgtgtgtcaccagtgaccttaaggaaataatggaatagaaatagaaataaatgtaatggaagttgataacattattagttctataatataatttttctgccctttatacagttttgtaactgagtttagaaaccattataaataatgaaagacagaataaagcaagacagacagatataattcccatccattagcaaaatgtaaacaaatgaaaacccagagaaattaaacaagtttcttatcatatagctactgaatggcaaaactaggactagacaccaggtatcccaataccttatttcattattttgcttcttagtaatgagactgccatgca

SEQ ID NO: 2203 - DNA, 1664 bp, Homo sapiens
ataattcttggtctttttaaagtcttctgactggggaatcatagcatttaccttaaatcatctagacttacttatttatttattttttctttgagacggagtctctctctgtcactcaggctggagtgcagtggcgcgatctcggctcactgcaagctccgcctcccgggttcacaccattctcctgcctcagcctccccagtagctgggactacaggcgccygccaccacgcctggctaattttttgtatttttagtagagacggggtttcaccgtgttagccaggatggtctcgatctcctgacctcgtgatccgcctgcctcagcctcccaaagtgctgggattacaggcgtgagccactgcgcccagccaatcacctagacttattataattagagttactagtcccttcaggttaccagtgaatttttttctataaagcaccgaggcttcaaagacattagcaatactagtaaaggaattactcttaattgaaaaacactaatgtatcagataatctgctaaattctttatatacatttcctctaatctttacaaacatcctcctaggtaagtcatatttaacccattttacagataaggatattgaggctcatagaagttaagtgatttcgtcaagttcactcactcagtaaatagtagagttgggattcaaaccaggtctttctggcaccaaaacccatgtatactttttgcttttatgccataatgctttcttaactctttagaaaacactaatatcacttaaaacattgaaggcagaatgagcttggtgtgattagcaatcctttgtttcctttccagtattcaattctgacattcccaaaagagattctgagttctgtaagcgtctgttggtcacactctatcaagcccccttctttgctcctgctgtttttcttctttaaataccatttctccctttctctgtccagtgactgtctacccatcctgtggggctccatcagggtacaatttcttttttgtttgtaagacagggtcttgctctgttgtccaggctagagtacaatggcatgattatggtttactgcagtctctacttcttgggctctagcaatcctcctacctcagtctccctagtagctggtactacaggcatgcaccaccatgcacagctaacttttttgtttttttgtagaaatgaagtctcaccatgttgcccaagctggtctcaaactcttggcctccagaaatcctccaacttcagcctcccaaggtgctgggattacaggtaatagccactgtgcccagttaaggtgcaacttctttatggagcttttctttacttctccaagcaaaattagttgctcccttctctatgttctctgtacattttagtttgtaccatataaaattgcctctatgtaaccatttttgacctacaaatctggcaattttatatcatttagccaaatatctccttatcccattgtattacattttgggttggcatgtgtctatcctctctccattccaccccccagaatgtaagttccatgacagttaacagtaagagctgactttctgtgtgcttcctaggaggccaggactgttctacacacttgaagtaaattaactcttttaattcttagagcaatggtgtaatgatgatacttttct

SEQ ID NO: 2204 - DNA, 1664 bp, Homo sapiens
ataattcttggtctttttaaagtcttctgactggggaatcatagcatttaccttaaatcatctagacttacttatttatttattttttctttgagacggagtctctctctgtcactcaggctggagtgcagtggcgcgatctcggctcactgcaagctccgcctcccgggttcacaccattctcctgcctcagcctccccagtagctgggactacaggcgcctgccaccacgccyggctaattttttgtatttttagtagagacggggtttcaccgtgttagccaggatggtctcgatctcctgacctcgtgatccgcctgcctcagcctcccaaagtgctgggattacaggcgtgagccactgcgcccagccaatcacctagacttattataattagagttactagtcccttcaggttaccagtgaatttttttctataaagcaccgaggcttcaaagacattagcaatactagtaaaggaattactcttaattgaaaaacactaatgtatcagataatctgctaaattctttatatacatttcctctaatctttacaaacatcctcctaggtaagtcatatttaacccattttacagataaggatattgaggctcatagaagttaagtgatttcgtcaagttcactcactcagtaaatagtagagttgggattcaaaccaggtctttctggcaccaaaacccatgtatactttttgcttttatgccataatgctttcttaactctttagaaaacactaatatcacttaaaacattgaaggcagaatgagcttggtgtgattagcaatcctttgtttcctttccagtattcaattctgacattcccaaaagagattctgagttctgtaagcgtctgttggtcacactctatcaagcccccttctttgctcctgctgtttttcttctttaaataccatttctccctttctctgtccagtgactgtctacccatcctgtggggctccatcagggtacaatttcttttttgtttgtaagacagggtcttgctctgttgtccaggctagagtacaatggcatgattatggtttactgcagtctctacttcttgggctctagcaatcctcctacctcagtctccctagtagctggtactacaggcatgcaccaccatgcacagctaacttttttgtttttttgtagaaatgaagtctcaccatgttgcccaagctggtctcaaactcttggcctccagaaatcctccaacttcagcctcccaaggtgctgggattacaggtaatagccactgtgcccagttaaggtgcaacttctttatggagcttttctttacttctccaagcaaaattagttgctcccttctctatgttctctgtacattttagtttgtaccatataaaattgcctctatgtaaccatttttgacctacaaatctggcaattttatatcatttagccaaatatctccttatcccattgtattacattttgggttggcatgtgtctatcctctctccattccaccccccagaatgtaagttccatgacagttaacagtaagagctgactttctgtgtgcttcctaggaggccaggactgttctacacacttgaagtaaattaactcttttaattcttagagcaatggtgtaatgatgatacttttct

SEQ ID NO: 2205 - DNA, 1664 bp, Homo sapiens
ataattcttggtctttttaaagtcttctgactggggaatcatagcatttaccttaaatcatctagacttacttatttatttattttttctttgagacggagtctctctctgtcactcaggctggagtgcagtggcgcgatctcggctcactgcaagctccgcctcccgggttcacaccattctcctgcctcagcctccccagtagctgggactacaggcgcctgccaccacgcctggctaatwttttgtatttttagtagagacggggtttcaccgtgttagccaggatggtctcgatctcctgacctcgtgatccgcctgcctcagcctcccaaagtgctgggattacaggcgtgagccactgcgcccagccaatcacctagacttattataattagagttactagtcccttcaggttaccagtgaatttttttctataaagcaccgaggcttcaaagacattagcaatactagtaaaggaattactcttaattgaaaaacactaatgtatcagataatctgctaaattctttatatacatttcctctaatctttacaaacatcctcctaggtaagtcatatttaacccattttacagataaggatattgaggctcatagaagttaagtgatttcgtcaagttcactcactcagtaaatagtagagttgggattcaaaccaggtctttctggcaccaaaacccatgtatactttttgcttttatgccataatgctttcttaactctttagaaaacactaatatcacttaaaacattgaaggcagaatgagcttggtgtgattagcaatcctttgtttcctttccagtattcaattctgacattcccaaaagagattctgagttctgtaagcgtctgttggtcacactctatcaagcccccttctttgctcctgctgtttttcttctttaaataccatttctccctttctctgtccagtgactgtctacccatcctgtggggctccatcagggtacaatttcttttttgtttgtaagacagggtcttgctctgttgtccaggctagagtacaatggcatgattatggtttactgcagtctctacttcttgggctctagcaatcctcctacctcagtctccctagtagctggtactacaggcatgcaccaccatgcacagctaacttttttgtttttttgtagaaatgaagtctcaccatgttgcccaagctggtctcaaactcttggcctccagaaatcctccaacttcagcctcccaaggtgctgggattacaggtaatagccactgtgcccagttaaggtgcaacttctttatggagcttttctttacttctccaagcaaaattagttgctcccttctctatgttctctgtacattttagtttgtaccatataaaattgcctctatgtaaccatttttgacctacaaatctggcaattttatatcatttagccaaatatctccttatcccattgtattacattttgggttggcatgtgtctatcctctctccattccaccccccagaatgtaagttccatgacagttaacagtaagagctgactttctgtgtgcttcctaggaggccaggactgttctacacacttgaagtaaattaactcttttaattcttagagcaatggtgtaatgatgatacttttct

SEQ ID NO: 2206 - DNA, 1664 bp, Homo sapiens
ataattcttggtctttttaaagtcttctgactggggaatcatagcatttaccttaaatcatctagacttacttatttatttattttttctttgagacggagtctctctctgtcactcaggctggagtgcagtggcgcgatctcggctcactgcaagctccgcctcccgggttcacaccattctcctgcctcagcctccccagtagctgggactacaggcgcctgccaccacgcctggctaattttttgtatttttagtagagacggggtttcaccgtgttagccaggatggtctcgatctcctgacctcgtgatccgcctgcctcagcctcccaaagtgctgggattacaggcgtgagccactgcgcccagccaatcacctagacttattataattagagttactagtcccttcaggttaccagtgaatttttttctataaagcaccgaggcttcaaagacattagcaatactagtaaaggaattactcttaattgaaaaacactaatgtatcagataatctgctaaattctttatatacatttcctctaatctttacaaacatcctcctaggtaagtcatatttaacccattttacagataaggatattgaggctcatagaagttaagtgatttcgtcaagttcactcactcagtaaatagtagagttgggattcaaaccaggtctttctggcaccaaaacccatgtatactttttgcttttatgccataatgctttcttaactctttagaaaacactaatatcacttaaaacattgaaggcagaatgagcttggtgtgattagcaatcctttgtttcctttccagtattcaattctgacattcccaaaagagattctgagttctgtaagcgtctgttggtcacactctatcaagcccccttctttgctcctgctgtttttcttctttaaataccatttctccctttctctgtccagtgactgtctacccatcctgtggggctccatcagggtacaatttcttttttgtttgtaagacagggtcttgctctgttgtccaggctagagtacaatggcatgattatggtttactgcagtctctacttcttgggctctagcaatcctcctacctcagtctccctagtagctggtactacaggcatgcaccaccatgcacagctaacttttttgtttttttgtagaaatgaagtctcaccatgttgcccaagctggtctcaaactcttggcctccagaaatcctccaacttcagcctcccaaggtgctgggattacaggtaatagccactgtgcccagttaaggtgcaacttctttatggagcttttctttacttctccaagcaaaattagttgctcccttctctatgttctctgtacattttagtttgtaccatataaaattgcctctatgtaaccatttttgacctacaaatctggcaattttatatcatttagccaaatatctccttatcccattgtattacattttgggttggcatgtgtctatcctctctccattccaccccccagaatgtaagytccatgacagttaacagtaagagctgactttctgtgtgcttcctaggaggccaggactgttctacacacttgaagtaaattaactcttttaattcttagagcaatggtgtaatgatgatacttttct

SEQ ID NO: 2207 - DNA, 1551 bp, Homo sapiens
gccgggcatggtggctcacgcctgtaattccagcactttgggaggccaaggcaggtgtatcacatggtcaagagatcgagaccatcctggccaacgtggtgaagtcccgtctctattaaaaatacaaaagttagctggcgtgttgatgcgcgcctatagtcccagctacttgggaagctgaggcaggagaatcgcttgaaccygggaggtggaggcagtgagccaagatcatgctgctgcactccagcctgggcgacagagcgagaatccgtctcaaaaaaaaaaaaaaaaaaagatagaatattatttttatttatagatgatttgatactttaaaaagaatcaattgaaaaacaattagtggtttaaaaatttgagacaatataaataatcaaaattcctttatagatatctaataacctgaagacatgaaaaatatatcaactgtaatatatataaaatatataaatatataagtatgtataatggatacataataatgtatcagatataatatccatatatccatataactatatgtactatcccaatattttatatatattataaagtactagtcataaaatactagtcatgaactaagagaggcataaaagattttaataaactgagagcttcttctggagagggtggggcctagaataaattttttgaaaaagtgtttctttacaaatcaacacatagagtgaatataaataagcttaaaattcaaatgaacaggctgtgtgtggtggttcatgcctgtggtcacagcattttgggaggctaaggcaggaggatcacttgaggccaagagtttgagaccagcctgggcaatatggtaaaaccccatctctactaaaaaaatacaaaaatcagccagacgtggtggtgcatacctgtaatcccagcaacccaagaggctgaggcatgagaatcacttgtacccaggaggtagacgctgcagtgagccaagatcatgccactaccctccagcctgggggacagagcaaaactgtttcaaaacaaaaccaaaaccgaatataggagtggaattgaaatgtgcttcctcttttatcttgctttttctcacctaacacctccctctctagccttgagtttataaaattcacagttgtcacaagtgtttccctttgctgggccaccaacctggtttgtctgggttgtgaggggcagagtggatgctgtaaagaatgtctcctctccttgtaggtgagagaagagaagatgttccctcacgtagttaattctgtgtgtcagctgattacaatgccagacaatagatgccttccaatacaggggtgataaatgtaggctaaatgggaagtggagtcatattttcttgttcatctctgattccccagcacatagaagagtgattggcacataataagcattcaatagatatgtgtttaataaaggttttcactgacttgtgatatctttaatattttctcacagattatttgcctgatatgtaatgatggttaatccacaaattagttaatccattgcagataactgagagtt

SEQ ID NO: 2208 - DNA, 1142 bp, Homo sapiens
gaccctcatgacaaatctgagaggtagggtgggcaggtgttactattcctcctttacaagcaaagacagtaaggctaagagatttcccccatccccaccccaagtaataacaccttattttaatttgcagagtatggaaagcaaaggaaaattagaaattatttagcaaattctagctggttaagcatgtggaaggcattaatcaccaccccaaacaacaycatactcatcaatattgtttcttaccattaaatgtgctgaaatagaaattgctattttgacaatgtgaagtattattacaaggatttgagtttgctaaaaggccttatctccttcaatttgatactgtgtacaggaaaagctcaagataataacccattaaccacagttattaaaggttttcccgctgtatttacaaaactcatgaaaaaaaaatcgttattgacagaactagccaaaaattagtacagatccttgacactcagggaaacagaggtcaaatatagaatattaatattgaacaacatgtgtactatacaatcaaagaagaattactgagcattttcatgcccagaagtatgctgagtgctgtgggaatttaaaacaagctcctcacccagacagtttacaatctagttaggtgtttaccattgaataatctatgcagatcccattctttaatgaggagcaaagagccaggagcatatggaacaataaatgttctggtaatattaaagacaataacaagcagaagtaaagacagttttttcctgccctgttttcctgggctaatttgtcagagcatcgtagtctgaacaaaagctgtgccaataggaatctgtactaagaaagcaatattttcatcctttttaatgtcagtctgcaagcaaaagtgacaagtggtatcattcaatgaaaggtcagggggacaaaagcatgcagctgaatttgtttagggcttaccttatctttctttgataaacaaaacaattgacctaagtctcataacctgaagctcttcacatcttactaaactgcaatcatgaagttgaagatgattataatgattattttttcttcatacccttctctctgaagtagctgcagagttttcaaagacaagcatgatttccaaaagagga

SEQ ID NO: 2209 - DNA, 1142 bp, Homo sapiens
gaccctcatgacaaatctgagaggtagggtgggcaggtgttactattcctcctttacaagcaaagacagtaaggctaagagatttcccccatccccaccccaagtaataacaccttattttaatttgcagagtatggaaagcaaaggaaaattagaaattatttagcaaattctagctggttaagcatgtggaaggcattaatcaccaccccaaacaacaccatactcatcaatattgtttcttaccattaaatgtgctgaaatagaaattgctattttgacaatgtgaagtattattacaaggatttgagtttgctaaaaggccttatctccttcaatttgatactgtgtacaggaaaagctcaagataataacccattaaccacagttattaaaggttttcccgctgtatttrcaaaactcatgaaaaaaaaatcgttattgacagaactagccaaaaattagtacagatccttgacactcagggaaacagaggtcaaatatagaatattaatattgaacaacatgtgtactatacaatcaaagaagaattactgagcattttcatgcccagaagtatgctgagtgctgtgggaatttaaaacaagctcctcacccagacagtttacaatctagttaggtgtttaccattgaataatctatgcagatcccattctttaatgaggagcaaagagccaggagcatatggaacaataaatgttctggtaatattaaagacaataacaagcagaagtaaagacagttttttcctgccctgttttcctgggctaatttgtcagagcatcgtagtctgaacaaaagctgtgccaataggaatctgtactaagaaagcaatattttcatcctttttaatgtcagtctgcaagcaaaagtgacaagtggtatcattcaatgaaaggtcagggggacaaaagcatgcagctgaatttgtttagggcttaccttatctttctttgataaacaaaacaattgacctaagtctcataacctgaagctcttcacatcttactaaactgcaatcatgaagttgaagatgattataatgattattttttcttcatacccttctctctgaagtagctgcagagttttcaaagacaagcatgatttccaaaagagga

SEQ ID NO: 2210 - DNA, 1226 bp, Homo sapiens
acatccaatctcctgggacctaagccattgggatgctttgcaaagttgagattctccatcatgctgcaaaccttgccttggagacaacagacattattttctattactttatgtgcacttatgctattttcatggagtcccacatctatatataatgttttagaagtaatgagcatgtcccatttcatgggtgttcttgattcaaaatcatttaacttaagaacacttaatactagaactaaaggccataacttcattttataacttctaggcattgtaaatttcaattttctttaagctctaaactaatcttctactgtttgttgaaatattacttataccagtttatcggtacttggaagacttaatttccctgagaatccgtctctgcaggctccrtttcacacgggcactagagtaggttaagacgctgcttgtctagcacttataacgagcaagtatattgaaaagaagccccgttgttcctcataccaacctgactgtggctgccatataaaacctactgagccatatattttactcatcttaataagcgcattataaaatggcactgaatttcttcctctcagagacaaggaatgctcagggtattaagaacatcaaaagcagaaaaagttaagtagttgcaacaggtacagatctaaggcaaagaactacatctatcgtggaatctcagatcaaatatgcctgctttttcctttcgccctttggggtcgttcctctgataaataattcacagactgcagtgcaaagtagtttgcatactgacaagattaaaaagaatgctttgtctgggttaaatttacaatctgaaaccttcctttaaaatgtcaagaaggtaattaatttaagaaggtttgccaagcagagtctccgaccctgtcagaaaaatttcatttcctgagggtgaaggggatgttgcatttatctttcccaaatgcctgttttggtttccattttaagaccattttctcccttcctaatatgccttatagcccttttctttttaggcaaaaattaacccagtattctttcttggtggatttttttttaagattatctaacacagtctgcaaattacctgtgagtggggactaaagcacaggtcagaccttttgacacaaacagaagggcattttccacagagagcactctccccggcctgaacattcagacaagcattttgagtagcagcgggaaatgca

SEQ ID NO: 2211 - DNA, 611 bp, Homo sapiens
taaacattccaccattgatctattcattcaattagatggatcttagatgttgatggacatgtaggttgtttttaggtttgttctattatgaactaaattattacagacattgttgctcatgtcttttagttgatagatacacatgtctctgggcatatacctgagtggtattgctgggtcataggataagcatrttttagcatttgtaaatacttccaagtagttttccaaaaaggctgtactaatttatattcctactaaagtactgtatggaagatccacttacttaatatctctgtgaacacttggtattgccaacatttttacctttagatattctggtgagtgtgtagtggcaaaccagatcttgagacagacactcagtttcattgcacagcacagcctgacactacctttttattctcactcattttatccacaggaaaatttctcttggtcctaggcctggttgaagagtgggggttggtggtggcagggcagagctagatccttctgtctgatttggctacaacccctgagctggattctagctcctatattttaatctttattgtgtaaatttggcagttcactgagagaatacagagctc

SEQ ID NO: 2212 - DNA, 1248 bp, Homo sapiens
ggaacggaaaactggggtggtagaagagggtgctaataatcagccttctctgagtggttcacaaagaagtgaatacagagacatgcaatttgtgcagtgaaatttaaaacaccttttgtaagtcaacaaaaacaagtttctcatggctcagaaaagagagcttcctgagttttttattaataaactcatgttacaaccagcatgcccatgtataccaagtcaggcagcaaaagaaaatggagagatcactagccttttaggaaaaaaaaaagagtcctaatgttgatttatttctttattaacaagtaatctgtcggtttactccactctgtgtgaagatgtaccactaactcattacacgacttcaggcgaagatgttttttatctacttcctcaaatacagaatgaatttaacacttgtctcactgacttcacaaggtgaagtcactgcactaaatgttttaggtacaagatctcattttatccctccaagatgcccatgaagtaagtatcattaattaaagctattttacagacgaggaaaatggggcttcagaaaaatagattctctaatgacagaagatgaaaaatttctttgaataatataaaatgctatacaaaaatgatgtaattatakccattttaaacaggaaacagtgaagcatgtatgctgtagaaaaaaatgtcaactatatttagtagctcagtaagaccacccgatataactcatgtaataatacaaaacgtttagttagagcttatatatgccaaccgcaggtcttagcatttatgtcctcactttaattcattaatcttcaaaataaccctgtgaggtacatagtattattatccccacttcgcagctaaagaaacacagaaacagaacaagtgacttgttccaggtaacagctagtaaacggcagagctgggactagaacccagaaggtctggttcttaaacctgcgctcttcatcataacactgcttctatgaagcaggctggaaagggtgcaaaccaattagctatttattcaacaggcttagagaacaaatagctggattatttctcattgcgcacaagccttcgggccattctctaggctctgttggtttggtccgcatgatgttctgtaaggagcaatcagagtttcaaatggcagctcagccagccctgttcatcctccatgacctctttaaggttctgtttcccattcgtaaatgaggaaaagaatacctattcatcagggat

SEQ ID NO: 2213 - DNA, 1248 bp, Homo sapiens
ggaacggaaaactggggtggtagaagagggtgctaataatcagccttctctgagtggttcacaaagaagtgaatacagagacatgcaatttgtgcagtgaaatttaaaacaccttttgtaagtcaacaaaaacaagtttctcatggctcagaaaagagagcttcctgagttttttattaataaactcatgttacaaccagcatgcccatgtataccaagtcaggcagcaaaagaaaatggagagatcactagccttttaggaaaaaaaaaagagtcctaatgttgatttatttctttattaacaagtaatctgtcggtttactccactctgtgtgaagatgtaccactaactcattacacgacttcaggcgaagatgttttttatctacttcctcaaatacagaatgaatttaacacttgtctcactgacttcacaaggtgaagtcactgcactaaatgttttaggtacaagatctcattttatccctccaagatgcccatgaagtaagtatcattaattaaagctattttacagacgaggaaaatggggcttcagaaaaatagattctctaatgacagaagatgaaaaatttctttgaataatataaaatgctatacaaaaatgatgtaattatatccattttaaacaggaaacagtgaagcatgtatgctgtagaaaaaaatgtcaactatatttagtagctcagtaagaccaccygatataactcatgtaataatacaaaacgtttagttagagcttatatatgccaaccgcaggtcttagcatttatgtcctcactttaattcattaatcttcaaaataaccctgtgaggtacatagtattattatccccacttcgcagctaaagaaacacagaaacagaacaagtgacttgttccaggtaacagctagtaaacggcagagctgggactagaacccagaaggtctggttcttaaacctgcgctcttcatcataacactgcttctatgaagcaggctggaaagggtgcaaaccaattagctatttattcaacaggcttagagaacaaatagctggattatttctcattgcgcacaagccttcgggccattctctaggctctgttggtttggtccgcatgatgttctgtaaggagcaatcagagtttcaaatggcagctcagccagccctgttcatcctccatgacctctttaaggttctgtttcccattcgtaaatgaggaaaagaatacctattcatcagggat

SEQ ID NO: 2214 - DNA, 597 bp, Homo sapiens
attgaactaggagggggaaaatatatcactgctggggcacaatcctggctcctacacttactagttgggtaagttatttaacctctttgtgccttagttttctcatctttcttttttaattttaaagactttttatttattattatttttaaattattatgctttaagttctgtgatacatgtgcagaacatgcaggtttgttgcatagttatacacgtgccatgatgatttgctgcacccatcaacccatcatctacattaggtatttctcctaatgctatccctccccttgtccccccacacccctacaggccccagtgtgtgatgttccccttcctgtttccatgtgttctcattgttcaattcccacctatgagtgacaacatgcrgtgtttggttttctatccttgcgatagtttactgagaatgatggtttccagcttcatccatgtccctacaaaggacgtgaactcatcattttttatggctgcatagtattccatggtgtatatgtgccacgttttcttaatccagtctatcattgttggacatttgggttggttccaagtctttgctattgtgaatagtgccgcaat

SEQ ID NO: 2215 - DNA, 1305 bp, Homo sapiens
ttcttctgggggttagacccatttttctttttttttttcggtggtagggggggattggagggggacggagtctagctctgtcacccaggctggagtgcaatggcatgatcttggctcagtggaacctctgcctcccaggttcaaatgattctcctgcctcagcctcaccagcagctgggattacaggcgcccaccaccccaccccgctatttttttgtatttttagtagagatgggggtttcaccatgttggccaygctgatcttgaactcctgacctcaagtgatctgcccgccttggcctcccaagcgcccggccctagacccatagctttctttaggttgtcaaagagtttcatgactgcaaaaaaggcagaaaaactattaaagctaacaagatgactgtatccaattaactatttatttcagtttttctaaatatcgcttaatagcctgaaacataaatttatcatgattctcttctctgcttcttaaaacccagatgccagtcaacaaattaaagaaactttattgacatgaatggtacaggcatatgactaaagcagagaaagtacaatacggtttcattttatgagagtgacgtgttcctgaagacttggcaatattcaaaacttgcatatttcatgtttaattgctcccatagaactgacaaagatgtttactagcaaaactggccaagacatacgccaatagcataaacacagttgttaattccctcatccctcctccaacttaaaatcataattcttcaagataaaaaaattgtatttacatcatttctagttttgtgctgaaagtgaaactttattgatatttttagttcagccttttcaagtgaattaaagttttccacagaacactgagtcaaaatgaaaattaaacacacacgtacacacgctactgggtatatatccaaaggagatgaaatcactatggtgaagagatatctgtactcccatatttattttagccctattcacactatgcaagatacagaatcaatctaaatgcccagcaatgaataaatggagaaagaaaaaaatatggtaaatatacacaatggaatactgttcagccataaaaataggatgaaatcctgacatttgtgacatggatgaacctggaggacattatgttaaatgaaataagcccagctgggcgcagcggctcacacctgtaatctcagcactttgggaagctgaagcggatggatcacttgaggtcaggagttcgtgaccaccctggccaacgcagtgaaaccctgcctctactaaaaatacaaaaat

SEQ ID NO: 2216 - DNA, 656 bp, Homo sapiens
aggcccaagtgatcctctcacctcagcctcccaagtatctgggatcacaggcacaagccaccatgcctggcaaatttttgtattgttttgtagagatggggtgtcgccatgttgcccatgctggtcttgaatctgcccatctcagcctcccaaagtgctgggattataggcatgagccactgcacttggccctttggtactatttttacctacaaagaatcgaaggttctgaaaggagcaatgtccaaatamgttgttctcattccaaaggtcttgttctttacactatgaggttataaagctgttaaggcagtgcttgtctgggtctgtaagtgttacttcttcttcttatgtcatctggttatgaggaaggatcaagattgcttaaattctgaaataatctatatcaaaccccagaggagatcaagaaacaaatacatttagaatcaatgaaaataatttatggcaacaattatctataagcgttggtatatgctaaaaatacaaactcagattatgttaaaataatttaatagataaattgcccaacatattaccaacaaaaatttgagaggtattcttaattctggagatgaagtaaagggcagtaatgttgtgcaattcttcccttggtacctttatcagaggcaggagat

SEQ ID NO: 2217 - DNA, 744 bp, Homo sapiens
tgcatagtatttccattttaacattattaactccccaagtctttggattttttttttgcctctacattatgtcaaggaatttttgataacacttagggtaggcctcttttgaaaccagatttcatttgatcttcttgaattagataactgaattctcttgaattagatcactgaattcaaaatctagcaaacgaatccatgatgataataatcccttctgtttgatctagcctttcccctatatgggtccatgatcacacatattccctgggcttctagagctataaataagcaggaaattgcaaatatttaaatagctaaactttcttgtctccctgaggcatgatgggatttggctttttttaataggtcacaagacaatgataattgttgtggtggaacatgaagatatttggcatcttcttgaaggtaamtatctcggggaggtcactgcagggtctccacgcaaagcagaactggcatgattgggtggggaagaagggttgcttctgctggtgagcaaggcacagtggatattgggggctccaaggactcatattcatctgaatttgcgcaactgttctcatttcagttctcaaagttccactctttcttaaccaaagtctaacttgcacatagaagacccagtgaggctgtgaattcaatttaatttgtgatttaaaactcgcatgatcagctttggcatcttacttttggacatcatcccattcagtttaagagatt

SEQ ID NO: 2218 - DNA, 623 bp, Homo sapiens
gctcaagcaacccacctgccttggtctcctaaagtgctaggtttagaggcatgagccactatgcctggctccctagtttttaaattataaaattaatacctgcagcatttaaagttgtaaaatgaaaagtttaatttttaaatctctccatcctcatgtctactttctagtagtagtctctgttactacattgactatctttctaaatctcttttttttgatatgtatgtctagctatgttgaccatgctgatgttgaactcctgggctcaagtgatcctcccacctcagcctcctgagtagctgggattacaggcacatgccagcatgcttggcttaactcttcttctagaaacctacacacacacatttttttttcttacaaacgtgaaaataatgcactcattctgaaactctgttttcctcattcagttgtgcatattggattaacttctctgtgttaatgcaaagggttggattgtcaaagcatcttcatctgaatgtgaaatcttacccaactccaaaccttactcatgattcagaggttacaggcagaagccgcagacacagatgagcattccttcttggaggagcccccrgccagcaggcacagcttccaaagaa

SEQ ID NO: 2219 - DNA, 585 bp, Homo sapiens
tttaaatactggtttactgtgactagtttttgattctcgatatgaattcagggcatctggcaggttaagtggaaagtattatttctcactatataaaaaaaatgcaatcattggargacatagttcaaccaagggtctcaatggaaaattgaattagaacataaattagctcttctttcatagatcaattgcccaatgtagatggggacttggctattaggttatagtgcagttgttgccaaagtggggtgcatatacatttaatagattgatactggtttattcattaggttgatatgtgagagtgtcccttgctacatatgagaggaaatcttagaacaagagaagtagctccctatcaaagagaggctgagggtggtgccattacttatttgattgtgtgtttttttaatgttttctcaattagaacagattctgttatgtgggtttgaatatatttgatttttcttagaattttcatctttctgcccacattactcatccgttcttgtgtgttgtttacttttttttactacatctcttaacatattaattgtagcattttaaaattctctgcttaataat

SEQ ID NO: 2220 - DNA, 971 bp, Homo sapiens
ctttacaagttctgtttgtcctcacttcccctgcttcagatccagcgtttcttcccaactgctgacctgccatgttttcgggtccaccagacatagcagtaacagccttctgtggacttcctcatgagtgcctgcaattgagtaaggtmtaattcctagaataaattacttacttgatatcattcatagtatttctacttcacagatcaagccctaccttatacaatattacactccagaatgtaattcaatatttgatcctcagcaggtatttgttcaataaatactcttcactctcattaacaatcatcattaaccaatctggtggcaaaagtaggaaagatataagccagagaagaaattaatgagaaccttaaggtttggctttatagatacgagaacaataagtcatcttagatatgattatgtacaaggtgagttcagaggagataaatatgtataaaacaatgtctgcacattttttttctggggagagattgggcccattgctttttaacagattctgaaaggaccagtgttataggtacagcctttattttatagatgtgaaaattatagctgggagatcttcacaacacaacagaatagtaacagaacacaggccagaaccaggtcttctgatcttaacttttattttccttgaactctagcatggaaaatggcactaaaacaaaattttaataacaaaaatactgcagcaggggagagacaatgaaagatactgtaaatacttctgagctctcagcagcctcaacctcactaatattcttatggaacccactgacaattggcagtcatctgtctatcttagagcaggcaggtgagcacaaagagtttaaagcatggatgatgatcaaaaggctagtctggatgtattcagaggcttccaaagtttcatttctgacttagaaatgtttttcaaatggtgtggttccctaaactatttttcc

SEQ ID NO: 2221 - DNA, 1310 bp, Homo sapiens
gctggaacaaatcccccacatatattgagggccgactgtatctctttaagtggatgaatccctaargcctaaccctccacattgtcgtattttgccgcctcttccttcttaatgtagcccacccccatggtcattctggaggaatctgtagagagcttctgtatgtaactgatatatagaacagaggaaagatgctctgttgagtgggacaaagtgattcaatcctgtaagtgaaaatggcccagggcagtgatgacactgatgacatccacagtaactacctttttgagaactgggaactgttgtagacattcttatgcaccattctgttttattccctcagtggcctgtgaggtgtgctgtcatgccctattggagaggaagatatgaagaggctttgagggattaagcaactggtcagcatcacacagctagtaaagggacttctagaatttgaacctaagtgtctctgactccaaatctttatctaactcgtaatcagcaccctattctctctcctcctttgagtaatcatataatcacagacctgcagagccttcatgttggaagtgccatgagagatcgcctagattaggagtgaggtttgtttacataccaaggcctcacagtatgatttttatctgatatggggctgggatccagtgtttaccatgaagacaccttccacagccctttagttttgcggaggcaaagatagcctctggtgatctgcatggagaggatttaattgcttccatttttcttttaagagcaaagagctttctaggaaaaatagcagtatttcaaaggtcaagtctgatggcttgtgggaagagcaggagagattgatttatggggattggaacagaaaacatggtgtccgtatggcaatgagacaaataaaataccagggcttggctgactgtattcaaattcttgtctgtgtgagccctggctagggagggctccaaataatgttcaagtcatttagttggagactgagactggcatttgcaagaaggatagaaaaatttaaagctagagtggacaggaaataaaggatactttggttaggattaaaactgggactctacttaatttattcatgcagtcaacggatctttttgagcccttgctatgtgccaggcattgtactggacagaggagaaacaacaggaattccaacttatgtggtcctagccaggctgcatggagctcacagccaagtcagggagacagatattggccaaataaacacaaattagttgtttaattacaatttagttagtgctgcaaagaagtacaggatg

SEQ ID NO: 2222 - DNA, 1179 bp, Homo sapiens
tgcttcttatgtgtgtaagcccttctcatatgtggtctcattcactctttctttttcttttttttttttaaagtctgggtttcactctgttacccaggctgatggcatgatcacagctcattgcagcctcgacctcccgggctcaagcgattctcctgcctcagcctcctgagaagctgagacaacaggcatgcaccaccatgcctggctaattttttattttttgtagagatgggttttcactatatttcccaggctggtctcaaacccctgagctgaagcaatcctcctggcttagcctcccaaaatgctgggattacagacatgagccactgcacctggccgtgtcatctcctttaatctctgcaacgaccctgtaaggtagatgctatcgtagcatcctcgttgtacagatgaggaaaccacaacaaagagtggatactttactgtgagtgtcagaactgggatctgaacccagaggtctgatgccaaaggccatgaggtcaccactctctagaataaagaacagggcactgggcttggggccacccattctggagagtgcatcgtataaatggcagagggacactgtgtcattagccagagcacacaccctggccttgaggtaccagggactcagggatcaagaggaagacggagattgaaaatgtaattttaaagcctttgttatatttagaagacacagaataagagatcctcagaaatggcccgtgaactagaagggtcactaaaaattttaagtaatcacaattatttcaaatgcccctttatgagagaggagttaattgatagagcttctgccgcacacacacaaaacccaagctgggtacaaattaaccctttattgtgtggtatmtctcagataaattttagttcacaacagcaacccttttagatttgctgatagcctggaaagagggaaaccatgaattattttcttttttcttctctccattttctgtctacttccttctctgagaatcaccaatggccagctatgctctacacccaagactagatgtgtgcagcctgggccccacttatctgtgggatctccagccaaataagggagggagtgcttgttttggaagctgctgcagaggtcacatctagttctgaaattgcttctgttttccaaattctgagactggaaggaaa

SEQ ID NO: 2223 - DNA, 1179 bp, Homo sapiens
tgcttcttatgtgtgtaagcccttctcatatgtggtctcattcactctttctttttcttttttttttttaaagtctgggtttcactctgttacccaggctgatggcatgatcacagctcattgcagcctcgacctcccgggctcaagcgattctcctgcctcagcctcctgagaagctgagacaacaggcatgcaccaccatgcctggctaattttttattttttgtagagatgggttttcactatatttcccaggctggtctcaaacccctgagctgaagcaatcctcctggcttagcctcccaaaatgctgggattacagacatgagccactgcacctggccgtgtcatctcctttaatctctgcaacgaccctgtaaggtagatgctatcgtagcatcctcgttgtacagatgaggaaaccacaacaaagagtggatactttactgtgagtgtcagaactgggatctgaacccagaggtctgatgccaaaggccatgaggtcaccactctctagaataaagaacagggcactgggcttggggccacccattctggagagtgcatcgtataaatggcagagggacactgtgtcattagccagagcacacaccctggccttgaggtaccagggactcagggatcaagaggaagacggagattgaaaatgtaattttaaagcctttgttatatttagaagacacagaataagagatcctcagaaatggcccgtgaactagaagggtcactaaaaattttaagtaatcacaattatttcaaatgcccctttatgagagaggagttaattgatagagcttctgccgcacacacacaaaacccaagctgggtacaaattaaccctttattgtgtggtatatctcagataaattttagttcacaacagcaacccttttagatttgctgatagcctggaaagagggaaaccatgaattattttcttttttcttctctccattttctgtctacttccttctctgagaatcaccaatggccagctatgctctacacccaagactagatgtgtgcagcctgggccccacttatctgtgggatctccagccaaataagggagggagtgcttgttttggaagctgctgcagaggtcacatctrgttctgaaattgcttctgttttccaaattctgagactggaaggaaa

SEQ ID NO: 2224 - DNA, 2465 bp, Homo sapiens
tgacatacatttcttgtatccccatgatggtggcagcaagaaggragacactgcaaaacacattcaactcccctctttggggaactgtttattcctgcgaagctgctagtgcagatcgatggttctgatccagtggaacacatcaaaatcatctggagagctttttaaaaagacaaatattatcctccttctagagactctgatccaggaggtccagcacaaggctgggcatgggattcagcctgcactctgggtgtggacctcatgctgatgggcaccaagctatggctgtacatgagaccatgagccatttccttccccgcacccttctctaccctcctgtgcctgccctcgggcccaggtggactgtgatgttccccggtggagatctgatagagatttttctcagaaaattgaatacaaagtaatctctcttcccttttaactgtaattctcactatcactaccacatccctgtttccttggaaactacaaagttaagatggacttgcaatgttgtgtccaaaagtttcctaatctgaaactctgcacctgggctggaaatccaggccagctttctatgtcaagagtgggatgtttcactcttcacgttatgatttcaggtagcaaagtttctgaccctctgtgatgacagagaacaagatttctcagtgagataagaaacagtggtcacaaaaaaagagaactgttaggacaccgtatagctgcattctgaccttggggaaataggcttcccgttagctttgtagctgggcttctctgtgtttgttaccccagcctgctctaggaatagcaggcctgatttttaccttctcactagattcctcacatctgcagacctaacacgctcagttttgatcctgtggtccatgatatgtgttcattggagattttgagaaagtatacaagaatgcccagcattcacatccgacatcttaatgtacctccgaacctgtaaagcactaagaaagtaacttaaggaaaagtgacctgaaaggagaattaaaattaaaactggtattagaaaggtagggaagggaaacaggtataagtaagccatggtttgaagcctttatagtgcttaaaatcctttggcctgctaatatcatgcaaagagagctagtctgaggaaatcactagctgtaaggacaaagatgcatagacagggataagcattatatgtcatggtgaaaaaccaaaaaccacttaaacattaaaggtgtagttatatatccaaaatgaacagcggccacaaggatgctcatgaaataagtgcaaaaaaaacaagatcttaaaatatatagtatgatatcaactaattttttaaattgtataataacatgtatagaaaatgtctataaggaaatgtaccaaaacagtaacgatgatttcagagtgcctggattatgggagattttgtttctttattctttattttctgtaataagcttgtatttttcggaataccacagtgagcatctattacaacaatacagggcagttctaaaataaacatgtattactcagagaaagaaattaattacttttggaaaaaaagtaatggctctttagccagaaaataaaaattgtatgaggataattacatgctgcagagttactcctattcatgggactgtgcaactgtgtttttcctgctatgttcctggtagctggaagaacataatttttaatttttgattggtggtttatgtgctaaacaaggctgaatgaatctgcatcttttttagttgtgtaatttttagcatttaaacctttttttaatcattagtcatttctcctagtaggaataacaactttagtaggcgtttgacgttggttgtttcactcagaaaaatgggttcaaacttcggaccttgttactgtttttatttatttttaaacttttttttttttttagaggcatggtcttgctttgtcacccaggctggagtgcagcggcatgatgatagctcactacagctccaactcttgggctcaagcgatccccacaccccactgccacctcagcctcctgagtagctgcaactataggcgtgcaccaccatgcccggataagtttttaaaattttttgtagagatggggtcttgccgtgttgtccaggctggtctcaaacgcctgggctcaagggatcttccctcctcgacctcccaaagtgctgggaacataggtgtgagctgccacacccatcctaaaacttttcatacctttattttctccagagtaattctaggtatccaacaagtaaatattaaaatactatgtacttataaagagaaatatgtaggaaactattgaaatttagttaagatcaattgagatttatagacaaacttagctttgaatttagatggcctttttgccatttatagcaaaattatctttataaataggaagagtatgtacatatttactcaaaaattta

SEQ ID NO: 2225 - DNA, 2465 bp, Homo sapiens
tgacatacatttcttgtatccccatgatggtggcagcaagaaggaagacactgcaaaacacattcaactcccctctttggggaactgtttattcctgygaagctgctagtgcagatcgatggttctgatccagtggaacacatcaaaatcatctggagagctttttaaaaagacaaatattatcctccttctagagactctgatccaggaggtccagcacaaggctgggcatgggattcagcctgcactctgggtgtggacctcatgctgatgggcaccaagctatggctgtacatgagaccatgagccatttccttccccgcacccttctctaccctcctgtgcctgccctcgggcccaggtggactgtgatgttccccggtggagatctgatagagatttttctcagaaaattgaatacaaagtaatctctcttcccttttaactgtaattctcactatcactaccacatccctgtttccttggaaactacaaagttaagatggacttgcaatgttgtgtccaaaagtttcctaatctgaaactctgcacctgggctggaaatccaggccagctttctatgtcaagagtgggatgtttcactcttcacgttatgatttcaggtagcaaagtttctgaccctctgtgatgacagagaacaagatttctcagtgagataagaaacagtggtcacaaaaaaagagaactgttaggacaccgtatagctgcattctgaccttggggaaataggcttcccgttagctttgtagctgggcttctctgtgtttgttaccccagcctgctctaggaatagcaggcctgatttttaccttctcactagattcctcacatctgcagacctaacacgctcagttttgatcctgtggtccatgatatgtgttcattggagattttgagaaagtatacaagaatgcccagcattcacatccgacatcttaatgtacctccgaacctgtaaagcactaagaaagtaacttaaggaaaagtgacctgaaaggagaattaaaattaaaactggtattagaaaggtagggaagggaaacaggtataagtaagccatggtttgaagcctttatagtgcttaaaatcctttggcctgctaatatcatgcaaagagagctagtctgaggaaatcactagctgtaaggacaaagatgcatagacagggataagcattatatgtcatggtgaaaaaccaaaaaccacttaaacattaaaggtgtagttatatatccaaaatgaacagcggccacaaggatgctcatgaaataagtgcaaaaaaaacaagatcttaaaatatatagtatgatatcaactaattttttaaattgtataataacatgtatagaaaatgtctataaggaaatgtaccaaaacagtaacgatgatttcagagtgcctggattatgggagattttgtttctttattctttattttctgtaataagcttgtatttttcggaataccacagtgagcatctattacaacaatacagggcagttctaaaataaacatgtattactcagagaaagaaattaattacttttggaaaaaaagtaatggctctttagccagaaaataaaaattgtatgaggataattacatgctgcagagttactcctattcatgggactgtgcaactgtgtttttcctgctatgttcctggtagctggaagaacataatttttaatttttgattggtggtttatgtgctaaacaaggctgaatgaatctgcatcttttttagttgtgtaatttttagcatttaaacctttttttaatcattagtcatttctcctagtaggaataacaactttagtaggcgtttgacgttggttgtttcactcagaaaaatgggttcaaacttcggaccttgttactgtttttatttatttttaaacttttttttttttttagaggcatggtcttgctttgtcacccaggctggagtgcagcggcatgatgatagctcactacagctccaactcttgggctcaagcgatccccacaccccactgccacctcagcctcctgagtagctgcaactataggcgtgcaccaccatgcccggataagtttttaaaattttttgtagagatggggtcttgccgtgttgtccaggctggtctcaaacgcctgggctcaagggatcttccctcctcgacctcccaaagtgctgggaacataggtgtgagctgccacacccatcctaaaacttttcatacctttattttctccagagtaattctaggtatccaacaagtaaatattaaaatactatgtacttataaagagaaatatgtaggaaactattgaaatttagttaagatcaattgagatttatagacaaacttagctttgaatttagatggcctttttgccatttatagcaaaattatctttataaataggaagagtatgtacatatttactcaaaaattta

SEQ ID NO: 2226 - DNA, 2465 bp, Homo sapiens
tgacatacatttcttgtatccccatgatggtggcagcaagaaggaagacactgcaaaacacattcaactcccctctttggggaactgtttattcctgcgaagctgctagtgcagatcgatggttctgatccagtggaacacatcaaaatcatctggagagctttttaaaaagacaaatattatcctccttctagagactctgatccaggaggtccagcacaaggctgggcatgggattcagcctgcactctgggtgtggacctcatgctgatgggcaccaagctatggctgtacatgagaccatgagccatttccttccccgcacccttctctaccctcctgtgcctgccctcgggcccaggtggactgtgatgttccccggtggagatctgatagagatttttctcagaaaattgaatacaaagtaatctctcttcccttttaactgtaattctcactatcactaccacatccctgtttccttggaaactacaaagttaagatggacttgcaatgttgtgtccaaaagtttcctaatctgaaactctgcacctgggctggaaatccaggccagctttctatgtcaagagtgggatgtttcactcttcacgttatgatttcaggtagcaaagtttctgaccctctgtgatgacagagaacaagatttctcagtgagataagaaacagtggtcacaaaaaaagagaactgttaggacaccgtatagctgcattctgaccttggggaaataggcttcccgttagctttgtagctgggcttctctgtgtttgttaccccagcctgctctaggaatagcaggcctgatttttaccttctcactagattcctcacatctgcagacctaacacgctcagttttgatcctgtggtccatgatatgtgttcattggagattttgagaaagtatacaagaatgcccagcattcacatccgacatcttaatgtacctccgaacctgtaaagcactaagaaagtaacttaaggaaaagtgacctgaaaggagaattaaaattaaaactggtattagaaaggtagggaagggaaacaggtataagtaagccatggtttgaagcctttatagtgcttaaaatcctttggcctgctaatatcatgcaaagagagctagtctgaggaaatcactagctgtaaggacaaagatgcatagacagggataagcattatatgtcatggtgaaaaaccaaaaaccacttaaacattaaaggtgtagttatatatccaaaatgaacagcggccacaaggatgctcatgaaataagtgcaaaaaaaacaagatcttaaaatatatagtatgatatcaactaattttttaaattgtataataacatgtatagaaaatgtctataaggaaatgtaccaaaacagtaacgatgatttcagagtgcctggattatgggagattttgtttctttattctttattttctgtaataagcttgtatttttcggaataccacagtgagcatctattacaacaatacagggcagttctaaaataaacatgtattactcagagaaagaaattaattacttttggaaaaaaagtaatggctctttagccagaaaataaaaattgtatgaggataattacatgctgcagagttactcctattcatgggactgtgcaactgtgtttttcctgctatgttcctggtagctggaagaacataatttttaatttttgattggtggtttatgtgctaaacaaggctgaatgaatctgcatcttttttagttgtgtaatttttagcatttaaacctttttttaatcattagtcatttctcctagtaggaataacaactttagtaggcgtttgacgttggttgtttcactcagaaaaatgggttcaaacttcggaccttgttactgtttttatttatttttaaacttttttttttttttagaggcatggtcttgctttgtcacccaggctggagtgcagcggcatgatgatagctcactacagctccaactcttgggctcaagcgatccccacaccccactgccacctcagcctcctgagtagctgcaactataggcgtgcaccaccatgcccggataagtttttaaaattttttgtagagatggggtcttgccgtgttgtccaggctggtctcaaacgcctgggctcaagggatcttccctcctcgacctcccaaagtgctgggaacataggtgtgagctgccrcacccatcctaaaacttttcatacctttattttctccagagtaattctaggtatccaacaagtaaatattaaaatactatgtacttataaagagaaatatgtaggaaactattgaaatttagttaagatcaattgagatttatagacaaacttagctttgaatttagatggcctttttgccatttatagcaaaattatctttataaataggaagagtatgtacatatttactcaaaaattta

SEQ ID NO: 2227 - DNA, 749 bp, Homo sapiens
aaaagaatgtctactctgtgttgcaatttgcctatgacttggatgagtctgtttcaaatgaccctccgtgaggactgccacattcagttgtgcagcctgtgcactgcacaaaggtgctcctgcccaggggagcaggaggaagctggaattcaccagggactctgcttacgagctgggcctgcctgggcctctttcaatcatagcctggggctctttcaatcttagagaggagcctcaggaggtcagctgtaacttgtctgccagaaagggtaaccttgcgaaattcctacaatggtgctgtatgtacttgctggagccctgacttagtttaccctcagcctccccatgtctcagtctggtcaacatccttatcagaaattcacactagcttcctttacaatctgcctttaggacagtcctgaggcaaatttcacttgttcttccctctgcctggaatgctcttccccagatagccacacggctcactctcttccttcactcaggcctctgctccaacatcccctctacagagaggycttccctccacatctcctctaaaataggcccccatcctgccttgctctcacctctcatcccacattcttcatcctgcttatcacccatggaatgtgtatgtattcatttatcgcaagcttctcaaaaggagggactcagtctcactcactaattggtgcctgtcctgcgctggcacagagtaggtgctcagcaaatacatgttagatgaatgc

SEQ ID NO: 2228 - DNA, 1387 bp, Homo sapiens
gctcacttggcttgtgtttcaaacacaggtctgtctgaaaccagtgcctgatgctcatccttgcaaagcaccacatttccaagtccttgtttttcttctttgcattttattctacacactgttgccaaaataccctccctgataacaaaaccctaattatatcgtgccctttcctaaatctttataatcatttcctgttgactaaagttttaaatatgtactcctctccctcgtgtcaatggcattctagaattttctcgcttttcttcactgcttccctaaatgccttctttgctcccattggaccccattattccttagaaatgcagcaaatttttttttatcttcaacatcttatagaccacaaatctcagcctcgtattatccctgaatttattttcaaaaaataatgaaacatatatgcaaaaaccaccttgtctttcatttcgtagcagccacaaccagcatgaatgaagtagctgctgcacaattaaaattrctgagttttattgaaaattaagaagcctaattttagccaattaaaacttaagtgacaacaaaatgtgtaactaagactgaaagaatttaatgctgtcaatgtaaaacttttacaccttttctgattttcacgtacatggtagactggttaaaaaggatgagttctaaattttcagcaattcaacaactaagattctgatatggggccatgtgcagacactcagtggaaggagagtttcccgcatgtgagttgcagcatttcagaaaattctaaagcaacatttttccttttttgctctttgagttgcaaaactagctttcaacaggaaaagaaaatttgctacttacccttggaaggtgtcttttctatgtgtgaaaatgctaaggtgaaaatgtcaaatatttcacatttgcttgagcctgtgaaatctaaagagatgtgagattttcttgttattccgatgattcagattggaggtataggagcttcacctgcccatgtggatctcctggagctgccctatcattttatttttaaaaggcaaatattaaaaattttgctcttctctttaagatataaaattactattatttccctttatgtagaaaaaaataaaggtcatcctggaactatgaatttgtgataaaaacggcaaatcgtataagacatttaattgcttagagcactttaaatccaatttctttgtatcagtttcagaccagcctctgcacaatgagactctaaacacaagtactctttttctgggctaggaatttgtctacatatccaaattatgtcaacctataattcattcaacttccacattcattccttcactcatttaacctatcgggagtgcttacctgccacctgctctatattaatgca

SEQ ID NO: 2229 - DNA, 1387 bp, Homo sapiens
gctcacttggcttgtgtttcaaacacaggtctgtctgaaaccagtgcctgatgctcatccttgcaaagcaccacatttccaagtccttgtttttcttctttgcattttattctacacactgttgccaaaataccctccctgataacaaaaccctaattatatcgtgccctttcctaaatctttataatcatttcctgttgactaaagttttaaatatgtactcctctccctcgtgtcaatggcattctagaattttctcgcttttcttcactgcttccctaaatgccttctttgctcccattggaccccattattccttagaaatgcagcaaatttttttttatcttcaacatcttatagaccacaaatctcagcctcgtattatccctgaatttattttcaaaaaataatgaaacatatatgcaaaaaccaccttgtctttcatttcgtagcagccacaaccagcatgaatgaagtagctgctgcacaattaaaattactgagttttattgaaaattaagaagcctaattttagccaattaaaacttaagtgacaacaaaatgtgtaactaagactgaaagaatttaatgctgtcaatgtaaaacttttacaccttttctgattttcacgtacatggtagactggttaaaaaggatgagttctaaattttcagcaattcaacaactaagattctgatatggggccatgtgcagacactcagtggaaggagagtttcccgcatgtgagttgcagcatttcagaaaattctaaagcaacatttttccttttttgctctttgagttgcaaaactagctttcaacaggaaaagaaaatttgctacttacccttggaaggtgtcttttctatgtgtgaaaatgctaaggtgaaaatgtcaaatatttcacatttgcttgagcctgtgaaatctaaagagatgtgagattttcttgttattccgatgattcagattggaggtataggagcttcacctgcccatgtggatctcctggagctgccctatcattttatttttaaaaggcaaatattaaaaattttgctcttctctttaagatataaaattactattatttccctttatgtagaaaaaaataaaggtcatcctggaactatgaatttgtgataaaaacggcaaatcgtataagacatttaattgcttagagcactttaaatccaatttctttgtatcagtttcagaccarcctctgcacaatgagactctaaacacaagtactctttttctgggctaggaatttgtctacatatccaaattatgtcaacctataattcattcaacttccacattcattccttcactcatttaacctatcgggagtgcttacctgccacctgctctatattaatgca

SEQ ID NO: 2230 - DNA, 767 bp, Homo sapiens
tctattctttccattggtctacgtgcctatttttgtaccagtaccatgttgttttgattactgtagccttgtagtatggtttgaagttgggtaatgtgatgccttcagctttgttattcttacttaagattgccttggctatttgagctctttttttgttccatatgaattttgaaacagttttttttctaattctgtgaaaaatgtcattggtagttcaatagaaagagcattgaatttataattgctttgggcagtatggccatttcaacaatattgattctttctatccatgagcatggaatgtttttccatttgcttgtctcatttctgatttatttgagcagsgttttgtaattctccttgtagaggtctttctcttccctggttagctgtattcctaggtattttattctttttgtggctattgtgaataggactatgttttttttttttatctcaatctttgccatcatgtattaaaatctcatgcagtattttttaggtctagaataaagatgtattacaacaacaaaagatcagaattttccaaattcagatcactgaaattacctaggatgctttttgtaagtaaaaatttctgatccatttcttgataatcataaactccaacagtagatccctgggtggacttcttttttttaaatatcttcctcaggatgactctttatatatatatatatattttttttattatactttaagttctagggtacatgtgcacaacatataggtttgttacatat

SEQ ID NO: 2231 - DNA, 767 bp, Homo sapiens
tctattctttccattggtctacgtgcctatttttgtaccagtaccatgttgttttgattactgtagccttgtagtatggtttgaagttgggtaatgtgatgccttcagctttgttattcttacttaagattgccttggctatttgagctctttttttgttccatatgaattttgaaacagttttttttctaattctgtgaaaaatgtcattggtagttcaatagaaagagcattgaatttataattgctttgggcagtatggccatttcaacaatattgattctttctatccatgagcatggaatgtttttccatttgcttgtctcatttctgatttatttgagcagcgttttgtaattctccttgtagaggtctttctcttccctggttagctgtattcctaggtattttattctttttgtggctattgtgaataggactatgttttttttttttatctsaatctttgccatcatgtattaaaatctcatgcagtattttttaggtctagaataaagatgtattacaacaacaaaagatcagaattttccaaattcagatcactgaaattacctaggatgctttttgtaagtaaaaatttctgatccatttcttgataatcataaactccaacagtagatccctgggtggacttcttttttttaaatatcttcctcaggatgactctttatatatatatatatattttttttattatactttaagttctagggtacatgtgcacaacatataggtttgttacatat

SEQ ID NO: 2232 - DNA, 577 bp, Homo sapiens
caactgcattctcaaagcccaggacagtaactagaagatggtatgtgctaaaaaaaaaaaagtctatttaatgaatgaatacattagcttcatggagtatccactttgtggcacctttaaaaatcaaccaaaatcaactttttatagttaccatcatgcttctgtttgttccttgatgtgttgttcaaagaaaacactgtggctttcagtgttattcagtgtcaacacataatttaaagaaagagatctattttcctttagttaaatgaaaaatattttattctgtgtatatatgtaaatattattatttatgctgctgtgttcactaaatctattttattaatctaatacctaaatctcataggatggtatgacatatttaccaatatagtatttcccttctaaatgttgcaagtgactacctgtatgtagttctcaagacacagcttattattatgwtagtgtttggattcacttgggaactgctttaagacataacacacattcctaacctgccccctactttttcttgatgagcgttgataaccaaaagaatgctggaatctaccagccagaa

SEQ ID NO: 2233 - DNA, 1184 bp, Homo sapiens
tttttagtacagaaagggttcctccctgttggtcaggctggtctcaaactcctgatctcaggtgatctacccacctcggcctcccaaagtactgggattacaggcgtgagtcaccatgcccgacctaatttttgtgtttttagtagagacgggtttcaccatgtttaccaggatggtctcaaactcctgacctcaggtgatccgcatgcctcggcctcccaaagtgctgggattacagggatgagccactgtgcccagccttgtttttgtttttttaagagagagggccttgtgctgtcacctaggctggagtgctgtggcaccatcatggctcacggcagccttgacctcctgaggctcaagcgatcctcttgcctcagccttctgagtagctgggactacaggcgtgcaccaccacacccagctaatttttaaattttgtatagagacggggtcttgctatgttgcccaggctggtcttgaactcctggcttcagaggatcctcccaccttggcctcccaaagcactggggttactggcgtgagccaccatgcctggccagcagtagtgtcaataataaggaatgttagttgaggggtgattccctcctgggccttgaagacctggctaagggccatgggggaacccagctgggggcagagtgggagtggccatgtccaacatcccatccttctccagaacgggctgcgagtgtgatttaggctgggcaggtggcttagcgcggggccctgggcagccacctaccctgtccccttttcccccsacagctgccgcagcgggaaccgcaagagcttggtggtaggaacgccctccccgaccctctcccggcccctgtcgccattgtcggtcccaacgggtgagtgtgggagcagccagcgggtgctgtgtcctgcctctgccccgctgactcagtttccccgcctcctcctcagcaggcagcagccccttggatagtcctcggaatttctcggctgcctctgccctaaatttcccctttgcccggaggtgagtgattgccggctttgggagacagtgcgggcaccacgggcaggggttgggcaggggcacgtgctcggtggctagacctggctcctcattcatttcattcaccttttcccctcccctggcccgtctggtggtggtctccccctctggctcccat

SEQ ID NO: 2234 - DNA, 565 bp, Homo sapiens
caggcatccatcaccatgcctggctaatttttttttttaattttttagtagagacggggtttcaccatgttggccaggctggttttaaactcctgacctcaggtgttctgccagcctcagcctcccaaagtgctgggattacaggtgtaagccaccgtgcctggcccyccattcttgaaaccgcacatgttctatcccctctgaactcccggtctctgtgacctgtgacccccggttatccttgcagggacaggcccccacctgagggtcagcgtgtactcgccctggatcttgctagaagcatctcggactaggaaggtgccatcgggagtgtcccggagtttctcgttcacctcctccctgtgggaacatccaacattgggactgccgagccacctggagaccccgctcaccctgtgacacctccttggtccctggccccctgccagcaacctaccttgaaatgtccccccagtaccactcagcatcctgcagggagggtgggctccctccattggccaggactgtggaggccggctttgccttggggggtttaggcggcagc

SEQ ID NO: 2235 - DNA, 1189 bp, Homo sapiens
atatgttctggatatctatggtatcgcatggtgagtagatttaataacaatgcattgtattcttgaaaattggtaaataagtagatcttgaatgttctcacagcaaaaaaagataaatatgtaaggttatggttatgtcccttagcttgatttaaatttgatttaatctttcatatgtatacatataccaaagcaccaccaaaaatatatggatttttasatttattaattgtcttaataaaagaaaaaaacatggatgtataaaaaataaagaatacctaagagagttaaattcccaataagtactaggagctgttattaggaaaagcttgatacttgaacttataaaatcagagataaaataacagaaagtaaagattgaaattcatcattgctctctgagttcttagtatatcaagacttctcatttacagcagcatatttctcaaatttcaatctgttaaattttgtcaccctccatgaaacattttacattaaagtaatactagaccattttaagcagaagagaaattccttttatgttgcacctgaattgtgcctatgaaaaagaaaaaaaaaatttatagaaataaagatcctttgttttcagtgtgtaatattagaaaaagttggcttttgagccagagaagcagatatgtctataatagacatcattgtatccctaagccttttggccacacacagttgcaatcttttgagcaaacagtagaaaatttagaataaagtattatcacctgtgtttatttctaacctaccttattcaaaaacagaatatattcacttttaacaaaaatagaaggctgtcacttgtagaatgtgtactgttctgactgatgagaactgtctctcaccagaggacacttgcaacttacttgaaagagtaaaacatttttgataatcttctatcacagtttatgtcataattgaagactcaacttgtaacatagtcatccgtggccattgtgttcattctctgcaatatattttcgttattttgctcttttttatttttggtgttcaaaatcaagctcactgaaaaattgcacatattcgccactccactttttttctccagacttttctctttcttgggtttccccctaatgttctgtcttctttgcagatgtttctttccgcattttaaatgctgagatttcccagagctaat

SEQ ID NO: 2236 - DNA, 1189 bp, Homo sapiens
atatgttctggatatctatggtatcgcatggtgagtagatttaataacaatgcattgtattcttgaaaattggtaaataagtagatcttgaatgttctcacagcaaaaaaagataaatatgtaaggttatggttatgtcccttagcttgatttaaatttgatttaatctttcatatgtatacatataccaaagcaccaccaaaaatatatggatttttagatttattaattgtcttaataaaagaaaaaaacatggatgtataaaaaataaagaayacctaagagagttaaattcccaataagtactaggagctgttattaggaaaagcttgatacttgaacttataaaatcagagataaaataacagaaagtaaagattgaaattcatcattgctctctgagttcttagtatatcaagacttctcatttacagcagcatatttctcaaatttcaatctgttaaattttgtcaccctccatgaaacattttacattaaagtaatactagaccattttaagcagaagagaaattccttttatgttgcacctgaattgtgcctatgaaaaagaaaaaaaaaatttatagaaataaagatcctttgttttcagtgtgtaatattagaaaaagttggcttttgagccagagaagcagatatgtctataatagacatcattgtatccctaagccttttggccacacacagttgcaatcttttgagcaaacagtagaaaatttagaataaagtattatcacctgtgtttatttctaacctaccttattcaaaaacagaatatattcacttttaacaaaaatagaaggctgtcacttgtagaatgtgtactgttctgactgatgagaactgtctctcaccagaggacacttgcaacttacttgaaagagtaaaacatttttgataatcttctatcacagtttatgtcataattgaagactcaacttgtaacatagtcatccgtggccattgtgttcattctctgcaatatattttcgttattttgctcttttttatttttggtgttcaaaatcaagctcactgaaaaattgcacatattcgccactccactttttttctccagacttttctctttcttgggtttccccctaatgttctgtcttctttgcagatgtttctttccgcattttaaatgctgagatttcccagagctaat

SEQ ID NO: 2237 - DNA, 1189 bp, Homo sapiens
atatgttctggatatctatggtatcgcatggtgagtagatttaataacaatgcattgtattcttgaaaattggtaaataagtagatcttgaatgttctcacagcaaaaaaagataaatatgtaaggttatggttatgtcccttagcttgatttaaatttgatttaatctttcatatgtatacatataccaaagcaccaccaaaaatatatggatttttagatttattaattgtcttaataaaagaaaaaaacatggatgtataaaaaataaagaatacctaagagagttaaattcccaataagtactaggagctgttattaggaaaagcttgatacttgaacttataraatcagagataaaataacagaaagtaaagattgaaattcatcattgctctctgagttcttagtatatcaagacttctcatttacagcagcatatttctcaaatttcaatctgttaaattttgtcaccctccatgaaacattttacattaaagtaatactagaccattttaagcagaagagaaattccttttatgttgcacctgaattgtgcctatgaaaaagaaaaaaaaaatttatagaaataaagatcctttgttttcagtgtgtaatattagaaaaagttggcttttgagccagagaagcagatatgtctataatagacatcattgtatccctaagccttttggccacacacagttgcaatcttttgagcaaacagtagaaaatttagaataaagtattatcacctgtgtttatttctaacctaccttattcaaaaacagaatatattcacttttaacaaaaatagaaggctgtcacttgtagaatgtgtactgttctgactgatgagaactgtctctcaccagaggacacttgcaacttacttgaaagagtaaaacatttttgataatcttctatcacagtttatgtcataattgaagactcaacttgtaacatagtcatccgtggccattgtgttcattctctgcaatatattttcgttattttgctcttttttatttttggtgttcaaaatcaagctcactgaaaaattgcacatattcgccactccactttttttctccagacttttctctttcttgggtttccccctaatgttctgtcttctttgcagatgtttctttccgcattttaaatgctgagatttcccagagctaat

SEQ ID NO: 2238 - DNA, 1189 bp, Homo sapiens
atatgttctggatatctatggtatcgcatggtgagtagatttaataacaatgcattgtattcttgaaaattggtaaataagtagatcttgaatgttctcacagcaaaaaaagataaatatgtaaggttatggttatgtcccttagcttgatttaaatttgatttaatctttcatatgtatacatataccaaagcaccaccaaaaatatatggatttttagatttattaattgtcttaataaaagaaaaaaacatggatgtataaaaaataaagaatacctaagagagttaaattcccaataagtactaggagctgttattaggaaaagcttgatacttgaacttataaaatcagagataaaataacagaaagtaaagattgaaattcatcattgctctctgagttcttagtatatcaagacttctcatttacagcagcatatttctcaaatttcaatctgttaaattttgtcaccctccatgaaacattttacattaaagtaatactagaccattttaagcagaagagaarttccttttatgttgcacctgaattgtgcctatgaaaaagaaaaaaaaaatttatagaaataaagatcctttgttttcagtgtgtaatattagaaaaagttggcttttgagccagagaagcagatatgtctataatagacatcattgtatccctaagccttttggccacacacagttgcaatcttttgagcaaacagtagaaaatttagaataaagtattatcacctgtgtttatttctaacctaccttattcaaaaacagaatatattcacttttaacaaaaatagaaggctgtcacttgtagaatgtgtactgttctgactgatgagaactgtctctcaccagaggacacttgcaacttacttgaaagagtaaaacatttttgataatcttctatcacagtttatgtcataattgaagactcaacttgtaacatagtcatccgtggccattgtgttcattctctgcaatatattttcgttattttgctcttttttatttttggtgttcaaaatcaagctcactgaaaaattgcacatattcgccactccactttttttctccagacttttctctttcttgggtttccccctaatgttctgtcttctttgcagatgtttctttccgcattttaaatgctgagatttcccagagctaat

SEQ ID NO: 2239 - DNA, 533 bp, Homo sapiens
cggggtttctccatgttggtcaggctggtcttgaactcccgacctcaggtgatctgccagagtcggcctcccgaagtgctgggattacagatgtgagccaccgcaccccggcytgttttttcttttcttctctttttttttttttttttttttttttgagatggagtctcactctgttgcccaggctggagtgcaatggcatgatttcggctcactgcaacccccacctccagagttcaagcgattctcctgcctcagcctcccgagtagctgggacttcaggctgcccaccacacccggctaatttttttttgtatttttagtagagatggggtttctccatgttggtcaggctgatctcgaaatcccgacctcaggtgacctgcccaccttggcctcccaaagtgctgggattacaggcatgaggctttctgagttttatagaccacaaacttattccttactttggttcccactctctattgatctttttggatgaatgattttgttgtaaattatacactggctttgaa

SEQ ID NO: 2240 - DNA, 3217 bp, Homo sapiens
ttctgcataaaacctcattgagatggggaatctgaccagcattgcccttgtaataagtgaaagaagaggagaaaatgggagtagcgaaaagccaaatcactctctgggcttctcttaggccacagatgtcctccgyggctgctccaaggagctgggtgcctcctcgtgctcaggtgcagaaatgcacctttctttcccctctccgaagcggtgcccaccttcatgttcattacaaggcccctgagcctctcttaaaaagaccctaagtgagcacactcaatctccgccaccctaggagggggaacggagctcagggaccccaggactttccctgcacctgagggatttacttattgtgctgaaggggggcaggaggggaaaacaaaacaaaacaaaaagggggaaaacaacagcaaaacttaggcagcggagcagcaggaatagcagccttccatgtttcccgagtgtttggaagaacatccaagtcccagcccggagcggcctccgcagaggcgccggggtgcaggggcggcgggcggccgcacttaccatgactgtggccgcggccgcggctgcctgggcggccaccgcagcttggttggcttggtgctgcgcagctttgattttggcctgcaagtgtgcaggagggtgaaaatatttgcatttctccctcatgcaacgcccctttatgtaatccatacaaacggttacggtgttgtcacttgtgtcgatcatggtgctgtctgcggggtgtgcaaagcggcagtcggtctctccccgggcacagtttcctcgctggaactccctgcatacctaagacagggaagaagagccgcgctgcagaggcaagcctgagcccaggcgcccctgcggccccggccaccgcgggaggagcggaggctgcctcgctttcaatggtggctcatgtaccactgacaagaaaagattgattatgcggagcccaggtaaccacaatctctgacacagtcatttgagttttgttttaccgccttttctagggtgaaaatctatattgagaaaataatacgaaatctgcagttcagctaaaataacaaaggaaaagcaacaaggcctccattgtccctgggtagcatattatgcagctgtctatcgatctgtctgtctgtctatccatccatccatatatctatcatctatctatttatccatgcatccattccttcatctatcatctaccatcaatcaatctatccaatcatctatccacctgttcattcatccatcatctattatctatcatctatcaatctatccctctattatctattatccatctatctatccatccacccatccatctatccatccatccatccatccatccatccatctattatctgttaatctatcattatttttaatggtaaaaactgcaattacttttgcaccaacctaatattatctatcatctatctacctacctaccatctatctatccgtccatccagccagccattcattcatccatctatcatctatccatccagccatccatcatctatcatctactgatctatctaaaatctatcaattaattaatcatctatctaatctagttacctacctatctatatacctgcttacctacctataatctatctatttaatctgtcaatcacctataatctatctacctctctctatatcttcaatcacctacttgtatgacaattctgacaatgctataggtttttttttgtgtgtgtggagggataatttcacctatatcaagctaccaggtcatagctgtacaaaaagaatcagagaaaatgacgacaaacttgttcctcctctctctaagggggtggggtggggtggggtggggggaatctgaacactcctgtttcccactccttctctcctgctctacaaagataacataatcataaatcagaagaacaatatctaagacaccaaaattttcatttttaaggtcactatactatttttgacagcacagaaaagaaaaaaaagacaaaaggagagaaatacggcaagagatatagagaaagaaaaatggagggaaatagtttattttaaaaattctttaatgctaaattatcctgaaatctcaagtaactaggattctctatcccctgagaattctggtggatcaagattttactgtatgaaaaaatatttctttagaatttgaagagtattcttaattatgccctgcatatagataacataaaatagcataaataacatatgcatgttgcttatataattcttctctgctcataaatattagcaggaaataattatgagtagaatcgtaagttatttatttttaggctccaattccaaagtggatatgtaaatgatcatcacgctgatcattagtgatgttatatgaagggcccctgacatgaaattcaagtattgtggaagtcagacatacttaggaaatactgtttcactgaccagtgaccaggccagcttgaaggtagatagcataaatcaccagattgttaattgtttcctcctactttggatattagccaacattctaactttagttcataaaatgcgcaaaataaatcactaagatgttcccacggattctgagcaagccttcctccatcaatggaatgacttctgtctgatagcatcataggtgtggaccagccatcaggctcctaccaaggtgctttgtgtgcagctgacttcattcctggtttgaaatgaaccaaaagccgctctgctaaaatcattgtgattcatttttacatgtctttgtctaccagccctgttgagaaggacaatttgttcccaattccactgatttaatttgttttctaaagtacagtcacatactgaacacaaaagctccgtgggtccagcaggtggagcccaaaacacttttccagtcctgtgaaaggtctattcagtaattgacaagggtaggctggatcttttcaaaatagtaacaattagagtttccattctcttcatctgggcatccagattgaaactaagtgaaaaaataaatatcttctaaaatatttgcagtttgaaattctgagttttaaaacttgcacaggttattaggcagccacattttattgccttcaaggtttattgggttaatatttaaacaaatgcacattgaaagaacattctctaataatcccactaacagaaagcactgtgtacgtcctaaccagatgca

SEQ ID NO: 2241 - DNA, 3279 bp, Homo sapiens
tttggacagatttcacttatttcaaaaattgactagcttctggaattgctaaggactgatgataataaaaatagaacccaacatttactaaacattcagttggccctcagtattcgtggattcaaccaactatggattgaaaatactagttaaaaattgcgtctgtactgaacatggtcagacttttgtcttggcattattccctaaacagtaaagtataacagctatttacattagcattcactttgtattaggtgttataagtaatctagagatgatttaaagtatataggaagatgtgtataggttatatgcaaatactaggccgttgtatatcagggacttgagcatcctgaattttggtatctgtgggaggtcctggaaccagttccccatggaaactgtgggatacagatgtcatgtgatggtgtttataaggcttcaggaagtaaacccccatagagtggttgtcaattactctggcttcttttaattctctaaatggctagctctaattaaaaaaaaaattttgtgggtacatagtaggtgtatatacttatggggtgcatgagatgtgttgatacagacatgcaatgtgaaataagcacatcatggagaatggggtaccccttctctcaagcatttatcctttgagttacaaacaatccaattatattctttaagttatttaaaaatataccattaagttattgttgactatagtcaccctattatgctgtcaaatagtaggtcttattcattctttctgtttttcttgtacccattaaccatccccacctcctcgctccaaatggccaactctaactcccaccttcctccccactctcaactagataatctgataaatatcttagcttaaatgttaaatgtcccatcctctggagtcatccctgacctctaaactaaggagagctccctgcaatgcattcacaccgcctatcatggcattgatcactctattttaattgtcattttaatatcacagggcttggcacatggaaggggttcaatacatatttgttgaaggaaggaaggaagatcactggataacatgcacccgtcgtatgaggtttcctgtacggttggggtttgaggagaagttcgggaagtagacagaaaaggcctgccctccctagcaggagaaattccaaggctcagataaaaatgtttcatgggatttctattcacccatggggctgcagacattaatgaatgtggtatcaaaaaatctagactctatgaagtcaaacagccactagattggtatatttgtcagtgttctctaaaaaacagaactaataggatagatgtatatatgaaggggagtttattgggagaatcgactcacacgatcacaaggtgaagtcctgcactaagctgtctaccagctgaggagctaggaagccagtccaagtcccaaaacctcaaaagtagggaaaccaacagtgcagccttcagtctgtggccaaaggtccgagagcccctggcaaaccactggtgtaagtctaagagtccaaaaaccaaagaacttggagtccgatgttcgagggaaggaagcatcctgcatgggagaaacatgaaggccagaagactcagcaggttgttcattccacatccttctgcctgcttttttctagccttgctggcagccgattagatggtgcccacccagattgagggtgggtctgcctctcccagtccactgactcaaatgttaatgtttggcaacactctctcagacacacctaggaacaatactttgcatccttcaatccaatcaagttgacactcaatattaacatcacaactggtttcatgtaaggttgatatatgattatggtccacactaaccaaactacccccgtgactcagaagacattgatattctcattaaataaaataatttccaaatgaagcatctggtgcctggaaatttgtttccctgaatctctaaagaactgatgggctatttttagtctcactgatttctcttaactggcacattttcagttaatgaataaaattaagagaattaacaatccttatcggtaagaggggtttctcccttcatcaagccaacaaacagctctccccatcacaagacacaagtagtatgagaaattggaactgcccagccaaccaaaatgcatttaaaatttttttaaagactgggtgcagtggctcacgcctgtaatccccgcactttgggagggcaaagtgggaggattgcttgaaccaaggagtttgagaccagcctgggcaacacagtgcgaaccagactctacaaaaataaaaaaattagactggcatggtggtaagcacctgtagtcccagctacttgggaggctgacgtaggagaattgcttgagcccaggaggtcgagactgcagtgagctatgattgtgccactgcactccagcctgggtgacagagtgagaccctgtttcaaaaataaaaataaaaaatttttaaaaggcttaaacatgctatgaaatggcaaactacaaacaattcacctactttgcctttcttcctcatttactagttgttatgctttgtttatttaaaatagtcacaaaattaatgtcaggggccagtgccagtggtgcttgaaagaagagggcagttgcattggcctaataaggaatgagtcacaaatctactcccaaagcacctgtggtggcctgaaggtttttcccagccctcaggtgatagcaagctatcctaaatgcaaatccagagatgagaacactcagatttgcaactcccttgaagaaaggtaaaagcactatcattagagaagagctctgccccatagtccaggtgatgcagtggaatgatgctctacacctatttgtatgggtttttggaaagaaaatgcaaactgatttggtccacttacctatgtaacttcattcccacttttctttatcctctcctaaacccgtagcaattggtggtggtgggtaaaattggaggtagtagtgactgtctaccactatttgtgtttttccctcatttatccaccaggctacactgccaaatattccttatatcattctaggcatttcttccatataatggaagcaacagagaaaaagaacacaccagagaagaaatgtaaatacaccatttttatctgtcattaataagtacaaaatgttgtgstattcaccaaaaattatttgcatatctagactgttaaggataaattgtaatatatgttgaaccaaataataaacagaaagagcttattag

SEQ ID NO: 2242 - DNA, 737 bp, Homo sapiens
cagcactcccccagtgagacccaagtccccagaatcaatcctcaagtgacactgaatctttgcaccagctgatgctgactcatggccctagctttgactagacagctgctctgtttcaagccctaacacccgccgggtgtcccacgtcttatgctacagggtcccgcaggcttctctttttgcctccaagttcaaggtctgagaacctgcctccctccaggctccttaccagagtgaagctctgccttttgcctttgcctccagaaaaccctgcctgtaggctggggtcctgtgtcccctgctgtgcagctgttgctcactcaccctttctgagggtccccatccagggtttttcttcactgtggtccaccctcagtagrtacctgctaatttttctcagaattcctgctgctgcatgtttctccagtacgtacctagagagggcggagaccttgagacaacacacccaggctcacagcattgaaatctccatctctgtgtcccagtgggcagaactaacttcagaccctggggtctcttctggtcaaattcagcccaacttagtgagctatgacattacttcctctttctcttaggacctgcctgtaaactgtggaagaagtcttttccctcagcaaaccccagctgttcttcatctgtcactgctggctggatacttaagctctgggtagtccagaaactgctagtcaaatgtatttacaaactgaattgatgca

SEQ ID NO: 2243 - DNA, 544 bp, Homo sapiens
acacacacacatatatttatttcacagtgacaactattagagtatgtttacatggtttcctagataataatggcctggatactcacaacttgtttgcttcctgttggagaatagaattttatctaattagtgattgtgtttgtatatggcaccctaaacaaaaataccttcttttctgctccatggactgagcgagatgagaccacgtgggaggatgcaatagaggcctattggccacattgttttgctaacactgaatctcagagctaaacgggcttcccccttcccatcccagaagccctccatctcccaaggagtgcagtttctaaataaacagcccagcccggcatcaagcagcaattcacttagcaaagaatggatgagagggctgaacagagtattcagttttctgaaatttttcagtaaggccatcactctcccttcccaggggcaaagttagtaaagggaaggacatcagkagtagggcaaaaacctatccactttaagaactgcaattaattaataaatgttccagttcatgctg

SEQ ID NO: 2244 - DNA, 573 bp, Homo sapiens
ccatactaaccctcagttatttaatacactaataaatccagtactgacctcattttgagtctttgaaatgaagagtagcaggtgtcatgttccctacttagacacaaggaatcaggttttaggaaccctactaacttgctgtaacttcactcagttatttatcgagtcatagaaatagattgtgaagccaagtgtttatatcttaaggcttttgtgccaaactattttttggttcaaaacaattagaggacttggacttacaacaaggaaaatatttatagacaaataaggcaaaagtataaatgctaaaaaattatgaaaaccctcaaagatcttcagtgttgctaatttgtattcaaatgttgtagggaatctgtgaaggtacataatttctacctttgaattacaasaaacatataattaatacctttatgttaaaataactaaatacatgtttgaagagagagatctggaagaagccttcttcttacatggttacatcaagatagttctgacttggttctactaataaaggggacatgaaaagcagcaaaaggagagagacatttccta

SEQ ID NO: 2245 - DNA, 1307 bp, Homo sapiens
gcatagccggacttgggtgactcatgccctgggggaaaggctgaagcccaaacggaacaccctgttttaaaggacacagcctacaaatcaaatattaggactgccaacctgccctggaaaggcaaataggtggtgacgtggatttgtgatctctgcaaacagaggaggttcagagagaatctgtgaagggtctccyagtatgagacacgggcaaaccgtggcttgctttaaaaaaaatttttttttgaccaggctcggtgactgatgcctgtaaccctagcactttgggaggccgaggcaggtggttcacctgaggtcaggagttcgagaccagcctggtcagcatggcgaaaccccatctctactaaaaatacaaaaattagccagccatgatggcaggcgcctgttgtctcagctactcaggaggctgaggcaggagaatcgcttgaacccggggggcaaaggttgcagtcagccaagatcacaccacttcagtccagcctgggcagcagagcgaaattccatctcaaaaataaatacataaataaataataaaaatccatttttttgatcataaggaatttgaaatcacccttagccggactagttggaatcacggacacaggcaactctagagatgaaaaaaataggggctaaaacagggactccgctgccaaggcagggcctggaggggaacattggtctgagatgttttaggagatactctgaggctccgtctctcagcgcctgccgttctcacatcaccactcacttcctcttcatcttttttatcgtcatcttggtcttcccctttagaggatctccaggaacttgagtgagtttccagctccctcgtggtaattcccgacacgcgttcccaggatgaggagcctgggtccccggtgctgctcctcagcaatgctgccgtctttccgtcctctgccagccgttagccctgacgtgaggtttactttggttgccacgctttcagtcatttggcccctggatcctgtgactcactggatcttttgtgctccagtccccaactcagggtcaccctcaggaatcatttctccattacctggggtctgtcctcaggctgttttctcaggcatggcatggagtgtggattttgtctttgaggatctgttccacttgcctgggagtacaatctgacctcacacgctttcccctacaggctgtggggatgcttaccggtggtaagcagaataatcccccccaaaaagatgtctacttcccaaccccaagaacctctgaattcgtgaggctatacagaaatgggatta

SEQ ID NO: 2246 - DNA, 1307 bp, Homo sapiens
gcatagccggacttgggtgactcatgccctgggggaaaggctgaagcccaaacggaacaccctgttttaaaggacacagcctacaaatcaaatattaggactgccaacctgccctggaaaggcaaataggtggtgacgtggatttgtgatctctgcaaacagaggaggttcagagagaatctgtgaagggtctcctagtatgagacacgggcaaaccgtggcttgctttaaaaaaaatttttttttgaccaggctcggtgactgatgcctgtaaccctagcactttgggaggccgaggcaggtggttcacctgaggtcaggagttcgagaccagcctggtcagcatggcgaaaccccatctctactaaaaatacaaaaattagccagccatgatggcaggcgcctgttgtctcagctactcaggaggctgaggcaggagaatcgcttgaacccggggggcaaaggttgcagtcagccaagatcacaccacttcagtccagcctgggcagcagagcgaaattccatctcaaaaataaatacataaataaataataaaaatccatttttttgatcataaggaatttgaaatcacccttagccggactagttggaatcacggacacaggcaactctagagatgaaaaaaataggggctaaaacagggactccgctgccaaggcagggcctggaggggaacattggtctgagatgttttaggagatactctgaggctccgtctctcagcgcctgccgttctcacatcaccactcacttcctcttcatcttttttatcgtcatcttggtcttcccctttagaggatctccaggaacttgagtgagtttccagctccctcgtggtaattcccgacacgcgttcccaggatgaggagcctgggtccccggtgctgctcctcagcaatgctgccgtctttccgtcctctgccagccgttagccctgacgtgaggtttactttggttgccacgctttcagtcatttggcccctggatcctgtgactcactggatcttttgtgctccagtccccaactcagggtcaccctcaggaatcatttctccattacctggggtctgtcctcaggctgttttctcaggcatggcatggagtgtggattttgtctttgaggatctgttccacttgsctgggagtacaatctgacctcacacgctttcccctacaggctgtggggatgcttaccggtggtaagcagaataatcccccccaaaaagatgtctacttcccaaccccaagaacctctgaattcgtgaggctatacagaaatgggatta

SEQ ID NO: 2247 - DNA, 637 bp, Homo sapiens
agttagaattttaggtactcctcagatgctattttattaaacttgtatgttgctactccacacatttcaacctgccctttgcctcatacacaattgggcaatttacggtgtaaatgcagcatagtggaagctgagcagctcttgtgatggagctgtttaagaaagagagaatcagcccccgcattggggagctggtccagcacacatggccttggggytctcctgttgagcacacatgatctcacaggacccccacaacagacaaggctactctgtgatcacaatggggcaagatgaaaatgagaccacattgtaaccctatctgaacacagacaaaaagaaaaacatggtgcaaaccacaaaaaggacaaaaacactccctgtcctggttaataagagtgactgctcttctctaccaatctataccaaggccatcctgcttctaggtaagacttaagatacagctacagaatcacctccacgtcttgacaacatccaatccaggccacagttccatttctttaagccttccacaaaatgacctgccactagctcaagtccccccagtccttccggccaccctcctatggagatgccctcatgctttgccacggtatgcattctccctggatgccat

SEQ ID NO: 2248 - DNA, 482 bp, Homo sapiens
aaaaaccatttttagaggtctttgctacttattgtatctttccttccaaagtgtgtktttttttttttaacagatacagcactgacacctgaaatacgggtacagccttattcctgaagagttttgttttggtagtggctgctgctactgcccttttcctgcccattgtctttgtgtgtgatttttactaaaccaaacatcagtgcaccatgaaaaatatatagctgtgaaataaaattgtaaatatttttattttacctattagatcttgagcccccgtttgtacagtttttgcacattagcaggtgccttcatgtttgaacaggcatctcttatgaaatgctgattacaatgtgatagttgctgttctgggcagaagttcctgctgagttacggtaattgctcagggtgttaacagcaataaaagctgaagcttctgttgtcagtattggtctaatacaacacattaaagctatctacaa

SEQ ID NO: 2249 - DNA, 482 bp, Homo sapiens
aaaaaccatttttagaggtctttgctacttattgtatctttccttccaaagtgtgtgtttttttttttaacagatacagcactgacacctgaaatacgggtacagccttattcctgaagagttttgttttggtagtggctgctgctactgcccttttcctgcccattgtctttgtgtgtgatttttactaaaccaaacatcagtgcaccatgaaaaatatatagctgtgaaataaaattgtaaatatttttattttacctattagatcttgagcccccrtttgtacagtttttgcacattagcaggtgccttcatgtttgaacaggcatctcttatgaaatgctgattacaatgtgatagttgctgttctgggcagaagttcctgctgagttacggtaattgctcagggtgttaacagcaataaaagctgaagcttctgttgtcagtattggtctaatacaacacattaaagctatctacaa

SEQ ID NO: 2250 - DNA, 601 bp, Homo sapiens
agataacacacattgcggcgccttggtttccccaaatctggtatttattactagaaaaggaaggagccgtggccatgccagaagccgcgggtgaggtgaacattgcaaggcaccggccttcgccttctgagctgctcactccatacaggtggaggccctgcttggggcctgtgttgctgggggcctgcgcgcgggacgtggctgtccgtgtgagctcatttatggacacgtgcatgctgtatgatgtacgcgtgtgtcgcatgtgggyatgtatgtgtgcacacgtgtgtatttatgaatgtgcacatgcctgtgagcgttgtgtgtgatcgtttttaagagccgggctacctgtaacagacagaaaaagactcctagagccttaaatgcccatgaaacctatttattggcgacccttagaaacaaaacccaggctgacgtttgagtaggagggcactggtgccttaaagaatgttaggttaggttaaagatctcccgtctccaaattgaaccggaagggcatcctggccatccacttagcgatgtgaacttttgtctaagtgtttcagaactgaaaacgcaaagtgtttggggctccagc

SEQ ID NO: 2251 - DNA, 933 bp, Homo sapiens
cccagcaagcaccatggttcataatgacaacagtgcccacccagatgctgctgaggattaccagaaggcttattctctggacctgttccttctgggtcttgaaccctggctctgttcttgaccttcgtcatttgcttttgccaccaccaccattcaccttgttttagtgactaattcagacccctgactctggttctctggtctcgggtcttctctttactcagctctgcacaatcaatcccttaatttctgtaccacctagagctgcaggtgggagatattccttccatccttctttactttttcaactagcccaagcccagctgggtctcagctggaaggagaaggagtggacactgtgtagcattttttttttcttttgagacagcgtctcgctctgtcacccaggctggagtgcagcggcacgatcttggcccactgcaacctctacctcccggattcaagcgattcttgtgcctcagcctcccgagtatctgggattacagatgtgyaccaccatgcctgagtaatttttgtatttttttttttttagtagagacagggtttcaccatgttggctaagctggtctggaactcctggcctcatgtgatccacctgcctcagcatcccaaagtgctgggattacgggtgtgagcccactgtgcccggccccgtctccccattttcatgagtggtcatggtggtggttttccgcctgccatatcacaggaacccctgagtgggagcagagggggaaaaccaagcctcctaccctgccaatcaggaaatcctgaaaccctagcataattcattaccttatatagctggggggaatggggaagccctttctctagcaagtcacctcacctggatctataatctgggcacgaagtgtaattttattgctgtgcccccagcactgtcttgctaca

SEQ ID NO: 2252 - DNA, 933 bp, Homo sapiens
cccagcaagcaccatggttcataatgacaacagtgcccacccagatgctgctgaggattaccagaaggcttattctctggacctgttccttctgggtcttgaaccctggctctgttcttgaccttcgtcatttgcttttgccaccaccaccattcaccttgttttagtgactaattcagacccctgactctggttctctggtctcgggtcttctctttactcagctctgcacaatcaatcccttaatttctgtaccacctagagctgcaggtgggagatattccttccatccttctttactttttcaactagcccaagcccagctgggtctcagctggaaggagaaggagtggacactgtgtagcattttttttttcttttgagacagcgtctcgctctgtcacccaggctggagtgcagcggcacgatcttggcccactgcaacctctacctcccggattcaagcgattcttgtgcctcagcctcccgagtatctgggattacagatgtgcaccaccatgcctgagtaatttttgtatttttttttttttagtagagacagggtttcaccatgttggctaagctggtctggaactcctggcctcatgtgatccacctgcctcagcatcccaaagtgctgggattacgggtgtgagcccactgtgcccggccccgtctccccattttcatgagtggtcatggtggtggttttccgcctgccatatcacaggaacccctgagtgggagcagagggggaaaaccaagcctcctaccctgccaatcaggaaatcctgaraccctagcataattcattaccttatatagctggggggaatggggaagccctttctctagcaagtcacctcacctggatctataatctgggcacgaagtgtaattttattgctgtgcccccagcactgtcttgctaca

SEQ ID NO: 2253 - DNA, 1705 bp, Homo sapiens
tgcataataacacatcagggtaaatgggatatccatcacctcaatcttcccttatattttaagcgcctggtagatgctcactaaaataatcataaaagtttaggagcaaaaggaccttgtaatrtaattttctaatagaaaattgctttctaagcaagttttcaaacaggatatttatttaaagtaagcacttaaaggtttggaatgtcaatttatagtttagaaaaatggaaggatcttggctgggagtggtggctcacgcctgtaatcccagcactttgggaggccaaagtgggcagatcacttgaggtcaggagttcaagacaagcctggccaacatggtgaaaccctgtctttactaaatatacaaaaattagctgggcgtggtggtgcgcgcctataatcccagctactcgggaggctgaggcaggagaatcgcttgaacccaggaggcagtggcgacagtgagctgagattgcaccactgcactccagcctgggcgacagggcgagactctgtctcaaaaaaaaagaaaaaaaaaagaaaagaaaaatggaaggatttggatggattcatgctaggttaaaagagagagagaaaggctggcacggtggttcacacctgtaatcccggcactttgggaggccaaagtaggcggatcacctgaggtcaggagtttagaccagcctggccaacatggcgaaacaccatctctactaaaaacacaaaaattagctgggcatgctggtgtgcgcctgtaatcccagctactccggaagctgaggcaggtgaattgcttgaacctagaaggtggaggttgcagtgagccgagattgcaccactgcactccgacctgggtgacacagtgagactctgtctcaaaaaaaaaaaaaaaaaacaacgaaaagaaaaatggaaggatcttgatggattgatgctaggttaaaagagagagagcgagcaagagaaatggaaggagctaagagaacagtgtttctcaaaatatagtctatagaccagcatcagcgtaagcatcacctaggagattaacactttttaaattaaaaattaatttaaattaaaaattattccaggcctcactccagaagcagaatctcttgatgtggggcccagaagtttgcatttttacaagctcacaattgattgttaggcacccaaagtttgagatttggaacactaactccatgactgtactgtataactcactgcatcagggtctccatgctttgcaagccaggagctcttctatatggagagataaaatgatgctatcattcacccacaagcccctctgctggttcagtagcaagttccaatttcttgttagcaaaactgttcagatcctggactcaagtggaccttgtttctttcctgggacatcattggctgaattaaattgtccacacaattttgtctctgttggggattgtgccttctcacttgccccccttgtttgatacagccctctgtggcttgcgacatgtcatcctgaatgctctctgaaaacgtcctttgtcctcaccagccgtccacttcagaagtggtggtgttattctgaggcagggcttgggatgccatatagaataaagctatgattgtactaaaaaccaccagaggataagcggctaacacaaacatgaagaaggcctaagcacatgctgtaccaggggaaagaatgagcgaa

SEQ ID NO: 2254 - DNA, 1705 bp, Homo sapiens
tgcataataacacatcagggtaaatgggatatccatcacctcaatcttcccttatattttaagcgcctggtagatgctcactaaaataatcataaaagtttaggagcaaaaggaccttgtaatgtaattttctaatagaaaattgctttctaagcaagttttcaaacaggatatttatttaaagtaagcacttaaaggtttggaatgtcaatttatagtttagaaaaatggaaggatcttggctgggagtggtggctcacgcctgtaatcccagcactttgggaggccaaagtgggcagatcacttgaggtcaggagttcaagacaagcctggccaacatggtgaaaccctgtctttactaaatatacaaaaattagctgggcgtggtggtgcgcgcctataatcccagctactcgggaggctgaggcaggagaatcgcttgaacccaggaggcagtggcgacagtgagctgagattgcaccactgcactccagcctgggcgacagggcgagactctgtctcaaaaaaaaaraaaaaaaaaagaaaagaaaaatggaaggatttggatggattcatgctaggttaaaagagagagagaaaggctggcacggtggttcacacctgtaatcccggcactttgggaggccaaagtaggcggatcacctgaggtcaggagtttagaccagcctggccaacatggcgaaacaccatctctactaaaaacacaaaaattagctgggcatgctggtgtgcgcctgtaatcccagctactccggaagctgaggcaggtgaattgcttgaacctagaaggtggaggttgcagtgagccgagattgcaccactgcactccgacctgggtgacacagtgagactctgtctcaaaaaaaaaaaaaaaaaacaacgaaaagaaaaatggaaggatcttgatggattgatgctaggttaaaagagagagagcgagcaagagaaatggaaggagctaagagaacagtgtttctcaaaatatagtctatagaccagcatcagcgtaagcatcacctaggagattaacactttttaaattaaaaattaatttaaattaaaaattattccaggcctcactccagaagcagaatctcttgatgtggggcccagaagtttgcatttttacaagctcacaattgattgttaggcacccaaagtttgagatttggaacactaactccatgactgtactgtataactcactgcatcagggtctccatgctttgcaagccaggagctcttctatatggagagataaaatgatgctatcattcacccacaagcccctctgctggttcagtagcaagttccaatttcttgttagcaaaactgttcagatcctggactcaagtggaccttgtttctttcctgggacatcattggctgaattaaattgtccacacaattttgtctctgttggggattgtgccttctcacttgccccccttgtttgatacagccctctgtggcttgcgacatgtcatcctgaatgctctctgaaaacgtcctttgtcctcaccagccgtccacttcagaagtggtggtgttattctgaggcagggcttgggatgccatatagaataaagctatgattgtactaaaaaccaccagaggataagcggctaacacaaacatgaagaaggcctaagcacatgctgtaccaggggaaagaatgagcgaa

SEQ ID NO: 2255 - DNA, 676 bp, Homo sapiens
tatttaagtacttatatttattatgaatccataaacacttcactttacacacttacataactgtccgctatttgtctacttgacaactgcatgctcttcaaggacaggactatgactcattcatatttgtatctgcaaaccctgtagtaccctttacctagcaggtgctcaataaatgctgaatgagcaaatatcatcatagttacaattacaattcattagatatttacaatatgaaaattgttgtgatagacactgtacatacatacacagacataatatatacatataaattcatttaatyctcacaacaactctaggaggtacatatattataatcccaatgttacaggaaaggaaaccaagacttatagaatttaagaaacttttttgcaaagtcacatatctagtaaatcacatatcagtaagtaacagagccataaattaaagtcacgtctgattttagactccaatcacttcactactgtgccctcctaaagtgtaactatgtcataaaattagcatgttgccaaggattccacctcaacaccacattgttctatagttaagaacctcaaacattaagaagaaataacctaagtatagaagactccactaaataaatccataaaacaccatacctggcttatgaaaatcttcattgcttttgttccta

SEQ ID NO: 2256 - DNA, 604 bp, Homo sapiens
ttgttacatgtaattctaaatacaagagaatgtttctgcaagctcctggaggaattcagaaattcaaccaattagagattatctactattcacctttccagagaacatcatgaaaatttaaaataggaaaacacaaagaaagcctaagcatctcatttcagaacaaaagatgttctgtagtaaagaaatttgtatttctaaaacatgatttttttgtcttaagcytcctaatgtttgaagcatgccaagaagtaagtaatgccattacatttattacctaatatatcaatgataaggtgcattttggagttagtgggaaagatatggcagattaacattagaccgtttaaataataactaagcgtattcttagaaggtgttggatatatatgagtgctgaaattcatattattcttgctcaagtgttagcccaagactactgaggttttctgggtgagtatagctaaaagaaaagtgttttaatgatagtcatttccacccctttttcatgcatgttttagcattctgtttggaattggagagttctcttttgatctctgatgtaataatgaactctgacatacatttttctcagagatctgct

SEQ ID NO: 2257 - DNA, 1686 bp, Homo sapiens
acctattttctttgtaaattacactgtcttaggtatttcttaatagcagtatgaaaattgactaaaacacatactctgtgtagcaatgcaccactatgtaggtgattatggatgaataataaatttcatctaacaaaacttttctatttgtkattacacatttcctctcataaatctgagatctaaaatacatacaaaacatccattttaagtcgagggtacaaattattttcactgtggtcactactggaatcaagtcaatttaaggaaaccaaagaagaggaataaatgaacaatgccttcagaacactgccagtggccgtaaagtgttttttctccctatgttactttgcttaataaataaatccctaaaaagagaatttgaatagagtatcttgatttgtgtgcctgtccttgaaaaagtgaaggtaattggaatagatgaataaaatttgacaatcccagtagaaccacagaaatagtaaaacagagttctccagtgagaaagcagaatgttgctactgaaaaaggagaagagatgttggctagacataaatgatgaatgtctattatacagatttactattcagtacaatcaacacttcaggaatatatggtttaacattgagttatcttggcaactatgaacatatatcacactgtatatcatctttaacttatcgaaatgattggattctgaagtcaaattctcaagattcacacttagtaaggtttttactccgtgaagagtttcaaagatttttatctagcaaaaatattattaggtattacatataaatttatttttacttttaaactttattttatacatggtcttactatgttgcccaggctgatcttgaacctctcctgtcaagcattcctcctgtctcaccctcccaaattgttggaattacaggcttgagccactgtgcttggcagtatcaaattctaagagtaatttcaaggatacaagaaatcaagaggctagaagaagcatggaatgtttttggagattgagggctattctgaatatttcttttctgcatggaggcaccctgttgtctcagagtagataaggcctccaagtgaggtactaattttattacctcacatagcaagaagtgttcagtctttttataacagagaagtgatgacattttccggagatccacatcttataatgcataaattctaagtgtattcgtccatccttgcattgttatacaaaaataatggagactgggtaatttatagagaaaagagatttaattggctcccacttccacaagctgtataggaagcatggttgggagacctcaggaaatgtacagtcatggcagaaggggaaggataagcaggcatgtcttacatagcccaagaaggaggaagacagtgaagggggaggtgctacatacttttgaacaaccagatcttgtgagaactcactcactctcaggagatcagcaagggggatgtccgtccccatgattcaattacctcccaccaggcccctgttccatatttggggattacaattaaacatgagatttgggcaaggacacaggtccaaacttttagtttatcacgaaactgtttctataagcaattgccaaccaggcatgttatgttaggaacgtttctcagatatacctccaagtaaacccccctactactaaatatagc

SEQ ID NO: 2258 - DNA, 1686 bp, Homo sapiens
acctattttctttgtaaattacactgtcttaggtatttcttaatagcagtatgaaaattgactaaaacacatactctgtgtagcaatgcaccactatgtaggtgattatggatgaataataaatttcatctaacaaaacttttctatttgttattacacatttcctctcataaatctgagatctaaaatacatacaaaacatccattttaagtcgagggtacaaattattttcactgtggtcactactggaatcaagtcaatttaaggaaaccaaagaagaggaataaatgaacaatgccttcagaacactgccagtggccgtaaagtgttttttctccctatgttactttgcttaataaataaatccctaaaaagagaatttgaatagagtatcttgatttgtgtgcctgtccttgaaaaagtgaaggtaattggaatagatgaataaaatttgacaatcccagtagaaccacagaaatagtaaaacagagttctccagtgagaaagcagaatgttgctactgaaaaaggagaagagatgttggctagacataaatgatgaatgtctattatacagatttactattcagtacaatcaacacttcaggaatatatggtttaacattgagttatcttggcaactatgaacatatatcacactgtatatcatctttaacttatcgaaatgattggattctgaagtcaaattctcaagattcacacttagtaaggtttttactccgtgaagagtttcaaagatttttatctagcaaaaatattattaggtattacatataaatttatttttacttttaaactttattttatacatggtcttactatgttgcccaggctgatcttgaacctctcctgtcaagcattcctcctgtctcaccctcccaaattgttggaattacaggcttgagccactgtgcttggcagtatcaaattctaagagtaatttcaaggatacaagaaatcaagaggctagaagaagcatggaatgtttttggagattgagggctattctgaatatttcttttctgcatggaggcaccctgttgtctcagagtagataaggcctccaagtgaggtactaattttattacctcacatagcaagaagtgttcagtctttttataacagagaagtgatgamattttccggagatccacatcttataatgcataaattctaagtgtattcgtccatccttgcattgttatacaaaaataatggagactgggtaatttatagagaaaagagatttaattggctcccacttccacaagctgtataggaagcatggttgggagacctcaggaaatgtacagtcatggcagaaggggaaggataagcaggcatgtcttacatagcccaagaaggaggaagacagtgaagggggaggtgctacatacttttgaacaaccagatcttgtgagaactcactcactctcaggagatcagcaagggggatgtccgtccccatgattcaattacctcccaccaggcccctgttccatatttggggattacaattaaacatgagatttgggcaaggacacaggtccaaacttttagtttatcacgaaactgtttctataagcaattgccaaccaggcatgttatgttaggaacgtttctcagatatacctccaagtaaacccccctactactaaatatagc

SEQ ID NO: 2259 - DNA, 1209 bp, Homo sapiens
ctcaagcgccctggtgccccgggtggcctcatcctccactgcctttacagtcttgaggagcgaggtgacattggtcaccatcacctgcataggaagggagaatgaatacagatagtgcagtgactcaggtccagcccctactccttttacttctggatcgcatgctatgagcaaggacgcctctccttcctttaagtgagaagagaactcaggtgctcatccccagtcggagccccactctaccttggcagcccccttgagctggtacatggaagggtcgtccactggyttgctggcagctcccttggtagcactgatgagatcagaaagggccttggccacatctttgatggcattgatcaaaaccacctgaaagagagcacagaactcaggtgagcaggcgtcaagatgtcagctgtgggctttaccaaggcatgcagcctgagggcaggccagggcacgggggaggagagaaagacagtctgaagtctgcagcatggcagacctcctgggaagccacccttggtgattctgatacaggactcaggactttgaaaagctgcccaggggaggctgaagctgagccagaacggagaagtcaggtgcaaacatgcagcttatgtaaaacctcctagccagcaacttggccgatgagctgcctctgacagcacaaaggacaccagagaggcaacaccacttactcctaactggcaccctgaacactgagtaaaaatccccacctgaccccagccctcaaggccccacaacagccctgcctgcctctctggctatgaggtgctctgctacaggcacacaggtcagcctgtcttcttctccatgggaaatctcaactcattcctgtttcggacctttgctcattgttctaactgggactcagctctttccatcacttgggccttaactcaaatgtcatgtcctcagaggcttttccccatccctcagctaagggcccactcccacaattgctgaaactgtcaggttgccgttttatttacagcacttatcagtaggtggaattattttatcatttattcacttataaatcatctgtcttctccctcaacttgagtgcaagctccaggaggcttggcctggacttctgctttgtttcacgcttgtaacagggatgagcacccagcaggtactcagtaaatacttgtggaatgaagatgcaggtacgttcccaca

SEQ ID NO: 2260 - DNA, 1231 bp, Homo sapiens
accacgctgccattctcctcgtgtgccttctggtctcatgccctggggccctgctcctcgccagcccaacccagcagacccctacttgtcctttgtgactcatctgggaagccctccctgactcccagggtttgggcagtttatccctcctctgtgctttgagagcccctagccagaccactcaggttcccatcacatggtrctactgtaggtctgtctgtgagcaggttgtgagcctcttagatgcaggcaccacatcttcatctgtgcctctctcatacgttactaactcggtgcctgcttcagaggaggccttcagccagtgtctgctacagaagggagtaaaatgactgaaattctatgagactgttgctgtttcccagagcccagagaacatgttaggaaggtaacaatcaagtccttctcagagcagatacattttcctgattgctttaattataaaaatattttaaatacaataaaagaaatgcttaaatgaaaaaaatcacacagccccaacatcttcatatagcaaacgttatcattgctttctgttcgtttttatctacatataaaataattttgtccagttgtaatcatggcgagatacattctgctttcttttcacttaacattttatcatatgtaatttttccttgaagataaggcttcattaacttctctatgcaaagctagctggcccattcttcatgagttccatttttaatgattgcatgatattacatcaactgattatgccagaatttccctatactttggacattttgtttccaattttcgagatttttttattgtaagtgttaaaatgtagattgtctgtattgctaaaagtatgtttacatcagtcatgtagcaaatcataaatggcagaaatctcagaattcttgttgtattgtgaaaggcctaaagtgcatttccattttttggccctcttgagtccctctctgacccacacctccctcacctttatttgatacctgggataaacccagggaaaaattgaggagctgcatgttcgtttgtgaatatgtgatttctgggtctgggggacacttctgaggaaaacatcctgagttaagagagacctggttcaagtcctgcttctgccatttattaggtgcataatcttatataaatcactcaaaacttttcaggggtttcatctgtaaaatggggatagagccatccacactgactcttatgagggtca

SEQ ID NO: 2261 - DNA, 646 bp, Homo sapiens
ttttgagaatggaaaatgattgatatrgcttgctattctagttcatgttattcaaggctttgacctgcaaatagcaatgggctatatgttaatatgattttagggcctgtgctcaaaacaaaagccccaaacaaacaaacaaacaaacaaaccctgtctttattctaatagtgctgtctgtgacacctacacaattagaaaaccattccttgagatttcccttgagttgtcatctttttagtctgaagaagttcagcttaggcttagtggcttgattggctgcccttcttcccaatagactgagaggtttgtgggagcagaaaggggaagagaaaagcttggagaggtaagaagcaggaagggcgagcagcaccaagggaaggctgagcatctcctgttaagctggaagtcgtgtgatcccagctgaaggggtatgattggagaaagccatgtagccactggtggggctgggacctgagtttcttccactccaaagtccactcttgcaatcagcctgcttcactcttttgcctgtgtttgggcccatctgtgtcaggctcctgctgagtggcacccaccctgcctcgcactggtgttctcaaattgctctgaagtctggtaaaccccgacctccagggatctacca

SEQ ID NO: 2262 - DNA, 646 bp, Homo sapiens
ttttgagaatggaaaatgattgatatggcttgctattctagttcatgttattcaaggctttgacctgcaaatagcaatgggctatatgwtaatatgattttagggcctgtgctcaaaacaaaagccccaaacaaacaaacaaacaaacaaaccctgtctttattctaatagtgctgtctgtgacacctacacaattagaaaaccattccttgagatttcccttgagttgtcatctttttagtctgaagaagttcagcttaggcttagtggcttgattggctgcccttcttcccaatagactgagaggtttgtgggagcagaaaggggaagagaaaagcttggagaggtaagaagcaggaagggcgagcagcaccaagggaaggctgagcatctcctgttaagctggaagtcgtgtgatcccagctgaaggggtatgattggagaaagccatgtagccactggtggggctgggacctgagtttcttccactccaaagtccactcttgcaatcagcctgcttcactcttttgcctgtgtttgggcccatctgtgtcaggctcctgctgagtggcacccaccctgcctcgcactggtgttctcaaattgctctgaagtctggtaaaccccgacctccagggatctacca

SEQ ID NO: 2263 - DNA, 646 bp, Homo sapiens
ttttgagaatggaaaatgattgatatggcttgctattctagttcatgttattcaaggctttgacctgcaaatagcaatgggctatatgttaatatgattttagggcctgtgctcaaaacaaaagccccaaacaaacaaacaaacaaacaaaccctgtctttattctaatagtgctgtctgtgacacctacacaattagaaaaccattccttgagatttcccttgagttgtcatctttttagtytgaagaagttcagcttaggcttagtggcttgattggctgcccttcttcccaatagactgagaggtttgtgggagcagaaaggggaagagaaaagcttggagaggtaagaagcaggaagggcgagcagcaccaagggaaggctgagcatctcctgttaagctggaagtcgtgtgatcccagctgaaggggtatgattggagaaagccatgtagccactggtggggctgggacctgagtttcttccactccaaagtccactcttgcaatcagcctgcttcactcttttgcctgtgtttgggcccatctgtgtcaggctcctgctgagtggcacccaccctgcctcgcactggtgttctcaaattgctctgaagtctggtaaaccccgacctccagggatctacca

SEQ ID NO: 2264 - DNA, 600 bp, Homo sapiens
tttttttgtcgaaataaaagtaaaatggagaaaatcatctcctggttttgtgccttgggggaagttaaaagcctggtctttatgaagttttggatctgattccagttggagggggtctaaggaatcctgatcgcctttcctcactgcctcaaacacaacaaaacacactggtttttcccaagccttaaaaaacaactacatctgaaaccaggtcaaatataatttgcttgggacagcttgtgaaagttgaaaaggcaagaatggaacttatctgacaaagatagaaaacatggaagaaaaaagtggctgggcatggtggctcacatctgtaatcccagcacttgggaggctgaggcaggtggatggcttgagtccaggaggttgagaccagcctgggcaacatagtgagaccttgtcaatagaaaaattaaccaggcatggtggygcacacctgcagtcccagctacttgggaggctgaggtgggaggattgcttaagactgggacagagctcaaggctgtagtaagctgtgattgcactactgtactccagcctgggcaacagagtgagaccccggctcaaaataataataatggtaat

SEQ ID NO: 2265 - DNA, 1108 bp, Homo sapiens
ctcgcctaccagctgggcgctgtgggccatgtgttgcaaacatctagcgggcgcaccccctatgccaggctctctgctgaaagtttaacttccatttcctcactgagcctccacaactttaagaggcagatacacatgaagataccgaggctttgaggggttgagacgcatgctccatctcatgcagctaagaggtggagacagcggcatcccaccccacagcccyggctctcagctgccacagtctgtggtctctttcactttcattgggatgccagtcctgctgctgtgggagcaccgcacttttagaagtttatcatttggtgtttggatgaccctctacctggcatcagaatatgagatcttaacattttgctatattcacttcagacaccagaatctatcccctctcagaatctatcctcactcagataaaatacaatggcatgaatcacacttttctgttcaatgcctcattctgtgcggtaatgactaatggctaaattacaccctttaagagaacttaagatcaaacctttagccagcacctcccttaacgcttcttcccatcacatgttagaagaatgagtgttgtggggatgtggacaggaagaccactcacatgagcagtcactgggccagcaggagagggtggaggatgatggggtgggggtggctagggcaaggtgagggaacgtgtccaaaaaataaaacttaattaacgctaatagtgagacatgattattggccaacaataaaacttatttttacattgttatttcctctatggttatcttacagagaggtttcaaacctggtgaatagggctgttcccggcccttagggagcctttgaatgaattttaaaggggtcctttgggcagacatgagcgacgccagggcagagcatgggctgaattttcgtccctacttcccacttcagccaaatgcctttgtggagggcacagcctatacaaccacaggcagcagctccacacacttgcatttgatttcatcctcatccccaggaagggcactggtgtcaccaccaaagggaacggagcactgaagggtcatcgggacagagggcttagggtggtcctttatgt

SEQ ID NO: 2266 - DNA, 1108 bp, Homo sapiens
ctcgcctaccagctgggcgctgtgggccatgtgttgcaaacatctagcgggcgcaccccctatgccaggctctctgctgaaagtttaacttccatttcctcactgagcctccacaactttaagaggcagatacacatgaagataccgaggctttgaggggttgagacgcatgctccatctcatgcagctaagaggtggagacagcggcatcccaccccacagccctggctctcagctgccacagtctgtggtctctttcactttcattgggatgccagtcctgctgctgtgggagcaccgcacttttagaagtttatcatttggtgtttggatgaccctctacctggcatcagaatatgagatcttaacattttgctatattcacttcagacascagaatctatcccctctcagaatctatcctcactcagataaaatacaatggcatgaatcacacttttctgttcaatgcctcattctgtgcggtaatgactaatggctaaattacaccctttaagagaacttaagatcaaacctttagccagcacctcccttaacgcttcttcccatcacatgttagaagaatgagtgttgtggggatgtggacaggaagaccactcacatgagcagtcactgggccagcaggagagggtggaggatgatggggtgggggtggctagggcaaggtgagggaacgtgtccaaaaaataaaacttaattaacgctaatagtgagacatgattattggccaacaataaaacttatttttacattgttatttcctctatggttatcttacagagaggtttcaaacctggtgaatagggctgttcccggcccttagggagcctttgaatgaattttaaaggggtcctttgggcagacatgagcgacgccagggcagagcatgggctgaattttcgtccctacttcccacttcagccaaatgcctttgtggagggcacagcctatacaaccacaggcagcagctccacacacttgcatttgatttcatcctcatccccaggaagggcactggtgtcaccaccaaagggaacggagcactgaagggtcatcgggacagagggcttagggtggtcctttatgt

SEQ ID NO: 2267 - DNA, 1261 bp, Homo sapiens
tggggactctaggaagcagagttaaaacagatgctgagcactctgttcatgttcagccaggaagaaaggcaaaagtcaaaaaagcaaggtcagccaggtgtggtggctcacacctgtaatcccagcactttgggaggccaaggcgagcagatcacctgaggtcaggagttcgagaccatcctggccaacatgataaaatcccgtctctactaaaaatacaaaaatttaccaggcatggtagcgcatgcctgtaatcccagctattcaggaggctgaggcatgagaatcgcttgaatctgggaggcggaggttgcagtgaaccgagatcacaccactgcactccagcctgggcaacagagtgagactctgtctcaaaaaaaaaaaaaaaaaaaaaagcaaggtcatggtgacaatgaacaaatgtgtacattggccaagactcatcatacctcattaaagtttattaaaagaaaaaaagcaaagacagactctccctcctccacagtgcttgggacaatgatctcatagccccccgggatttttatccccaaagggctcctctccattctgattctcttgtaaggaggaagggaataaaggactggcagaagaaaaaaaaaaaaaaaaaaaggaaagagattaaagagagactccctcccctcctactctccagatccccacatttgaaatctttagtgaggtcttcaagcaatcagattccataacttttatttttaaatagctctcaactctgaagaaagccctgaagtcatgtctaaggtcagtggaactatttgctctagggaaatttacttagagggaaaaggttccatcttcccaggtatctatttaaaaagccttggtcatcaaagtcatcctgcaaagccctctgacttctgagcgaaggcgagcaatgtttctggtctcatgtttgacggacaggatgttggctttagattaaacacatgtggcggcgtgaatgctcttcacgtgcggytggctcccttcactgaaatccaggttgtgctcagcaggtttctgcctggtttctaacacttacagcacaaagtcacctctttaaaccaggctagatctttgaagatgtcttcacttttctgactgcctgtgagaaaatgcaatgtgagttacatcagtccaccctgagacatagctttcaagaatgccattgattctgagctatactctggatgtaatgactgcctctggggcaaaaaacacacaaccatattaaatatatgca

SEQ ID NO: 2268 - DNA, 757 bp, Homo sapiens
actggcagagttcatgaggtgccaacacgctaacagcgatgtggttgtagggttcacccaatccagcatccaagatctgagtgcgtagggatgggtttggagtcaagggacttaattggctcaagtatttcagctttttttttttccaccaaatacctcctctccacccatttacgaatacatttaattcaatgttattctggttcattgtgcagtcatcacatcttcaaytgttctgtattattttaatgtacttgttcaaagcgataaaacaacaatgttttatcattgtggaaatgagtaggttattttacctgtaaagaatattactaaagcaagataaattatgtcaactggctcaacagcaaacactctttaaaggcaaatgatttaatttctatttggccgtgtgatgacaactacatataattcctgccccttacttgctctcatattgatagtttgatatacttaactaatatttagtaatactatgcttacaataaatgtgaaataagcatttagatcactgtctggaagctttaaaaagctgttaaagtgatctgatatttacccatgtaacttttctttaagataaacaaataggagaaagaaatacatggtaaacatgtaaatgtgtgtttgaattctaatgaacatttcaaactatgaggctattcagcaagagggatagagacaatgttatttcattatgagtacatcacacagatgagttgcatttgtgtttgggtatgca

SEQ ID NO: 2269 - DNA, 477 bp, Homo sapiens
ggagaaagaacatagatgagccaaataacaataatatattcataaagcaaacacaaatgtgtctgaaattaaattaaaggcaactaaagtgctgaaattaaagcayaaagactgactgattttgttaaaaaacaaaactgtattacacttaacacattctcaaatgaacacgaagaaaacacccaaaatgaagatggaaaaatatataccatgaaaaattaaacaaaacaaagttggtatagtcgttatgctattagaatacatagctaataaggcaagcaacttttctgaagagtaacctttgataatgacaaggcagcccttctactacaaatagatcataaaaccagttctctggcgcatacaacagtattgcttctaatgatacatgacttaatttgacagactgaaaataagaataaggcaaattccaatcatcctggggtatttaaaatcaaaagtcaaaatactagaagt

SEQ ID NO: 2270 - DNA, 1316 bp, Homo sapiens
gtttgcttatcaactacataaagataaaaatattaaagactcaatgtgcttgtgaggacaaaattgtatcatctctgcagaggacctaacatagagcctgtcacatgtcaaagacccaaataatggtggctgtaacattccttcagtatgggtaaattaatactaaagctagagattctgaaatggattatggattagacaaaagctctatttttttcttccagtttaaagagttaaagatgaatttatcagtagctaaaatttggttaacaaattattgaggctacaaggcatgagagagcaraacagactagatttgtggacgcacactcaaaaacactttttatttatgtctctgtttagataccagaggtacaatatgatctctgaaaacttaaagaacattgataaacataaatttatgactaaattcacaactattttgaatactttcactagattcatctaatcataatagttccaaaagccatgaattcgtgtaactgtctgtgcatacaaatgtaccaaaataaataagcataaaagaaaacggacagcaaccaagtgcagtggctcatgcctgtaatccctgcagtttgggaggtcaaggcaggaggatctcttgaggtcaggagtttgagaccagcctgggtaagaatgagacccccatcttttttagaaaagaaagtaaaagaaaacagaaaacagaatgctatggaagttttgggggaaaataacataggacacagatttttcttgtgtcctagaaattattttccagaaaactccagttgccatttatgcttgggtatcctttagaaatcatggctctgtctctctaacatctgatatttatttcaatttattcaatgtttagaaataataaatccaaatcttacagagcttaaatggccaatctatagctatgatgaaatgaagacacaaccctacattttatatttttaaatccaattatcttgccattatataacagcaaaacaaatagctggtccagtgaattttggcaatgtgcttctcaaaccgatgaaaaactactaatacagacatttgattaaattgtttagtatttggactgtgatacattagtcaatgttcccatgaatatacagcctcaaaatactaggttgggcatttttcatctgaaatatcctcactataattagccctgtcagcttgtattatttcaagtatctttgctcgtgtatatctcaaggacacctaaatgtaccatgcaattaactaaattattgaggtatgtaataatttgtattacagctccattggatatatatgca

SEQ ID NO: 2271 - DNA, 625 bp, Homo sapiens
gtgaatcttaaaggtcaaatatttctgtaaattatgatacatctcaaaatcagaaaagaacaaaaatactacaatacacagccatgcacttaactacccagatttaacatacttttacttcctcccctcaagtttacttaaacaccctcacaggagccaccgcattgtctgtgatgagcctcgcgggccactgttcttccccagctcctctcgggtggctgcggtggtgacgaccacgagggcagaggtgttttttctcaaaaaaaggtatctggctaggcacggtggctcacacctgtaatcccagcactttgggaggccaaggcaggtggatgacatgaggccaggagttcaagaccarcctggcccacatggtgaaaccccatctctactaaaaatataaaaattagctgaatgtggtggtgcgtgcctgtaatcccagctacttggcagactgaggcacaagaatcacttgaacccgggaggcagaggttgcagtgagcctagatcgcaccactgcactccagcttgggccatagagactgtctcaaaaaaaaaaaaaaaaaaaaaaatatataatatatatatattttttgtgggagagagagagagagagagagagaga

SEQ ID NO: 2272 - DNA, 588 bp, Homo sapiens
gctatggttgtgttaaatgacaaaaaagattttgaagatgtaattaaggttggtgagccattgacttttaagatagaaagattgtccaggtgggcttaagttaacttcatgagtcctttaaaagcagagttttctctgaggatgtagaagtttgagagattccaaggacgagaaggatttcatgcaccataataggcttggaaaaacatgttatgaggartgtgcacagcctccaggagctgagattggccgctatctaacagtcaggaggaaaggaggaccttaggcctacaccaactaggagctgagttcttccaaaaatctacatgagtttgggaatgtattgttccctgagtctcctgagagagctcatcctgactcgcacattgatttctgccttgtgagatggtaaacagagaagagagttgagcctgcctggatttctgatctatggtctaggaactcaatgataggtgtagttttaagacattatgtttgtgatatcttgttacacagcaatagaaaactaacacgatggccaaaagagtgtagattttactgaatttgaaggtaagaaaaaaggaggaa

SEQ ID NO: 2273 - DNA, 1143 bp, Homo sapiens
tgttaaaacttgagaaatactatttcagattccatttgattatttttcagatctacctttttgtttttatagattcctattgttttccattgtgtgatttttcgaatttctttacatctttcacgttgagttactgtatacagttttctcttggtatctgcagggggtactggttccaggaacccctgcagataccaaactccaaggatgctcaagtcctttgtataaaacaggatagtatttgcatataacttatgcacattctcccatatactttaaatcatttctagattacttataatatctaataagatgcctacatatcaytctatttgtgtggattcaaggtactacttgcatgtggcaaattcaagttttgctttttggaactttgtggaatttttttttcccctgagtatttctcatctgaggttggttgaatccacagatgctgaacccacggaaacagagtatggccaactgtactgtttatctgatcattctaatatctggagtcttgaggtctgtgttagtctgttgtctcattgatataaagaaataccttagactggataactgataaagaaaataggtttaattggctcatggttcggcaagctatataggaagcacagctggagaggcctcagaaaacttacaatcacgacagaaggtgaaggggaagcaggcaaatcttacatggccagagcaggaggaaaaggtgtggggtggaagcaccacacaattttaaacaaccagatctcatgcgaaaactcactcattatcacaaggacagtgttcggggggatggtgttaaaccattagaaaccattcccatgatccaatcacctcccaccaggccccacctccaacactgggattacagttgaacatgagatttgggtagggacaaagatccaaaccatatcaaggtcccaaatgtgttacttttaattttcagttgactttttttcatgctgattggttctttatttattttgaagatttttggttgtcagctcatattaaggcctaattggaaggtgtttttctctggagaacatttgcatttgctctgacaagagccagagagtgataatcgtctgaatttacattacataaacataagcagtaagtattaag

SEQ ID NO: 2274 - DNA, 1143 bp, Homo sapiens
tgttaaaacttgagaaatactatttcagattccatttgattatttttcagatctacctttttgtttttatagattcctattgttttccattgtgtgatttttcgaatttctttacatctttcacgttgagttactgtatacagttttctcttggtatctgcagggggtactggttccaggaacccctgcagataccaaactccaaggatgctcaagtcctttgtataaaacaggatagtatttgcatataacttatgcacattctcccatatactttaaatcatttctagattacttataatatctaataagatgcctacatatcactctatttgtgtggattcaaggtactacttgcatgtggcaaattcaagttttgctttttggaactttgtggaatttttttttcccctgagtatttctcatctgaggttggttgaatccacagatgctgaacccacggaaacagagtatggccaactgtactgtttatctgatcattctaatatctggagtcttgaggtctgtgttagtctgttgtctcattgatataaagaaataccttagactggataactgataaagaaaataggtttaattggctcatggttyggcaagctatataggaagcacagctggagaggcctcagaaaacttacaatcacgacagaaggtgaaggggaagcaggcaaatcttacatggccagagcaggaggaaaaggtgtggggtggaagcaccacacaattttaaacaaccagatctcatgcgaaaactcactcattatcacaaggacagtgttcggggggatggtgttaaaccattagaaaccattcccatgatccaatcacctcccaccaggccccacctccaacactgggattacagttgaacatgagatttgggtagggacaaagatccaaaccatatcaaggtcccaaatgtgttacttttaattttcagttgactttttttcatgctgattggttctttatttattttgaagatttttggttgtcagctcatattaaggcctaattggaaggtgtttttctctggagaacatttgcatttgctctgacaagagccagagagtgataatcgtctgaatttacattacataaacataagcagtaagtattaag

SEQ ID NO: 2275 - DNA, 1143 bp, Homo sapiens
tgttaaaacttgagaaatactatttcagattccatttgattatttttcagatctacctttttgtttttatagattcctattgttttccattgtgtgatttttcgaatttctttacatctttcacgttgagttactgtatacagttttctcttggtatctgcagggggtactggttccaggaacccctgcagataccaaactccaaggatgctcaagtcctttgtataaaacaggatagtatttgcatataacttatgcacattctcccatatactttaaatcatttctagattacttataatatctaataagatgcctacatatcactctatttgtgtggattcaaggtactacttgcatgtggcaaattcaagttttgctttttggaactttgtggaatttttttttcccctgagtatttctcatctgaggttggttgaatccacagatgctgaacccacggaaacagagtatggccaactgtactgtttatctgatcattctaatatctggagtcttgaggtctgtgttagtctgttgtctcattgatataaagaaataccttagactggataactgataaagaaaataggtttaattggctcatggttcggcaagctatrtaggaagcacagctggagaggcctcagaaaacttacaatcacgacagaaggtgaaggggaagcaggcaaatcttacatggccagagcaggaggaaaaggtgtggggtggaagcaccacacaattttaaacaaccagatctcatgcgaaaactcactcattatcacaaggacagtgttcggggggatggtgttaaaccattagaaaccattcccatgatccaatcacctcccaccaggccccacctccaacactgggattacagttgaacatgagatttgggtagggacaaagatccaaaccatatcaaggtcccaaatgtgttacttttaattttcagttgactttttttcatgctgattggttctttatttattttgaagatttttggttgtcagctcatattaaggcctaattggaaggtgtttttctctggagaacatttgcatttgctctgacaagagccagagagtgataatcgtctgaatttacattacataaacataagcagtaagtattaag

SEQ ID NO: 2276 - DNA, 1143 bp, Homo sapiens
tgttaaaacttgagaaatactatttcagattccatttgattatttttcagatctacctttttgtttttatagattcctattgttttccattgtgtgatttttcgaatttctttacatctttcacgttgagttactgtatacagttttctcttggtatctgcagggggtactggttccaggaacccctgcagataccaaactccaaggatgctcaagtcctttgtataaaacaggatagtatttgcatataacttatgcacattctcccatatactttaaatcatttctagattacttataatatctaataagatgcctacatatcactctatttgtgtggattcaaggtactacttgcatgtggcaaattcaagttttgctttttggaactttgtggaatttttttttcccctgagtatttctcatctgaggttggttgaatccacagatgctgaacccacggaaacagagtatggccaactgtactgtttatctgatcattctaatatctggagtcttgaggtctgtgttagtctgttgtctcattgatataaagaaataccttagactggataactgataaagaaaataggtttaattggctcatggttcggcaagctatataggaagcacagctggagaggcctcagaaaacttacaatcacgrcagaaggtgaaggggaagcaggcaaatcttacatggccagagcaggaggaaaaggtgtggggtggaagcaccacacaattttaaacaaccagatctcatgcgaaaactcactcattatcacaaggacagtgttcggggggatggtgttaaaccattagaaaccattcccatgatccaatcacctcccaccaggccccacctccaacactgggattacagttgaacatgagatttgggtagggacaaagatccaaaccatatcaaggtcccaaatgtgttacttttaattttcagttgactttttttcatgctgattggttctttatttattttgaagatttttggttgtcagctcatattaaggcctaattggaaggtgtttttctctggagaacatttgcatttgctctgacaagagccagagagtgataatcgtctgaatttacattacataaacataagcagtaagtattaag

SEQ ID NO: 2277 - DNA, 1143 bp, Homo sapiens
tgttaaaacttgagaaatactatttcagattccatttgattatttttcagatctacctttttgtttttatagattcctattgttttccattgtgtgatttttcgaatttctttacatctttcacgttgagttactgtatacagttttctcttggtatctgcagggggtactggttccaggaacccctgcagataccaaactccaaggatgctcaagtcctttgtataaaacaggatagtatttgcatataacttatgcacattctcccatatactttaaatcatttctagattacttataatatctaataagatgcctacatatcactctatttgtgtggattcaaggtactacttgcatgtggcaaattcaagttttgctttttggaactttgtggaatttttttttcccctgagtatttctcatctgaggttggttgaatccacagatgctgaacccacggaaacagagtatggccaactgtactgtttatctgatcattctaatatctggagtcttgaggtctgtgttagtctgttgtctcattgatataaagaaataccttagactggataactgataaagaaaataggtttaattggctcatggttcggcaagctatataggaagcacagctggagaggcctcagaaaacttacaatcacgacagaaggtgaaggggaagcaggcaartcttacatggccagagcaggaggaaaaggtgtggggtggaagcaccacacaattttaaacaaccagatctcatgcgaaaactcactcattatcacaaggacagtgttcggggggatggtgttaaaccattagaaaccattcccatgatccaatcacctcccaccaggccccacctccaacactgggattacagttgaacatgagatttgggtagggacaaagatccaaaccatatcaaggtcccaaatgtgttacttttaattttcagttgactttttttcatgctgattggttctttatttattttgaagatttttggttgtcagctcatattaaggcctaattggaaggtgtttttctctggagaacatttgcatttgctctgacaagagccagagagtgataatcgtctgaatttacattacataaacataagcagtaagtattaag

SEQ ID NO: 2278 - DNA, 1137 bp, Homo sapiens
taagcaggaaaagtggaaaatagtcttcacataattagctaaaagagacaaagctttggaatgtcttttaaatctattttaaaagctcagctacttttttgttttttttctattacagacctaagaaaagttatttcaactgaattgcatacataactcctagagtgtagacagttgctattatttgttcacttcatcaaatgctcttttaaattcttgctacatctgtattaccaggtcctagagaaaccaaggtgaaagaggcccaggagaggccaaaccctctttgctatttctaacaaaggaaatgccattcttgccactaactcttggaatgatttccaagttctctgaaagtaatttaacctgtgtcaagtagctgtctcatctggaaaactcaataaacgaatgtagaagttagaaagagtaggggaaagttaggtgtcatagtgaaatagtttatcccaggcatgttgaattgagactccaaattagccagcatacttccacacatctgctcacttttctttaaacttgagctatattattgcagaaaagcataataatccccactctgatcttgtatttcaaatgaaagaggctaaaacatcatagcacatgcgcctttctagatcggttaaatattatgagtggatacatttcctttggagatcagcatttttacatttaaaggacagattraacagggagaaaaagtagaggagtaatatataaaatatttgtatccaatgacaaggattccaattttacattaaactttagcttaaagaggacatgcctattagattatacttcacttaatagttggattctttaacattttgtgcaaattatttctcggcagccaaatcatacttcactgtacctgaatagtggtttacatgtaaaaacctcaggtaaatgcttatgtactgccaaagtgaacagcaacctttatttatttgtttaaaaaaggtgaggtctttgtacactgttttcttaatttgaagcagtttcaatgtggcagttacaaaaaataaaattttaaattctattatataaattttcaaggaaactatatttcataattttccagctgtagaattaagattaatgtttattatatgttggtttatg

SEQ ID NO: 2279 - DNA, 581 bp, Homo sapiens
tgcatgactgcagtttcagctacttaggaggctgaggcacgaggattgcttgaacccgcaagtcagaggttgcagtgagccgagattgtaccactacactcccgcctggatgacagagcaagactgcctcagaaggtggtgggggtgggggggcgggaagcacacaatgttaacaatactatattgatttttcaagaggaaaaatccatttgtagatataacaacatcttaaaagcccagagaaattctaagtatttaacattattctgtgggtttaggcaacacaaacttattatcaagaggattactttttgaagaaaatgcctacaaacacctaactccagaactcttagaaactgtgtgatatttctaaaaatgagcccaaacaatatttaaggtaatatccagyactacaagtacaatgtttaagcttccagtttacaaatggaaaaggcagtcctgtttagttcaattactaaacacattaaggattatcattatgggtaaagctttaaaagctctatatgtactaatagctggcgctggcacattatatattcaatcagaaaatgattgatcat

SEQ ID NO: 2280 - DNA, 988 bp, Homo sapiens
tgcatctgactcttttttgtcaagtatctaatagcagttactctatgtgtagaaaaaatacattgtttctgtatattaaggcaaatattaaaggcttattaaaaggcctcgtcgggttgttttcagagtcaaaggactctgaaatgcttaatgcttaagaaacagctgatgggggtgggagaagtgtaaaatctttgggagatttggatactggtaatgccatgtggtgttggtaggttaattccagtgtttctttcaatgaaataggcactatggcatcagtaataaaaactgtgaagtagattgttgaaaattgacctgtttcctatttagtgacttgggaaaatggtaaattttgtggatgttgagaaacaataagtgttatactcttacttgaaaaacaacttttaaaaggaaacattatacagtatttatttaaatattttacttctccatagtcctggaagagtactcaagtctattaagttttgctttggagtaaaagactaaattttgagcccttgatcagtatatatattcatttctgctaatgataaattaattgaagaaagcattccatgttttattgtatggcaacacttttatgtgctataaattagtttctctcttctctaaataactaataatacatcttaatttttaattcccttttctttgcttatttctcctgattttcccttcagcccttgggagtctaaatttgtgctggtcagtctggtggccatgagcacatgtgattatttaaattaaaagtagttaaaattaaataaaattcaaaatttggtttctcatttgcactagccacatktcaaatgcttagtaaccacctgtcgctagtgactgctataattggcagcaccgattatggtgttttcccctcattgaagaaagttctgctggaaggcactgttctaaattgtcaggacaacttaaaaattctttgggcatatcttcctgtatctcagag

SEQ ID NO: 2281 - DNA, 1289 bp, Homo sapiens
tgtgtgggtggagatgaggctgcagagatgggctggagaggattatgagagatggatgactagcaaaggaagttggtcatgtccttatgtggtgggggaccatggaaagatttttatttataagacgtggtttattcttcattctgtggcaaaaagcagatactatagtctgaatgtttgtgtccctccccacattcatatgcgatgaaacctcatcaccaatgtgatggtattaggaggtggggcctttgggagataattaggtcatgagagcacagcccttataaggggattagtggcttataaaggaggcccaagagagctgccttgccccttccaccatgtgaggacaaagccagaggacgtatctatgacccaggaaatgagccctcacaaaataccaagtctaccgtgccttgaccttggacattctagtctccagaactgtgagaaataaatttatgttgtttataagccacccagctcgtgatttatttatttatttatttatttatttatttatttatttatttatttagagasagagttttgctctgtcactcgggctggatttcagtgccatgatctcagatcactgcaccctctccttcccaggtgcaagtgattctagtgccttagcctcctgagttgctgggattacaggtgcttgtgaccacatttggctgatttttttgtatttttagtagagattaggtttcatcatgttgcccaggctggtctgaaactcctgacttcaagtgatctgcccacctcggcctcccaaagtgctgggattacaggcatgagccactgtgcctggctatgatattttgttacagcagcttgaatggactaagacagaaggaaaaataggcctttctgtagcgtgcgtgaaagacagaaaatagccataggtttctaaagagagaaaaagatatatgtttgacaatatgtttcaattagtactttttttgaaatgcagtaagttacctataccttattccatttctaatctatatgatggcatttaaatattgactaggtttctgatacagtttttggagtctgaatgtcactgcatggatgaataaaccaaacagatcggattcatatgggtttgccaaatgacaaatttttttccatgtaagattagaggaaaaactgatttcacccaatttcctgccttatttatattagaactgaagtcaatgctgttatccctttgcatgttcttttgtatttaaaatctgatatagaattgtgctgttacagaagaaataatttaatgc

SEQ ID NO: 2282 - DNA, 1219 bp, Homo sapiens
ttcactgaaagacatatactacattgttcgcagcagctctcttcacgacaaaaactggttactacccaaatgcccaacaacaatgcacaaatgaataaccctcaactgcatgcagcaacatagatgaatctcacaaacaatgctgaattgcagacacaagaatccataccacgtgcttctatatgaagttcaaatgcaggcagaaccagtctcttaggtgagaaatcgggattatgtgccctggggacactaggggagtctgtgggggtctggccaggtgctgtttcttggcctggacacaggtgtgagctgcaaacttacgatatgtgctcttgcttgtagcaggttacatctttttattgttgttttgagatggagtttcactcttgtcgcccaggctggagtgcagtggcacaatcttggctcactgcaacctccgcctcccgggttcaagcagttctcgagcctcagtctcccgagtagctgggactacaggcacctgccaccacaaccaactaattacaggcacgcgccaccacaaccagctaatttttgtatttttattagagacggggttttgccacgttggccaggctggtctcgcccgcctcagcctcccaaagtgctgggattacaaaagtgagccaccgtgcccggccctgtagctggttacattttaataaaaagtttgtaaaaattcggcagacatcagaggtactgataagtttattaaagtgacaaaagctataatgggtggcagagtcacagaatattaagtgtgtgaggaccctctgcctttctgcccctgaaggaagggcctgcgctggtcactgcagccatccctctggctgaccgggggaaagaacagaaagaccagagtgagagagtgctggaaacaaaccagaaggctcttacatcggaaagggtgaaaactactggtgtggaaagaaatgtggaagaggtccaggaaggcagggaagaaaaaataccagagctctagacagaaaaatgggaaggtggagaggaagsgggaggggagggctgggagctctggggagagttccctctctgactcctttgatggcgttttggtgtaaatctgaacagtctctgagtaagaacggccgggcctctggggttcatttaggttgggctgccagagaatggtgctcctatactgcgaagtcaaaacaatttttaaaagtgtgtttataccatg

SEQ ID NO: 2283 - DNA, 815 bp, Homo sapiens
aaaagagatggtgagagagagctagagcacaaaggcccggcctcaagctgttgcgggatgcacactaatgcattgaggacggctccagtggcatgacctaaacacttccgagtaggccctacctcccaaaactgttgcagttgaggattaagttgtcaatacatgcttttgtagggacacattcaaaccatggcatatttctaggatgccatgagaattatgggatgatatgttctatcagctatgagtatgcagtgaggtctaactaggttcttatttttgcccttgcaaattagaatgaatggtacctggacaacaatcctcatcatagcagctmtgaccagggaaaagaagcaccactttcccccatgaagtaggagattccagaccaaattgctcccctagagctgtctctgtggagcccagctggtcattttgatgaaggcaaagagcctttcatcccctttttgatatatccttccttgtgtaggaaaagccacttgcttaatgctcctggccaacccataacctcctcctcaacccatcttcaagggaaggagcagaggaggagcaataagctggaaggatttagggcaatttgctccccgtgaaaaccaagggaatggggaaggaggtcctccaaacacttaacaataacatttctctccatattcgtagattatggactttaaccaaaaaacaatcattaataaaactcattttgtacacattgaaaataattgattattgaaacagatcatgcagtgatcatggctactattttctccaacctagtgtatattatattttatgca

SEQ ID NO: 2284 - DNA, 952 bp, Homo sapiens
tgggctaaaagaagccataacccaaaccaaaagaaataagtatgattaagcaattacacaaaatagaaggtgtcaaggacacaaatcaatttgaggaaatttaagaatttctctcacaacactatatttctgggaagaaaatggctttcttcctaagtcctagtaaaaaggtcaaccgttgctgtgttgctcaccttgtgctattccagttgaagaagattaatttcaatgacatgaccatttattggtgctttgcatatgtgaagtagaaatattttcttaaatattttctctaagtatgcaaagcacctttaggagagtgtgtggctataatttaacagtgacagtgtgtgctttgcacactgaccaggattaagttcatttttattaactgggttgcttgctattaaataaaccttaaattaaaccacttttgttatcaatgaaataaaccatcatcttaaaatatgattatttaccttaaaaaaaataattttattttgtattcatgctaaggcagtctgtatggcatttggggaggaaaagattctttctggattaaaaggagccataagataatggaaaaggtcttcaaacgtgtaattaagattaaattaatcatctttttttctcaataagcatattattttgctgagtcactaagtatatttaaatgatattgcattggattaagaggattaatgcttaacctcacttctttgtttgcytaggactgccgctgagggtttactgagtatggattgagcatcacactaaaaaccttccccggaaaaagggaccaaaggatgtaaactgaaaattttaaaaatctgctttgttttcctcaaattgctgaagatccaggtagatatttgcctgtaagtgctgtgagtcaatttaatctgctaaaacaaagtgcagcattgaagacaatgtctttctttttccccta

SEQ ID NO: 2285 - DNA, 784 bp, Homo sapiens
aacttctgacctcaagtgacccgctggcctcagcctcccaaagtgctgggattacaggcgtgagcaaccatgcctggcccaatatacatttctataaggaaggaaataaaggagtgctgtagtttggtttgtccccaccaagtctcaggttgaaatctgatccccaatgttgaaattggagcctagtgggaggtgtttgggtcacggagtcaaatctctcaagaatggcttggtgcatcttcatggcaatgagtgagttctgactctattagttcctgagagctggttgttwtaaggagcttggcacctcctttcctctcttgccatgtgacctctgcacatgctggctgtcctttgccttcaaccatgagtggaagcagccagaggctttcgccagatgcccaatcttccagccagaagaatcatgagccaaataaatgttttttctttagaaattacctagcctttggtattcctttacagcaacacaaactaagacaaggaggggaagattttcttaaaaagggagcaatagtacacacagtaacttgaaggggtgatgcagcctggaaaaggaagtgtgttgttttacccaatagcaatgacttagcacatctgtgggagagggaaggtgatggagggttaaagacacaggacgctaggacaacaaatgaaagaaatggaagacacaagcgtgctgtgtggagtgttaacatttagccttctccattatcattcaagaggaagacaatactggaaggtcttccaatgacaattatatgca

SEQ ID NO: 2286 - DNA, 340 bp, Homo sapiens
taacatacacaatattgttgctcaaaaccacaacacattctttggcattccctacgtctgtagtttcaggcacaaattccatgcctgctggcatctctaagaccaactgtttcatcaacaggataaaaatygggcaaacaggtaaaaaaagaaaaaaagccaaaatgggttcccaacccattataaaaatgaaccaacctccacttgggtggtatttgagagaaaggaagtagctgccgcctggtctctgggtcagactgttgctccccaagggctttatcaaatgagcaaaccaaacaggctcagccactgatttcaaagccaaacttaaaacttgcta

SEQ ID NO: 2287 - DNA, 1581 bp, Homo sapiens
ggggaggaaaagtaattttatctctaccsttcatagttgttagttgggatggatccctgtaacaaaagacagattaattagaaaaataaacagaagtttaataacatgtatacctcatatatacctgggagataacccaaagaaataagtaaatctcaaaggcatggttttgagttcaggcttaagtaccgtcatctgctgaaacaaagaaaggacggtgtgggaaaagggtagttatggagagatgcccagaaaagcaaagtaaacaagggtgtattaatctgttcttatgctgctaataaagacatacccgagactaggtaatttataaaggaaagaggtttaagggactcacagttccacatggctggagagacctcacaatcacggcagaagatgaaggaagaacaaagggacttcttacatagcagtgggcaagagaacttgtgcaggggaactcccatttataaaactatcagatctcgtgagacttattcactaccgtgagaactgcatgggaaagatctgcccccatgatgcaattgtctcccatggggtccctcccatgacacatgggaattgcgggagctacaattcaagatgagatttgggtggggtcacagccaaaccatatcaaaggttaagggtagttatgcagatttaagtcagtgccttcttcattgatgagtctccagcaattcagtcttccttttcttggtagagatagagtgacatccttactaatagagatttcctttacaaatataaatttcccttatgaaaggacaacttctactctgttttcggagcttcccctgtgtctgcagtctctcaaattaatccgctcaaaataagcttcatgccaaacaaatattttggggtggcatattttggtctcctacagagtcttcatgcatatttttgacatatttttggtctcctgcagtaacttaatgttattcttttaaaagagacttgtggtcaactaagcttagaaaacacagggttaatcgaaataaagcaagtcctttagctacagtagttttcagtttttaacacaataatctccaagtttgcaacttgtgccaagctcatgtaatgtcattaaagcattaaggcattaagactattgccagcagaacaagactgcaagaaagtctgccccggagcaagagacagacaagtttcagggctgcaaagtggtgaccctgcccacttgagcagcgacacagtggacgccaattcataacaaaattccctcttaggttaagcttcactggtgaaagataaactctggtctcaaatctcgtgaatcccattctctaaaactgtgctatccaatacaatggccacaagccactgtccgctatgagattatttaataggaaatcactaaatgctactgatcatttgcaatgaagttactgcagattgacaaattgaatttattttatgtaaacgcattaaaataaaaaaactgaagcagtgtaaaatatttttctattaaacacaaatgtcgtgttttggtaggtctgcatttcgctttaatcactgaaaaattaacatctgaattgagttgtg

SEQ ID NO: 2288 - DNA, 760 bp, Homo sapiens
gggccttattaaagggcaagagaagggagttgttactggacttcagcaagaggtgtatctgcgggagagaagcctcctgacaacagccctagccttaggacaaggagtagagctacaggcaaagcaatagggcctaggcagggatggagcagggataaaaatatcccaacctatatcccctcctactttgccaactcctgctggtgtctcccactggccaaacccaagaagaagccagaaggacacacaactcttgtgatgaaatccataaagataagcctgcctcctgagacagagagaagagcagagaagggtggagagtgcaagtggaggggaaaggaagaataagaaacaactttcagtgaagcagagaaaaccatccccatttgtccatttastcaacaaatacctatcttaccaggggcagggaagacaagacaagacaagtaaggtccctagcttcagggaggttaccatgtagtaggggataattgacaataatcatataaccaaacaaagatacagcattttcagatagtggtaaatgccaggaaggaacaacaggattaatggactgattgtagcagatggagagctgctttaaagagggtggtcaggaaaagcttcttggaggaggtggcacttgagttaaggcaatctgggcttcttagaaaaatctcccttgattccacatctactatcagggtttttctacgtggtttgtgggtaagaatccaatttgggctgtgatctagatgca

SEQ ID NO: 2289 - DNA, 636 bp, Homo sapiens
  misc_feature (1)...(636): n = A,T,C or G
atactcagacatgagatttctggaaagtatggtagctatattttaattgtttgagaaactttcatgctgttttccataatggctgtgccaactgacatccccaccagcagagtacaagggttctctcttctccgcatccttgccaactcttacctcttgtccttttgatgttaaagacaacatgctatttactatgaaatcctctgcctctagaccccagagggaagaccctggtgacttgaaattgccttggcatggctcaatgaaatctgggatactcaggatctggccctagtccagagttgtttgcgtatttgngncatgaatagtcagtccagcaatggttaagagtcttaaaacagccagacagcccaggtttgaatcttatctctgcatttactatctatgagcccaggaaaagttattacatctctttgtgcctcactcttcctatctttgaaatggtgataatagtagtactagaaagtattgctttataagaacaacatgatgttaaatgagttratatgcgtgatttatggaaaacaatactggcacatagtagacagtattactgctcagctgtgagttacatatgtgtgtatgtatatatacacatacacgtatacacacata

SEQ ID NO: 2290 - DNA, 1220 bp, Homo sapiens
tactcaaattgttccctaatatgacaaatgctttggaacaaattctcattttgaaataagtgcttatcactactgatttattacactacctaactcagatatcccaygggacattcaagtcaacatgttgaaaagttagctcattacttttttctttttctttcttttattttctttctgctttgtttgttctaaccaacttgttcctgccctatgtttctacttcagtgagtgataacatcaagatctgcattgattaagccataaacctgggttttatctttaccttccttgtctcctcgtctatatcctgtctattccgcaccctaagcactttgagaatcttttgaattcttcacatcaccactaccactcccttaattaacaataccactcctttctcaactggattattaattcagcctcgcaaattctaaagctagtcttctctcatccatttttatctctgcaaccaattacatttctaaattataaatttgatcttatctctcccctgtttagaacctggccctagctccccattgacaatgagataaagtttaattattcttttcttttcttttttttcttttgagaaaaagtctcactctgtcacccaggctggagtgcagtggcaccatctcagctcactgcaacctccacctcctgggttgaagcgattctcgtgcctcagcctcccgaatagctatgattacaggcacctgccaccacacctggctaatttttgtgtttttagtggagacggagtttcaccacattggccaggctggtttcaaactactgacctcaggtgatccacctgcctcagcctcccaaagtgctgggattacaggcgtgagccaccgcacctggccataaagtttaatttttaaaatatggcttaggaggcattttcttcaacccccagtgaaccctgaaaatctgagacaggtctcagttaatttagaaagtttattttgccaaggttgaggacatgcacccacaacacagcctctggagatcctgacgacatgtgccccaggtggttggggcacagcttggttttatacattttaggcagacatgagacatcaatcaatatacataagccgtatgttggttttgtccagaaaggtgggacaactcgaagcagggagggggcttccaggtcataggcagatgagagacaaatggtttcattcttttgagtttctgattag

SEQ ID NO: 2291 - DNA, 1220 bp, Homo sapiens
tactcaaattgttccctaatatgacaaatgctttggaacaaattctcattttgaaataagtgcttatcactactgatttattacactacctaactcagatatcccatgggacattcaagtcaacatgttgaaaagttagctcattacttttttctttttctttcttttattttctttctgctttgtttgttctaaccaacttgttcctgccctatgtttctacttcagtgagtgataacatcaagatctgcattgattaagccataaacctgggttttatctttaccttccttgtctcctcgtctatatcctgtctattccgcaccctaagcactttgagaatcttttgaattcttcacatcaccactaccactcccttaattaacaataccactcctttctcaactggattattaattcagcctcgcaaattctaaagctagtcttctctcatccatttttatctctgcaaccaattacatttctaaattataaatttgatcttatctctcccctgtttagaacctggccctagctccccattgacaatgagataaagtttaattattcttttcttttcttttttttcttttgagaaaaagtctcactctgtcrcccaggctggagtgcagtggcaccatctcagctcactgcaacctccacctcctgggttgaagcgattctcgtgcctcagcctcccgaatagctatgattacaggcacctgccaccacacctggctaatttttgtgtttttagtggagacggagtttcaccacattggccaggctggtttcaaactactgacctcaggtgatccacctgcctcagcctcccaaagtgctgggattacaggcgtgagccaccgcacctggccataaagtttaatttttaaaatatggcttaggaggcattttcttcaacccccagtgaaccctgaaaatctgagacaggtctcagttaatttagaaagtttattttgccaaggttgaggacatgcacccacaacacagcctctggagatcctgacgacatgtgccccaggtggttggggcacagcttggttttatacattttaggcagacatgagacatcaatcaatatacataagccgtatgttggttttgtccagaaaggtgggacaactcgaagcagggagggggcttccaggtcataggcagatgagagacaaatggtttcattcttttgagtttctgattag

SEQ ID NO: 2292 - DNA, 1220 bp, Homo sapiens
tactcaaattgttccctaatatgacaaatgctttggaacaaattctcattttgaaataagtgcttatcactactgatttattacactacctaactcagatatcccatgggacattcaagtcaacatgttgaaaagttagctcattacttttttctttttctttcttttattttctttctgctttgtttgttctaaccaacttgttcctgccctatgtttctacttcagtgagtgataacatcaagatctgcattgattaagccataaacctgggttttatctttaccttccttgtctcctcgtctatatcctgtctattccgcaccctaagcactttgagaatcttttgaattcttcacatcaccactaccactcccttaattaacaataccactcctttctcaactggattattaattcagcctcgcaaattctaaagctagtcttctctcatccatttttatctctgcaaccaattacatttctaaattataaatttgatcttatctctcccctgtttagaacctggccctagctccccattgacaatgagataaagtttaattattcttttcttttcttttttttcttttgagaaaaagtctcactctgtcacccaggctggagtgcagtggcaccatctcagctcactgcaacctccacctcctgggttgaagcgattctcgtgcctcagcctcccgaatagctatgattacaggcacctgccaccacacctggctaatttttgtgtttttagtggagacggagtttcaccacattggccaggctggtttcaaactactgacctcaggtgatccacctgcctcagcctcccaaagtgctgggattacaggcgtgagccaccgcacctggccataaagtttaatttttaaaatatggcttaggaggcattttcttcaacccccagtgaaccctgaaaatctgagacaggtctcagttaatttagaaagtttattttgccaaggttgaggacatgcacccacracacagcctctggagatcctgacgacatgtgccccaggtggttggggcacagcttggttttatacattttaggcagacatgagacatcaatcaatatacataagccgtatgttggttttgtccagaaaggtgggacaactcgaagcagggagggggcttccaggtcataggcagatgagagacaaatggtttcattcttttgagtttctgattag

SEQ ID NO: 2293 - DNA, 1220 bp, Homo sapiens
tactcaaattgttccctaatatgacaaatgctttggaacaaattctcattttgaaataagtgcttatcactactgatttattacactacctaactcagatatcccatgggacattcaagtcaacatgttgaaaagttagctcattacttttttctttttctttcttttattttctttctgctttgtttgttctaaccaacttgttcctgccctatgtttctacttcagtgagtgataacatcaagatctgcattgattaagccataaacctgggttttatctttaccttccttgtctcctcgtctatatcctgtctattccgcaccctaagcactttgagaatcttttgaattcttcacatcaccactaccactcccttaattaacaataccactcctttctcaactggattattaattcagcctcgcaaattctaaagctagtcttctctcatccatttttatctctgcaaccaattacatttctaaattataaatttgatcttatctctcccctgtttagaacctggccctagctccccattgacaatgagataaagtttaattattcttttcttttcttttttttcttttgagaaaaagtctcactctgtcacccaggctggagtgcagtggcaccatctcagctcactgcaacctccacctcctgggttgaagcgattctcgtgcctcagcctcccgaatagctatgattacaggcacctgccaccacacctggctaatttttgtgtttttagtggagacggagtttcaccacattggccaggctggtttcaaactactgacctcaggtgatccacctgcctcagcctcccaaagtgctgggattacaggcgtgagccaccgcacctggccataaagtttaatttttaaaatatggcttaggaggcattttcttcaacccccagtgaaccctgaaaatctgagacaggtctcagttaatttagaaagtttattttgccaaggttgaggacatgcacccacaacacagcctcwggagatcctgacgacatgtgccccaggtggttggggcacagcttggttttatacattttaggcagacatgagacatcaatcaatatacataagccgtatgttggttttgtccagaaaggtgggacaactcgaagcagggagggggcttccaggtcataggcagatgagagacaaatggtttcattcttttgagtttctgattag

SEQ ID NO: 2294 - DNA, 1220 bp, Homo sapiens
tactcaaattgttccctaatatgacaaatgctttggaacaaattctcattttgaaataagtgcttatcactactgatttattacactacctaactcagatatcccatgggacattcaagtcaacatgttgaaaagttagctcattacttttttctttttctttcttttattttctttctgctttgtttgttctaaccaacttgttcctgccctatgtttctacttcagtgagtgataacatcaagatctgcattgattaagccataaacctgggttttatctttaccttccttgtctcctcgtctatatcctgtctattccgcaccctaagcactttgagaatcttttgaattcttcacatcaccactaccactcccttaattaacaataccactcctttctcaactggattattaattcagcctcgcaaattctaaagctagtcttctctcatccatttttatctctgcaaccaattacatttctaaattataaatttgatcttatctctcccctgtttagaacctggccctagctccccattgacaatgagataaagtttaattattcttttcttttcttttttttcttttgagaaaaagtctcactctgtcacccaggctggagtgcagtggcaccatctcagctcactgcaacctccacctcctgggttgaagcgattctcgtgcctcagcctcccgaatagctatgattacaggcacctgccaccacacctggctaatttttgtgtttttagtggagacggagtttcaccacattggccaggctggtttcaaactactgacctcaggtgatccacctgcctcagcctcccaaagtgctgggattacaggcgtgagccaccgcacctggccataaagtttaatttttaaaatatggcttaggaggcattttcttcaacccccagtgaaccctgaaaatctgagacaggtctcagttaatttagaaagtttattttgccaaggttgaggacatgcacccacaacacagcctctggagatcctgacgacatgtgccccaggtgkttggggcacagcttggttttatacattttaggcagacatgagacatcaatcaatatacataagccgtatgttggttttgtccagaaaggtgggacaactcgaagcagggagggggcttccaggtcataggcagatgagagacaaatggtttcattcttttgagtttctgattag

SEQ ID NO: 2295 - DNA, 583 bp, Homo sapiens
tgcataacatccctaaatatgaatgcaccataattgattcagccattcactttaattccaacttttggacactatgaacaataaataaataaatgaagactgttttagatgtcctcagtgctgggctatcctgaagcctgatccactctctcgctggcactggctgtggcaggctgcctgggaaygcggacctgggaagcagggctcgagggttggggcaggtgggacaagagcttcatctctgactcactgtgctgctctgggcatggtggcgaggcctcctccctagaaaagtggagataatgagagtgactcagtggcaagaactcatatgggccaattggtgagaaagccacaggtctcctcatcagccttctgtgcacctttccccaggaaggggcaagagctgcccctcgggctcctcctcggccacatctccctaacagagccccaaagtgaggctgtcagattccagaacctaaggatttaagtgcctatcaagtacccaatacaataaatggggcaagacccatagcaggagaagtggtggggagattccagagcacctggcataaaggaaaga

SEQ ID NO: 2296 - DNA, 1288 bp, Homo sapiens
attcatgctgacatttaatttttatctatttatttttatttattgattgattttttaattttattattaatatactttaagttttagggtacatgtgcacatttaattgcatgtcctaatgtagaaatattcacttgtcgagaagaatcggggagaatggggctgaagtgcctcctttacatattctgggaaggcttcctaaatgctaattcatactgaatgggaggaagaggattcccctctactaggcactgggtctacacagtggagaaaagaggtacagttcctgtcctcaagaagtttataatctattagaaagaaggtcaaaatcagaatatacagcagagaaaacaggtatagttcctgtcctcaagaagtgtataatctattagaaagattaaaatcagaagtgcaaggaagtattataaatgctgagatagaaaaaatgaaaaaaaagaaagaatttgtcatttcaaagttagttctaagggtgaacggctgggaaacgttctactcttgtgcttgagcacatcagctccctgctgtaaaaggcacctgaaagtcttatctttctgtgcragatgtaggaaatgttatgaaaaactgaatgaaggaaaaggccccaggccaacttgaggctgattcatgatcaaagcattgtttgcagtaggctagtccctaaccatcaggtatagactcaaatgccagatagcaaatgccagaatgtagcttcctgctgggtgccacccatgggcacacctacatacacgggatatgctgcctcacactagagatatttctttcactttggtgttcattcaacagccttagaaatactcaagggcttagaaccctgactcaccagtaccacagtccccttttccccacccaggtctccaaagagatatgtgtgttctgcgtaaataggattcttggagatatgtcccaaaatcccaaattatctgagttcaaggagctaaagagctcccttctcactatcatcttcctgcagcctccccagcccccactcagcaatggccattcctaggtgaggatgggatctctggcaaggattatgtctcctatttctttttggggatcctccacagttcctgccataacaccttacaggttagttcattaaatgattgataatgatgatggtggtaacaacaaatgcaagaactcctcaaaagtgactagaatggtagaatcccaagattttaccatgagccaaaagttctgtgaaaaatctggttggatagcacaattaaagacattctatgca

SEQ ID NO: 2297 - DNA, 602 bp, Homo sapiens
tggtttcccattattctcagaacagaattcaaactctccactttagaattggcttagaaggcactctatgctctgtcccctgtgtaccttccaacttgctcaaagaccactttccccttgctcactgggctccagccaccctggtctcacttctgttctactctttccacctcgaggcctttgcacatcacttgcactttgtgcactttgtaatcaggctataagatctagctgactgtcacctttcagatctccrctttaacctaccatcttttcaggcaggcctcctgtcattctttccatacaacattctctcaaacagtaactgctatgttttaggcactgaaaatacagtgacaagtaggataggctccatgctttcatggaacctatgttccacagtaactgtcactctccattatactaaactatgtatttgcttcatagcaatgatcaaaatctgaactcgccttgttttttgtttgcctccctcactagcacatgtaagaaacatcagagcagagatgctatttgctcatgactctgtctctagcctaacacagtgcctggcacacacagactgggatttacttccaagcaag

SEQ ID NO: 2298 - DNA, 602 bp, Homo sapiens
tggtttcccattattctcagaacagaattcaaactctccactttagaattggcttagaaggcactctatgctctgtcccctgtgtaccttccaacttgctcaaagaccactttccccttgctcactgggctccagccaccctggtctcacttctgttctactctttccacctcgaggcctttgcacatcacttgcactttgtgcactttgtaatcaggctataagatctagctgactgtcacctttcagatctccactttaacctaccatcttttcaggcaggcctcctgtcattctttccatacaacattctctcaaacagtaactgctatgttttaggcactgaaaatacagtgacaagtaggataggctccatgctttcatggaacctatgttccacagtaactgtcactctccattayactaaactatgtatttgcttcatagcaatgatcaaaatctgaactcgccttgttttttgtttgcctccctcactagcacatgtaagaaacatcagagcagagatgctatttgctcatgactctgtctctagcctaacacagtgcctggcacacacagactgggatttacttccaagcaag

SEQ ID NO: 2299 - DNA, 647 bp, Homo sapiens
ttgctatatgtacatctaaaacaaagccacaacctgatcttttcttccctgagctggtccatcagtgggaatgttccctctccaaagcatgtaatcttgaccgctctggcatggtgctgtggaaaccctggggacagatgtcagcctgccaccagactccctgaacaccctgaacaccctggagctgtgaaatgtcaggtgccaaaagcgagtgttctacattcwtcatcatggctgatactttttgatcggtttccgtggtgaaggagagggaaggcctaggacaagttcgcactggcatcttccttcagagccctggcccctgcctgggtgggtgcatgctgactggctgacttgctatgacaactggctgagcagctttgattaattaaatatttcactccaaatttgcaaaacagcatctcctggcaagtccagtaagcccacataacgcctgtaattctgggctaattagcctagcaggtcattggctggtgtgctgttgtctgtttaactcttagataggctgaaaaaatgttggttttagaaaggaaggaaaaggtttaggattcagccagcatgtcagtttgcctggtactaagatttccttctagtcaccttgaaaccccagtaacttcctgtgtggg

SEQ ID NO: 2300 - DNA, 647 bp, Homo sapiens
ttgctatatgtacatctaaaacaaagccacaacctgatcttttcttccctgagctggtccatcagtgggaatgttccctctccaaagcatgtaatcttgaccgctctggcatggtgctgtggaaaccctggggacagatgtcagcctgccaccagactccctgaacaccctgaacaccctggagctgtgaaatgtcaggtgccaaaagcgagtgttctacattcttcatcatggctgatacttttygatcggtttccgtggtgaaggagagggaaggcctaggacaagttcgcactggcatcttccttcagagccctggcccctgcctgggtgggtgcatgctgactggctgacttgctatgacaactggctgagcagctttgattaattaaatatttcactccaaatttgcaaaacagcatctcctggcaagtccagtaagcccacataacgcctgtaattctgggctaattagcctagcaggtcattggctggtgtgctgttgtctgtttaactcttagataggctgaaaaaatgttggttttagaaaggaaggaaaaggtttaggattcagccagcatgtcagtttgcctggtactaagatttccttctagtcaccttgaaaccccagtaacttcctgtgtggg

SEQ ID NO: 2301 - DNA, 606 bp, Homo sapiens
cactcaaggctcactgcagcctcaacttcctgggctcaagcgatcctcccacctcagcctccctgatggctgggactacaggtgcatgccatgacacctggctaattttttttttttttttttttttatatttatatttatattttttgtagagatagggtcttgccatgttgcccaggttggttttgaactcctgggctgaagtgatcttcctgccttggcctcccaaagtgctgggattacagatgtgagccactgcaccaggctatgttgctttttagaagggtgaacggataytgaaaaccaacagatgtttataagagatgaatattattaaaattcctactctacaattgagaaaactaagatatagaaaggttacattgcttgtccaaaatgatactatgggtgcatgctttgaattcaagttggccttactgctgagcctgtcctttaaccgtgaccctctactgccttctcgtcctcccctccatgcccatctattacaccatctagttgccttccccttgtttcatcacactgtcatctatagacctggaaaatatagatccttagctttatacaacgtttatttttaaacagtgg

SEQ ID NO: 2302 - DNA, 606 bp, Homo sapiens
cactcaaggctcactgcagcctcaacttcctgggctcaagcgatcctcccacctcagcctccctgatggctgggactacaggtgcatgccatgacacctggctaattttttttttttttttttttttatatttatatttatattttttgtagagatagggtcttgccatgttgcccaggttggttttgaactcctgggctgaagtgatcttcctgccttggcctcccaaagtgctgggattacagatgtgagccactgcaccaggctatgttgctttttagaagggtgaacggatattgaaaaccaacagatgtttataagagatgaatattattaaaattcctactctacaattgagaaaactaagatatagaaaggttacattrcttgtccaaaatgatactatgggtgcatgctttgaattcaagttggccttactgctgagcctgtcctttaaccgtgaccctctactgccttctcgtcctcccctccatgcccatctattacaccatctagttgccttccccttgtttcatcacactgtcatctatagacctggaaaatatagatccttagctttatacaacgtttatttttaaacagtgg

SEQ ID NO: 2303 - DNA, 650 bp, Homo sapiens
gaagaaagaacaagtcattagagcaggcacagctttcagaccagtgagcagaaagagtagccactgaccactggttggctaaaatgctgaggaaaaaatgtgactaaaaattctacaaagcaacattaacatccagtggggtctagagtccagcctgaaatgtcggaacaatggtagctttcattgacttatatacttatgtgaatacttatgtgaatagctatattttaagatttctaattgaagtagtataacatcccaaaagtaaaaaaaaatgaacagatcataagtttacaatttgataaattttccaaaaggaayacaacatagaacagacacatagattacccaaaaaccacattaccagcccccgacaagtccctctcatcccccctcctattattaacacctcctcccacaaggtaccccttatcctgacttccaaaatcatagattggtttttacctgttttcacactttatgtaatagaatcatacactatgtcatcttttgtctttgactttgtttagtcaacactgtttgtgatattcacacgtgctgttgtgtgaattgaagattattcatggtcattgcggtgtattattccagtgcatgaatctaccattgtttatctgttctactctagatgg

SEQ ID NO: 2304 - DNA, 1288 bp, Homo sapiens
tgcacaaatcataaatgttcggcgtaatgaattttcacaaactgaacaaactggtgtaacctgtgcccagatcttgaaagagcattcctgtgcatctggatgcttccttacagccccttccagttttgcctggttttcttctttctataaatggaattatatagcacggttctttgtgtgtaactcttttaactcactgttacattggcgagaattatctgtgtcgtggtgtctaattgtgtttcatttattcttattagcatatagttttctattgtgagactatgtcacaacttatcttcactctagtgttgcaagtcattggggatgtgttcatttgtacggaattgtgttgagcttatgttctttagagttgtaattttaacctttcctatgtgtgagtgtgtttcattttcccatttatgttaggaatacatagtaaattcttattgcaaaaaaaaaaaaaaaatctagcattcagggaaaaaaacaggcagtgaatttctctctgatttcttttcgtctccctcccaacccaattaattcagtttcactgttactagttttctgggcatccttccagacatttctctgtgcatctgtgcactgatacatacaacattcaatgtgatgcttaattttgtttttacataaatgcaattgttctgcaatttttttcacttatcaatatgtcctgtagacccttctgtagatcatcctcrttgcttaagactgctgagcctgcttccattgcatgggcgtgccatgatttatttaaccagtctcctactggtgggtattcaggctgtctccagttttctgctgctgcaagcagggtggcagtgaacatccttttatgtgcttctttatgagcattgcaactatttctcttggggagaaatggaaaggtggaattgctgggtgtacacatttgcctttaagtggctcttatgaggtcaaatagattgcccgtaccactgtgaattctgggtacagcctgaaatttaagtgaaggcatttggcataaagatcgaaattcacttgggttttcaaagattcgacggttgcctagaattgggcagaacagaagaggaagctgtcttagctttcacttagtacagtttgccagcacctcgaccccacgggatgctgatgctacacagagattccataagggaagaaagtactaccagcagatggtaaggagagttggaactgggacgtctgagacacaagggacggctctttgaggacaactagaataatcatgatagtaacacagctaaca

SEQ ID NO: 2305 - DNA, 1288 bp, Homo sapiens
tgcacaaatcataaatgttcggcgtaatgaattttcacaaactgaacaaactggtgtaacctgtgcccagatcttgaaagagcattcctgtgcatctggatgcttccttacagccccttccagttttgcctggttttcttctttctataaatggaattatatagcacggttctttgtgtgtaactcttttaactcactgttacattggcgagaattatctgtgtcgtggtgtctaattgtgtttcatttattcttattagcatatagttttctattgtgagactatgtcacaacttatcttcactctagtgttgcaagtcattggggatgtgttcatttgtacggaattgtgttgagcttatgttctttagagttgtaattttaacctttcctatgtgtgagtgtgtttcattttcccatttatgttaggaatacatagtaaattcttattgcaaaaaaaaaaaaaaaatctagcattcagggaaaaaaacaggcagtgaatttctctctgatttcttttcgtctccctcccaacccaattaattcagtttcactgttactagttttctgggcatccttccagacatttctctgtgcatctgtgcactgatacatacaacattcaatgtgatgcttaattttgtttttacataaatgcaattgttctgcaatttttttcacttatcaatatgtcctgtagacccttctgtagatcatcctcattgcttaagactgctgagcctgcttccattgcatgggcgtgccatgatttatttaaccagtctcctactggtgggtattcaggctgtctccagttttctgctgctgcaagcagggtggcagtgaacatccttttatgtgcttctttatgagcattgcaactatttctcttggggagaaatggaaaggtggaattgctgggtgtacacatttgcctttaagtggctcttatgaggtcaaatagattgcccgtaccactgtgaattctgggtacagcctgaaatttaagtgaaggcatttggcataaagatcgaaattcacttgggttttcaaagattcgacrgttgcctagaattgggcagaacagaagaggaagctgtcttagctttcacttagtacagtttgccagcacctcgaccccacgggatgctgatgctacacagagattccataagggaagaaagtactaccagcagatggtaaggagagttggaactgggacgtctgagacacaagggacggctctttgaggacaactagaataatcatgatagtaacacagctaaca

SEQ ID NO: 2306 - DNA, 885 bp, Homo sapiens
tccagctgtgaatactaactacatgctagagcatgctacatgataagactactatcttttagctttcaagtacaattcaaatgatttaaaacaaaagacctttatgccacagacatttaaattgaaaaaagtctttctcagtttccttttatgtataaatgtagaaaaacatgcaactagaaaattttccccatcacgggaagcaaatctcttagaagattgggagcatcttattcaattctcagtgctctttcctacaatacagcaaattactctcaactcctacagcgcaggatgcttggtatgacttgataaggggcaaacagattccttcttttgcaatttataaaaattcagtttatatagaatgtttctggaacatacctataatgaataaagktcactggttcttttctaaatttgtgttttttttaaattagttacttctttcattatatttcatatttcatttttttatctttacacaattattttgtctcttgacttgttctgtttttttaagtttcagaaatggtattccagaagattctccttaatggtagattgtatcatggtacagacagaaatctttgagtgtgagttcattctcagtgggcatttttttttctttctatagaagtcccatgtgctttggactgtggaatgttttgcatttgcatctcatgggccctaggtacactagttgagactagactggacctttatgccaaaacataaggcaataaaataaaataatcccttaggaaaagaagagctgatttagattcaaatcttcatagaagtctcctacagatgacatctcaaatactgtcttttgaaggagatactatctggtaaagacatagttgcctgaaaccagctcaa

SEQ ID NO: 2307 - DNA, 1465 bp, Homo sapiens
actcttttctagagtttttcttataaaaatataatgctggcatccaaagctagataaactatgaagacatcttctctaggcctgcactcttcctagtttcccttatgtatttaaattagtctgtgtatgaacattttttccatcacaggagccagccagtctggacaagaaagtcactggagtacacatgtggtcacaatgtatgcaaggaaggtggtttacctcactggtgtaaagagtcacgtcaaaaggtactaactacatcagcctataggcacatagtcagataggcatttgttggttggccgaggcacttgaatagcacaaacaatatgtcttatttgggaaaatgctttcagaaggaagacagtgctgaattggggcggtggtggggaagaaccattgcattttccaaaaattcaactttataaaagcttcatgtggcaacaggtttccctgtaggatactcttaagcagaaagttcttccaatacatgtaaaatattctgatttgtaattttttccaggaacagacctgctccagaaagaaatatgctagtaatttaggcaaactcttgtactgcttattgtgtgaattattcaccaatatgacatgaaaaattcaacagccataatacacattaagctccaggatctaytaaagaacaaatatgaagagaagaaaaagagaaagtagttattacagttgtataggaataattaatctgacattttggaagcgctttcttttctgaggaagaggcactgtgagtgttgttactgatagcaccttgcccaggctagatactgaatgaaaagttgagtcagaaaataagtaaaataaagagaactgcccatttgttatgggatctgactcagacattggtagtgttacattaattcttcaaattttcataattacaacatttctcccaagatactgtacaatcttaagtattcacagtaaaaagagaaaatgtcattcaatcatctggatgttttgtccacacaagtcaattactgaataattagagttgttttattatgctgtttcagattggaatttccataacactaacaatgcattattttaatttcaaatatgtattgtttaaacatgctgtttaaataatttctcttaatttcatgtttaaaaatttcacatttaaaaagcctgatttcacatttaaactagctgggtatggtggcatgtgcctatagtcccagctcttgggaggttgaggcaggaggatcacttgagaccacttgagcccaggagttccggtagggggctgcagtgagttctgattgtgccactacagtccagcataggcaacagaatgaggtttcatctctctctctatttttttaaaaaggtgtcagtctgccaggcacggtggctcatgcctgtaatcctagcacttcgggaggccaaggcaggaggatcacgaggtcaggagtttgag

SEQ ID NO: 2308 - DNA, 687 bp, Homo sapiens
tatctggacccagaaaggcatcatgtgtcaggaatcactccactgtggttactgtttatgaccacagtggaaagggacttgagctcacaacccrgcctgttagttgataaactgcctcctgggtacagtgtccaatatttgggtgatgggtaggctaggaacccaaccccatcattatgcatgtaatacccatgtaacaaacaagcacaggtacctcctgaatctagaataaaataaaaaaatgggttctcttggctgtccatggtggcatcacccctgccatcaaggggctgcaccccactgagtacttgccgcccttggccaaatgcctcagtcagacgcagataccaaccagcagggactggcaagaactgtgacagctgcagggctgggtgctgctgctcttgcctttgcaggtcgctgtgcgtcgcagtcctggaaacctctagaacaaggatcacagaagcagtagagaacctttgaactcctagcctgtcatcctattacaaaggaggatttgaacagaaaatgagtaggagaaaagctagtgttattttaggtgtaagttcacctgctggcaaggctaagattagagcagctcacaggagaatcgtgattttgaatcacccagataaaggtggatctccctacttagcaaccaaaataaatgaaacagaagatttgcga

SEQ ID NO: 2309 - DNA, 654 bp, Homo sapiens
attccctggcctgtctcctcacccacaatataccaggttaaaaagaagcttgggccaggcacaatggctcatgcctgtaatcctagcactttgggaggccaaggcgggcagatcacctgaggtcaggagttcgagaccagcctggccaacatggtgaaacccccatctctactaaaaatacaaaaattagacgggcatggtggcatgtgcctgtaatcccagctacttgggagtctgaggcaggagaattgcttgaacctgggaagtggaggttgcagtgagccaaaatcgcgccatagcactccagcctgggcaacagagcgaaactccgtctcaaaaaacaawaagcagcttggggcctgaacttgtgttcagtggcaagactatcaagtcccctcttgagtcagctcagtgggcagccttcctgatcaagggttccggacacccccgtgctcctggcagcctccactgtgtccctgcactttaaccaccccctccattaaaggccagtacaggagaaatagttcaagattttatgtagatggtaaaactgcaggggatccgtgaggtaataaagcccaaatcaggaaacgccttcaaaggagttgccacttgccttaggtctggttagagacagagctcagattagatcca

SEQ ID NO: 2310 - DNA, 1286 bp, Homo sapiens
tggtggctcaacgcctgtaatcccagcattttgggaggccgaggcaggtggatcacttgaggtcaggagttaaagaccagcctggccaacatggcgaaaccccatctctactaaaaaatacaaaacaaacaaacaaaaatgccatattcaaggccaaatatatattcaaataccttttctacaacccaagtaggggattgcactgctcacaatatgatcaggttaatgaaagcatccttgtttttatagatgtaagatatttaagtacttctactctaaagatactttcaaacaaaacgcagcatgtaaaacaaataaagtggaaagataaaaaacaagaaagagaaagagattgttgtagcaatagcataggacaaaacaacacctttggcagcatcttggtagcaacctatgaagccaccgccttgggaatagttaataaagaccgggatgcttgggctattgcaatcctttaaaaatgggcactcacgtaaagaatagtgggcttgggaatatgaagactcaggttcaagcctagttctgtcatgacctagctgtatgatcttggtgaagtcacttatcctctatttttttatttttttttttatttttctttttttggtttctttgactgcaagagagaagtgtggtagagagtctttgggtgtacctcttcccctgcttctcacccagttctctaaattgtgagtccatgattgcttggccgtctccaaaaaagaagtactttgcttaaccttttaggctatatttttaagggtaatgatcatgtgtttacagtgagttgtaaaaatgctgtcattgccagtgttcagtcataaaatttggtgaaaatctatggttttaaatagcccaaacaatgggagttaacaaattgggcactaacattttaactttttctcgtgtttcaatatgtggaatttcttgcttagaagctggctctttccaagtatattgtttcatacaaacttggagtttcttgtttgattttctatttgacctttgattgctgctgttttcctactaagtgkttggccaaaagtgagagggccagtacagataaagcaaatagtgtttcatggggttaataattaataaactgaactgtcatcagaaaacccgcggatccagttcattataatgtcatgatgacaacattttgtgagagaagtctgtataaaaagcaattgctcttttgtttccaaaacaggtattacaagtggataaataatgtgcactgctctgagcccaaaggtacgcagtggacc

SEQ ID NO: 2311 - DNA, 622 bp, Homo sapiens
aaatgcagttattttccacttaatatgagcawtatgtaacatttcatttttttcagttattcttaaaaaataacattttcagcattaaaaatttaagcacctatttattagggttgctgctgtcaaatacagctactatctaatgagtttggaacagcttgcttttcttttttcttgtggcccttttaccagaaacttattctgcagggttctcacattcttggtatggccaataaaaattccttaggacagatggtatcttctgttagttcaaaagtttacagaatcaccttcatgttcacaagttgacacctttcagagcagttatcctaattttgtatgtgacttgtgcagcagaaccagcttgatcttttttgatataaatgcagggtagacacttgaaaatcagtgtgaagcaggtgctggtctagggattttgcatataatgaactgtttcctatctcacaaacttgaaacttttgtctcaaaatactgaataattttggttaaagagagcatatgaaccactttgaattctccagttagaaaaatatatttgtactgagaggtacagtggggatgaaaatagaatttgatagtatctggatcatctttagggatt

SEQ ID NO: 2312 - DNA, 622 bp, Homo sapiens
aaatgcagttattttccacttaatatgagcattatgtaacatttcatttttttcagttattcttraaaaataacattttcagcattaaaaatttaagcacctatttattagggttgctgctgtcaaatacagctactatctaatgagtttggaacagcttgcttttcttttttcttgtggcccttttaccagaaacttattctgcagggttctcacattcttggtatggccaataaaaattccttaggacagatggtatcttctgttagttcaaaagtttacagaatcaccttcatgttcacaagttgacacctttcagagcagttatcctaattttgtatgtgacttgtgcagcagaaccagcttgatcttttttgatataaatgcagggtagacacttgaaaatcagtgtgaagcaggtgctggtctagggattttgcatataatgaactgtttcctatctcacaaacttgaaacttttgtctcaaaatactgaataattttggttaaagagagcatatgaaccactttgaattctccagttagaaaaatatatttgtactgagaggtacagtggggatgaaaatagaatttgatagtatctggatcatctttagggatt

SEQ ID NO: 2313 - DNA, 622 bp, Homo sapiens
aaatgcagttattttccacttaatatgagcattatgtaacatttcatttttttcagttattcttaaaaaataacattttcagcattaaaaatttaagcacctatttattagggttgctgctgtcaaatacagctactatctaatgagtttggaacagcttgcttttcttttttcttgtggcccttttaccagawacttattctgcagggttctcacattcttggtatggccaataaaaattccttaggacagatggtatcttctgttagttcaaaagtttacagaatcaccttcatgttcacaagttgacacctttcagagcagttatcctaattttgtatgtgacttgtgcagcagaaccagcttgatcttttttgatataaatgcagggtagacacttgaaaatcagtgtgaagcaggtgctggtctagggattttgcatataatgaactgtttcctatctcacaaacttgaaacttttgtctcaaaatactgaataattttggttaaagagagcatatgaaccactttgaattctccagttagaaaaatatatttgtactgagaggtacagtggggatgaaaatagaatttgatagtatctggatcatctttagggatt

SEQ ID NO: 2314 - DNA, 622 bp, Homo sapiens
aaatgcagttattttccacttaatatgagcattatgtaacatttcatttttttcagttattcttaaaaaataacattttcagcattaaaaatttaagcacctatttattagggttgctgctgtcaaatacagctactatctaatgagtttggaacagcttgcttttcttttttcttgtggcccttttaccagaaacttattctgcagggttctcacattcttggtatggccaataaaaattccttaggacagatggtatcttcygttagttcaaaagtttacagaatcaccttcatgttcacaagttgacacctttcagagcagttatcctaattttgtatgtgacttgtgcagcagaaccagcttgatcttttttgatataaatgcagggtagacacttgaaaatcagtgtgaagcaggtgctggtctagggattttgcatataatgaactgtttcctatctcacaaacttgaaacttttgtctcaaaatactgaataattttggttaaagagagcatatgaaccactttgaattctccagttagaaaaatatatttgtactgagaggtacagtggggatgaaaatagaatttgatagtatctggatcatctttagggatt

SEQ ID NO: 2315 - DNA, 622 bp, Homo sapiens
aaatgcagttattttccacttaatatgagcattatgtaacatttcatttttttcagttattcttaaaaaataacattttcagcattaaaaatttaagcacctatttattagggttgctgctgtcaaatacagctactatctaatgagtttggaacagcttgcttttcttttttcttgtggcccttttaccagaaacttattctgcagggttctcacattcttggtatggccaataaaaattccttaggacagatggtatcttctgttagttcaaaagtttacagaatcaccttcatgttcacaagttgacrcctttcagagcagttatcctaattttgtatgtgacttgtgcagcagaaccagcttgatcttttttgatataaatgcagggtagacacttgaaaatcagtgtgaagcaggtgctggtctagggattttgcatataatgaactgtttcctatctcacaaacttgaaacttttgtctcaaaatactgaataattttggttaaagagagcatatgaaccactttgaattctccagttagaaaaatatatttgtactgagaggtacagtggggatgaaaatagaatttgatagtatctggatcatctttagggatt

SEQ ID NO: 2316 - DNA, 1203 bp, Homo sapiens
aaagttgagaaggagaatactattttccctatttcacatacggtgaaattgagcccctgagaacctaaggaactttttcaagacaaaccagtttagtaagtggagtggataggcttctttcattcctaaacctgagctctttcctcaaaccagatgacaacccgaaatatacatacatatatatataaaagatttgacgcgtgtcttcattagccttcgtaggaatgtattgtggttatatttgcatatacctgccccttctggtaggagggtaatgtgatctttacattaaaagcatttaactttgtgcctataacattatgaggctcagataaatgctgaacagaaggaaagaaggaggaagggagggagggagggaaaaagagagggagggaggaaacttggctgagtatggctctcactctttcactttrccatggatgtgttacataaaaacctccacagctaaatacatgcaaaatgtagctctaacctaaagaaagtgatagctccaatttctttagctcaagaaaggtctcaaaaagcaaataaaaagctgtagttgaaggataaaaaagaagtaaagctcgataggtagatttgttaaagaagagcagtttaatggagatatcggggggatcagcatggctgaaccaggtttggagaaaaccagtgagagattatttaagtcagcatcaaacaaaaatgtaaaagaatgaccacatatttctgtttgcaaagaacttttagtaagatacagatgagataatcaatcctagtggaaatacagattcatattacttgggatatgataagtcccatcgtttctaaagtttaaggatgaggaaaatcctgataaaacacaggaagttattaggtgaggcactcagcttttcttgcgtggtaagcatcagaagccagaagcagaattttagagttcccagtatcttaggaacaatctggttttacctctcaattctagagaaaactaacttgtacggaaattaacagaagtaatccaaatttatggattggcaacaacactggatcccagatctcctggctccctctttaggattttttccattcaagttcaactttctggagaagtcataagtggatgagtcagggaaagagaactgtggcctgatataaactgtttgtacttgaagttatagaaaaatactgttttatctagatcat

SEQ ID NO: 2317 - DNA, 1067 bp, Homo sapiens
taaattctatgataatcgcttataataatggatggtgttgatgatgatgaaaaaagagatgacttaagtcaaaatggctgattatacaaaacttatggttcatatggactcttcaccttccagaatcttataattttattccagtgcctatttccaaccaaatgcttacgaatgttcctttggagatacagggctgtgggggaagaaatttaaaattatagtgcctttacacaaatttaaatactgcacagtattccacagtagggaacgctatggtgagcatattgagtcattctcctaaagaagaaatttaaattttttgatgactttttttttatagtaatcaccagaattttcttccttgaaactctctggaaaaaaaaaaaaaagcccttattagttagctaagcattaacagttcctttactacttggatccttagtcttcctaattatgtctcaagggcttaataatctggcagacaaagggaaaccagtttcatgcttatttcaaaaattctttaaggcacaggaactttatattactttatacatttaaggcaaaccaattgttaaatcaaggtttttcttacagaatggaaataaattatataactttaaccaagtttttttttttttaccaagaaaaagacaatttctgatagcacatacaagagtgaaagtggtaatttaatatacaaatacattcaaagcagtgagaaaaaaattagcaaccatacaatcatgctttctgatgatgagtgaaccacagataagaagttgccttttattgaagattatcattttcacttaagtaactcagtacatgggaactgactggaaactcaggtacctaggcaagcaaaaaaaaaaaaaatggttttatgtgtggatgcagaaggtacatatccaagaagaaaaactaagtttaataaggtcccaaggtycattacagaaagggtatcaagaaatagctctgaatctgttttgtgagataatgtcttacaacttagaatattgagtcagagagaaatcttggactgttgttatctcctgctgcaatcatag

SEQ ID NO: 2318 - DNA, 586 bp, Homo sapiens
aggattaaaatgctcactaaaaggcagatgctaggtaaactctttcagggccccttggaaacagctctgggactcaaggctgctgagataaggaaaatggttagagcttcacaattagaatcaatcagyttgaaccattttctgcctctgggttctcctccaaattggagagaggatcaaattggcccaacttgaattccctacccagtatgtggccaggggaaaatagagacacttaaccacagacagctggcaaaggaaaactgaggtgattttgccaagagatggcagaagaaaggcttggttgatgaaatgaacagatgtccaccattagtgatgtgtctaacagtaggtaagggagttttaatcatacacaacgtggatgtgaaaaatggggctaagaagcagagcacttacaaaactgctgtattataggatgacagggaccctgcccctcttctcattgtgctctaggaattctgaatacttgcaggcactacctctgatttttctgtttacatatatttcacctttagcattactgttccctgtgcttgagatacttatcttcccccttattggtttt

SEQ ID NO: 2319 - DNA, 586 bp, Homo sapiens
aggattaaaatgctcactaaaaggcagatgctaggtaaactctttcagggccccttggaaacagctctgggactcaaggctgctgagataaggaaaatggttagagcttcacaattagaatcaatcagcttgaaccattttctgcctctgggttctcctccaaattggagagaggatcaaattggcccaacttgaattccctacccagtatgtggccaggggaaaatagagacacttaaccacagacagctggcaaaggaaaactgaggtgattttgccaagagatggcagaagaaaggcttggttgatgaaatgaacagatgtccaccattagtgatgtgtctaacagtaggkaagggagttttaatcatacacaacgtggatgtgaaaaatggggctaagaagcagagcacttacaaaactgctgtattataggatgacagggaccctgcccctcttctcattgtgctctaggaattctgaatacttgcaggcactacctctgatttttctgtttacatatatttcacctttagcattactgttccctgtgcttgagatacttatcttcccccttattggtttt

SEQ ID NO: 2320 - DNA, 538 bp, Homo sapiens
ctacccataattttaaaatattatcaaaatgtccactttttcatattgttawtataaaatatattcattgtgtacaatttggaaaacacaaacaataattataaataagctccaagaatgctgttatgttcatcacagtatttcttctttttattttgtgcatatcatgctctagatatgaaacttcgtaccatttttttatttaacacaatataatgagaacttatccataacatttaaatacaagtatgttaaagtttttgatccaatagaaaatagcaaatctcccacctctaatcccaagtgggcacttctagaataagacactcttttttatttttttaactttttaagtggaggaagattaccgcatcaggatatgagctttttttccagtggcctgaggacattgtgcacaatgacctgcttctcttacagagtcaaacttttgtgatctaggggtgagattttttacataactagtcaatgggaagctggtcaacgagaaggaaagactctgataactagggtgacctca

SEQ ID NO: 2321 - DNA, 538 bp, Homo sapiens
ctacccataattttaaaatattatcaaaatgtccactttttcatattgttattataaaatatattcattgtgtacaatttggaaaacacaaacaataattataaataagctccaagaatgctgttatgttcatcacagtatttcttctttttattttgtgcatatcatgctctagatatgaaacttcrtaccatttttttatttaacacaatataatgagaacttatccataacatttaaatacaagtatgttaaagtttttgatccaatagaaaatagcaaatctcccacctctaatcccaagtgggcacttctagaataagacactcttttttatttttttaactttttaagtggaggaagattaccgcatcaggatatgagctttttttccagtggcctgaggacattgtgcacaatgacctgcttctcttacagagtcaaacttttgtgatctaggggtgagattttttacataactagtcaatgggaagctggtcaacgagaaggaaagactctgataactagggtgacctca

SEQ ID NO: 2322 - DNA, 1465 bp, Homo sapiens
cttgggagagaggctgaggtgggaggatcctttgagcccaggagttccacgtgatggtgaactacgatccaacaactgcaccccagcctggagatggaataaagccctatctctaaaaattaattaattaaaataaattaaaaataagtaaaagtaaataaaagtaaaatcatccttgataaatggcttatctaactatagcttacattgcagatatgagacttttgagataaatcttatagtaaatgtraagtattgctgtaaacaggtaaagtcaagcttctaagttatgagatgaaattcttccattgaatcagagatggtagaataatcaaatctatgccttggaagcagttccatgcaggtttttttagccatgttttttcccctctcttatgtgaaaatttaaagtctacttcatagtgatcttattttatgtactgttccattaaaatatgtactcatgtttagctctcaccactagaaaagcagaaagccaaaatgaatggacatatcacttcttcaccccattccaatttgaagtagaccttctcaccatacttcaccctaattccttctttagagaagaaaggctgcctgtcaaactcaattttcagagatatctttgattcaagaaaatatacgtcatctaatataaataaaatatattacattttcacataagagaggggaaaaatctagtagagaagcctcaggtaaagatctttagaatattttttcacattggtagattttagcattgctattgtgagatgggacagaaattccaagcaatctgttagtatatatagaaagtactttccttctcttttaagtctctgagttggaaaaaaggccgtacttgagagattggagaagaaaaggtgcttactcgaatagataccaatttagtaaataaagaagataactataatagttagggacagaattttataacaaattgtaagtggaatgattaaaaatagataataaaatatagaaaaaatgtgaaaagtagagaaagtccattaaagaaaaagtaagttatcgaagtaaaaattatatttttcctttattttctctacattttgcatgattttttaaagcctataacttttttgtatttgttgttaagttagattaaaaacaaatatttccaaaacaaagatacattttgacttaggattacttttatcttaaatgtgaaattcctgtagatgcctctgaaaataaatcagtcttcatgttaatgatgttaagttcctttttctgccatacactttaaggtaataagctagctaggtaaatgtctcaggaattattttgatgaaactgaaggatccgagttctattccattacgaggcaaagtaatgtgacagttatgaatggccccccctaaatcaacaattgctgccacattagcctccttgttgtgtcttaatttacaaggaatcaaaccatctt

SEQ ID NO: 2323 - DNA, 1465 bp, Homo sapiens
cttgggagagaggctgaggtgggaggatcctttgagcccaggagttccacgtgatggtgaactacgatccaacaactgcaccccagcctggagatggaataaagccctatctctaaaaattaattaattaaaataaattaaaaataagtaaaagtaaataaaagtaaaatcatccttgataaatggcttatctaactatagcttacattgcagatatgagacttttgagataaatcttatagtaaatgtgaagtattgctgtaaacaggtaaagtcaagcttctaagttatgagatgaaattcttccattgaatcagagatggtagaataatcaaatctatgccttggaagcagttccatgcaggtttttttagccatgttttttcccctctcttatgtgaaaatttaaagtctacttcatagtgatcttattttatgtactgttccattaaaatatgtactcatgtttagctctcaccactagaaaagcagaaagccaaaatgaatggacatatcacttcttcaccccattccaatttgaagtagaccttctcaccatacttcaccctaattccttctttagagaagaaaggctgcctgtcaaactcaattttcagagatatctttgattcaagaaaatatacgtcatctaatataaataaaatatattacattttcacataagagaggggaaaaatctagtagagaagcctcaggtaaagatctttagaatattttttcacattggtagattttagcattgctattgtgagatgggacagaaattccaagcaatctgttagtatatatagaaagtactttccttctcttttaagtctctgagttggaaaaaaggccgtacttgagagattggagaagaaaaggtgcttactcgaatagataccaatttagtaaataaagaagataactataatagttagggacagaattttataacaaatwgtaagtggaatgattaaaaatagataataaaatatagaaaaaatgtgaaaagtagagaaagtccattaaagaaaaagtaagttatcgaagtaaaaattatatttttcctttattttctctacattttgcatgattttttaaagcctataacttttttgtatttgttgttaagttagattaaaaacaaatatttccaaaacaaagatacattttgacttaggattacttttatcttaaatgtgaaattcctgtagatgcctctgaaaataaatcagtcttcatgttaatgatgttaagttcctttttctgccatacactttaaggtaataagctagctaggtaaatgtctcaggaattattttgatgaaactgaaggatccgagttctattccattacgaggcaaagtaatgtgacagttatgaatggccccccctaaatcaacaattgctgccacattagcctccttgttgtgtcttaatttacaaggaatcaaaccatctt

SEQ ID NO: 2324 - DNA, 1465 bp, Homo sapiens
cttgggagagaggctgaggtgggaggatcctttgagcccaggagttccacgtgatggtgaactacgatccaacaactgcaccccagcctggagatggaataaagccctatctctaaaaattaattaattaaaataaattaaaaataagtaaaagtaaataaaagtaaaatcatccttgataaatggcttatctaactatagcttacattgcagatatgagacttttgagataaatcttatagtaaatgtgaagtattgctgtaaacaggtaaagtcaagcttctaagttatgagatgaaattcttccattgaatcagagatggtagaataatcaaatctatgccttggaagcagttccatgcaggtttttttagccatgttttttcccctctcttatgtgaaaatttaaagtctacttcatagtgatcttattttatgtactgttccattaaaatatgtactcatgtttagctctcaccactagaaaagcagaaagccaaaatgaatggacatatcacttcttcaccccattccaatttgaagtagaccttctcaccatacttcaccctaattccttctttagagaagaaaggctgcctgtcaaactcaattttcagagatatctttgattcaagaaaatatacgtcatctaatataaataaaatatattacattttcacataagagaggggaaaaatctagtagagaagcctcaggtaaagatctttagaatattttttcacattggtagattttagcattgctattgtgagatgggacagaaattccaagcaatctgttagtatatatagaaagtactttccttctcttttaagtctctgagttggaaaaaaggccgtacttgagagattggagaagaaaaggtgcttactcgaatagataccaatttagtaaataaagaagataactataatagttagggacagaattttataacaaattgtaagtggaatgattaaaaatagataataaaatatagaaaaaatgtgaaaagtagagaaagtccattaaagaaaaagtaagttatcgaagtaaaaattatatttttcctttattttctctacattttgcatgattttttaaagcctataacttttttgtatttgtygttaagttagattaaaaacaaatatttccaaaacaaagatacattttgacttaggattacttttatcttaaatgtgaaattcctgtagatgcctctgaaaataaatcagtcttcatgttaatgatgttaagttcctttttctgccatacactttaaggtaataagctagctaggtaaatgtctcaggaattattttgatgaaactgaaggatccgagttctattccattacgaggcaaagtaatgtgacagttatgaatggccccccctaaatcaacaattgctgccacattagcctccttgttgtgtcttaatttacaaggaatcaaaccatctt

SEQ ID NO: 2325 - DNA, 1926 bp, Homo sapiens
ttcaggaattcaacttagagctgatctgttgagagaaccatcaaatgaatcaagtggagaaaatttgagattaatttatatataaaatatatattagaaaatagccaagaagtagctcatactatcttatggattaatacttaaaattaacataagtacaaccatgacaaaagtgttaaggaaaaaatatgccacatgaacaggtggtctaataagaaaaatttcatatttcattcatagataggcttcaacttttaaagaaaatttggtataattccatcaaacttttatcatcatttaatccataaacattatgcaaaaactaaatatttttctaaaacaattctaggcattaaagtatcattttggaggaaatgtattgcaatattatttttactttctttaagcatttttcatgatgtgtaaagtgatgcccattacttctctctgggttttctctgctaattttttggtttaaaaaaatccttcaaattgtcactgagaaagccccaaattccgtgagaagaacaggtgttttcaagaaggaatttgaggcatgaggcaccagggagacttggcttatttcagcaaagcaaatgaagtggatgaggtttttgaaccctgctttcaccagaataaagcaagtttctccatgcattagtgtttctgagtcagaagggccttttctgcaacagttggcatagggctgctttatggttgcagtaaactccctttttaaaaaccttcatttatccctaaaaataaaggcacagaaaaggaaactataatgcgttttaaaggtattcttagtctatcagtttggcatttagctcgaacataacagctatttcaatgtgtaaatacacacacacacgcacacacacagatattaagaagttataggtacttaacaaagtcatcttttctgttaccctcaacatttctaggacaaagccaaaaaagtatctggagccatattttaaaacaaatgttattctctgaattataggcctgaagtctgttccggaaatagtctcatggccagtgtaattatggcttatatgagtcacggggcctactctaggcactgttcatcctatttataatctatccctggaacaaaaattcagaagctaaggaaacaatgataaagaacaatgtcaggtggagttcaacagacacagcctcctttcttataactcaatctcaaggatcccagcagacaggttagggagacgtcctgcttccttggaatccctcgacagttatgaggggacattcgggtaggtcactgcttcatttgaggtgtgaccttgctgggttattatagagaattggatcctactgaaaaatttggccacagcaatttactctgcagcagaataacgcacttcaccagagaagtgtcagattattgaattctttgtgctgaaatgtggtttgtacaagggtgtatatattggagtctacaagcctaatacagttcctacacattctgcctgccttcagtttacgagtcatcttgctgtgcgggaatttttgtacagcaacaatgtgttagctgaatgcgatggattttttttctattttctctcttttttattaaagacttttwttttttttagagcagttttaggttcaccgcaaaattgagaggaagatacagagatttcccatctactccatgccttcatacattatctactcctgtattatctactttctctttagttagcagatcaaaagaaataaagatcaagatggtgaaaattattgctttaaatgttgcaaaaaaatttaaggtccaatttgcccgtaagaaaacgccagaaatatgtttggaatttcgtgtctgcatcatgtctctttctataattatgtatggactgcattaaactataagctcatggagagatggaactatgc

SEQ ID NO: 2326 - DNA, 1926 bp, Homo sapiens
ttcaggaattcaacttagagctgatctgttgagagaaccatcaaatgaatcaagtggagaaaatttgagattaatttatatataaaatatatattagaaaatagccaagaagtagctcatactatcttatggattaatacttaaaattaacataagtacaaccatgacaaaagtgttaaggaaaaaatatgccacatgaacaggtggtctaataagaaaaatttcatatttcattcatagataggcttcaacttttaaagaaaatttggtataattccatcaaacttttatcatcatttaatccataaacattatgcaaaaactaaatatttttctaaaacaattctaggcattaaagtatcattttggaggaaatgtattgcaatattatttttactttctttaagcatttttcatgatgtgtaaagtgatgcccattacttctctctgggttttctctgctaattttttggtttaaaaaaatccttcaaattgtcactgagaaagccccaaattccgtgagaagaacaggtgttttcaagaaggaatttgaggcatgaggcaccagggagacttggcttatttcagcaaagcaaatgaagtggatgaggtttttgaaccctgctttcaccagaataaagcaagtttctccatgcattagtgtttctgagtcagaagggccttttctgcaacagttggcatagggctgctttatggttgcagtaaactccctttttaaaaaccttcatttatccctaaaaataaaggcacagaaaaggaaactataatgcgttttaaaggtattcttagtctatcagtttggcatttagctcgaacataacagctatttcaatgtgtaaatacacacacacacgcacacacacagatattaagaagttataggtacttaacaaagtcatcttttctgttaccctcaacatttctaggacaaagccaaaaaagtatctggagccatattttaaaacaaatgttattctctgaattataggcctgaagtctgttccggaaatagtctcatggccagtgtaattatggcttatatgagtcacggggcctactctaggcactgttcatcctatttataatctatccctggaacaaaaattcagaagctaaggaaacaatgataaagaacaatgtcaggtggagttcaacagacacagcctcctttcttataactcaatctcaaggatcccagcagacaggttagggagacgtcctgcttccttggaatccctcgacagttatgaggggacattcgggtaggtcactgcttcatttgaggtgtgaccttgctgggttattatagagaattggatcctactgaaaaatttggccacagcaatttactctgcagcagaataacgcacttcaccagagaagtgtcagattattgaattctttgtgctgaaatgtggtttgtacaagggtgtatatattggagtctacaagcctaatacagttcctacacattctgcctgccttcagtttacgagtcatcttgctgtgcgggaatttttgtacagcaacaatgtgttagctgaatgcgatggattttttttctattttctctcttttttattaaagactttttttttttttagagcagttttaggttcaccgcaaaattgagaggaagatacagagatttcccatctactccatgccttcatacattatctactcctgtattatctactttctcttyagttagcagatcaaaagaaataaagatcaagatggtgaaaattattgctttaaatgttgcaaaaaaatttaaggtccaatttgcccgtaagaaaacgccagaaatatgtttggaatttcgtgtctgcatcatgtctctttctataattatgtatggactgcattaaactataagctcatggagagatggaactatgc

SEQ ID NO: 2327 - DNA, 1053 bp, Homo sapiens
tctactcatgagttcattatgtcccaccttttttcaaaacttatgaggttttgttgtaattgctgagctacacacacagacacacacacacacacacatacacacacccactacctcacccacagtcatgcaagtatattcaaacaacttgccaacccacacattttatttgccaacacccacaccccacccacaattaggtttcccagattcaaaaagtaaattgctggtcctttcttttggtgcacaataagaaaggaccggcgatatacttgagtcataaatggactactccccaaactgygttttcataattatataattataattttagcagtataaaattaaaagaaaaaatattatttattgcttgactaagaagtagcctatgaaagagatttgcctcttctccatgcctatagatttcaacatagagcagaaataattagaatctgtgcttaacaacaacaaaaaatacaccaagattcatttatgaaattcaaaataaataatatgctatcttaaattattatttttagatgttgagttgtataagcaacctgcagagggtgaaatttgaaggcagctccacacaagatgtaagcatgagagaggcatatataaagaatcttaccagcccaggaccagcagatgatgaaatctgacagattggctggcattatctcccccattctgggtgcttgtctcatgcaatctgctcccacggggctgagccattgcctcactctaaaaacatcaaccacacacacaccacctccgatcctggaaactgaagaactctacactgtggtaaacatttgttctctgaagttttcttcactaaacttttaggattcatatttaccacatgttaagaatgtaccaaatgcacaacattcagaaaatttcccccatcgcaatccacaatagttcaaaaatatttgttcaacaaacctctgttgaacatctgctatgtgccaggcactgcagtagctattaaagatgtaaagctgaatcagagactggtcccctcctaaaggagatcatcatgca

SEQ ID NO: 2328 - DNA, 1288 bp, Homo sapiens
tgcatctatcattttttttcttcaaagtattttaacaaactcttagctgattttgtgacctccagtccagtggttctcagatcttagggaacattagaatcacctgcaggtcttgtgaaaacaaactgatgggccgcactcccagattttctgattcagtgggtttgtggtggggtgagactgtgcatttctaacaagctcccaggtgaagctgtggtctgggaccacagtttgagaaccactgatccagtttctccccatccatccatctctatgcttctgccagaatgatcttttcgaaacactgatcagtccatactgcttacactgcttaaaaccttcaaatggctccctagtggcctcaagaaaaagcctacctccttaggtgggcactcgagacctcacccctcttacctgtcaccctgatctccaggcgcagtgctcggcttgctggcccaggtagctttccctccaagaggcaggctgcactagggaagggcacaggcatcagacaggcctgggtttgaattccagccctggcatgggctctctgctgtgactttaggcaagtaacttacctctcttgtgcatatgggaaaactgaggcttaacaagttcaagaattcttacctctatgtggagctggaaaagctaaatgaactgtctggggagcatgtgccatgcctgctccatggcaggtgatcctcagcctgatgtcttctcagggcctgtctgtttagtctctaagacctcaccctgctgtctcctccctactgtgtggcttgcctccctccccctagttctgatggctcttgctgacagaatctgtgaagtaccatgtgaagggcacacacaaggccagatctctgtgaggggatggtcagggaggacttcctggaggaaagccataacargttatcagcctccaagatggtccccagtggtcctgcctcctggtactcactccattgtgtagtcccctcccacactgtccctgggtgggaccagtggtatatggcagaagtgatgatatgtcacttctaatattaggttataaatactacttttctgtgttggtgcctcttgctttctcttgatcacctgccctgggggaagccagctgccatgttgtggggctgtggccaggaactgaggcctcccaccaacagccatgtgtgtcagccattgagaaagcagatctttcagctgttgtcaaacttttgggtaactgcaacctcatgagagaccctgaaccagaaccatccagcctagctgctcctagattctg

SEQ ID NO: 2329 - DNA, 2038 bp, Homo sapiens
  misc_feature (1)...(2038): n = A,T,C or G
atttttgtatttttagtagagacagggtttctccatgttggtcatgctcgtcttgaatttctgacctcgtgatccacctgcctcggcctcccaaagtgctgggattgcagatgtgagccaccgcccccggcccacatttcttcgtgtgatcaatatccatcaacaaccatctcgacccaagaacaggaacattcaccattatgccggtccttgccgccttctgtggactcccgccttcgcgccaggcgcaattaccctatcctggtcacctccgcacccacactcgcgccccacacccgtccctgggccatcccacccgtaactaactactgcccccccctgcccgcgaccccccccgccccctccttgcatctagctcctcttagctcccacccccggcccgctccactcccccccccccccccgtcctctcgccgtccacccccgccaccctcttcccctcccccatccccaccccctccgccgcccccacacccgcgccgcgccgtcccctccgcctccgcgctccccgcccccccccccggcccgcgccccagcacgccgggctcgctctcgcctcgcccgcccnnnnnnnnnnnnnnnnnnnnnnnnnnnnnnnnnnnnnnnnnnnnnnnnnnnnnnnnnnnnnnnnnnnnnnnnnnnnnnnnnnnnnnnnnnnnnnnnnnnntgtgggttgtgtgtggtatcagactcaaaaatttttagtagataaactaaagtattaagatttgtaactactgtgggaagagtattaaacggaagcttaaatttgggtaggatgcattgaacgcttttgacatgttaataggtttactatgttctaggacaaattatcaaacaaaatgaagggttcattttcagtyagtatttcctttgaaaatctcgcttatttctgtaaataatatagtgcagttacttgcttgtctttattgcgttactacaagtaactaattcatgatgtgtataaatgaaacaacacaacttttaagtaattacaaatttgtgcactttaatttcagacgccatcgtagtagaagcagggagcggaagaagtctcgatccaggagtagggagcggaagaaatcgagatccagaagcagagagaggaagaaatcgagatccagaagcagggaaagaaaacggcggatcaggtctcgttcccgctcaagatcaagacacaggcataggactagaagcaggagtaggacaaggagtaggagtcggtaggtgaccatcatcctgaataaaatttaataggatcctcagagagtctgtttatcttcctcagtaagagagtattaaaattgtgagtcacaattctatttatagattatggtaaaattattttagtcattacctaacgtatgaagaacacacctaaccacttgaatagcattcacaggtattctcgtgattgataaatctcttgcgaagtgcaggtatgaataggcctattaaaatgcagttgttggctaggtgtcgtggtttacacctgtaatcacaacgaggcgagcagattttttgagcccaggagttcaagaccagcctgggcaatatggtgaaaccccatgtctacaaaagatatgaaaattagcctggggtgatgacccacacctatgatcccagctacttgggaggctgaggtgggataatcacttgagcccagaaggcagaggttgcagtgagccaagatcatgctgttgcactccagtctgggtgacaggagtgaatcctgtcgtaacaaacaaattcagttgtgttcaacactggatttgttgtattaattttattatcacaaataactaaaatctccttttgcatacttaccatatgctgtatgctagaactccttgcatgttattagctcatctagttctcagaagaaccatgttgaaaggtaagtgtgtcgtgcttaaagacgtttaagaaatttgccccagaattccaaaacagtatcattattaagtgctagagccaggagcaggtttcagatatatctaaatgcaaattccatgca

SEQ ID NO: 2330 - DNA, 2038 bp, Homo sapiens
  misc_feature (1)...(2038): n = A,T,C or G
atttttgtatttttagtagagacagggtttctccatgttggtcatgctcgtcttgaatttctgacctcgtgatccacctgcctcggcctcccaaagtgctgggattgcagatgtgagccaccgcccccggcccacatttcttcgtgtgatcaatatccatcaacaaccatctcgacccaagaacaggaacattcaccattatgccggtccttgccgccttctgtggactcccgccttcgcgccaggcgcaattaccctatcctggtcacctccgcacccacactcgcgccccacacccgtccctgggccatcccacccgtaactaactactgcccccccctgcccgcgaccccccccgccccctccttgcatctagctcctcttagctcccacccccggcccgctccactcccccccccccccccgtcctctcgccgtccacccccgccaccctcttcccctcccccatccccaccccctccgccgcccccacacccgcgccgcgccgtcccctccgcctccgcgctccccgcccccccccccggcccgcgccccagcacgccgggctcgctctcgcctcgcccgcccnnnnnnnnnnnnnnnnnnnnnnnnnnnnnnnnnnnnnnnnnnnnnnnnnnnnnnnnnnnnnnnnnnnnnnnnnnnnnnnnnnnnnnnnnnnnnnnnnnnntgtgggttgtgtgtggtatcagactcaaaaatttttagtagataaactaaagtattaagatttgtaactactgtgggaagagtattaaacggaagcttaaatttgggtaggatgcattgaacgcttttgacatgttaataggtttactatgttctaggacaaattatcaaacaaaatgaagggttcattttcagtcagtatttcctttgaaaatctcgcttatttctgtaaataatatagtgcagttacttgcttgtctttattgcgttactacaagtaactaattcatgatgtgtataaatgaaacaacacaacttttaagtaattacaaatttgtgcactttaatttcagacgccatcgtagtagaagcagggagcggaagaagtctcgatccaggagtagggagcggaagaaatcgagatccagaagcagagagaggaagaaatcgagatccagaagcagggaaagaaaacggcggatcaggtctcgttcccgctcaagatcaagacacaggcataggactagaagcaggagtaggacaaggagtaggagtcggtaggtgaccatcatcctgaataaaatttaataggaycctcagagagtctgtttatcttcctcagtaagagagtattaaaattgtgagtcacaattctatttatagattatggtaaaattattttagtcattacctaacgtatgaagaacacacctaaccacttgaatagcattcacaggtattctcgtgattgataaatctcttgcgaagtgcaggtatgaataggcctattaaaatgcagttgttggctaggtgtcgtggtttacacctgtaatcacaacgaggcgagcagattttttgagcccaggagttcaagaccagcctgggcaatatggtgaaaccccatgtctacaaaagatatgaaaattagcctggggtgatgacccacacctatgatcccagctacttgggaggctgaggtgggataatcacttgagcccagaaggcagaggttgcagtgagccaagatcatgctgttgcactccagtctgggtgacaggagtgaatcctgtcgtaacaaacaaattcagttgtgttcaacactggatttgttgtattaattttattatcacaaataactaaaatctccttttgcatacttaccatatgctgtatgctagaactccttgcatgttattagctcatctagttctcagaagaaccatgttgaaaggtaagtgtgtcgtgcttaaagacgtttaagaaatttgccccagaattccaaaacagtatcattattaagtgctagagccaggagcaggtttcagatatatctaaatgcaaattccatgca

SEQ ID NO: 2331 - DNA, 2038 bp, Homo sapiens
  misc_feature (1)...(2038): n = A,T,C or G
atttttgtatttttagtagagacagggtttctccatgttggtcatgctcgtcttgaatttctgacctcgtgatccacctgcctcggcctcccaaagtgctgggattgcagatgtgagccaccgcccccggcccacatttcttcgtgtgatcaatatccatcaacaaccatctcgacccaagaacaggaacattcaccattatgccggtccttgccgccttctgtggactcccgccttcgcgccaggcgcaattaccctatcctggtcacctccgcacccacactcgcgccccacacccgtccctgggccatcccacccgtaactaactactgcccccccctgcccgcgaccccccccgccccctccttgcatctagctcctcttagctcccacccccggcccgctccactcccccccccccccccgtcctctcgccgtccacccccgccaccctcttcccctcccccatccccaccccctccgccgcccccacacccgcgccgcgccgtcccctccgcctccgcgctccccgcccccccccccggcccgcgccccagcacgccgggctcgctctcgcctcgcccgcccnnnnnnnnnnnnnnnnnnnnnnnnnnnnnnnnnnnnnnnnnnnnnnnnnnnnnnnnnnnnnnnnnnnnnnnnnnnnnnnnnnnnnnnnnnnnnnnnnnnntgtgggttgtgtgtggtatcagactcaaaaatttttagtagataaactaaagtattaagatttgtaactactgtgggaagagtattaaacggaagcttaaatttgggtaggatgcattgaacgcttttgacatgttaataggtttactatgttctaggacaaattatcaaacaaaatgaagggttcattttcagtcagtatttcctttgaaaatctcgcttatttctgtaaataatatagtgcagttacttgcttgtctttattgcgttactacaagtaactaattcatgatgtgtataaatgaaacaacacaacttttaagtaattacaaatttgtgcactttaatttcagacgccatcgtagtagaagcagggagcggaagaagtctcgatccaggagtagggagcggaagaaatcgagatccagaagcagagagaggaagaaatcgagatccagaagcagggaaagaaaacggcggatcaggtctcgttcccgctcaagatcaagacacaggcataggactagaagcaggagtaggacaaggagtaggagtcggtaggtgaccatcatcctgaataaaatttaataggatcctcagagagtctgtttatcttcctcagtaagagagtattaaaattgtgagtcacaattctatttatagattatggtaaaattattttagtcattacctaacgtatgaagaacacacctaaccacttgaatagcattcacaggtattctcgtgattgataaatctcttgcgaagtgcaggtatgaataggcctattaaaatgcagttgttggctaggtgtcgtggtttacacctgtaatcacaacgaggcgagcagattttttgagcccaggagttcaagaccagcctgggcaatatggtgaaaccccatgtctacaaaagatatgaaaattagcctggggtgatgacccacacctatgatcccagctacttgggaggctgaggtgggataatcacttgagcccagaaggcagaggttgcagtgagccaagatcatgctgttgcactccagtctgggtgacaggagtgaatcctgtcgtaacaaacaaattcagttgtgttcaacactggatttgttgtattaattttattatcacaaataacwaaaatctccttttgcatacttaccatatgctgtatgctagaactccttgcatgttattagctcatctagttctcagaagaaccatgttgaaaggtaagtgtgtcgtgcttaaagacgtttaagaaatttgccccagaattccaaaacagtatcattattaagtgctagagccaggagcaggtttcagatatatctaaatgcaaattccatgca

SEQ ID NO: 2332 - DNA, 882 bp, Homo sapiens
cagcactgcccagcaacttcttggtccacagcacgagaactctctttctctaatcacccaaagccacataaagaaatccacatataaatccttgctgtctattaaaaggtacaaattctgcaaagttccagaaaatattatcaaatccccaataaggcaccatttacaactcgttttaagggagatgattcgatagcatgtcacaggctgcctggtggcatgagaaagagttcatataatatcttccagtgatgtcaactgttaaaacttcaacttttcttaagtgatctacctatcagattatacatggtatgcaataacttgttgccactacacatgtaaagacaaagatgacaagctgtaggacgattaactaaataatgtatgctatctttctgaaagaaagattctccaagaatttttacttggggatccaaaatataactgtcactgagctgtttttatttttgaggktatacggtagtgaaattttacttgtttttatttatatatttaagtgtcaaatgttcaaatgaaatcaagaatattgagatcacaaatatctcacctgaccccaactcccagacaagatgtcatataaagtacaagataaaatattagtttaagagaaaaactgaagattcatgttatttaaaaaagagcaaagatccatacagtattgttttatttacattgtccagacataaggctaagaacagctggtaagatttttacactgaatcaatttactcctctgaactccactgtattgcgcattagcataggcaaaaatcagcccaggacaacaggacaaccaagcactgggacccctcccatctcattctttctttcattttttttttttcttgagacagagtctta

SEQ ID NO: 2333 - DNA, 1751 bp, Homo sapiens
cataaaataatactttcttatgctatgttaacttttgttacttaatggctaattatttcatttgatgaataccagtggtcctgcttacttcaaaccttatcttgtctgttgccttttaagtactataagactttgctatttcacttcttcctgagaagtaagggtataaatcttaaaagagactaaattaatccacattgatattcatgagcatctctatagtgactgtgcctggcaggtatagcatgtgtggtggtgaaatggggctgacatgtcaattttccagcaatgcttgacctctcttctcactcaaacttccctgttcacacatgtgggggatcactccttcatactacatgaccaagccacagctgatcagaccaagggtaggtggctaacttaagggcaaccaaaacattggttgggttcagccagatttttccttacagtttgaatgaacagatacagatacagtaatcaaagagtgatgtgcctgagatctcagaagtcacagactcagggccaaagttgactctggcctaagtgtgagctgaagtcgtgaggaagcagaaactataagccctgcagacaaaggcagtctgcaagagaatggaccttctgcagggaaaagtgaaaatgagagactgtgtagaccaagaaagaagcaagagctgtaacctaaagacttaacagtccagctaaacttagtgtaacttagactctatgtgattcctcttaatctatatcatttccatagctcttttttaaaaactgaagctcacttaaaccagttgctgtcccttgtaaccaaagtacctttgttaaaatgtctagtggggaagagattctcttacctctgttgcagtgagagaattatctggggtttcaatgtatacctttctcacccttccttgtgcctgctgcctgcatcctctgttgtttcagacaagtaaggatgggcttaagcaaaacataccaacctgtttctctataaaactattataaagaaatgaggaaaatatttttatttccgtatttgatgagttaatagggtttctccaacaaataggtagctatgcctggctcacccacaggccacacgattgaacaaatacttaacaatccactatgtgctcwgaatataaaataaataagaaaatatttcatgcctagaggagtgtgtagtctgagaagacacacatagtctattagctattatagtcatcaaagtcattcctcacactttcatttaatctcattatgcatcctataagtgatttgtggaaagtcctattggaatgcagaggaccgtatcggtcattctggttgaggagttgaggaaagcttcacagaaatgggaagaagtgatttaaagtatgtctagtgtatcatgttttccaaagagtgctctgtggaacactagtttcatgaaatataatcatatataaatagacagatggatggatggatggataaacgggcagacaaatagatctatgaacaaataagcttcaaaagttctaggcttcacaaagtttacaatttctttactgtaggccttctcaggaagggtccttaatatttgaatcagaattttgaatttccaagaaagacatatagcattgaccaaattattggtttacaagacccttttttcctttgagccttttacaagaagcagtattttgcaagccagattaaaaaaattgaattttgcccatttcttcttatttcttactcctgttatttag

SEQ ID NO: 2334 - DNA, 626 bp, Homo sapiens
  misc_feature (1)...(626): n = A,T,C or G
agaatttttaaaggattaattttctttaaattaatagtcattttggggataattgacatttataattgttttccaatctattaacatggtatatccctatatttacttaccttgcctttaatatcttgcagtaaatttctataatattctgcataaaactctggtacatttaaaaaatgtattccctgtgtattagttaggggtcctttttttttttttttttnttgagatgagtcttcgctcttttgcccaggctggagtgcagtggtgcaatctcggctcactgccagctctgcctcccgggttcaygccattctcctgcctcagcctcccaagtagctgggactgcaggcgcccgccaccacgcctggctaattttttgtatttttagtagagacggggtttcaccgttttagccagggtggtctcgatctcctgacctcgtgatccgcccgcctcggcctcccaaagtgctgggattacagacgtgagccaccgtgcccagccttagttagggttctttacagaaacaaaatgtatattctgcaatatacgtatacacacacagacaacatgcacacacgcacacatacatgcagagacctaactctggtggaatatgttcc

SEQ ID NO: 2335 - DNA, 656 bp, Homo sapiens
tgcatgctaggatttgcttaaagaaaatgttgacagggcgcgatggctcacacctgtaatcccagcattttgggaggctgaggcaggtggaacagctgaggttggcagttggagaccagccaggccaacgtggtgaaacctgtctctactaaaaatacaaaaattagctgggygtggtggttcacgcctgtgatcccaatcacgtgggaagctgaggcgggagaattgcttgaacctgggaggtggaggttgaagtgagccgagatcgtgccgtagcactctagcctaggcaacagagactccgtctcaaaaagagagaaaatgtcaagcccaaggaacggaaaaacttaccagatttctggtaggattaggatgtatagataacttaagaaaatatgactgaaatgttgcatgccatacacaggttattcatgaagtcaagataaatatatagaaataagtaatgttagtgtaatcaagaactgcaaatacagatataacatttctacccatgagtttaacaaagatttttaaaaaatgactctagcccatgtggtggactgtgaaaagggtggagatataagcctcccatatattattggtagtagtgcaagtagcatagcgttttttagagcatttagggatgtgtatcaggc

SEQ ID NO: 2336 - DNA, 656 bp, Homo sapiens
tgcatgctaggatttgcttaaagaaaatgttgacagggcgcgatggctcacacctgtaatcccagcattttgggaggctgaggcaggtggaacagctgaggttggcagttggagaccagccaggccaacgtggtgaaacctgtctctactaaaaatacaaaaattagctgggcgtggtggttcacgcctgtgatcccaatcacgtgggaagctgaggcgggagaattgcttgaacctgggaggtggaggttgaagtgagccgagatcgtgccgtagcactctagcctaggcaacagagactccgtctcaaaaagagagaaaatgtcaagcccaaggaacggaaaaacttaccagatttctggtaggattaggatgtatagataactwaagaaaatatgactgaaatgttgcatgccatacacaggttattcatgaagtcaagataaatatatagaaataagtaatgttagtgtaatcaagaactgcaaatacagatataacatttctacccatgagtttaacaaagatttttaaaaaatgactctagcccatgtggtggactgtgaaaagggtggagatataagcctcccatatattattggtagtagtgcaagtagcatagcgttttttagagcatttagggatgtgtatcaggc

SEQ ID NO: 2337 - DNA, 656 bp, Homo sapiens
tgcatgctaggatttgcttaaagaaaatgttgacagggcgcgatggctcacacctgtaatcccagcattttgggaggctgaggcaggtggaacagctgaggttggcagttggagaccagccaggccaacgtggtgaaacctgtctctactaaaaatacaaaaattagctgggcgtggtggttcacgcctgtgatcccaatcacgtgggaagctgaggcgggagaattgcttgaacctgggaggtggaggttgaagtgagccgagatcgtgccgtagcactctagcctaggcaacagagactccgtctcaaaaagagagaaaatgtcaagcccaaggaacggaaaaacttaccagatttctggtaggattaggatgtatagataacttaagaaaatatgactgaaatgttgcatgccatacacakgttattcatgaagtcaagataaatatatagaaataagtaatgttagtgtaatcaagaactgcaaatacagatataacatttctacccatgagtttaacaaagatttttaaaaaatgactctagcccatgtggtggactgtgaaaagggtggagatataagcctcccatatattattggtagtagtgcaagtagcatagcgttttttagagcatttagggatgtgtatcaggc

SEQ ID NO: 2338 - DNA, 656 bp, Homo sapiens
tgcatgctaggatttgcttaaagaaaatgttgacagggcgcgatggctcacacctgtaatcccagcattttgggaggctgaggcaggtggaacagctgaggttggcagttggagaccagccaggccaacgtggtgaaacctgtctctactaaaaatacaaaaattagctgggcgtggtggttcacgcctgtgatcccaatcacgtgggaagctgaggcgggagaattgcttgaacctgggaggtggaggttgaagtgagccgagatcgtgccgtagcactctagcctaggcaacagagactccgtctcaaaaagagagaaaatgtcaagcccaaggaacggaaaaacttaccagatttctggtaggattaggatgtatagataacttaagaaaatatgactgaaatgttgcatgccatacacagkttattcatgaagtcaagataaatatatagaaataagtaatgttagtgtaatcaagaactgcaaatacagatataacatttctacccatgagtttaacaaagatttttaaaaaatgactctagcccatgtggtggactgtgaaaagggtggagatataagcctcccatatattattggtagtagtgcaagtagcatagcgttttttagagcatttagggatgtgtatcaggc

SEQ ID NO: 2339 - DNA, 655 bp, Homo sapiens
atgtagatttcctgtgagaggttcttaagggtaactcctcaaggtacgattgcttctaaccaccttccattgttcagaactcattcacatcagcacacctaactggaagagaggctggaaaatctagttttgctgtgtacccaagaggaagagaaaatggattggggaacagctagctaatcttcaatgcaacgtccagrgaatttaaatagctgactctgccaagctcaagctactgcctttagttaatggcaggatttccttaagaatccaatgatttttcaatcctatctttctgcctgttcccaaaatattgagataacccttaaatggtctatcttctctttgaggggagaattattgtcttatttttcattatcttactgttatctggaacacggctccagacaggtgctccaaaaatgtttctgtaagttaattttgtacctaataataactggtccattagattcttacctataaaagttatgtcagtcttcattttagaaatcagtcaccattgggccaaaatcctgaataatttttccaccatcaccatagaccttcctgttaatgcaccttgttattttctctgaaattttcaggtataaaaatatatttatttgtacattattaaaacaacaagtatttcaat

SEQ ID NO: 2340 - DNA, 655 bp, Homo sapiens
atgtagatttcctgtgagaggttcttaagggtaactcctcaaggtacgattgcttctaaccaccttccattgttcagaactcattcacatcagcacacctaactggaagagaggctggaaaatctagttttgctgtgtacccaagaggaagagaaaatggattggggaacagctagctaatcttcaatgcaacgtccagggaatttaaatagctgactctgccaagctcaagctactgcctttagttaatggcaggatttccttaagaatccaatgatttttcaatcctatctttctgcctgttcccaaaatattgagataacccttaaatggtctatcttctctttgaggggagaattattgtcttatttttcattatcttactgttatctggaacacrgctccagacaggtgctccaaaaatgtttctgtaagttaattttgtacctaataataactggtccattagattcttacctataaaagttatgtcagtcttcattttagaaatcagtcaccattgggccaaaatcctgaataatttttccaccatcaccatagaccttcctgttaatgcaccttgttattttctctgaaattttcaggtataaaaatatatttatttgtacattattaaaacaacaagtatttcaat

SEQ ID NO: 2341 - DNA, 655 bp, Homo sapiens
atgtagatttcctgtgagaggttcttaagggtaactcctcaaggtacgattgcttctaaccaccttccattgttcagaactcattcacatcagcacacctaactggaagagaggctggaaaatctagttttgctgtgtacccaagaggaagagaaaatggattggggaacagctagctaatcttcaatgcaacgtccagggaatttaaatagctgactctgccaagctcaagctactgcctttagttaatggcaggatttccttaagaatccaatgatttttcaatcctatctttctgcctgttcccaaaatattgagataacccttaaatggtctatcttctctttgaggggagaattattgtcttatttttcattatcttactgttatctggaacacggctccagacaggtgctccaaaaatgtttctgtaagttaattttgtacctaataatwactggtccattagattcttacctataaaagttatgtcagtcttcattttagaaatcagtcaccattgggccaaaatcctgaataatttttccaccatcaccatagaccttcctgttaatgcaccttgttattttctctgaaattttcaggtataaaaatatatttatttgtacattattaaaacaacaagtatttcaat

SEQ ID NO: 2342 - DNA, 628 bp, Homo sapiens
tgcattaaaagccacaccttagatatcgaactcagaatcttgttaaaaatcaacaagagattgacaaacactcaaggtacaaattacaacactataataattattgaatattgccaagttggagaaggagagagaagcagagagaataaggaaatgtacacaatttacatgaartgttgaaaatctttgaagtccaggtaataccagttgatcttattaaagccacaccctttgaaatcacaacagaagcagatgaattttccagagcataatttttaaggagaaaaccctctctacattttttttattatactttaagttttagggtacatgtgcacaatttttaatgtttctgagaactaccacacacacatactaagctatatacatgctgtgactatttttatttttaagagggggtggcagtcaagacaatgtggtttcttttacaggtaacactacaattcaattttaatgtctttttccctctcatgtcacctttattttttggttcttttgaataacaaggaaaaagataaatcgagagtcataaagagttctttggggtaaactgaggggatataaccacctaattatgaatttcctgaatgtgcaacttgaccagcag

SEQ ID NO: 2343 - DNA, 2076 bp, Homo sapiens
tggtttcttcatcagtgctttgtagttctccttgtaggggtctttcaccttcttggttaaatgtattatcctaggggtgtgtgtggggtgtgtgtgtgtgtctgttattataaatgggattgagctcttgatttgattctcagcttgagcattattgatgtaactgatttttgtgcattaattttgtgtcctgaaactttactgaagttatcagcactaagagtcttttggaggaatctttagggttttctaggcataagatcctgtcatcagcagagataatttcacttcctcttttccaatttggatgctttttatttttttatcttgcctgactgttctggctaggacttccaatactataggagtggtaagagtggaaattcttgtcttgttccagttcttagggggaatgctcttagctttttcccattcagtatgatgttggctctgggtttgtcatatatggctcttattattttgaggtatgttccttcaatgccaagagctgtggatcttttcctaggtttcagatgaagagatcagcaaaaatagtctaataaacactttatgtcatgaaaagttataaagcaagtaactggaaacttaatgtcatttaagtatattaaaatttttcctacctagtttctttaggactcagaatattctgtttcttgagatattttaccaagaaactgactgccatgtgtaccaactgtggattacgaattctctaagaattagaatccacacttaacagcaaaagattcagaaggcacttaaaggattgttcaatttctcaaggtcatcaccgtaaacattgcttattattctatcagagacacacacgtaggtaagagtaatgaagagaatgccagacaacagtctgttcttccatttttccattcaataagcatttattgagtactactttktgtaggcaaaagcattgtggggactcaatcatttaactaagcttctgtccatagaatttacaatgcttaatattccatctttctaaagagtaaaaggatttgtcagtattcgtagccctttaagccactaacagaacccaagactcctaacacccccctttcgttagaagcataaataagcaattatttcacttggtaattggaattcaaatataaataataagcaaatggcagcctttatatctgcccatttgctaatttttctaccatcttgccatatctgctctcagctacttaaatatgggtgaacgtaaaagccaggcaagctaacatgaaggaaattatgcacattcttattacaatgaatatcaacatcaagacctagtgttaaagacagtcctaagcagttatatctctggatgatgaaaagtcttcaatataaagcaaaagccataagtattctgccaaccaaagttcgctaagggaagctaaatcagtatctatgaaaaaatcccacaccaggaatatcaccttcatgaagctgacacccaacatcaatatttaaatttacatattgttgcttatacattcattaatattaatacaaagaacttgagtaaattgatgtactttttcactcataatttttctattacagttaaatatgaaaggatcaaatttttggtgattgccttaaagaatgctgtggaaatatatgcttgggctcctaaaccgtatcataaattcatggcatttaaggtaagcagggatgtgattatctaaaatgtgctttttaaaaattttccgtttctacccattaataaaatagtccatatagaccaataccaattttcatatagataataaacctgttttaaaagtgtaggtactctagggtttattgtttcaaaagtaaagactgaatatttgtaaatgctataaaattagattaaaatttgggtatgccctcctccttgagatctatgaatcatcatcctcaagaggcatttagaatggttagtaggcatagcattgattatgatcttatgcaatgacatttgttataaagccacctaaaccagggtattccctgatattttgtttgaaaaaggcagacaaatggcagcactgaatctcagag

SEQ ID NO: 2344 - DNA, 590 bp, Homo sapiens
aagctgctcaccaagggctctgtatggtgaagaagggaaaaccatctacactggacagtgcagggtccccagcaccatggcatcctgttgatccctcaggccctggggccacatctgggcacgtgcctatgggcccaaaaggaagaccagagccctgtgtcatgagaatttgcacaaccagccccatggaagtgtctcacactgacttcagggcatctctcagtccctagcaagtcaccattcactatttgattgcttgaattacaagttttcaatggaatcttagagttttagggcygggagacgcctctgagatcatccaatctccaagaaacagtacagggtagtgtgtggcaaaatcaaggccagaggccatgtctcctgataccccatccaacaggaagctggtgatggaaagatgcctactcttgaaggctcctcagatggtttgttttatttgtatggaaacaaatttccccattgcacgtttcaatgtctttcttttgctttctctacttgcttccttatctgtaaaatgagaccctaaagcccataatatgtgtaaagcacttggaattgttattaacaca

SEQ ID NO: 2345 - DNA, 1212 bp, Homo sapiens
aactggagagtcatcagtttctctccctctccctctttctcttctcttcctctctccctgcttccttctctctctcactctctcattctctttgcttctctctggatctgcaccatttttggctagcccttagtttctgctcccttaaattcagcttgtatatggttttgaattgtcatggcccaacccctgtgtgaccttaaagctccaatgcccaacagcatctgaccaaccatactctgtttccttagtaaaatgttcgaggaaaagaatccgagtggttgctacctctagtaataaaggcaaagcaggagtaagggtggtcagtataccaatagcaaatctcctagggtgggaccactcatcctggttgccagccccagggggacatgctttacctcatagagtccagcacccatggacacacacacacatacacatacacacacacacacacacacacacacacacacagagagagatagagagagagagagagakaggtcaaacctggcacaggaaggatgtgagatggggaagcctgctagccactcctcctgccagcctccagccaattacactgctgctcagttgccccaaagcccttctcattcttgatacccttctcttcagagcatggaatgcccgtggctgccccacatccgcatgtctcttgactatggatttttccttccatctaatctcatctgccttctcagtttttaggaattcctcaaaactgtcttgcccatgaagggcactcagtactgttgctaaaatatatgtaatctattattttcagatgccagggaaagaacgggtggagataccaaagtatgtcatcagtctaccatctcagtccctcttggcttttcttaggtagaggcttttgttgcccttctgaaattatggactccttgagaataaaattcacatctaattcatggttctttctcccacagtgcttaccacagcactttgcatatagctggttcttaatagttattgaatgagtatatgagtgaaaatgtgaccaaataaatgaacaaataaggaatgtctaaattaaagagtgaagaaataaattgataaaattaataattacaaagtaccgtaagatgcctgaaagctgttaagtgttttatacagtcaaaaaatagcatttcccttgaaattgtgtttatgtgattaatttgccctccctgtaagaga

SEQ ID NO: 2346 - DNA, 552 bp, Homo sapiens
caggaggctgaggcaggagaatcgcttgaatccgggaggcggaggtttcggcgagccgagatcgcaccattgcactccagcctgggcaacaagagcaaaactccatctcaaaaaaaaaaaaaaaaaaaaaaaaaggtcatatgtgtggccaggcatggtggttcgtgcctgttatcccagcactttgggaggccaaagtgggcggatcacctgaggtcacaagtttgagaccagcctggccaacatggagaaaccccgtctctactaaaaacatgaaaattagctgggtgtggtggtggatgcctgtaatcccagctacttgggaggctgaggaaagataatckcttgaacctggaaggcagaggttgcagtgagctgagatcactccattgcactccagcgtgggtgacgagagtgaaattctgtctcaagaaataataatagtaataataataaatattcatatgtgaatataaataacatttttaatgtgaaaaagaaatttttaagtaaagatagctactacaagaacatgctttcttttcctgcctt

SEQ ID NO: 2347 - DNA, 1138 bp, Homo sapiens
gttgagagataaaataaatgttaacagcaattttctttgtgtaataagattagagtgatttttattttcttctttatatttttctgtagtttccaaattttcatagtgaacatgaattgcttttataataaggaaaaaagaaaaacaatggaaagacattaaaaaaaactttgttatgttcttttgaaatgtattttttacagtttcattacagtttcattccaggatgcttggttttgcaatgctaagctttttctgaagagttttgtacttcatcctgagagagttagagaataaaaggaactgtcagttattctcgtctgtctagcaaaagagaaagcacacctgctttgccctcagcagacctgtgtgggtacggcagccttgccccttcctggctacgtgaccttgggtcacttgtttaacctctctaaggtttggattctgcctctttaaatggagacatacaatcatcacttctaccacataggatttagtgaggaagcatatgtaaagtgcctgggacaatgcctggtgcatagtaggtgctcagtaaatggtaactagtacaaaccagatggtgaggaaaaggcatgaagtctttataaaatgagaagcagtcatccagagaaaaaaattaatccctttcggaaaaaattattctgatatgggggcctcatgtcatcgctcccattttctgaaaagtctttggaagctctcacaaaggtagaattctttgctcaagatctcccaggacttcaaagattaggggatgaacaaacagcaaagcccagctttctttactcttagaataatgttccactgctacttccctagcccagaatggcttgtggtccttcttcccacatctctgcagaccaagagcaacatcttctcccactttccaccaacatgatcctctagggctcattgctgttaattaatckcaggaaatcttgcacattatctaaatgtctgtgagcagtatcttcagtttccactaggttgggggcatgtaatgccatcctcttactgatacttgggagcacctcaacagggagactttaactgcccaaatgtacaggaaaaaaaaatagtccctctttggtcttttaacactaatatgtcctaatatcag

SEQ ID NO: 2348 - DNA, 1318 bp, Homo sapiens
tgcatacagggtgtgccctgcctcccctctttctccaatcacccaccagatcactctctgtctacctgccacactggcctcctcatggtttctcagatgtcccaccatatttggaagcaatgagattttccaaatgaggaataggaggcccttaggcaagagatattgggacctcaaatgtcctaccataggactttcacataggctgctgtctcctaacaccctaggtccctccctcacctggttaattttctacctttatatatcaactcagatgtcacttccttcctaactccccaacctactttcgtttcgttactgtgcattttcatggatgtgtttccttccttcacagcattatctccrtttataatcacagattgattggtgtgattatttagtctatctctccactaaagctgtaagctcttttaagacaaaacctggtccattttgtaatccccattttgtttccctaacttatttgcatgatgtattagtctgtcttgatgctgctaataaagacatacccgagactgggtaatttataacggaaagaggtttagttgactcccagttccacaaggctggggagccctcacaatcataggggaaggcgaatgaggagcaaagtcacatcatacatggcagcaggcaagagcgcttgtgcaggggaacttccatttataaaaccttgagatcttgtgagatttattcactaccaagagaacaggatgggggaaactgcccccatgattcaattatctccacctagccctgcccttgacatgtggggatttactattcaaggtgagatttgggtggggacacagccaaaccatatcacatgagtcagaattgagtcagaactagaaaggagagaggaggattcaaatggctcccaggcctttgcttattggcctttccaaataagaaccgtaatccttcctccaattgctatcaacaaaactgagaggcaaagtggaccactagataaatgtcaagctgttgaaaaatctaagattgactgctgtaattggcaccattggtcggcatcatgaatagtcataacaagcagaaatttgttaccaaagaacactgtgttttcaggggggagatacctccctgttctctatttcactaaaaaaaaaaaagtccaattatctctttaattaaaaacaaagacttttctgattataaagtcaaggtggaaatcccacaccgagcatttagaatagcagatgagaagcctcattatgtgtatgtgtgtatgtgtgtgtgtgtacatatgtgtgtgtgccttgcccatgcacatgca

SEQ ID NO: 2349 - DNA, 666 bp, Homo sapiens
caactcaaaccatggggacaataagaaagtcagaccatgtttagtgagtgcttctatgtgccaggcaccttgctaggtgctctcctgaaccacattgagacagcagaggtcatctgacaatataacacagcaattagacacacaggctctggagccagactgccttaaactctggatccaccagtcactacgtgaccttgggcctcaatgtttccatctctaaaatgggatgatgttattaatgctactctctccactgggctattgtgagcatgagatgagcacatggttagcrttccataaatgtgagcaagtgttgactctcccaatgaccctgtgaagtaggtcatcaacccattttgcagatgagaatactgaggcccttatgtgtgcagtgagttgcccaataccacatggctaatgagtgcagagacaagattggagcctcagctgttcacatcctagtgctctgccctttaccattcatactatcccattatcatagagtacctgttcattgtgccttcaccctgggaaggagaaaaggtcaagccttctgtcctctgcaagaccctctgttgctcttccaatggcttgtttttgtcacagtcacacataactgcatgctgttgacacagaagtcaatattcaaggtttcctccatgc

SEQ ID NO: 2350 - DNA, 621 bp, Homo sapiens
agaaagaaagaaagaaagaaagaaagaaagaaagaaagaaagaaagaaagaaaataaaagaaacacttttctagaatactgctcagtacacaagagctttgtataaagttgatgagtgactagaatggactgagtcattaacaggaaacaacctataatgtaatgagattaaatgccatcctaacaaggcacatggaaagaactacagaagtgcatgtaagaaygtgatcacagacctgggaaggcttccaggaggaagtgactttcaagttgagttttgtaggctgcaatgacatttttcaggtggacaggtgaaagagaagcctccaggcaaaacacacagcattgaaccataaacagccaaggaccaggacacacctaggggagcagctggaaatgaagcagcaaggcaggctcccttggtccagaagatgtgatccacagcagagagccccaaggggttcatttgggcttcatcagttccttggtgatcccttactccaggtgacccccaacccttgaatatgcactacagcccactataaggagcaccaagctccttcttgcctgccctacactggactcactgagaagggaagtgccatgctcagttgtcttcca

SEQ ID NO: 2351 - DNA, 625 bp, Homo sapiens
taaatatattttgatgaaataaaatgcacctatgcaaaaatcatcaatgattatgaggcatgctcggagcctaatggttttttaaattgccaacagtttaggtaccactacctgtggactttaaatgttgcacgtacattatagagacagctagctatgacgtttgattcctaagaaaaactacaaaccaaggaggtgtacctcagtattcaacatccttaaagaatttccactttggattaaatgagacccctaaggccaygatgaggaaatatttttaaattatatccagaaaaatcacatgtgctagaacatatatcccttcatgcctttgttttttaaaatagatgactattacaactgtgacacattctcaatctctggccctttctgatgccttgacccagtaaccattaccattccacacttctctgaagcaatgccgtgaaaatcatggctcttcactcagtttacatattctaacccatctgtcctcttctatgctttccttcctaagtattttccttattattctttattgcttcctaccaaatgctgagggagtggtcagataactattagagcccaaccctctaccacagtgagatctgtttcagaaatactt

SEQ ID NO: 2352 - DNA, 567 bp, Homo sapiens
tttccctaagagtgacaaaaaggaaacgctatacccatacatgcacagagacatcaatatttctatgtagtcttttgggggactaggcgaaaacaatcaacaaagaaattttatttgggggcatttctgaagcttttctgccttcttttttaatgcactgaaagctctttgggatcttgcattcttttactttgcctacctagctggtgtttcctccgtttgtcaaacttgatcccaaaccaccgatctgcctgctcctgtgccctgcaaatattcayggccaagtgcagtagcccctcaaagccaatgtaagcctgtttccagccctagtgttgatgggtgatcttatgtttaccaggctgaagttctgaacaccctcttcagaaaacagactgcactagctccaggctctcctcctcgttggtaagcgtgtcatccatgctccaagttttccagagctccttgtttaacttggagctggacaaaagcatggccccaggggcagcttggcttgctttatattaatagagtcctcaccacagtaggactgcactgtgcccttgcttc

SEQ ID NO: 2353 - DNA, 608 bp, Homo sapiens
tctcactaggaggtgctggaggaagtcggggtgagggagaaagtgaaaaagaaggtagaaactccgggcagttagaacaccaccttcaactgtgttatttcccaagtgaaaagttgcatgattttatttttgaaagactgccatttttattatagtgtttttttttttkttgttgttgttttttgtctagtgagtaatttttcaggacctttaaattaaaattaattcagcggaaatcacttggcttttctagaattttcctggcaaaggtccttcctgggccctattttccttcttttcctttttgtgtctctccctcagcaactattagaaatatttagtgcaagagtgagagccaaacgccgggagctgggtgtgagctatttgagaaagtgcctcctaattgatcttttctgtgctgttttaattcagccacgttcaggcccattattttagctataaccacttcagattgcctttttctctcgttttttataaaaatgtctgcagaagtgcttcgccctgtccagctgagatggaaaccaacaaatagactttattatagagaaatgagggttctgagaaatcagcaactggaagataagtct

SEQ ID NO: 2354 - DNA, 599 bp, Homo sapiens
ggaaatgctgtttttccaaaatgaaagtggctgttacagatctgaatgatgcttatgtaactttaaacactgaatttgggtagatcttaattcattaacagaaagggaaacggaggagttctgacatacccacctcccatcattaaaacaataggatctttaaggtaaatcttcaatagtcaggttgctakgggggcctttttagacccttcccctgccctcttctaaggtagattagttgcagtgggaggaatgcaggcaggagctgaggactgaggatttagaggggcctgctacccatagcactgtagggcaggacacttcacttcgttatgcttccatttcctcatccatagagacaatacctccccttttgtaatttacaaagtactttcacatatattatctatttcatttgatctctcacttctttgaggttgatagagcagatattatgcccatttttatagatgcctgttttgtaaatgaggaattggtctgggaaggttaattgactcacctgagacctcacagcttgttaagaagaggagacaggatgtctttggactttaagactagaacccttgacactttaacat

SEQ ID NO: 2355 - DNA, 599 bp, Homo sapiens
ggaaatgctgtttttccaaaatgaaagtggctgttacagatctgaatgatgcttatgtaactttaaacactgaatttgggtagatcttaattcattaacagaaagggaaacggaggagttctgacatacccacctcccatcattaaaacaataggatctttaaggtaaatcttcaatagtcaggttgctatgggggcctttttagacccttcccctgccctcttctaaggtagattagttgcagtgggaggaatgcaggcaggagctgaggactgaggatttagaggggcctgctacccatagcactgtagggcaggacacttcacttcgttatgcttccatttcctcatccatagagacaatacctccccttttgtaatttacaaagtactttcacatatattatctatttcatttgatctctcacttctttgaggttgatagagcagatattatgcccatttttatagatgcctgttttgtaaatgaggaatyggtctgggaaggttaattgactcacctgagacctcacagcttgttaagaagaggagacaggatgtctttggactttaagactagaacccttgacactttaacat

SEQ ID NO: 2356 - DNA, 290 bp, Homo sapiens
gagggatggccacgttaaycctgtggctggcagcctcacatcctgtaaggtcattgagaacatctcccctccttctccccaccacctgcaccgaatgacagagaggagagggaggctcatggggaagggaggtgggaggggatgtagcctatacccaccccttgtccttccagaaaatggagctggcgctggtgcctgtgagcgcccacggcaacttctatgagggggactgctacgtcatcctctcggtgagcaccctcctccccactcctgtgagcctctcccctggg

SEQ ID NO: 2357 - DNA, 1207 bp, Homo sapiens
tgcatacagaaattgaacgtaaggagctcaggcgtgtgtctcagtcatatggttaactcctttgtgctgtactaacacagccagatccccctgtacccattgcatgtcaacattaggcatacttcacttgttttctggggtgaactcacaaattagtctgcagaggtacacttgcctgtaatttaattcctatctccagaatagaacagaaagaatgagcagcctaaagaatccagcttggttggatataaagaggagaccatgatgacaactaaatgcccactggtgtgaagcaaggtaaagctggattgatttccctgggaccatcactgctgagcaaacctattggtaattcattttgtctatttcaggtagcaacatttttcagaactctggagttgaaccctaaatatgtctttccacctctccagctaatttgctaaatgaggcaggaagctgatttgtcaaagtccatatgtatcttaatactatgtcaagggaatcttgacttactgaaccaccaaattcaggtttctcctcaacaggattctgactagaaataacactgtaaccatagaaacacccattcaatgaatggtcatgggagaaatgacagcacaatgccattttaaaaggataaaaaaggagaattcctgccaaatttgatacrgagaaggacttttttctcaacaaaaaagcactacaaagtgctcagaaaggaggatttcgatttttttctagctctctctacaagtacacattttctctcttttattcattcatcaaatatttttttaatgccagccacattccaggtactgttctaggcactgcagtaaacaaagcagactgagtctctgttgtctaatggggaaacacaaataataataacacctaatatgtaaaaaagtgttagatgtaaaggagaataaaatggggaaaggagatagagcatgatgataataaatgtcaagagaatgaaatttattatgaccaagaaagacctccacgaaaaggtgacaattgtgctgaggaaacagaacagatttctcatatggaacaagggaatagcctgtgcaaaagccctgcagtgggaatatgtattgggcgatggagcaaaagtgaagattactgaaatagagtaaaggagggtgagagagctgggtgacaagtgttgggtagtgggctcagaccatgaagggatgca

SEQ ID NO: 2358 - DNA, 1207 bp, Homo sapiens
tgcatacagaaattgaacgtaaggagctcaggcgtgtgtctcagtcatatggttaactcctttgtgctgtactaacacagccagatccccctgtacccattgcatgtcaacattaggcatacttcacttgttttctggggtgaactcacaaattagtctgcagaggtacacttgcctgtaatttaattcctatctccagaatagaacagaaagaatgagcagcctaaagaatccagcttggttggatataaagaggagaccatgatgacaactaaatgcccactggtgtgaagcaaggtaaagctggattgatttccctgggaccatcactgctgagcaaacctattggtaattcattttgtctatttcaggtagcaacatttttcagaactctggagttgaaccctaaatatgtctttccacctctccagctaatttgctaaatgaggcaggaagctgatttgtcaaagtccatatgtatcttaatactatgtcaagggaatcttgacttactgaaccaccaaattcaggtttctcctcaacaggattctgactagaaataacactgtaaccatagaaacacccattcaatgaatggtcatgggagaaatgacagcacaatgccattttaaaaggataaaaaaggagaattcctgccaaatttgatacggagaaggacttttttctcaacaaaaaagcactacaaagtgctcagaaaggaggatttcgatttttttctagctctctctacaagtacacattttctctcttttattcattcatcaaatattttttkaatgccagccacattccaggtactgttctaggcactgcagtaaacaaagcagactgagtctctgttgtctaatggggaaacacaaataataataacacctaatatgtaaaaaagtgttagatgtaaaggagaataaaatggggaaaggagatagagcatgatgataataaatgtcaagagaatgaaatttattatgaccaagaaagacctccacgaaaaggtgacaattgtgctgaggaaacagaacagatttctcatatggaacaagggaatagcctgtgcaaaagccctgcagtgggaatatgtattgggcgatggagcaaaagtgaagattactgaaatagagtaaaggagggtgagagagctgggtgacaagtgttgggtagtgggctcagaccatgaagggatgca

SEQ ID NO: 2359 - DNA, 704 bp, Homo sapiens
agttctgaagaggaaatctgagtagtataccagagcatccaatccagtataggccaatccttgcatcccttggattcacgtgattcacacrgtaaatttattccatctgggaagaactccttcaagtttctggttggtctctttttctgggaaactttacaaaagaaagatgagtagcatgaactatatatatagcttttgccaatatagctggttttacagctgaaactgaaactcattttctccctcctctgcaacctattccagattgttttgaccctaatttagcacctctgatgatctagatggcttacctggtggggttacccagacagtcatccctgagtgcctaggcttctggtaaccacaccatactgtggctgctgtacttgtccatttcttgaaaaaatcaggaaagtatcaagacatgatccagtagataacctgacaaccaaacttatgctttccagaccccactgagtacccctaggaggccattaggaggatggcctcctaatggccggaatcaattacctctaccaacattgttttcttttattgcttactggactcttgacatgaagaaacttaaatgaccctacagtagccatagtttaaagtttaatgggactcttactgggccccctggtaaaacaatttccactttagaatccagaacctagtttagaatccacagaaccaaa

SEQ ID NO: 2360 - DNA, 630 bp, Homo sapiens
attaggtatttgtcctaatgttctccctccccttgccctccatcccccaacaggccccagtgcacgatgtttctcttcctgcgtccatgtgttctcatcgttcaactcccacttaagagtgagaacatgtggtgtttggttttctgttcctgggttagtttgctgagaatgatggcttccagcttcatccatgtttatggctgcatagtattccatggtgtagatgggccacattttctttatccaatctatcactgatgggcatgtgggttggttccaagtctttgctattgtaaatagtgctacaatgaacatacatgtgcatgtgtctttatagtagaatgatttataatcctttggttatatatccagtaatgggattgctgggtcaaatggtatttctsgttctagatccttgagaaatcgccacactgtcttccacaatggttgaactatgctctcaccaacagcgtaaaagcgttcctatttctccacagcctcgccagcatctgttgtttcctgacattttaataattgccaatctgactggcgtgagatggtatctcacttatgagatcataagtgatctcatatgatctcaaatgatcataaccattgattatggttcat

SEQ ID NO: 2361 - DNA, 413 bp, Homo sapiens
  misc_feature (1)...(413): n = A,T,C or G
tcaaactcctgggttcaaacaatcctcccatataagcctcctgagtaggtggggctacagaagtgtgctgtcatgcccagctaatttttttttgttkttgttagagacagggtctcactatgttgcccaggctgagttttgggggtttttgatgatgcacacagcagttagtctcattttaaatagcaaacgtgacacatggtaaatgggagtgactgatatctgctatccttattaggggttatttggattacccangataacgttctactgcatagtagacatttgctttctccacgcacatcccactcctaccccatgatgatgagcattttgggtggggcctgaacctgcccccagctacagagggtggctctggtgggttaacccatcagcgaaatccatgcctcctt

SEQ ID NO: 2362 - DNA, 751 bp, Homo sapiens
gttggtgaaaataaatttcgtcccaaactacaacttaaaagaatagacaaataaaaaccatgccctagcattcatttttagaatcatatttcctcagaatttggaggaaagagaatgacaatcccaacagtgtctgtgtcccttactggttaaataattaatggtgaaaataaaataaacacagcattttttccattggaaattaggagctcacaatttatattgatatttataacacaccataaaccttttttgttttcttggtcccctttgcatataattatgacgacccattaaaagtcaataataaatgcctcagattaaaacacttaacatctatgtatgctaattattagagttttaaagaactaaaataataaactgagccaaaaatgagatccatggagagttatayttcataattaaaacatatgaatcctaaatatgctttcttggccaatcgtgtaatctctaagggtataccataaaaatgcgaatgcacccacatattccaattaatgtttccatcttggctgacttgcttggtggattcagaaagccagaatgttctaacaacttcacaaatacagcatgagagtcaggcccatactttaacatgctactttttccaaatactgcacatgctcctaatgcaaagtggtatagttcaaaagtaatactataaaaagctttaaaaagataacaaaatgctattacctattagtgcctgaaattgcaaaaacatgatgca

SEQ ID NO: 2363 - DNA, 751 bp, Homo sapiens
gttggtgaaaataaatttcgtcccaaactacaacttaaaagaatagacaaataaaaaccatgccctagcattcatttttagaatcatatttcctcagaatttggaggaaagagaatgacaatcccaacagtgtctgtgtcccttactggttaaataattaatggtgaaaataaaataaacacagcattttttccattggaaattaggagctcacaatttatattgatatttataacacaccataaaccttttttgttttcttggtcccctttgcatataattatgacgacccattaaaagtcaataataaatgcctcagattaaaacacttaacatctatgtatgctaattattagagttttaaagaactaaaataataaactgagccaaaaatgagatccatggagagttatacttcataattaaaacatatgaatcctaaatatgctttcttggccaatcrtgtaatctctaagggtataccataaaaatgcgaatgcacccacatattccaattaatgtttccatcttggctgacttgcttggtggattcagaaagccagaatgttctaacaacttcacaaatacagcatgagagtcaggcccatactttaacatgctactttttccaaatactgcacatgctcctaatgcaaagtggtatagttcaaaagtaatactataaaaagctttaaaaagataacaaaatgctattacctattagtgcctgaaattgcaaaaacatgatgca

SEQ ID NO: 2364 - DNA, 1207 bp, Homo sapiens
gaactgttttgttctagaagagatgtccagaataataatgtgaccatatctagcttttagacagataaatctagtggaaatcaagagcaatgattgtcgccagacagcccagcgagtaggttttgtgatagtccaagtgtgatgagcgaaaaagaataaaaaatgaagtagcaagtaaaatggaaacaggatagtaaatttcaaaggattctatgtggaaacattatgacttagcatagaaaaggatggacatggtgggaaacagggcagaattaaagactattctaatgtttgcctatgtattctagtcatgaattgttttgtactataacatttataatgtgtaggtgatctatcttctcaaataccttatattaaaaaagtatmttgtttaaattaaaagtggatcaaattagagatggacaaggcctagcaatagttggaaaaaaggagatggcgacagaacagtgaagcagataagaagatatccaagaagcagataaaaagatatccaaaatttctaggcaacgagaatcagggatgagggaaatacatatgggaagattcagggattttatttcagtcttgaggggtattagatcctcacaaatatctgttcaactatttaaccctggagtatggattcaagacaaaaagataggaatcaagacagataactagaaaggtacaaggcagtgtcttggtcacaagaaagaagacaaaacctactttttggttagaaagtctgagttgactcagtagtactgctgaattggtggtaagctaataaattcttgtccctggctccttctatctgtctagaaacaggctgtatcctaaagtctgcagagagctaaacccatagacacaactcacacctccacagagtcagagaagtgcagaactctaagtgaggcactgcatgagtagaagcttttggaagggaggaaagggaacaactgtttactgcacttctctttctgtgctgggtattgtggccactggtaacaataccgagacatagattttattattcccattttacacacttggaaaactaattagtggtaaattgtcaaaaattgcagagctaataggataagctgggtctgctctgtttaattccaaagccaaaacaaattctgccatcccatgcttgcccccaggagtaatccacaagacctactttaaaatgctcagcacatgc

SEQ ID NO: 2365 - DNA, 2244 bp, Homo sapiens
tgcatgtatctgcaatttctggcaagattaaagttctcaaaaatatttactaaatgggaacaaattataactattattattgtattccttgaacatttttgtctgagcatctcttagtcatagctgaactcaacttttcactggtttctgaaatattatccaccttgacggtcccaatttccttttgaaataaaccatttctgtttcttattatgttttattctcttcccagtcaaaactcttaattccctgtgagtctgtgtttcccattagactgagtcatgtacctggtaagcactccacaaatgcaagtggttgaatgaaggattcaatgttgaatgaatgtatcactttccaacctagaaatagagatagaaaaatggcaagatttatccatcaacaaccttctatggtcctgcagtgaagcttcttctaataatgtctagaatttatttagcaataaatatgggctaatgtcttattataatccttggattcactgtatcaaggaaatccttttttttttttttttccttgagacagagtctcgctctgttgccaggcaggagtgccatggcacgatctcagctcactgcaacctccacctcccgggttcaagtgattctcctgcctcagactcctgagtagctgggaatacaggtgcacaccaccatgcccagctaatttttgtatttttagtagagacggggtttcatcatgttgaccaagacggtctcgatctcttgacctcatgatccacctgccttggccttccaaagtgctgggattacaggcatgagccattgtgcccagccaatgtacttttattatccccatttcatagacgaggaaaccaaaactgaaagagattaaagtattgcccaataacaaccagctagatgacagagctagagtttaaatgtctaggaagtctgccttcagagcctagcccttagccagcatgctataatacctccaagttacaacaaaatgatttcactgtcaatgtaatgcaaaggtacatgcatgtgtttgtatgcacaagtgtgtgaatgctgtgtttcatcataactgaagatattaaaggatccattactccagtatgctgtcgtcattgaatgtaactgaagactccctctatggaagaactagaagatgtattttaactatgtacagacttagagacttcttctgtccataacttattcggagttgtagtttgcaatcctcaatcagcctaaccaatggaaccaccccacctttttagaacttaaaacaccctgactttgctgccttttttcctcctcatcattctgtgaatgtctcttctgttttgtgttctccttcctggcatggtaataaactcaaaaacaactgctcctcctcctccttctccatttctttcttttacgcttttggtggtctttggtttattctttgaaagcagtgctgtgggagactattacagaagtccatttaccaacattgggtcccaaactcyagcttttgaaactgtgcattctttcaacctcagacaaataattagacaaatccaccttcaaaaatatcataaatctatattgattaagacttggggataattacataaattagtgacaggatggcataaaaaattatttaatgtagagttcatgttctatatagaaatgtatgttaatagaaagcaggtcagaggccaggcgcagtggctcacgtctttaatcccagcactttgggaggctgaggcaggaggatcacgaggtcaggagatcgagaccatcctggctaacacggtgctattttatgctctactaaaaaatacaaaacttagccaggcatggtggcacgtgcctgtagtcccagctactggggagactgaggcaggagaatcacttgaacctgggaggtggaggttgaagtaagccaagatcgtgccactgcactccagcctgggtgacagagcgagactctgtctcaaaaaaaaaaaaaaaaaagcagatcactaagactttacttactggagacactttgggagcctgttctgaataataaaggaagattcagatagtttatcaatggtttataagttatttgttctctaaagtgtggtggggctgagcatatttgaaaataagttgttctcttaagtaagcaaagataaactactccaaaattatttcccaacatataacccccaaattatctgggttattccaaccatttgcagaaacaactttttatgca

SEQ ID NO: 2366 - DNA, 2244 bp, Homo sapiens
tgcatgtatctgcaatttctggcaagattaaagttctcaaaaatatttactaaatgggaacaaattataactattattattgtattccttgaacatttttgtctgagcatctcttagtcatagctgaactcaacttttcactggtttctgaaatattatccaccttgacggtcccaatttccttttgaaataaaccatttctgtttcttattatgttttattctcttcccagtcaaaactcttaattccctgtgagtctgtgtttcccattagactgagtcatgtacctggtaagcactccacaaatgcaagtggttgaatgaaggattcaatgttgaatgaatgtatcactttccaacctagaaatagagatagaaaaatggcaagatttatccatcaacaaccttctatggtcctgcagtgaagcttcttctaataatgtctagaatttatttagcaataaatatgggctaatgtcttattataatccttggattcactgtatcaaggaaatccttttttttttttttttccttgagacagagtctcgctctgttgccaggcaggagtgccatggcacgatctcagctcactgcaacctccacctcccgggttcaagtgattctcctgcctcagactcctgagtagctgggaatacaggtgcacaccaccatgcccagctaatttttgtatttttagtagagacggggtttcatcatgttgaccaagacggtctcgatctcttgacctcatgatccacctgccttggccttccaaagtgctgggattacaggcatgagccattgtgcccagccaatgtacttttattatccccatttcatagacgaggaaaccaaaactgaaagagattaaagtattgcccaataacaaccagctagatgacagagctagagtttaaatgtctaggaagtctgccttcagagcctagcccttagccagcatgctataatacctccaagttacaacaaaatgatttcactgtcaatgtaatgcaaaggtacatgcatgtgtttgtatgcacaagtgtgtgaatgctgtgtttcatcataactgaagatattaaaggatccattactccagtatgctgtcgtcattgaatgtaactgaagactccctctatggaagaactagaagatgtattttaactatgtacagacttagagacttcttctgtccataacttattcggagttgtagtttgcaatcctcaatcagcctaaccaatggaaccaccccacctttttagaacttaaaacaccctgactttgctgccttttttcctcctcatcattctgtgaatgtctcttctgttttgtgttctccttcctggcatggtaataaactcaaaaacaactgctcctcctcctccttctccatttctttcttttacgcttttggtggtctttggtttattctttgaaagcagtgctgtgggagactattacagaagtccatttaccaacattgggtcccaaactccagcttttgaaactgtgcattctttcaacctcagacaaataattagacaaatccaccttcaaaaatatcataaatctatattgattaagacttggggataattacataaattagtgacaggatggcataaaaaattatttaatgtagagttcatgttctatatagaaatgtatgttaatagaaagcaggtcagaggccaggcgcagtggctcacgtctttaatcccagcactttgggaggctgaggcaggaggatcacraggtcaggagatcgagaccatcctggctaacacggtgctattttatgctctactaaaaaatacaaaacttagccaggcatggtggcacgtgcctgtagtcccagctactggggagactgaggcaggagaatcacttgaacctgggaggtggaggttgaagtaagccaagatcgtgccactgcactccagcctgggtgacagagcgagactctgtctcaaaaaaaaaaaaaaaaaagcagatcactaagactttacttactggagacactttgggagcctgttctgaataataaaggaagattcagatagtttatcaatggtttataagttatttgttctctaaagtgtggtggggctgagcatatttgaaaataagttgttctcttaagtaagcaaagataaactactccaaaattatttcccaacatataacccccaaattatctgggttattccaaccatttgcagaaacaactttttatgca

SEQ ID NO: 2367 - DNA, 2244 bp, Homo sapiens
tgcatgtatctgcaatttctggcaagattaaagttctcaaaaatatttactaaatgggaacaaattataactattattattgtattccttgaacatttttgtctgagcatctcttagtcatagctgaactcaacttttcactggtttctgaaatattatccaccttgacggtcccaatttccttttgaaataaaccatttctgtttcttattatgttttattctcttcccagtcaaaactcttaattccctgtgagtctgtgtttcccattagactgagtcatgtacctggtaagcactccacaaatgcaagtggttgaatgaaggattcaatgttgaatgaatgtatcactttccaacctagaaatagagatagaaaaatggcaagatttatccatcaacaaccttctatggtcctgcagtgaagcttcttctaataatgtctagaatttatttagcaataaatatgggctaatgtcttattataatccttggattcactgtatcaaggaaatccttttttttttttttttccttgagacagagtctcgctctgttgccaggcaggagtgccatggcacgatctcagctcactgcaacctccacctcccgggttcaagtgattctcctgcctcagactcctgagtagctgggaatacaggtgcacaccaccatgcccagctaatttttgtatttttagtagagacggggtttcatcatgttgaccaagacggtctcgatctcttgacctcatgatccacctgccttggccttccaaagtgctgggattacaggcatgagccattgtgcccagccaatgtacttttattatccccatttcatagacgaggaaaccaaaactgaaagagattaaagtattgcccaataacaaccagctagatgacagagctagagtttaaatgtctaggaagtctgccttcagagcctagcccttagccagcatgctataatacctccaagttacaacaaaatgatttcactgtcaatgtaatgcaaaggtacatgcatgtgtttgtatgcacaagtgtgtgaatgctgtgtttcatcataactgaagatattaaaggatccattactccagtatgctgtcgtcattgaatgtaactgaagactccctctatggaagaactagaagatgtattttaactatgtacagacttagagacttcttctgtccataacttattcggagttgtagtttgcaatcctcaatcagcctaaccaatggaaccaccccacctttttagaacttaaaacaccctgactttgctgccttttttcctcctcatcattctgtgaatgtctcttctgttttgtgttctccttcctggcatggtaataaactcaaaaacaactgctcctcctcctccttctccatttctttcttttacgcttttggtggtctttggtttattctttgaaagcagtgctgtgggagactattacagaagtccatttaccaacattgggtcccaaactccagcttttgaaactgtgcattctttcaacctcagacaaataattagacaaatccaccttcaaaaatatcataaatctatattgattaagacttggggataattacataaattagtgacaggatggcataaaaaattatttaatgtagagttcatgttctatatagaaatgtatgttaatagaaagcaggtcagaggccaggcgcagtggctcacgtctttaatcccagcactttgggaggctgaggcaggaggatcacgaggtcaggagatcgagaccatcctggctaacacggtgctattttatgctctactaaaaaayacaaaacttagccaggcatggtggcacgtgcctgtagtcccagctactggggagactgaggcaggagaatcacttgaacctgggaggtggaggttgaagtaagccaagatcgtgccactgcactccagcctgggtgacagagcgagactctgtctcaaaaaaaaaaaaaaaaaagcagatcactaagactttacttactggagacactttgggagcctgttctgaataataaaggaagattcagatagtttatcaatggtttataagttatttgttctctaaagtgtggtggggctgagcatatttgaaaataagttgttctcttaagtaagcaaagataaactactccaaaattatttcccaacatataacccccaaattatctgggttattccaaccatttgcagaaacaactttttatgca

SEQ ID NO: 2368 - DNA, 1046 bp, Homo sapiens
tcgtcaattcatttytacaagcacttctgtttgggtgcaatcttactctgacggcttaaattggtctaaattgttctatactgcacatgctgaaaacactaatgtattttagtaatctgccttttggggggcaaaattaacaataatttctggctaagccaaaaacagtacaccagcagatgtatttgcctttcaaaaacacaaggtcacctaggtgagatttttggtgtgtctaatgtctaaaagatgtaaagtgaaaatatgtattggtttttcagagacatttggcttaacatactgtattcaatttctcaaaaataatacgaattttatcagaacggaatacctgttgtagaactctgtgtccttactagaacccacaaactaatattttattgcatccaaaatactgaaaaatcatgttttgcagtctgtctgtacataggaaataaaaaagcttttcttcaattcaacataccccaggtaagttacaaggaaaacaaacaaacaaaataaaccacagagtattaagaagggaaaaaagccaatgcgtaaaatgtcttagataacagatcccaaaaatcccacaatcatatttatattcccagaaaaataagttttgctcttaaaaataagtgaggagatacacctaatgttaaatgatgagttaatgggtgcagcacaccaacatggcatatgtgtacatatgtaacaaacctgcacgttatacacatgttccccaaaacttaaagtataataaaaaaaattaaaaaaataaataaaataatgttccacaaaaaaaaaataaaaaaataagtaaggaaaggctggctcaactgcaacagaaattacaataacaaaacaacaatagttaacatgtatcaaacactgagtgcttatttcaggcaatcctcacagtaatcccatgaggtaaatattacagtcctccttccttttctttaaaattattttttattggacaaattcctatatctgcaaaaatatatttttaaggcaggtcagaacaagaaagtactctctcagag

SEQ ID NO: 2369 - DNA, 1356 bp, Homo sapiens
catcttttattctctggttacttttaagattttgttttgctttagttcagttttaccatgatgtgcctatgtgtggttttcattgtattaatctaccttgagctaattgagcttcttttacctgtgggtgacatctttcatttgtcttgggtcattatttcttcaaaaattgcttctacctcactctcactccctccactactgggagtccagttacatgtgttatatatttccattctcttccacatgtcttttatatgctttctgtgcatctcattcttaatcctctctcttagtctggatattatttactgacctaactttaagattactaatcctttctttaatgtgcctattctgttgtaaaattatcatattttaaatttcagtaattacattttttaaaaaaatctaaaattcccttaatttttcatagaatcaaattcactggtaaaatttgtttgtctttattttcttcagcatattaatcagttattttaaagtctgtgtctgatagctctggattacctttaggtctgtttctgttcagtgctttttctcttctgtctcttgatatatctggaaattctaaactgaatgccagacattgtgtttaataagtgttagagactatgaatgatgttatgtctcttcagagagggttttgtttagcatctggataaaggattagggttgatttgaagttatgttttagtccttgtaaggtctagttcacttctgcttcattgtaactatggtgtataatcttgtggagattatgcacctatgtgggccctgaactcctgattatatgcccccgatgtgatgtaaggtcagtaggtctgctaaacttctcagttttttagcagctgattttttttccctgtttctccatatttgatctatttgtcacacacattaataggtggttagatggataaaagtggtatagaagccaaaattatctcagtgattttttttttgtcagtagcatcatgacccttcaagttccatctgccttgctaactcttcagtaccttcaaatatctctgatgctttcaaacagatgtttttattttgtgtttcattttggcattttatctaatttttctagttgttcttagtagcagcactggtctgacaaaagctggcgcattrgagccagaagtggaggatttagggggtcagatctagagacagtgtatatcacattcttctaagacatgaaatacagtcacctgttgtgtccagaaggaaaataaaacgttttagtgaaaaatatagcattttattttcctgttataagcaatcagttgtgggtttactatgtactttgtaggtttcaatcagatcttt

SEQ ID NO: 2370 - DNA, 1235 bp, Homo sapiens
aaagatttctgcattctgtaaaaagtattcttgtatataagcattaaaatgaagacacctgaggaaataacacacttatgtaactcccctctgcacctttcaaagaggtctttttttgtgtatatttattttctgtgtagatctgtattgattgtcttgtgatagtattcaaagtttttcaagcagtttgactgaataaatgaggaaaaaagagggggaataaggacaagtgggtatagtctgtgattctgaaggaaaccagaaggaaactttaaagatttttctctaattttggatgtagaaggaaacagtaccctttacaatttgttattctttgaagctgatagttcagagttttttcccctttttaaattggataatttataaatgaatgcttccaaaggaactttaaaatcaaaagagaaaatatatttcttgaaagttgttttgtcaccagtactttttagcctaaatattttttcaactctggtaattacttgattttaaaattccatatgctaaaagtcaagaatatgcaaatgtccgtgggagaaatgaacatggtgagggtctcttgagggcaataattcagctgcatttctcatggatgtagatcattactttcagttacgcttatatgcctcagttttggtatttgggtgagttgggaaaagagaaaaacagtgctcaccctggctcttctgatcatcgtgtgctatgtctggtggtatgtgcatgcccaatctgactttattcttaggacaaccctgagaagaaggcagatcctcattttacacatggagatgaaaaggcaaagaaaggttagggaacctaccacattcatgacaaatttaaacagtatgactccttcaaactccttccgcgatagcagcagttctcaaattggaataaacattagaataatcagttggagggtttatgaaatacagattgctagaccccatcgtcagactttccgattcaatggatctatggtgaggctgataattggcagttctaattcattcccaggtgatattaatatggctattcaacaccagtgcawaccatacgataggatctctaagcctccatcaaaaatgccctgtcaataaaaagtgaatattcagtgcctgagtgaaataataaaaaccatgtcctgttatactttttgctcctcacattcagatacatgtaccctctgggaatgagacggtttgcctagggttgtcaaa

SEQ ID NO: 2371 - DNA, 1054 bp, Homo sapiens
ctcagccttatggctaagatcaagtgtagaaaatatgcctcaatttctattttcttgagtgtttttatcaggaataggaattgagttttgtttaaaagccccccacccccgcttttttttttttttttttttttttgcgccaagtgtggtggctcatgcctgtaatcccagcacttcgggaggctgaggcagcagaattgcttgagacaaggagtttaagaccaacctaggcaaaatagtgaggccccatttctaacaaatcaaaataaaaatattagccaggtagagtggtacatgcctgtagtcctacctgcttggaagactgaggcagaagaattgcttgagcccaggaggttgaggctgcaatgagctatgattgcaccactgcactccagcctgggtgacagtgagaccctgtctccaaaaaaaatttgtttaataaaataaaattaaaagaattttaaaaagccttttccccaactgaggataatatacaattawtcttcttatatctactaatatagtatttaaattaatagatttcctcatattgaatcatccttgcattccagaaataaatcctacctggtcatggtatattttcttaatgtggtgtttggattctgttttctaatatttactctagcatttttgcattgatattggataatggcttgtagtcttgtttacacattagagtcattttcctccataccacttttaggagaacagtttccatgaaagggagcttgatgataacagaaaagataaagagacaatctaacacagaaatagacctgtcttagggccacataaattaaggggaggttgctgactcctctcttactgactaggtgaccttagagaagttattcctcctcttctgccctcaattttcttgcctatcaattagacgaacctactcaaaagattgtgtgagaataaaatgacaagatgtctatacagacttcagtacaatgcctgacacaatgtaagctcacgtaaacactggtataccctattttattaaaaagaactacttttcttctactgc

SEQ ID NO: 2372 - DNA, 586 bp, Homo sapiens
gatttatggtcaaggttgttttgacccaagggcaggatttaaggtaacagtagataaagtacaaatcttagagtaattcccagaactcgggttaatcagaagtcaacaggtaatcttccatggaattagggtaaaaagaaaaaaaaaagtcagcatggcagattagcatccaagatagagttgctttagcctcaacactgtgcaacactttaaggttccccacctgagagggtgaaggacacaggaaagtaagatcagggactgtaaccactacagatcctggagaggcaaacaagaaaggtctgctgtttagtttacaacacartatctctagtgataaggaatggcagagcgcaggcaggactctggtctgtgattaaatagaaaactttattataaagaacccaggaaatagaaaaggtagaaagactctctctttcttccttccttccttcctttctttctttctctctctccccctcccgcgcttccctctttttccttccttccttcctcccttctttgcttccttccttcttttctttcctttctttctttcttctttctttccatcaccattactaaa

SEQ ID NO: 2373 - DNA, 608 bp, Homo sapiens
gacaaacccttaatacatttgcccatctgggctcctctttccaaagtacctaagtatctagtgaggtgcagtggctcatgcctataaatcccaacattttgggagaccgaggcagaaggatcatttgagcccagkagttcaagaccagcctgggcaacatagggagactcccatctctacaaaaaattaaaaaattagccaggcatggtagcacatgcttgtgcttccagctactcgggaagctgaggtaggaggattgcttgagcccaagaggccaggaggttgaggctgcaatgagccatgatcatgccactgcactcagtttaggaaacagagagagaccttgtctaaaaaaaaaaaaaaaacaaaaacaaaaacaaaaaaaacagttctaagttgtagttgaaatctgcagtaactgtttaatcaatgagcttctaatggtctttttattatgattatcaaatgtctatgcaaacatttcttcctctgaacttcaccctcctgaaaaggggcaactgtgaatgactattccctttctataccagttccaatagcacagtggagaggggagggaaaaataaacacacacatttctaactttccag

SEQ ID NO: 2374 - DNA, 608 bp, Homo sapiens
gacaaacccttaatacatttgcccatctgggctcctctttccaaagtacctaagtatctagtgaggtgcagtggctcatgcctataaatcccaacattttgggagaccgaggcagaaggatcatttgagcccagtagttcaagaccagcctgggcaacatagggagactcccatctctacaaaaaattaaaaaattagccaggcatggtagcacatgcttgtgcttccagctactcgggaagctgaggtaggaggattgcttgagcccaagaggccaggaggttgaggctgcaatgagccatgatcatgccactgcactcagtttaggaaacagagagagaccttgtctaaaaaaaaaaaaaaaamaaaaacaaaaacaaaaaaaacagttctaagttgtagttgaaatctgcagtaactgtttaatcaatgagcttctaatggtctttttattatgattatcaaatgtctatgcaaacatttcttcctctgaacttcaccctcctgaaaaggggcaactgtgaatgactattccctttctataccagttccaatagcacagtggagaggggagggaaaaataaacacacacatttctaactttccag

SEQ ID NO: 2375 - DNA, 1055 bp, Homo sapiens
tgggggaccagggaccccacggagctggagtgaggccagatgaggaccaaggaagctccggggaaagctgtgggcagaacctagggaagcctggacctgtaaaccaggccctgctgctgggcctctcctgcggacagcccagggggcactttacaagcttgtcttgttcaggaaggttgtcctcgcccagcccctagtggcagagccagatgcacccaggaccatccatctggaggcccaggcttccccgcccacactgctgtgtctcagggctcgtagggtggcccaggtgcgagaagggcagcacccttgccctggggatcaggaattgtaaccccatctctgtgccgcctttcccagccttgaggcctgggggaagataggagaacaggaatggcccagagagggcagagatggggttgccacggggcagagggtcaccagagtcaggaagggaccacagacagctggtaccatcccacagatggcgactggtcctcccacgcaaccgcaggagcccctcagcagggctggcactcaccactgtcctgggtctgcgtgcttttgcctgcgctccctcccgcttgcctcactcacccagcctgggagaagactcacttttggctatagctggtggggggactgtgctgggctgagcaggccagaggggccgggtgacccttcggggtccctgtctggggctatacagccccagcccagtcacggcccctcctggcagtcgctgcaaagtggtggggccagaagcggatcgactacgccctgtactgccctgacgccctcacggccttccccacggtggctctgcctcacctcttccacgccagctactgggagtcaacagacgtggtctcctttctgctgagacaggtacccggggcctgggrcctcccaggagggccctgagtgacaacacccatgacagggccacatttcacagacgaggggacagtggggactcctctccaaccccatcagatcacagagcaagcaagatgagggcacctttatgctcgggtgtattcaggcttttcagg

SEQ ID NO: 2376 - DNA, 582 bp, Homo sapiens
tgaaattcaatcaaggagtgaatgctttgaaagctgtaccatttttgcaccaggaaattccctaagaaaataaaaagtaatcaaggaggtcgggcattgtggctcacgcctgtaatcccagcacttcgggaggccgaggcaggyggatcacaaggtcaggagatcgagaccatcgtggctaacacggtgaaaccctgtctctactaaaaatacaaaaaattagccgggcatggtggcgggcgcctgtagtcccagctacttgggaggctgaggcaggacaacggcgtgaacccaggaggcagagcttgcaatgagcccagaacacgccactgcaccccagcctgggcgacagagcaaggctctgtctcagaaaaaataaaataaaataaataatcaaggaattggggaatatgagtactagttattgatatattagtttttagaaacatatgatgcttattattttactctactatttttaagtttttatgggcacattttttaaaatcattgctatatctcatatgtactactttgggatcagaacacaaaaaagctggaaaaattcctttaaattacttt

SEQ ID NO: 2377 - DNA, 538 bp, Homo sapiens
tgatgggggactatgtctgggtgtgggagtatggaactccctcttgaaagtctgcatgtgagatttaagattccaccaatcttcttgagggtgaaggtggtgacatgggttgggcacctgctggtgaaatgaaggaggtgagcactggaccagaaggaatggtattaagaaaacactcctgttccttcaggccccttgagmagcgggagccatggagtgattccctagcaggcccccttggccccctcccccccaacccaggccaccggattcgtgcttctgtgtaggactggctggttatgtggagagggttagtgaaaaaagagttggtgatgagtttgatgcccaaagaaccctcttagatgagacgagctcgggaatgtgctctgagatgtcagacaaagaggagatttctttatcaatgtttgtctttcttatcagtcttatctttttgtgttgtgatgaggtgagaaaaagcctaaagggaggtttcccttgagggagagctgcctggtgaaattggcacaccctagttaga

SEQ ID NO: 2378 - DNA, 538 bp, Homo sapiens
tgatgggggactatgtctgggtgtgggagtatggaactccctcttgaaagtctgcatgtgagatttaagattccaccaatcttcttgagggtgaaggtggtgacatgggttgggcacctgctggtgaaatgaaggaggtgagcactggaccagaaggaatggtattaagaaaacactcctgttccttcaggccccttgagaagcgggagccatggagtgattccctagcaggcccccttggccccctcccccccaacccaggccaccggattcstgcttctgtgtaggactggctggttatgtggagagggttagtgaaaaaagagttggtgatgagtttgatgcccaaagaaccctcttagatgagacgagctcgggaatgtgctctgagatgtcagacaaagaggagatttctttatcaatgtttgtctttcttatcagtcttatctttttgtgttgtgatgaggtgagaaaaagcctaaagggaggtttcccttgagggagagctgcctggtgaaattggcacaccctagttaga

SEQ ID NO: 2379 - DNA, 706 bp, Homo sapiens
ggtgtagcatggtctttccatgttgtggatgtaacataactgctttccgtttgttaaacactgtatcagtcggggtctcagtagaagataggtggcacacccaaattaggataaatagaagagttttttgttttttttttaatagggacagtttacaaaggtgtagttagggtgaaaggaaaccaccwagatggtgcgtcttcagtgcagtgactgtaaagcacccctagacctaacagccaggggaggggggagatttctgaaaccctgaggatcatttggtagaacggatgctttgagagactggttgaggaaagcagccatcccaactgaccttgcagaggagttaggagaataaatgctccaagcttatgttcctgtcttcctcaaatctttctctgtttttctgctgtgctccccactggctggacgctactagaaaccagcaagcaatagagtctccatgcagtccatagaggtcagctttccagggcaaggagctgggaggaagcgaatatgaaggggcacacaggatatccagcacagacagtccatataaagttatttttaagggcgttttgacaggaagcactggataagcaactatacatacaggataataaagtaagtggtggggatagggctggaattgggaaactgggaattagtgacatcgtttaggtaaattttgatgtttgtggatgca

SEQ ID NO: 2380 - DNA, 706 bp, Homo sapiens
ggtgtagcatggtctttccatgttgtggatgtaacataactgctttccgtttgttaaacactgtatcagtcggggtctcagtagaagataggtggcacacccaaattaggataaatagaagagttttttgttttttttttaatagggacagtttacaaaggtgtagttagggtgaaaggaaaccacctagatggtgcgtcttcagtgcagtgactgtaaagcacccctagacctaacagccaggggaggggggagatttctgaaaccctgaggatcatttggtagaacggatgctttgagagactggttgaggaaagcagccatcccaactgaccttgcagaggagttaggagaataaatgctccaagcttatgttcctgtcttcctcaaatctttctctgtttttctgctgtgctccccaytggctggacgctactagaaaccagcaagcaatagagtctccatgcagtccatagaggtcagctttccagggcaaggagctgggaggaagcgaatatgaaggggcacacaggatatccagcacagacagtccatataaagttatttttaagggcgttttgacaggaagcactggataagcaactatacatacaggataataaagtaagtggtggggatagggctggaattgggaaactgggaattagtgacatcgtttaggtaaattttgatgtttgtggatgca

SEQ ID NO: 2381 - DNA, 706 bp, Homo sapiens
ggtgtagcatggtctttccatgttgtggatgtaacataactgctttccgtttgttaaacactgtatcagtcggggtctcagtagaagataggtggcacacccaaattaggataaatagaagagttttttgttttttttttaatagggacagtttacaaaggtgtagttagggtgaaaggaaaccacctagatggtgcgtcttcagtgcagtgactgtaaagcacccctagacctaacagccaggggaggggggagatttctgaaaccctgaggatcatttggtagaacggatgctttgagagactggttgaggaaagcagccatcccaactgaccttgcagaggagttaggagaataaatgctccaagcttatgttcctgtcttcctcaaatctttctctgtttttctgctgtgctccccactggctggacgctactagaaaccagcaagcaatagagtctccatgcagtccatagaggtcagctttccagggcaaggagctgggaggaagcgaatatgaaggggcacacaggatatccagcacagacagtccatataaagttatttttaagggckttttgacaggaagcactggataagcaactatacatacaggataataaagtaagtggtggggatagggctggaattgggaaactgggaattagtgacatcgtttaggtaaattttgatgtttgtggatgca

SEQ ID NO: 2382 - DNA, 706 bp, Homo sapiens
ggtgtagcatggtctttccatgttgtggatgtaacataactgctttccgtttgttaaacactgtatcagtcggggtctcagtagaagataggtggcacacccaaattaggataaatagaagagttttttgttttttttttaatagggacagtttacaaaggtgtagttagggtgaaaggaaaccacctagatggtgcgtcttcagtgcagtgactgtaaagcacccctagacctaacagccaggggaggggggagatttctgaaaccctgaggatcatttggtagaacggatgctttgagagactggttgaggaaagcagccatcccaactgaccttgcagaggagttaggagaataaatgctccaagcttatgttcctgtcttcctcaaatctttctctgtttttctgctgtgctccccactggctggacgctactagaaaccagcaagcaatagagtctccatgcagtccatagaggtcagctttccagggcaaggagctgggaggaagcgaatatgaaggggcacacaggatatccagcacagacagtccatataaagttatttttaagggcgttttgacaggaagcactggataagcaactatacatacaggataataaagtaagtggtggggatagggcyggaattgggaaactgggaattagtgacatcgtttaggtaaattttgatgtttgtggatgca

SEQ ID NO: 2383 - DNA, 634 bp, Homo sapiens
attcaatttaaaaaattatacctcttacaagagagatagaaaatataacaagagagtacatgttggggtgaaagaaaatagaaaaataaaagtggggacaaagttgctgggaatgtgactgaaaacatacaatataatgctggaggtaggtcctgtttcctatcagtcaaaggtgaaaaaacaggagccttctctcttacaaaatgtattgttcagaagataaaacgcaaatcaatcgctcataagcagtaaatctatatttggtatcaagaccagacagaaatttctccccatgcgttctcattaagaggaaattgagtaaagtcrtgaacacccttgcaaacattattacagtattaacaataaagagcttcttaggaatctttcttataatgaccctcagtctggccaatgacatcatagcaacaaagtgaaatacattaagaacaattcctcaggtggggaccagagcaaactctggtttagaccccaagaaactcatccagtagaagggctgagggatcaaccctcaaagtaggtgctgttccaaatcaatgctctaggggtctggaagctcaggtgtggaagtgaggatcagatatggtaggtctggcctgcttttagtcttttttca

SEQ ID NO: 2384 - DNA, 626 bp, Homo sapiens
ctgaattcttttaaaagagttatacagaatccccaattgtctccctgagtatctttcaaagtaatctcctataaaccctccatgatgctaacgaaataaagtgccatttttatttaggtgccatagttaccactgtttacaagattagcaccaatgagtttatttgtagaggaaaaattgcattttgtaaagaaacccagagtagttcctgcttttcattttaactaaggtatttcagtgttcggattttcttgcttagtcagmatctcttttccctggcttgggatatagaatatcagcaatgtttaaatgctaagatggctaaagtattcaaccttttgcaaaactaggtgtataagcaacctcttatccttgctcctaaaacaagcaaagatccatttgggaaatcaagtatgatcacttttcatttgcttctttatgaacctcacaattatgtccctctctccctggagataaaattaagaacttctttttattattttttattttactttaagttctaggatacatgtgcagaatgtgcaggtttgttacataggtatacatgtgccatgatggtttgctacacctaccaacccatcatctaggttttaacctcctcatgc

SEQ ID NO: 2385 - DNA, 1158 bp, Homo sapiens
  misc_feature (1)...(1158): n = A,T,C or G
gtggaattatatactttcttaagaaattgagcaattataattgtttcagcttaggcccaaaagtccaagacttttagggtattttttttttaatgtttgaatggtcaaatattacacattttctctagtaagcttgattaatctctggcagattaaggtatcacacaaaatttcatctttttttttttttttttttttttgagacagggkctcatttagtcacccaggctggagtgcagtggcatgatcatggctcactgcagcctcaacctcctggcctcaagccattctgccacctcagtccctcaagtagctggaatcacaagcttgtgccaccacacccagctaatttttttattttttgtagagatgaggtctcactatgttgtccaagctggtattgaactcctacactcaagagatcctcctgcctcagcttcccaaagtgctgagattacaggcctaagccactatgcctggcccaaagtttcatctttatgtgcagctgtaactggcacatttatttactactttaaacatacttaatgtttattctggttagggggatgatgactacaaattcatgaagtttatgatattttgctaaaattgtctcactatggtgcatctgagaaaatgtcctaccatattaactaaaaaggctacgtttatatgctattactgatatatactagatagtagcaaagaactttcaatcaaattaaggttgaatttaacacaatctactatttcacaatcatgtcaaagaagacttagtttggacccagccctctcacagatttcctgcagtggcagttaactaaactaggcaaataaattacttaatttaattaaatcactactgggtcactgtcacgttcatcacagctaaaagaaaataattcaaaatgcaaaaagaaattgcatttttaaaaatgtgagatgaatcctagcaatacaatgttaaatgagagacaacaagtccaaacattacacacagcaaaatgccttttaaaaaaggtaaaaacaacaaagaagtacatatttcttaaggaatnnnnnnnnnnnnnnnnnnnnnnnnnnnnnnnnnnnnnnnnnnnnnnnnnnnnnnnnnnnnnnnnnnnnnnnnnnnnnnnnnnnnnnnnnnnnnnnnnnnnc

SEQ ID NO: 2386 - DNA, 1047 bp, Homo sapiens
tgggagaaagatttatattcctttgggcatcatgaggccaggagatcaagaccatcctggctacacagtgaaccccgtctctataaaaaacaaaaaattagccgggcgtggtggcgggcgcctgtagtcccagctactccggaggctgaggcaggagaatggcatgaacctgggaggcagagcttgcagtgagccgagattgcgccattgcactccagcctgggtgacagagtgagagactccatctcaaaaaaaaaaaaaaaaaacacacacacacacaccaaaaaaaaaaaaccaaaacaaaaactaacaatcaccataatatccatagaattcagaaaaaaattcaatttggtttttcacggataaaaaatgtaaaatggtattgggcagtaatttggctgtaacatataacttgggtgatagtcttttaagtgattttggatcactgattttttggaattcggcatagtaacactactactgaatagtctatggtgatccattttcaaccctctcttatgttggtagattattcagaggatcargacaggaggcaagccaaagtcatattaaaatttaacattataaattatataacaaaaatttttgacctcattaacctgtgactaaaaagtaaattcacttttatttctcaagtcctgacagctgggctcattgagtagactgccgatttttcattttcttgctgtttttctgtcaccaagtaatttctaagaaacactgtaagtatttatacattccacaaatttatcctggtgtttatttgacatatccaccaactttcctcgaaaactcagaaccgctgaggcgcaagaactttgccactctcctctttcagtcttaagaaaaaacagactgtgggtctttggaataatttgctgaattcctacagaaaacaaaagtgtattacagtgcagaaaatggaaatgttaagctagatattagctatcactgcttctacagcccttaggccatgtgcttccctagaagagcctcttcgtcttctctctttaacttctagcc

SEQ ID NO: 2387 - DNA, 2845 bp, Homo sapiens
tagtcagcaaacagagatggtctttcctttctactcctctccattgtctttccagtgaggtcagcatctacatgtgtaacgcatccagcaccagccgtcagaccaccggcatcctcaccttgaataatattttcctccatcctgcctcacaactcgcatccaaggcaaacatggacatacaccacctctgaaatcttcatctgaaacatccaactctgactcacctccctcctgtcctacagtattttcttccaccacttcccaacaattcctcagtcttcctgagatccctaatccttcgttctcactcccgtccaccatcacgtgtcctgtccttttacatttggcagatttctattcatctttttagtctttgcttaaacaaaactttagcagcaataatactgcacctttagattggatgtgatctcccttgtaaataaactttcctaatactcttaattttttcccatcttcaacctaatcagtctttaagacaatcgcttatttattgtcttccccagtagaggaaatagtaatcaagggaaaggaaatcacagccactcatttgttgctgtgttcctagagtgcttggctgataaccgatgcttgaaaactgtttaatgaattaacaacaacaaaagagaaaacccaatttgctcaaggcacagggaatatttgtagaaggagggagaatccaggatacagactcagattggtgccattttctagagtacttgagcattaggtaatgggaaacattggggtctttaaagatgaagacgctctccaaatactcattttttttcaataattagtacagctgattattaaaagtgtttatacgtttattgcaggaaatctgaaaaaacttagtgaagtaaaaagaaaaatcacccatttctgtagtactgctaacatttgatgcatttttttctacaaattttctagacatttggtttacatagtggcaataatacagtgcattcagacttggactctaatctgtttcctctcaacgctgtaacctaagcactyttttctcatcacgtaaaattttttagtaaacttacgtaatgactacttaacattaaatcattttaccattacacagtatacttatcattttcccatttttaaaaacttaagttttacccataaatgttttattgaaaatattacatagatcaagcacacaaatcttttctctatgaaactgacaaatgtctactcttacatagctaccacgcagatcaagtatttgacacagcagcatcccaaagtctcctatatgtcccttctcaggcaatacccccaaaggtaattatcattctgacttttagcaccataaattcgtttcgccagtttctgaacttcacagccctttttgcctgacttctttcgcccaatgttatgtctttgaaattcatccaagcttttgtataagtagtttattcattttcatttcttcaaagtattttcatatatatatgtgtgtatacacatacacatataagcacacatttatatgtactacactccatccaagccacggaaggacacttgggttatttctaccttgcagctattaaattcagttcctgttattagccatgcttcagtctagtcatactgttagcataaaacacctcttaatgaaatgagctgcagaaatctaccaaggatgtggaaaactgttttcttttgaacatgccttagttgttctgcactctgcaaaaaattcattttctgatgttagagctagacaaccaactctaaatcaatttctgcttatctattatttactcctagtgtcaaatgtgtgagttattgaaaagcaactaaatataaaagaaaaacatccccctgaaaattgggagggaggggtaacaatataccagaactgtaagcaggacagagacatgaaaggtccaaagcaaatatgcattttgcccaagtgacggcactttgacagtatactaggcttgagtgatactatgcttcaattctaagttagaggcacaggttgtagaatctgaaaaacctggaactgattcctggattatttccttctgtatggtcttagaaaactactttacctcagctcctcattttaaaaacagggccagtaatataaatatcagcatgagtaaatgtattctggcatatcattagatttcaataaatattattttttatactgatgaatggccaccaatatgccatacagtttagcttagaagacccaaataagtttaaattcaggtgcaatatttcccaaatataatcttaaaataaattccctaaaaacaagaacagcagacttgctgcagcagaatcagtctgatccaactctggcactgtacatttatgtcagtatcatgtttaattacagtgaatcataactatagcaacagtatatttttgtattctgttttagtgtacacaaaggcttttaaaatcaaatctcattcagtccttccgatacctgcggggatctgtcccttcctctatgcaagttatcaatttattgtgtctcagttcaaatccatccttcattacctacttggcaacaatggccttgaaccctttaagtctctgttctttgcagcaaacacaatattaagctttgtcactagagggtgctggaggaagtggtttctctccctgcttccagtttacttctatattgattttcttgttatttgttttggatggccgtcagcagctaatttgtgaggggaatactcacaaattgtggtgctcacagacccagaatgtgaagccccttggtaagcttgcgtccccagtttcagctcagtgatcatcttgccatggatctccc

SEQ ID NO: 2388 - DNA, 601 bp, Homo sapiens
  misc_feature (1)...(601): n = A,T,C or G
aaacaaatgaattttgtctttagacttgggtcccatttttgaggtatctccgtatatatatgcaaatattccaaaatctgaaaaaaatcaaaatctgaaacacttctggtcccaagcatttcagataagggatacccaataatttccatccttcatgattctaagtttataatttgtggcttttagctgacaattagagaaggatttatgtgtgggtccttaaattattggatacaggcaacaactcacgtgcatcttaagatgctgattcagtagacttcygttatagtgtcattatgctaattcagagatctatatgtgatttccctccataacaactgtcaagtacacacttactcattacccaacaaaggttatcttatgtggcacatccaatctgaagcccttatggaatggttcgtttgtttgtttggttggttggtttgagatgggagtnttactctttctcccaggctgagatgcatggggcgatcttggctcactgcaacctctgcctctggtttcaagcaaccttcttgctcagcctcccagataggtgggatattcccacccacaccaagcccagcttatttttgatttt

SEQ ID NO: 2389 - DNA, 629 bp, Homo sapiens
gtgaaaaaataacatgtacctcataaatatgtacaaatattatgtgtcaataaaaagttaaaacacaacaaacaaaactccagctcttattcttatagttgttcctgtaaatgcaaggtgttattttgtcccccctctaacttctttcrctttcggtagtgttactaacaaaacccaggtattcttttctttgtatttatcctacttggggtttgtatagcttcttaaatcagtgccttgatgtatttgatctgatatatagaattctttgccagtatctcttcaagtattactactgtttctgttatctcttattctgctgtatctgctgttaaactatgtattgagtcaacgatttcagttattacatttttagttctaaaattcctatttcattgtttcctatagattccagttcataagtgaaatttcccatcttgtcacctattttctgaatatatttggcatagtaattttaaacctatgtctaatagtgccaatatttatttttatctatgggcctgtttctagtgtatttatatattttttctttgtggttttaatattgcattcttttcacaactggtaatttttaacctggtgccagacattgtccatggtaaatttta

SEQ ID NO: 2390 - DNA, 604 bp, Homo sapiens
tttgggaggctggggcaggaggatcgcttgagctcaggagcctgagaccaccctgggcaacatagagagacccccatctcaaaaaatagtaataaggccaggcacggtggctgacgcctgtaatcccagcactttgggaggctggggcaggaggatcgcttgagctcaggagcttgagaccaccctgggcaacatagtgagacccccatctcaaaaaatagtaataaggccaggcacggtggctgacgcctgtaatctcagcactttgagaggctgaggcaggcagattgtccgaggttaggagttttagaccaacctggccaatatagcgaaaccccgtctctagtaataatacaaaaattagctgggcgtggtggtgcatgcttgtaatcccagctacttgggaggctgaggcagagagaattgcttgaasccgggaggtggaggttgcagtgagcagagatcgcgccactgcactccagcctgggcaacagagcgagactctgtctgaaaatagtaataataaaataaaatgtcaatgtagtatatattacagttcctgcccccacccttgccccgttctaccagtaaggcaatggggacc

SEQ ID NO: 2391 - DNA, 601 bp, Homo sapiens
gaaaggggaagagagagagaaagggagatggagagagaggagggaaaggaagggggagagaggagagaagaggagaggagagamgagaagagaaaaaagaaagaaaagaagagaggaaacatgacggacgctagagctcgcgagagcgcctgggtctgctctgcgcgcagggtgccgggctcaggacgcctaggcgtccaagctgtgttccccaccgcgccccactccgcccaaggggagagccccacggaccattgtggcttgcacaaaacccgcgccccaagagcctctgccaggccgctgggacttgattcatttcttgactaattaactggaagctatgtcgccccttctttcagggcccaattaattcgccgcgggcggtggggcggaggctgtgccgcggaggcgcccgcctggagcccctttgtgaagggctgtctgggccgtattgattctagacacacatgcgtgcgcatacacacacacacacgcacacacactcacacacacgcgcgcgcgcgcgcgcactttcccctcgttccttcgtactgaaaaaagagggggcggtaaagatctggatttccagagtttaagaagg

SEQ ID NO: 2392 - DNA, 601 bp, Homo sapiens
gaaaggggaagagagagagaaagggagatggagagagaggagggaaaggaagggggagagaggagagaagaggagaggagagaagagaagagaaaaaagaaagaaaagaagagaggaaacatgacggacgctagagctcgcgagagcgcctgggtctgctctgcgcgcagggtgccgggctcaggacgcctaggcgtccaagctgtgttccccaccgcgccccactccgcccaaggggagagccccacggaccattgtggcttgcacaaaacccgcgccccaagagcctctgccaggccgctgggacttgattcatttcttgactaattaactggaagctatgtcgccccttctttcagggcccaattaattcgccgcgggcggtggggcggaggctgtgccgcggaggcgcccgcctggagcccctttgtgaagggctgtctgggccgtattgattctagacacacatgcgtgcgcatacacacacacacacgcacacacactcacacacacrcgcgcgcgcgcgcgcactttcccctcgttccttcgtactgaaaaaagagggggcggtaaagatctggatttccagagtttaagaagg

SEQ ID NO: 2393 - DNA, 563 bp, Homo sapiens
ggaacccattgactggtctgccctcatctccgatccttggctgaaaagcctaacaagccattatctgtccgtactgaaacactcctcctgatgtcaagaaccttctaaacataaaaccacctggtgcacggatcatttcttcttccaagatgtatctgccattgagagaaagaacaaatactagcttcagctttgtttgtaayactcatttgcaggaaggcaaacatgattatatatgatttaaatggaataaatgtatagtaaggagaacaaatgagtttatttgtgattctttgctagatactgttggagataactacagtaagaaaaaatatatataataacagtggtttaaaccagccagaagccttttttctctgtcaggcaaaagtccaggaatagttcaatattaaggttctgctctatgaaaagcttagctcatggcaccatcatttcctaggttgtagctccttgttcaagatggtctctagctgtcatatccacctccgtgcagcagaatagaggaagcggggagaagggataaggggcaaccaggagtcaag

SEQ ID NO: 2394 - DNA, 604 bp, Homo sapiens
caaaaatctaaaagcaggactagggtcagaaaactgggatggtcatggatgttcagacattacaggaggagaytccatgaaaattgagcgtctgctggggtcatccttccacctgaggctcagcacactctgctaggaatgctgttggaggagaaggtggaattcctaaggagcaagaggcaccatatgacaatgattaagagattgagctctggaatcagacgtttatgaacataactgtaataaagtgtgatgaaccttccaagagggaagctccaagatccaagacataagagactatgttcttacaggtggacctcccctcacctaagggttcagggaagtcctccttcaaaagccttgcaaattgcttactgcacaactgaggggttaatgtgggctgaaatccaatctgtgttccactaaagctgtgcacgttgactcaaagccgtgtgctccccagaaggagctcttttcctcattcacccgaaggcctacagttcacccagacatgccctgcaattaaggacatctgaaagctcaaagataagtagatgttttccaggccaagtttaggccacagggaccaaggaggggaacagca

SEQ ID NO: 2395 - DNA, 604 bp, Homo sapiens
caaaaatctaaaagcaggactagggtcagaaaactgggatggtcatggatgttcagacattacaggaggagactccatgaaaattgagcgtctgctggggtcatccttccacctgaggctcagcacactctgctaggaatgctgttggaggagaaggtggaattcctaaggagcaagaggcaccatatgacaatgattaagagattgagctctggaatcagacgtttatgaacataactgtaataaagtgtgatgaaccttccaagrgggaagctccaagatccaagacataagagactatgttcttacaggtggacctcccctcacctaagggttcagggaagtcctccttcaaaagccttgcaaattgcttactgcacaactgaggggttaatgtgggctgaaatccaatctgtgttccactaaagctgtgcacgttgactcaaagccgtgtgctccccagaaggagctcttttcctcattcacccgaaggcctacagttcacccagacatgccctgcaattaaggacatctgaaagctcaaagataagtagatgttttccaggccaagtttaggccacagggaccaaggaggggaacagca

SEQ ID NO: 2396 - DNA, 604 bp, Homo sapiens
caaaaatctaaaagcaggactagggtcagaaaactgggatggtcatggatgttcagacattacaggaggagactccatgaaaattgagcgtctgctggggtcatccttccacctgaggctcagcacactctgctaggaatgctgttggaggagaaggtggaattcctaaggagcaagaggcaccatatgacaatgattaagagattgagctctggaatcagacgtttatgaacataactgtaataaagtgtgatgaaccttccaagagggaagctccaagatccaagacataagagactatgttcttacaggtggacctcccctcacctaagggttcagggaagtcctccttcaaaagccttgcaaattgcttactgcacaactgaggggttaatgtgggctgaaatccaatctgtgttccactaaagctgtgcacrttgactcaaagccgtgtgctccccagaaggagctcttttcctcattcacccgaaggcctacagttcacccagacatgccctgcaattaaggacatctgaaagctcaaagataagtagatgttttccaggccaagtttaggccacagggaccaaggaggggaacagca

SEQ ID NO: 2397 - DNA, 604 bp, Homo sapiens
caaaaatctaaaagcaggactagggtcagaaaactgggatggtcatggatgttcagacattacaggaggagactccatgaaaattgagcgtctgctggggtcatccttccacctgaggctcagcacactctgctaggaatgctgttggaggagaaggtggaattcctaaggagcaagaggcaccatatgacaatgattaagagattgagctctggaatcagacgtttatgaacataactgtaataaagtgtgatgaaccttccaagagggaagctccaagatccaagacataagagactatgttcttacaggtggacctcccctcacctaagggttcagggaagtcctccttcaaaagccttgcaaattgcttactgcacaactgaggggttaatgtgggctgaaatccaatctgtgttccactaaagctgtgcacgttgactcaaagccgtgtgctccccagaaggagctcttttcctcattcacccgaaggcctacagttcacccagacatgccctgcarttaaggacatctgaaagctcaaagataagtagatgttttccaggccaagtttaggccacagggaccaaggaggggaacagca

SEQ ID NO: 2398 - DNA, 2257 bp, Homo sapiens
cctaaggtttcccaaaagagaagggaaagccttcctatttccaaggtgggaatgttcttcaacgctctcctgacctttctccagtttcctcctttctcacctttctttaaacccttttcactttttcttctcttttcacctgcaagtctattgacaggtaagtgagagaagagaaaagaaaaagctagtatttattaagcacctgcaatctgtcaaaaattttcattagtggtatattataacccccctgaattagcttttgctatgttatacactaacatgcaattgtcaaatttcagtggcatacaaaaacaaagattgatttctaggtcatgccacatgtaggcagctgggttctgcttcccatttctagactcaggctgaaggcacagttgccattgggaacatgccatttttatggaaaagataaaaacaagcaacaagatcactcttaaatatctgcatgaatataatatatgtcctttctttcttacatttttgacaaatgcaagtcaaagtgagcccaatatcagtggagtagtaaatattgacctcccatagaaagtagtgctctaggccaggcgtggtggctcacacctgtaatcccagcactttgggagaccaaggcgggcggatcacgaggtcagcagtttgagaccagcctgaccaacatggtgaaaccccgtctctactaaaaatacaaaaatcagccaggcatggtggcragcgcctgtaatcccagctactcaggaggctgaggcaggagaatcacttgaacctgggaggcagagattgcagtgagccaagatcgcgccattgcactccagcctcggcgacagagcgagactccatctcacacacatacacacacacacacacacacacacacacacacacacacaagtagtggtctaactcacagggcattggatggtgcatgcatatatttttacagcaaaatagaagtgaatctttataaaaaaatataatctatcgcaataccctttttatataggggaaacatgaggctcagaggttaaattaactgtccaagagtagtgcatctagtggacgactcatttaagattgtagtcaagttttttctaattctacagccactgttcttggatttgcatagccaagttgaagagaggggagacagacttagttctctcttctattattttttaatctttcattccaaatattttctaaaacatcacgtcaccttaaggatctaggaataatctttgatttaatcctcttcattttttcatattaaataaaactctacattgtctaatgcttaataatgatacaattttttgagcacttaacttgtgccaaacactatttcaaactctcttcacatactgttttatttaattttgaaccataagttttgtggtaggcatcatatcactttaaagacaaagggctacacatagtggctcatccatgtaatcctagagctttgggaggccaaggtaagaggattgcttgaggccgggagtttgaggccagcctgggcaataatagcaaggccttgtctctagaaaaaataaaaattagtagggcatggtgacatgcccctgtagtcctagctactcaggaggctgagacaggaggattgcttgagcccaggagttcaaagttgcagtgaagtatgattgtgtaacctgggcaacaaagcaagaacttatctcaataaaaaaggataaaaacattgaggaaaaaatctcaataacttgcctaaaatgactgactgggagtgaagtagagctggtttttaatccatatctgatgttaacacttgtgcttctatgctctgcatcattctgctttctaatgaaaatctctgttttaaatatatcctacacttctctcttctcgtctccagcttctattgcctatgtttagtttttatcttgttaagcctaaatttctgctgttgctttctagttagatttcactcatgaaaccaacctatataccaagactagactaattcttaaactctgccttgatcacttttgtgtgcagaagacattcattgctctcccttcttcctactttcatccttccctcatataaactccttcatctgatttccaaggacacccagagtgcaaattattcttatttcccactagtcctcaaagtgtaccatttacctggttgtcccttattgattcaaccttgctttatttacatttttccccttactggaaactagatcaagaactttacgggagca

SEQ ID NO: 2399 - DNA, 2257 bp, Homo sapiens
cctaaggtttcccaaaagagaagggaaagccttcctatttccaaggtgggaatgttcttcaacgctctcctgacctttctccagtttcctcctttctcacctttctttaaacccttttcactttttcttctcttttcacctgcaagtctattgacaggtaagtgagagaagagaaaagaaaaagctagtatttattaagcacctgcaatctgtcaaaaattttcattagtggtatattataacccccctgaattagcttttgctatgttatacactaacatgcaattgtcaaatttcagtggcatacaaaaacaaagattgatttctaggtcatgccacatgtaggcagctgggttctgcttcccatttctagactcaggctgaaggcacagttgccattgggaacatgccatttttatggaaaagataaaaacaagcaacaagatcactcttaaatatctgcatgaatataatatatgtcctttctttcttacatttttgacaaatgcaagtcaaagtgagcccaatatcagtggagtagtaaatattgacctcccatagaaagtagtgctctaggccaggcgtggtggctcacacctgtaatcccagcactttgggagaccaaggcgggcggatcacgaggtcagcagtttgagaccagcctgaccaacatggtgaaaccccgtctctactaaaaatacaaaaatcagccaggcatggtggcgagygcctgtaatcccagctactcaggaggctgaggcaggagaatcacttgaacctgggaggcagagattgcagtgagccaagatcgcgccattgcactccagcctcggcgacagagcgagactccatctcacacacatacacacacacacacacacacacacacacacacacacacaagtagtggtctaactcacagggcattggatggtgcatgcatatatttttacagcaaaatagaagtgaatctttataaaaaaatataatctatcgcaataccctttttatataggggaaacatgaggctcagaggttaaattaactgtccaagagtagtgcatctagtggacgactcatttaagattgtagtcaagttttttctaattctacagccactgttcttggatttgcatagccaagttgaagagaggggagacagacttagttctctcttctattattttttaatctttcattccaaatattttctaaaacatcacgtcaccttaaggatctaggaataatctttgatttaatcctcttcattttttcatattaaataaaactctacattgtctaatgcttaataatgatacaattttttgagcacttaacttgtgccaaacactatttcaaactctcttcacatactgttttatttaattttgaaccataagttttgtggtaggcatcatatcactttaaagacaaagggctacacatagtggctcatccatgtaatcctagagctttgggaggccaaggtaagaggattgcttgaggccgggagtttgaggccagcctgggcaataatagcaaggccttgtctctagaaaaaataaaaattagtagggcatggtgacatgcccctgtagtcctagctactcaggaggctgagacaggaggattgcttgagcccaggagttcaaagttgcagtgaagtatgattgtgtaacctgggcaacaaagcaagaacttatctcaataaaaaaggataaaaacattgaggaaaaaatctcaataacttgcctaaaatgactgactgggagtgaagtagagctggtttttaatccatatctgatgttaacacttgtgcttctatgctctgcatcattctgctttctaatgaaaatctctgttttaaatatatcctacacttctctcttctcgtctccagcttctattgcctatgtttagtttttatcttgttaagcctaaatttctgctgttgctttctagttagatttcactcatgaaaccaacctatataccaagactagactaattcttaaactctgccttgatcacttttgtgtgcagaagacattcattgctctcccttcttcctactttcatccttccctcatataaactccttcatctgatttccaaggacacccagagtgcaaattattcttatttcccactagtcctcaaagtgtaccatttacctggttgtcccttattgattcaaccttgctttatttacatttttccccttactggaaactagatcaagaactttacgggagca

SEQ ID NO: 2400 - DNA, 2257 bp, Homo sapiens
cctaaggtttcccaaaagagaagggaaagccttcctatttccaaggtgggaatgttcttcaacgctctcctgacctttctccagtttcctcctttctcacctttctttaaacccttttcactttttcttctcttttcacctgcaagtctattgacaggtaagtgagagaagagaaaagaaaaagctagtatttattaagcacctgcaatctgtcaaaaattttcattagtggtatattataacccccctgaattagcttttgctatgttatacactaacatgcaattgtcaaatttcagtggcatacaaaaacaaagattgatttctaggtcatgccacatgtaggcagctgggttctgcttcccatttctagactcaggctgaaggcacagttgccattgggaacatgccatttttatggaaaagataaaaacaagcaacaagatcactcttaaatatctgcatgaatataatatatgtcctttctttcttacatttttgacaaatgcaagtcaaagtgagcccaatatcagtggagtagtaaatattgacctcccatagaaagtagtgctctaggccaggcgtggtggctcacacctgtaatcccagcactttgggagaccaaggcgggcggatcacgaggtcagcagtttgagaccagcctgaccaacatggtgaaaccccgtctctactaaaaatacaaaaatcagccaggcatggtggcgagcgcctgtaatcccagctactcaggaggctgaggcaggagaatcacttgaacctgggaggcagagattgcagtgagccaagatcgcgccattgcactccagcctcggcgacagagcgagactccatctcacacacatacayacacacacacacacacacacacacacacacacacaagtagtggtctaactcacagggcattggatggtgcatgcatatatttttacagcaaaatagaagtgaatctttataaaaaaatataatctatcgcaataccctttttatataggggaaacatgaggctcagaggttaaattaactgtccaagagtagtgcatctagtggacgactcatttaagattgtagtcaagttttttctaattctacagccactgttcttggatttgcatagccaagttgaagagaggggagacagacttagttctctcttctattattttttaatctttcattccaaatattttctaaaacatcacgtcaccttaaggatctaggaataatctttgatttaatcctcttcattttttcatattaaataaaactctacattgtctaatgcttaataatgatacaattttttgagcacttaacttgtgccaaacactatttcaaactctcttcacatactgttttatttaattttgaaccataagttttgtggtaggcatcatatcactttaaagacaaagggctacacatagtggctcatccatgtaatcctagagctttgggaggccaaggtaagaggattgcttgaggccgggagtttgaggccagcctgggcaataatagcaaggccttgtctctagaaaaaataaaaattagtagggcatggtgacatgcccctgtagtcctagctactcaggaggctgagacaggaggattgcttgagcccaggagttcaaagttgcagtgaagtatgattgtgtaacctgggcaacaaagcaagaacttatctcaataaaaaaggataaaaacattgaggaaaaaatctcaataacttgcctaaaatgactgactgggagtgaagtagagctggtttttaatccatatctgatgttaacacttgtgcttctatgctctgcatcattctgctttctaatgaaaatctctgttttaaatatatcctacacttctctcttctcgtctccagcttctattgcctatgtttagtttttatcttgttaagcctaaatttctgctgttgctttctagttagatttcactcatgaaaccaacctatataccaagactagactaattcttaaactctgccttgatcacttttgtgtgcagaagacattcattgctctcccttcttcctactttcatccttccctcatataaactccttcatctgatttccaaggacacccagagtgcaaattattcttatttcccactagtcctcaaagtgtaccatttacctggttgtcccttattgattcaaccttgctttatttacatttttccccttactggaaactagatcaagaactttacgggagca

SEQ ID NO: 2401 - DNA, 2257 bp, Homo sapiens
cctaaggtttcccaaaagagaagggaaagccttcctatttccaaggtgggaatgttcttcaacgctctcctgacctttctccagtttcctcctttctcacctttctttaaacccttttcactttttcttctcttttcacctgcaagtctattgacaggtaagtgagagaagagaaaagaaaaagctagtatttattaagcacctgcaatctgtcaaaaattttcattagtggtatattataacccccctgaattagcttttgctatgttatacactaacatgcaattgtcaaatttcagtggcatacaaaaacaaagattgatttctaggtcatgccacatgtaggcagctgggttctgcttcccatttctagactcaggctgaaggcacagttgccattgggaacatgccatttttatggaaaagataaaaacaagcaacaagatcactcttaaatatctgcatgaatataatatatgtcctttctttcttacatttttgacaaatgcaagtcaaagtgagcccaatatcagtggagtagtaaatattgacctcccatagaaagtagtgctctaggccaggcgtggtggctcacacctgtaatcccagcactttgggagaccaaggcgggcggatcacgaggtcagcagtttgagaccagcctgaccaacatggtgaaaccccgtctctactaaaaatacaaaaatcagccaggcatggtggcgagcgcctgtaatcccagctactcaggaggctgaggcaggagaatcacttgaacctgggaggcagagattgcagtgagccaagatcgcgccattgcactccagcctcggcgacagagcgagactccatctcacacacatacacacacacacacacacacacacacrcacacacacacaagtagtggtctaactcacagggcattggatggtgcatgcatatatttttacagcaaaatagaagtgaatctttataaaaaaatataatctatcgcaataccctttttatataggggaaacatgaggctcagaggttaaattaactgtccaagagtagtgcatctagtggacgactcatttaagattgtagtcaagttttttctaattctacagccactgttcttggatttgcatagccaagttgaagagaggggagacagacttagttctctcttctattattttttaatctttcattccaaatattttctaaaacatcacgtcaccttaaggatctaggaataatctttgatttaatcctcttcattttttcatattaaataaaactctacattgtctaatgcttaataatgatacaattttttgagcacttaacttgtgccaaacactatttcaaactctcttcacatactgttttatttaattttgaaccataagttttgtggtaggcatcatatcactttaaagacaaagggctacacatagtggctcatccatgtaatcctagagctttgggaggccaaggtaagaggattgcttgaggccgggagtttgaggccagcctgggcaataatagcaaggccttgtctctagaaaaaataaaaattagtagggcatggtgacatgcccctgtagtcctagctactcaggaggctgagacaggaggattgcttgagcccaggagttcaaagttgcagtgaagtatgattgtgtaacctgggcaacaaagcaagaacttatctcaataaaaaaggataaaaacattgaggaaaaaatctcaataacttgcctaaaatgactgactgggagtgaagtagagctggtttttaatccatatctgatgttaacacttgtgcttctatgctctgcatcattctgctttctaatgaaaatctctgttttaaatatatcctacacttctctcttctcgtctccagcttctattgcctatgtttagtttttatcttgttaagcctaaatttctgctgttgctttctagttagatttcactcatgaaaccaacctatataccaagactagactaattcttaaactctgccttgatcacttttgtgtgcagaagacattcattgctctcccttcttcctactttcatccttccctcatataaactccttcatctgatttccaaggacacccagagtgcaaattattcttatttcccactagtcctcaaagtgtaccatttacctggttgtcccttattgattcaaccttgctttatttacatttttccccttactggaaactagatcaagaactttacgggagca

SEQ ID NO: 2402 - DNA, 2257 bp, Homo sapiens
cctaaggtttcccaaaagagaagggaaagccttcctatttccaaggtgggaatgttcttcaacgctctcctgacctttctccagtttcctcctttctcacctttctttaaacccttttcactttttcttctcttttcacctgcaagtctattgacaggtaagtgagagaagagaaaagaaaaagctagtatttattaagcacctgcaatctgtcaaaaattttcattagtggtatattataacccccctgaattagcttttgctatgttatacactaacatgcaattgtcaaatttcagtggcatacaaaaacaaagattgatttctaggtcatgccacatgtaggcagctgggttctgcttcccatttctagactcaggctgaaggcacagttgccattgggaacatgccatttttatggaaaagataaaaacaagcaacaagatcactcttaaatatctgcatgaatataatatatgtcctttctttcttacatttttgacaaatgcaagtcaaagtgagcccaatatcagtggagtagtaaatattgacctcccatagaaagtagtgctctaggccaggcgtggtggctcacacctgtaatcccagcactttgggagaccaaggcgggcggatcacgaggtcagcagtttgagaccagcctgaccaacatggtgaaaccccgtctctactaaaaatacaaaaatcagccaggcatggtggcgagcgcctgtaatcccagctactcaggaggctgaggcaggagaatcacttgaacctgggaggcagagattgcagtgagccaagatcgcgccattgcactccagcctcggcgacagagcgagactccatctcacacacatacacacacacacacacacacacacacacacacacacacamgtagtggtctaactcacagggcattggatggtgcatgcatatatttttacagcaaaatagaagtgaatctttataaaaaaatataatctatcgcaataccctttttatataggggaaacatgaggctcagaggttaaattaactgtccaagagtagtgcatctagtggacgactcatttaagattgtagtcaagttttttctaattctacagccactgttcttggatttgcatagccaagttgaagagaggggagacagacttagttctctcttctattattttttaatctttcattccaaatattttctaaaacatcacgtcaccttaaggatctaggaataatctttgatttaatcctcttcattttttcatattaaataaaactctacattgtctaatgcttaataatgatacaattttttgagcacttaacttgtgccaaacactatttcaaactctcttcacatactgttttatttaattttgaaccataagttttgtggtaggcatcatatcactttaaagacaaagggctacacatagtggctcatccatgtaatcctagagctttgggaggccaaggtaagaggattgcttgaggccgggagtttgaggccagcctgggcaataatagcaaggccttgtctctagaaaaaataaaaattagtagggcatggtgacatgcccctgtagtcctagctactcaggaggctgagacaggaggattgcttgagcccaggagttcaaagttgcagtgaagtatgattgtgtaacctgggcaacaaagcaagaacttatctcaataaaaaaggataaaaacattgaggaaaaaatctcaataacttgcctaaaatgactgactgggagtgaagtagagctggtttttaatccatatctgatgttaacacttgtgcttctatgctctgcatcattctgctttctaatgaaaatctctgttttaaatatatcctacacttctctcttctcgtctccagcttctattgcctatgtttagtttttatcttgttaagcctaaatttctgctgttgctttctagttagatttcactcatgaaaccaacctatataccaagactagactaattcttaaactctgccttgatcacttttgtgtgcagaagacattcattgctctcccttcttcctactttcatccttccctcatataaactccttcatctgatttccaaggacacccagagtgcaaattattcttatttcccactagtcctcaaagtgtaccatttacctggttgtcccttattgattcaaccttgctttatttacatttttccccttactggaaactagatcaagaactttacgggagca

SEQ ID NO: 2403 - DNA, 674 bp, Homo sapiens
atttgcaaagtttgcaccaaacacatatttttaaaaatatccatgatcactaattcagagtgaaaagatgtgatcattggcattgtatcagagtcaatttgctgtatatatccattgctattgtgtcactgaaatagcttttgaataacttttattcagggttacttcaatcactttacttcaggttaataatttctccatttacaatagagttaaaatgaaaataccaaagtgttgcaatattcagtataagggtataaaggacttttttttaatctgtaaaagaaaagaaaagctattatttcatatagwaagaaaagcataatgaccatgcaaagttgaataaagatgactgacattcatcttatttctaaaacaagtaaattattggtgtttcaacttctttctacaaggggatctgaaaaaaatcatttgcaacccaactacaagttgaaagttctgcatttaatgtgtatcattttagaactgagaaaagatgtgttttacacaagctgacagattttatacaaaatcaatgcagcttatctatgaccataattaaatggggaagtttgatagtggacacatataatagtgaacagaagaaaataaataaaccaaaactgacctaataacaaatttattatatagtctcttgataagtttttactttc

SEQ ID NO: 2404 - DNA, 674 bp, Homo sapiens
atttgcaaagtttgcaccaaacacatatttttaaaaatatccatgatcactaattcagagtgaaaagatgtgatcattggcattgtatcagagtcaatttgctgtatatatccattgctattgtgtcactgaaatagcttttgaataacttttattcagggttacttcaatcactttacttcaggttaataatttctccatttacaatagagttaaaatgaaaataccaaagtgttgcaatattcagtataagggtataaaggacttttttttaatctgtaaaagaaaagaaaagctattatttcatatagtaagaaaagcataatgaccatgcaaagttgaataaagatgactgacattcatcttatttctaaaacaagtaaattattggtgtttcaacttctttctacaaggggatctgaaaaaaatcatttgcaacccaactacaagttgaaagttctgcatttaatgtgtatcattttagaactgagaaaagatgtgttttacacaagctgacagattttatacaaaatcaatgcagcttatctatgaccataattaaatggggaagtttgrtagtggacacatataatagtgaacagaagaaaataaataaaccaaaactgacctaataacaaatttattatatagtctcttgataagtttttactttc

SEQ ID NO: 2405 - DNA, 591 bp, Homo sapiens
caaattaacaatatatgtatttgaagctacgtagtgaaaggttatactacatacctggaaaaactgacccaggactagtaacaccataacttattataatgaaattagtagctaaaaaaatatatttttcargacagtgtctctctctgacccccagcctgaagtgcagtggtgtgatcacagctcactgtagccttgacctcctgagctcaagtgatcatcccaccaaaattacacattttaaaggggaaaaaattattttgggcttctaggcaaaaaaaatccacttataaaggaaaaaaaaatcagatttgccatcaaattttttttaacagcaatgatttaggtagaagaaaaatggagtaacatatttaagatattcaatgaaagaaaatgtgagtcagtagctttccaagataaaggcagcatacgaaatgtaatcactgtgcaaaaattcagggaatattgtttccatgagcacttcctgaggcatctacttgacaaaaactttcataagacaaccatatgtggtgtatatcacatttattgacctgtatgtgttaaaccatccctgcgttcctggtatgaaac

SEQ ID NO: 2406 - DNA, 591 bp, Homo sapiens
caaattaacaatatatgtatttgaagctacgtagtgaaaggttatactacatacctggaaaaactgacccaggactagtaacaccataacttattataatgaaattagtagctaaaaaaatatatttttcaagacagtgtctctctctgacccccagsctgaagtgcagtggtgtgatcacagctcactgtagccttgacctcctgagctcaagtgatcatcccaccaaaattacacattttaaaggggaaaaaattattttgggcttctaggcaaaaaaaatccacttataaaggaaaaaaaaatcagatttgccatcaaattttttttaacagcaatgatttaggtagaagaaaaatggagtaacatatttaagatattcaatgaaagaaaatgtgagtcagtagctttccaagataaaggcagcatacgaaatgtaatcactgtgcaaaaattcagggaatattgtttccatgagcacttcctgaggcatctacttgacaaaaactttcataagacaaccatatgtggtgtatatcacatttattgacctgtatgtgttaaaccatccctgcgttcctggtatgaaac

SEQ ID NO: 2407 - DNA, 591 bp, Homo sapiens
caaattaacaatatatgtatttgaagctacgtagtgaaaggttatactacatacctggaaaaactgacccaggactagtaacaccataacttattataatgaaattagtagctaaaaaaatatatttttcaagacagtgtctctctctgacccccagcctgaagtgcagtggtgtgatcacagctcactgtagccttgacctcctgagctcaagtgatcatcccaccaaaattacacattttaaaggggaaaaaattattttgggcttctaggcaaaaaaaatccacttataaaggaaaaaaaaatcagatttgccatcaaattttttttaacagcaatgatttagrtagaagaaaaatggagtaacatatttaagatattcaatgaaagaaaatgtgagtcagtagctttccaagataaaggcagcatacgaaatgtaatcactgtgcaaaaattcagggaatattgtttccatgagcacttcctgaggcatctacttgacaaaaactttcataagacaaccatatgtggtgtatatcacatttattgacctgtatgtgttaaaccatccctgcgttcctggtatgaaac

SEQ ID NO: 2408 - DNA, 591 bp, Homo sapiens
caaattaacaatatatgtatttgaagctacgtagtgaaaggttatactacatacctggaaaaactgacccaggactagtaacaccataacttattataatgaaattagtagctaaaaaaatatatttttcaagacagtgtctctctctgacccccagcctgaagtgcagtggtgtgatcacagctcactgtagccttgacctcctgagctcaagtgatcatcccaccaaaattacacattttaaaggggaaaaaattattttgggcttctaggcaaaaaaaatccacttataaaggaaaaaaaaatcagatttgccatcaaattttttttaacagcaatgatttaggtagaagaaaaatggagtaacatatttaagatattcaatgaaagaaaatgtgagtcagtagctttccaagataaaggcagcatacraaatgtaatcactgtgcaaaaattcagggaatattgtttccatgagcacttcctgaggcatctacttgacaaaaactttcataagacaaccatatgtggtgtatatcacatttattgacctgtatgtgttaaaccatccctgcgttcctggtatgaaac

SEQ ID NO: 2409 - DNA, 268 bp, Homo sapiens
tgaaggtagatgatattcgctaaaatatttttttttattttttgtagagatgaggtctcactatgttgaccagactggcctcraactcctgtcctcaagcaatcatcctgcctcagcctcccaaagtattgggattacaggcatgacatagcatccaacctaaaacatgtttattaatccacatattattaaaattatagataaaattttttgtcaatatctacaatatcaaaatgacaattattccactgaatgtgtttgtcccaaa

SEQ ID NO: 2410 - DNA, 1320 bp, Homo sapiens
tgcatgattagtatgcagttcttgctgtgtgaaactcatcactcaagttcaagaaccccgaattggtctagaacccattcaagaagagtccactgaccacgggcttagctattgtgagaatgtccaattgctagaaaagttttttaaacttgtaatttttgtactaactgcattctggtaataaataacttgcagagctaccctagtctacacaccacgctctgggttgcattgtcctggaaaatactggggtttggttttgttttggagatggagtctgactctgttgcccaggttggagtgcagtggcatgacctcggctcactgcaccctccgtcttctgggttcaagcaattctcctgccttagcctcccaagtagctaggactacaggctcacactgccacgcccagcttaattgtgtgtgtgtgtgtgtgtgtgtgtgtgtgtgtgtcttttagtagagacagggttccaccttgttgcccaggctggtctcaaactcctgagctcaggcactctgcccgcctcagcctcccaaagtgggattacaggcatgagccatggagcctggcctggaaaatactgttaaaaactactttatcatctgcatttgtaaaagaccacacattattattgaattaaaagtatggaagctagaattctgctattttggtgaagtaaacctaatacaaaatggtcattcatagcttttgtgggaagaaattattgcccgaggaatgtgcttgataagtaataaacatggaaaactctttgttctccattaggcagaggaaaactaatttcacagtttgttgtagctgaatgttcggcatttgtttctttattcttattctgtgttaaggatatttaatctttcccttggaaaactactttttatttaaaaagacatttttctcagtccatttgtaaataaagcaagtatactgaaatgattcagattcctgtggttcccatttacatctgatttccttcctggctgatcttccagtctacatgacttgattatcttcccaaattatcctgccaggaatattccacagggtttttcctatggaaactatattaaaccttttataatttagcaatgttggcactaacgtactttctccgaagtgcacttatctcgagaacattcttccatgaagatcatccaaaaagcactctagtgtcagcataagtgtcaacawaagaatgatccctaggcatttgcagaaatgcctttagctaattaaaaagatgttttaatatttgtcttcaaattgtgactcttcaatatgtctgacctaaacaacatgca

SEQ ID NO: 2411 - DNA, 1320 bp, Homo sapiens
tgcatgattagtatgcagttcttgctgtgtgaaactcatcactcaagttcaagaaccccgaattggtctagaacccattcaagaagagtccactgaccacgggcttagctattgtgagaatgtccaattgctagaaaagttttttaaacttgtaatttttgtactaactgcattctggtaataaataacttgcagagctaccctagtctacacaccacgctctgggttgcattgtcctggaaaatactggggtttggttttgttttggagatggagtctgactctgttgcccaggttggagtgcagtggcatgacctcggctcactgcaccctccgtcttctgggttcaagcaattctcctgccttagcctcccaagtagctaggactacaggctcacactgccacgcccagcttaattgtgtgtgtgtgtgtgtgtgtgtgtgtgtgtgtgtcttttagtagagacagggttccaccttgttgcccaggctggtctcaaactcctgagctcaggcactctgcccgcctcagcctcccaaagtgggattacaggcatgagccatggagcctggcctggaaaatactgttaaaaactactttatcatctgcatttgtaaaagaccacacattattattgaattaaaagtatggaagctagaattctgctattttggtgaagtaaacctaatacaaaatggtcattcatagcttttgtgggaagaaattattgcccgaggaatgtgcttgataagtaataaacatggaaaactctttgttctccattaggcagaggaaaactaatttcacagtttgttgtagctgaatgttcggcatttgtttctttattcttattctgtgttaaggatatttaatctttcccttggaaaactactttttatttaaaaagacatttttctcagtccatttgtaaataaagcaagtatactgaaatgattcagattcctgtggttcccatttacatctgatttccttcctggctgatcttccagtctacatgacttgattatcttcccaaattatcctgccaggaatattccacagggtttttcctatggaaactatattaaaccttttataatttagcaatgttggcactaacgtactttctccgaagtgcacttatctcgagaacattcttccatgaagatcatccaaaaagcactctagtgtcagcataagtgtcaacaaaagaatgatccctaggcatttgcagaaatgcctttarctaattaaaaagatgttttaatatttgtcttcaaattgtgactcttcaatatgtctgacctaaacaacatgca

SEQ ID NO: 2412 - DNA, 583 bp, Homo sapiens
taatagcaggaaattgaatcacttatagttctggaattcaggagttacaaaatcaacatgtcagcagggctgcgttctttctggaggctccaggggaaaatctatttccttgcctttccagtttctagaagctgcttgcattttttggcttgtgstgcctcccttacataatacagacctctgcttctgtggtcatatctttttgactctgaccctcctataaagactctcttataaagccccttggaaatatgtagatcccagcctataatccaggataatcttatctcaaggtccttactttaagtacatattttgggagactcattattctgtctagcatagagactgatgtattggatgaaatattcaggttctgacttgcacatttactgcaagtttgtaggacaaattttggatactacctcagaagtctcaggtaccctaaaagcaaaagaaaatccattcttcaaatcaccctttgtttgtgtagctgtggatgactttgcaatcagggaataaattctgtttcatcatgagcagagaggtcatcaacattcatgagttaaagtcaacagatgca

SEQ ID NO: 2413 - DNA, 583 bp, Homo sapiens
taatagcaggaaattgaatcacttatagttctggaattcaggagttacaaaatcaacatgtcagcagggctgcgttctttctggaggctccaggggaaaatctatttccttgcctttccagtttctagaagctgcttgcattttttggcttgtggtgcctccmttacataatacagacctctgcttctgtggtcatatctttttgactctgaccctcctataaagactctcttataaagccccttggaaatatgtagatcccagcctataatccaggataatcttatctcaaggtccttactttaagtacatattttgggagactcattattctgtctagcatagagactgatgtattggatgaaatattcaggttctgacttgcacatttactgcaagtttgtaggacaaattttggatactacctcagaagtctcaggtaccctaaaagcaaaagaaaatccattcttcaaatcaccctttgtttgtgtagctgtggatgactttgcaatcagggaataaattctgtttcatcatgagcagagaggtcatcaacattcatgagttaaagtcaacagatgca

SEQ ID NO: 2414 - DNA, 583 bp, Homo sapiens
taatagcaggaaattgaatcacttatagttctggaattcaggagttacaaaatcaacatgtcagcagggctgcgttctttctggaggctccaggggaaaatctatttccttgcctttccagtttctagaagctgcttgcattttttggcttgtggtgcctcccttacataatacagacctctgcttctgtggtcatatctttttgactctgaccctcctataaagactctcttataaagccccttggaaatatgtagatcccagcctataatccaggataatcttatctcaaggtccttactttaagtacatattttgggagactcattattctgtctagcatagagactgatgtattggatgaaatattcaggttctgacttgcayatttactgcaagtttgtaggacaaattttggatactacctcagaagtctcaggtaccctaaaagcaaaagaaaatccattcttcaaatcaccctttgtttgtgtagctgtggatgactttgcaatcagggaataaattctgtttcatcatgagcagagaggtcatcaacattcatgagttaaagtcaacagatgca

SEQ ID NO: 2415 - DNA, 583 bp, Homo sapiens
taatagcaggaaattgaatcacttatagttctggaattcaggagttacaaaatcaacatgtcagcagggctgcgttctttctggaggctccaggggaaaatctatttccttgcctttccagtttctagaagctgcttgcattttttggcttgtggtgcctcccttacataatacagacctctgcttctgtggtcatatctttttgactctgaccctcctataaagactctcttataaagccccttggaaatatgtagatcccagcctataatccaggataatcttatctcaaggtccttactttaagtacatattttgggagactcattattctgtctagcatagagactgatgtattggatgaaatattcaggttctgacttgcacatttactgcaagtttgtagracaaattttggatactacctcagaagtctcaggtaccctaaaagcaaaagaaaatccattcttcaaatcaccctttgtttgtgtagctgtggatgactttgcaatcagggaataaattctgtttcatcatgagcagagaggtcatcaacattcatgagttaaagtcaacagatgca

SEQ ID NO: 2416 - DNA, 569 bp, Homo sapiens
ggcctggggagggtcaggcttgtggttgtagttagctgagagcctggagttggatgtgacacagtccaccacctgcttaccatccacagcctgtgctgcctcgcctcccacagggggctgctgtaagtgaaattctgccacgtcaacgcaggaaacatagcactctccttccacatcttgttttcatttcacagaagtttccaaggatttgcctcgttagyaggcagacccttcaattttgtaactagtcatttgtatgcaatctgccctgtggtggcctccttctctataaatataaagccaagaggtaagtaaggtctgagcttttctgtcaaggggggatttgaaaatggacaccattctggaagcagcagtcccagtgcacaaaacaaatgaaatcttccttctattttggcttattggtgatttacagctggctgacttccaaaaagagtctaagacaacgtatagtaaaagacacatatacaataagtccattgaaatggtataaaaaatgaaaagtcataaagaagaggggtaaataaatactgtttgtcaaaaataaacag

SEQ ID NO: 2417 - DNA, 1222 bp, Homo sapiens
aaatgagcttctggataaagacacacagaagatggagaaaaataagggctgcttataatatcacactgctaactataaattccaatttcctaattctctcaggccatagttattcttctagttttagaagagaggagataggcagttcttctaattaagctccctcccacttgaaatttcagtcttgtaaagttcattctgtttttatgctagcctgagaaatttgctgacaatgaaatttccactttaaatattcagcatgattttaaatgggtttcttcaaattgctcttcagtggacctttaaaaccacaattggagagataaaggtaattagaaatagcagtgtaaatggagttgaatctctcagatgtcctccaaaatgtaacataccctgctcttacccagtttcccttaggatgttgaacagttcaaccatttatcattacacatcactcattccatttgcacatcacaagatatatccctgccattccaattagtatcctactgtgtcacaggagatagaatgttaatcacgagagctacagcagttaaactgaaatagtgtacatgaaaaggatatacaaaatgacaaatggagagactcttttcaagtcttggccaagccacttagtagtagtgtgaccttgagcaagtcccttaaactcctctcctcatctgttgtgaaaactgaataatcacatgagtgcactttataagctgcaggtactataccaatataaggagatatgatgattatagctatatatgtaacagtttggaaaatcttgacccagaattaataattaaggtctacatcaacataaaaccctcattctccacgcatcctagcagagccacatgtccaagagaggtcaagcgacaatccttggaagaaatgctgctatcctggccagtgggaggtatcacaatctctcaagtcatcatgtacctatctgttaattagataagttctttatgcaaatttaagcctgatggagatacattatagccaaaaacacaattaatgccagtgggaaataatacagcmaaacttcaaattagattctatttattctctaccacgaagaataattatttgttcattggaaacatatcactgattacaagggctagtggatgaaagttattaggaagatcctgggatcagccaagaaatgtggtacaggtacatttaaattcttaaagaaattgaaaca

SEQ ID NO: 2418 - DNA, 283 bp, Homo sapiens
cctaagttattcttcagcttttacatctcaaataacctttgcatatttatgatctaaatgctttgctctrtatgtggcagtacacccatgtgaatgaagtttgtagtttacgttagtaccaatatcaaagtgtgccaagtggctacaacaattaaatagctagaactatcgtagggtgcatctatggacataagtgaaagtcaggggaagcttcttctcacatgctgtacttggcatgtgtcagacaattatgcacgtcatacattaaaatacattggcaaac

SEQ ID NO: 2419 - DNA, 283 bp, Homo sapiens
cctaagttattcttcagcttttacatctcaaataacctttgcatatttatgatctaaatgctttgctctatatgtggcagtacacccatgtgaatgaagtttgtagtttaygttagtaccaatatcaaagtgtgccaagtggctacaacaattaaatagctagaactatcgtagggtgcatctatggacataagtgaaagtcaggggaagcttcttctcacatgctgtacttggcatgtgtcagacaattatgcacgtcatacattaaaatacattggcaaac

SEQ ID NO: 2420 - DNA, 573 bp, Homo sapiens
aaaaaaagaaatcagaatttgtcagttttctgtctagtgcattccaaatcacatgacacaaccattattggttttagaattggaaaagtttggtttattttttaactgactactcagattttaaaaaaattgtttyattaatagattagtaaaaatttaatactgctgttcattgtagggcttagtaagccattactatgatagatctttatttttgttttctttaagtctgtactggacattgaagtctctctatggtctctggacttacgtcttggccttacagactgtcctgtttcacctttgcctcagtctttgcagtaatctccctcactgagaagtctggaacatgccacatgttcacagtgaggctgttaaaacttccagccccatccaaaacctagacttggaaaccattgtcgcattgctttctgagtccacagatagcaaatgtgacaagtcaaaaatgatgcctaatgttgagcaaggagtctttaaaaagccctactcatgtttctaattctcacacccatgtaattcacaggcatctgtccacaggtagtttgagaacct

SEQ ID NO: 2421 - DNA, 573 bp, Homo sapiens
aaaaaaagaaatcagaatttgtcagttttctgtctagtgcattccaaatcacatgacacaaccattattggttttagaattggaaaagtttggtttattttttaactgactactcagattttaaaaaaattgtttcrttaatagattagtaaaaatttaatactgctgttcattgtagggcttagtaagccattactatgatagatctttatttttgttttctttaagtctgtactggacattgaagtctctctatggtctctggacttacgtcttggccttacagactgtcctgtttcacctttgcctcagtctttgcagtaatctccctcactgagaagtctggaacatgccacatgttcacagtgaggctgttaaaacttccagccccatccaaaacctagacttggaaaccattgtcgcattgctttctgagtccacagatagcaaatgtgacaagtcaaaaatgatgcctaatgttgagcaaggagtctttaaaaagccctactcatgtttctaattctcacacccatgtaattcacaggcatctgtccacaggtagtttgagaacct

SEQ ID NO: 2422 - DNA, 573 bp, Homo sapiens
aaaaaaagaaatcagaatttgtcagttttctgtctagtgcattccaaatcacatgacacaaccattattggttttagaattggaaaagtttggtttattttttaactgactactcagattttaaaaaaattgtttcattaatagattagtaaaaatttaatactgctgttcattgtagggcttagtaagccattactatgatagatctttatttttgttttctttaagtctgtactggacattgaagtctctctatggtctctggacttacgtcttggccttacagactgtcctgtttcacctttgcctcagtctttgcagtaatctccctcactgagaagtctggaacatgccamatgttcacagtgaggctgttaaaacttccagccccatccaaaacctagacttggaaaccattgtcgcattgctttctgagtccacagatagcaaatgtgacaagtcaaaaatgatgcctaatgttgagcaaggagtctttaaaaagccctactcatgtttctaattctcacacccatgtaattcacaggcatctgtccacaggtagtttgagaacct

SEQ ID NO: 2423 - DNA, 1237 bp, Homo sapiens
ttatgcttttcattggtttggcaagtgatatcaaccttataattgcattctctcatgacacttcatgcaatagctcaggtagtacaaaagaaacaaaagagaaactagggatctggagagtctgatacagtttggctgtgtcccacccaaaatctcatcttgaattgtaacccccataatccccacgtgtcaagggcaggaccaggtggaggtagttggatcatgggaggcggtttcccctttgctgttctagtgatagtgagtctcaggagatctgatggttttataaacatctagcatttcgcctgcttgtactcactttgtcctgccactctgtgaagaaggtgcctacttcccctttgccttctgctatgattgtaagtttcctkaggcttccccagcaatatggacctgggaatcaattaaacttctttcctttataaattacccagtctctggtatttcttcatagcagcgcgaggacagactaatacagagtccataaaccatatcgctaatttccagacaattcaatattgattttattaagcttttcttgtcatcaagacttatttgctttatgaatagtcagacacagagaacttaagaaaacatcattaaatcatgtccaactagactagctaaatttagcactgaagtatggcttttagggaatgatctcagggatgtgttatatatatatacaatattttctcaagtttctttaaaaaaatcttacttcttcatataaacttatttccagtttctctcaggggttggaaaaacatcttgataactacccaaatctttcctgtaaagtctttctggtcctacttatgtcaaaaccaataagaaagtaaatttatgtggaaacaattcatgtcagaaatgcaaaggggagaagactgagagatgcctgccctcagatttttcagagcaatagctctttagaccagaggcatgtaaattggtgttagtcttcccaggcaccctatgagaaggctggagggctttcctcggtgaatgttgcctaaatctttcatgtctgctcaacagaaatttcagtttatgagggaggaaaattataaattgaaacccgctctttctgtaaaactctggtcataatgttcggtgaagtgataaatgaataggtttttacaggcaaactacagtaattaggtcattcctcatttctttattggaggcagacctagatgtttaatcatcattatgcaat

SEQ ID NO: 2424 - DNA, 777 bp, Homo sapiens
ctgttccctccttgtcttttctggcttctagaggctgcctgcattccttggttggagaactctaacctctacttctcttgcctcatctcctccaactctgatcctcctgcatccctcctggaaggacccctgtaatgacatggggtccacctggataacccagagtaatctccccatttcaatgttcttaatcacatctgtgaagtccctttgccatgtaaggtaatatattcataggtcccagggtgtagatatcattggrgagggtcattattctgcctatcaaaaccacatttagtacttattctgtagtttctactagaccttattcatccttctcctctgtttcatttctcagactgctgggaagtttttatagcttaaaaattcacagggaagttattcaagagacaacaataacaaatcagtattgacaagaaatacctcaaagtcatgaaaaaatcatgaaaaggacacattggattatgctcatgaaaaagacatataagatgtacagctgcttttggtctgactgacactgagatgatccttgagggacatcctaaatacaattaaaggacctctttagcaatacaaaggttttaaaaattctgctactcaaacagtacacagttccgtgatgaataaggtgattcaaaactcatgcagaattgagtacaacaccaaattctaaacagggtgatggttttcagagtgatgatacacattaaatcagtccatcaaacgaaatcaataaatgctattgaatgccttttg

SEQ ID NO: 2425 - DNA, 622 bp, Homo sapiens
acacagtgagaatcagaaacatttccttaatacarcaaagtaatcacaacatgatgcccaagaaagagactggcaccacatggaacattctataagtgtgaggccatcttgacccagcctcctttgctttggaatttctaaacatgtcaggaaatttgttgatctaccccctccaagtgtttggatctcggaaggcagaccagtcttattcctactgacactctccaagcacctcctcccaacttcaggaccagcttttatagcactgtggtgtaatttttaagagcacaaaatggagataaatcaaagtggtccaataccaacaccatgaattacaagctgtgtaatcttgagtaaattacttaacctctctgagcttcagttttcttatctgtacaaaagattgctgtaaggatgaatgagttcatatatgtaaactacttggaatacaaaatatgtatgttttaactgttataatcccctcactgtaggacatgcacttgtaccatatattcttcctcttttctggcctatgatttagagtgaaaacaatgtggtcaggccttcaagctttgttccctaatgtttaaaaagaagcttttgggatttagaacattctttt

SEQ ID NO: 2426 - DNA, 447 bp, Homo sapiens
gtttcattttctcctgcaggttctcccttgctcagctctacttcaaatctaggttttcttcccagttgccagctctgctaacctatgatgactttagctccataccagatgtgacgtgaaagcgactgcaaagctcccacaattgttcaaggtctaaaactgaaaataaatccattattccatattaccatagtggttctgcttttctaagtgatagggattccattaaatcttttctattcagaatatgtacttggttacaaatattctttagtgcatgcctttcttttttaaaatttatgatattgtcaaaagaaatagtactaaygtactgagcctaagtatgttattttattctcccttgttttggggatagggacttggaatatgctcttttacacaattcctctcaaaactggtaagccgaggaattgggagtctgctcca

SEQ ID NO: 2427 - DNA, 545 bp, Homo sapiens
ataacatctaatcgaccatcattcggccagaactggagtgccccagccattcttccatgacagcatttctataaaacatgtttgtagcaatccttggttccaccagctgggtgctgtgaagcacacaggagttttgcagtttaagactagggtttgcatcttggttctgctatttattatggccttgggaacttcgtctcactgagctgcagttttcttatttgtaaaatgggtcgacagtccttgtcttgccatgctctcatgatgaacaaawgaaaccagacctgcccttaacagatgctaagtctgaataaggaggacaaatgcaggccataggctatatgtctaaatacttaaaagttataaatgaagccaacaaacagttatgtaaagtggttctattctaccttaacaaatccccctttattttattatttacttatttatttatttattttgagacagagtttcgctcttgttgcccaggctggagtggaatggcgcgatcttggctcactgcaacatctgcctcccaggttcaagcg

SEQ ID NO: 2428 - DNA, 545 bp, Homo sapiens
ataacatctaatcgaccatcattcggccagaactggagtgccccagccattcttccatgacagcatttctataaaacatgtttgtagcaatccttggttccaccagctgggtgctgtgaagcacacaggagttttgcagtttaagactagggtttgcatcttggttctgctatttattatggccttgggaacttcgtctcactgagctgcagttttcttatttgtaaaatgggtcgacagtccttgtcttgccatgctctcatgatgaacaaaagaaaccagacctgcccttaacagatgctaagtctgaataaggaggacaaatgcaggccataggctatatgtctaaatacttaaaagttrtaaatgaagccaacaaacagttatgtaaagtggttctattctaccttaacaaatccccctttattttattatttacttatttatttatttattttgagacagagtttcgctcttgttgcccaggctggagtggaatggcgcgatcttggctcactgcaacatctgcctcccaggttcaagcg

SEQ ID NO: 2429 - DNA, 1333 bp, Homo sapiens
tgcacatgtattgcaggccctggccaacgtcaacattgggagcctcatctgcaatgtaagggccggtggacctgctccatcagctggtgctgcaccagcaggaggtcctgccccctccactgctgctgctccaggtaggaaacatggagtttttagtattgggaggagtgtagagattttttwaaaaatagtattatagacaaaattgccattaatttttcacaagtatatgaagtatggaaatcctaacacctgattgactttttttttctagctgaggagaagaaagtggaagcaaagaaagaagaatccgaggagtctgatgatgacatgggctttggtctttttgactaaacctcttttataacatgttcaataaaaagctgaactttactgctgttggtcttgtccatagttttggaatgtgctctgcaaaaatggtctgttttgtaatgttggctttcagcctattctgccatgacacaggctggattttccctgccaccattgccggatgtgagatttagacaatcctgatgctaacaagaaggcacctcatggtacagtgttgaaaactgcactggggtggcaggaggaaggatcagagcagatgctttgtccaggttacctgtgtaaacttgatgattataaggtgtgtcccctacactgggggtggagggtaatacagaccagctttagaaagcctcctgggtatttaccctatacaaccctgcctaagaacgaactttgacgtatgctgaatgttgactgctacatcccaaggttgtaaaaaaacaagacttagctatgtaatgtctcaccaaatgtttgggagttttatggtaacactgaaggagtgcagaaagtttacttaatagtttattaaggtctccagttacacaaagtggaaaaaaaaaaagattcaaacctgtgttccaaaaactaagagctttttttgtttgccaattaataataccatgaatggaattttcaacttttcaggcttggatttatataataaaccgtgggtattgtgtgttcagagcagctaatgacatgccaggcacatgaatgagtcttatccttacctccattagcatttagtagatgaagacattcagtgatgaaaagcgtgacttctagccgggactcctcgtgtcaatgtgaaaaagaccatttgtgtaagttactacaactacttggggaaaatggcagttctactttgaggcattactcaagagaaactacatgtggacataggatacatgcctgggaatgttcaaagcaacacttggggcttctcataagctcaaaaaagacattaaatatatgc

SEQ ID NO: 2430 - DNA, 1333 bp, Homo sapiens
tgcacatgtattgcaggccctggccaacgtcaacattgggagcctcatctgcaatgtaagggccggtggacctgctccatcagctggtgctgcaccagcaggaggtcctgccccctccactgctgctgctccaggtaggaaacatggagtttttagtattgggaggagtgtagagattttttaaaaaatagtattatagacaaaattgccattaatttttcacaagtatatgaagtatggaaatcctaacacctgattgactttttttttctagctgaggagaagaaagtggaagcaaagaaagaagaatccgaggagtctgatgatgacatgggctttggtctttttgactaaacctcttttataacatgttcaataaaaagctgaactttactgctgttggtcttgtccatagttttggaatgtgctctgcaaaaatggtctgttttgtaatgttggctttcagcctattctgccatgacacaggctggattttccctgccaccattgccggatgtgagatttagacaatcctgatgctaacaagaaggcacctcatggtacagtgttgaaaactgcactggggtggcaggaggaaggatcagagcagatgctttgtccaggttacctgtgtaaacttgatgattataaggtgtgtcccctacactgggggtggagggtaatacagaccagctttagaaagcctcctgggtatttaccctatacaaccctgcctaagaacgaactttgacgtatgctgaatgttgactgctacatcccaaggttgtaaaaaaacaagacttagctatgtaatgtctcaccaaatgtttgggagttttatgrtaacactgaaggagtgcagaaagtttacttaatagtttattaaggtctccagttacacaaagtggaaaaaaaaaaagattcaaacctgtgttccaaaaactaagagctttttttgtttgccaattaataataccatgaatggaattttcaacttttcaggcttggatttatataataaaccgtgggtattgtgtgttcagagcagctaatgacatgccaggcacatgaatgagtcttatccttacctccattagcatttagtagatgaagacattcagtgatgaaaagcgtgacttctagccgggactcctcgtgtcaatgtgaaaaagaccatttgtgtaagttactacaactacttggggaaaatggcagttctactttgaggcattactcaagagaaactacatgtggacataggatacatgcctgggaatgttcaaagcaacacttggggcttctcataagctcaaaaaagacattaaatatatgc

SEQ ID NO: 2431 - DNA, 1255 bp, Homo sapiens
atttgtctttcctcgtctttgcacgactgttatcctctggatacatgcacgttaatgattatgcgtgtgcctgtgtgtgtatgctgagcataagtgggcawgtgacccacatgcgcgggccacaagaggggccatctgcgggttcagcctgcctggcgcccacgcccaccccagtcttgccttggggaacactccttccaccatggcaccggatctaggtgccaccatcacccacgatgctcattctctcctgaccaagggacgggcaactatcccaagccccaggctctctccccaaaatctgaatctcaaacagaatgattaaaaggctgaaattcatcctgttggctatgccctaaaggaacagtcttcaactcctacagcctggatccccaagctgcaggccctgaggcatcttgtcagggccacagaagtggaaactgacatatatatgaatatttatataacttcccagctgtaaagttctatgactcaggagcttaacagtctcacttacatcccatgatgacagccttgcctgggactgtcatttaaatctctttctctccccctcgtttagcttattactatcccactgtctcacatcagctactcttcttccctggtatagagaggactggtttcttcctagcaaccccgaacagtagacggcaatacttcctcagggtcactcagcaacaatccaagatgatccaaacaaaccagtatgattcagaagttgttcctgtccaggtacgtaccagttacacaattcgagatatacagatttgtttttgcactatagccaaaaggttttttttttgttttgtttagtttgtttcgtttttgagatagagtgttgctctgtcacccaggctggagtgcagtggcacaatctcggctcactgcaacatccgcctcccagattcaagtgattctcctgcctcagccccccgagtagctgggattgcaggcgcccaccaccacacctggttgatttttatatttttaatagagacggggtttcaccatgttggccaagctggtctccaactcctgacttcaagtaatccacctgcctcggcctcccaaagtgctgagacaaaagttctcatacatccttttttaaacaaatgaccttaatataactccaaaaatctgctatacattaattcattccctcttggcaatcaactaaacatcaagacttaaatagcaccacaaatcacgaccatacacaactagggaaagtccc

SEQ ID NO: 2432 - DNA, 551 bp, Homo sapiens
cagagacaacttttgagckccagatcttaagagggccgctagctcctgcttcattccccttagaagccagcggccccatatgaagtcctactataagaagtccaagctggtcacctgggaagagagagggagggaatgtggtgggacatgaaggtaggagggggtgaaacagcctcagccttccagcccagccctggagccaaccgaacacagccaagtgagtgaccccagctgagtttcatggagcagaattatccatccgagacctgtccgaattcctgacccgcagaatcatgagaaataataaaccattactgttttcaaccattctgtttcagggtgatttgttatgcagcaatagataaccaaaatgaggctcccctttagctttaaaagaatgttccatctcatatccatcttcaaacatcccccacagttctgcggtcctacatccaccaacagttactgccctctttgtatcaccaccgcagtcctctacaatagcacttcacatgccactggatagtcacttacgtacagaacaacttccc

SEQ ID NO: 2433 - DNA, 551 bp, Homo sapiens
cagagacaacttttgagctccagatcttaagagggccgctagctcctgcttcattccccttagaagccagcggccccatatgaagtcctactataagaagtccaagctggtcacctgggaagagagagggagggmatgtggtgggacatgaaggtaggagggggtgaaacagcctcagccttccagcccagccctggagccaaccgaacacagccaagtgagtgaccccagctgagtttcatggagcagaattatccatccgagacctgtccgaattcctgacccgcagaatcatgagaaataataaaccattactgttttcaaccattctgtttcagggtgatttgttatgcagcaatagataaccaaaatgaggctcccctttagctttaaaagaatgttccatctcatatccatcttcaaacatcccccacagttctgcggtcctacatccaccaacagttactgccctctttgtatcaccaccgcagtcctctacaatagcacttcacatgccactggatagtcacttacgtacagaacaacttccc

SEQ ID NO: 2434 - DNA, 551 bp, Homo sapiens
cagagacaacttttgagctccagatcttaagagggccgctagctcctgcttcattccccttagaagccagcggccccatatgaagtcctactataagaagtccaagctggtcacctgggaagagagagggagggaatgtggtgggacaygaaggtaggagggggtgaaacagcctcagccttccagcccagccctggagccaaccgaacacagccaagtgagtgaccccagctgagtttcatggagcagaattatccatccgagacctgtccgaattcctgacccgcagaatcatgagaaataataaaccattactgttttcaaccattctgtttcagggtgatttgttatgcagcaatagataaccaaaatgaggctcccctttagctttaaaagaatgttccatctcatatccatcttcaaacatcccccacagttctgcggtcctacatccaccaacagttactgccctctttgtatcaccaccgcagtcctctacaatagcacttcacatgccactggatagtcacttacgtacagaacaacttccc

SEQ ID NO: 2435 - DNA, 551 bp, Homo sapiens
cagagacaacttttgagctccagatcttaagagggccgctagctcctgcttcattccccttagaagccagcggccccatatgaagtcctactataagaagtccaagctggtcacctgggaagagagagggagggaatgtggtgggacatgaaggtaggagggggtgaaacagcctcagccttccagcccagccctggagccaaccgaacacagccaagtgagtgaccccagctgagtttcatggagcagaattatccatccgagacctgtccgaattcctgayccgcagaatcatgagaaataataaaccattactgttttcaaccattctgtttcagggtgatttgttatgcagcaatagataaccaaaatgaggctcccctttagctttaaaagaatgttccatctcatatccatcttcaaacatcccccacagttctgcggtcctacatccaccaacagttactgccctctttgtatcaccaccgcagtcctctacaatagcacttcacatgccactggatagtcacttacgtacagaacaacttccc

SEQ ID NO: 2436 - DNA, 2622 bp, Homo sapiens
taaagcctaacattaaaagtatgggacctgatatctatgtgtaaaatttcaatctttgaaaatgaaaattagccctacaaacaaagaacctggcatctcatgggaggaaactctacctccatacatggaacctgaccctacatagagaatggaacatggtactataaaggtggaatcttaatctctaagaatgtaacctggccttacaagcattgatccmatttgtaaaatcctaaacctcaagcacggaacattgcctctatgtgagaagcttagcactcaagacacagagcctgacatttcagttagagaggttgtatccctaagatatggaacctggttttctaggcagtgaaccagagattgtgaaatctcaatctccaagcatgaagcctgagcctacaagaatggtacatggtgcttcatgtgtggaatctcagtctccaagcatgaaacaaggtcttacaattgtgcaatacggcaatccagatcaggcatgaaaattggttctccactgagacttagtataactttcttagggtctaaacttcctgtaatggaacccagccctttaaggatgaaggctggccctctaagtgttgaatgtagctatttaaacatgagtcctgacccttcaagtatagaatcttactttataggcatggaaagtccatccaaatgtgaatcctgcccttccacacataggatcattcctataggatcattcctatagaatcactccttctagaatctcatgtggaatctggaattcaagatgtgaatcagagcctctagccatagaattagaccttggaggcaaaccatgacttcctacccgtttgatgtctctttctccaggcttaaaacatagccttctagtggtagaaccaaaatttaaagagatgttatgtagcccaacaactgtggaatctgatcatctaggcctaaaatatctaatctgaacttctaagtctgaaataaaaccttccagttttgatatttgactgtagacatggaatataattctccatgttcaaaactggccatctataagtaaaacctgaatttttgagtgtggtaaggtagttctccagacattgaacttgaccccccatttatagaactgtgccttgaggtatggaacatgtcacttcatgtgtggaatcacagtctccaaagatggaaacttatgagcatgaaacttggcatttccagtatgaagtctcaaattccatgcatggaacatgactccacatgcaaggcatatggcaaactatgtgtggccttacaagtatacagcctggcactttgtgtgcagactctcacttatcaaacatggaacactgatattacaagtgtggaaactggcaacctatacatggttggtacctgaattttcagttatagatgctgtgttatgtaaatgagccaaagatggcctctgtgtattggtccctaagttatttcttcactgctggttgagaaccattagctcaaaagcctactgatctcacacttaaatttttacacatttaattgttttaaaaatgctcccaaacaagcataattttggcatttagggccaacctgctttgcatattcaatgaaactacacccaatatctgctagccattgataaggtagagtcttgtggttataagacaccaaggtgctgctgctgcccttctgagttttctgacccagagacactctgttatgctgctgaatgaacatcacttagatacacagcctccctcttctatccccttaacccgaggttcccttgcctcctccttttctggatgatggcccactcaccataagcctctggatggactcatcctgtagggacttcccctctatgccaacctgtctaagcaccacacaataaagcttattgggtgttactgcatcttgtggtcatatctctttccctgattagccccaaatctcttaaaggaaccccttacatgttgccactctgagaaatggaaaccagtctcccaggcacaaaatctgatatgtcatatataaaatctcaatcttcaagcatggaacttggtcatacaacatggaatctggtcctccacatgagatatggccctaaaggcatagaactttgaccccatcatctccagcataaaatctagccctctaagcaggcacactggccttccaggtgtttaatgtggcccttaaaaatatcaaccctgactctccaagcacagaatctgattattcagacatggaatgtctctgcagaaataaatcctgcctctccaagcatacacacttaacctaggtatagagcctgagctgctatatatggatccttgtcttctggccatggagtagtctttcagatatgccacaggttatgacctatgtgaagtatcttttaccaagcttggaccctcaggttcttggatgaaacctgaatctcaaaacatgtcatctggcccactagaaatggttcctggacatctagatctgaactctggacttctaaatatctaacctgtacttctgggaatgaaacgagatgttttagtcttagcacttgatccctaaatatggaatctgagtctaaatgtttggaatttggctatctgtggataaaat

SEQ ID NO: 2437 - DNA, 2622 bp, Homo sapiens
taaagcctaacattaaaagtatgggacctgatatctatgtgtaaaatttcaatctttgaaaatgaaaattagccctacaaacaaagaacctggcatctcatgggaggaaactctacctccatacatggaacctgaccctacatagagaatggaacatggtactataaaggtggaatcttaatctctaagaatgtaacctggccttacaagcattgatccaatttgtaaaatcctaaacctcaagcacggaacattgcctctatgtgagaagcttagcactcaagrcacagagcctgacatttcagttagagaggttgtatccctaagatatggaacctggttttctaggcagtgaaccagagattgtgaaatctcaatctccaagcatgaagcctgagcctacaagaatggtacatggtgcttcatgtgtggaatctcagtctccaagcatgaaacaaggtcttacaattgtgcaatacggcaatccagatcaggcatgaaaattggttctccactgagacttagtataactttcttagggtctaaacttcctgtaatggaacccagccctttaaggatgaaggctggccctctaagtgttgaatgtagctatttaaacatgagtcctgacccttcaagtatagaatcttactttataggcatggaaagtccatccaaatgtgaatcctgcccttccacacataggatcattcctataggatcattcctatagaatcactccttctagaatctcatgtggaatctggaattcaagatgtgaatcagagcctctagccatagaattagaccttggaggcaaaccatgacttcctacccgtttgatgtctctttctccaggcttaaaacatagccttctagtggtagaaccaaaatttaaagagatgttatgtagcccaacaactgtggaatctgatcatctaggcctaaaatatctaatctgaacttctaagtctgaaataaaaccttccagttttgatatttgactgtagacatggaatataattctccatgttcaaaactggccatctataagtaaaacctgaatttttgagtgtggtaaggtagttctccagacattgaacttgaccccccatttatagaactgtgccttgaggtatggaacatgtcacttcatgtgtggaatcacagtctccaaagatggaaacttatgagcatgaaacttggcatttccagtatgaagtctcaaattccatgcatggaacatgactccacatgcaaggcatatggcaaactatgtgtggccttacaagtatacagcctggcactttgtgtgcagactctcacttatcaaacatggaacactgatattacaagtgtggaaactggcaacctatacatggttggtacctgaattttcagttatagatgctgtgttatgtaaatgagccaaagatggcctctgtgtattggtccctaagttatttcttcactgctggttgagaaccattagctcaaaagcctactgatctcacacttaaatttttacacatttaattgttttaaaaatgctcccaaacaagcataattttggcatttagggccaacctgctttgcatattcaatgaaactacacccaatatctgctagccattgataaggtagagtcttgtggttataagacaccaaggtgctgctgctgcccttctgagttttctgacccagagacactctgttatgctgctgaatgaacatcacttagatacacagcctccctcttctatccccttaacccgaggttcccttgcctcctccttttctggatgatggcccactcaccataagcctctggatggactcatcctgtagggacttcccctctatgccaacctgtctaagcaccacacaataaagcttattgggtgttactgcatcttgtggtcatatctctttccctgattagccccaaatctcttaaaggaaccccttacatgttgccactctgagaaatggaaaccagtctcccaggcacaaaatctgatatgtcatatataaaatctcaatcttcaagcatggaacttggtcatacaacatggaatctggtcctccacatgagatatggccctaaaggcatagaactttgaccccatcatctccagcataaaatctagccctctaagcaggcacactggccttccaggtgtttaatgtggcccttaaaaatatcaaccctgactctccaagcacagaatctgattattcagacatggaatgtctctgcagaaataaatcctgcctctccaagcatacacacttaacctaggtatagagcctgagctgctatatatggatccttgtcttctggccatggagtagtctttcagatatgccacaggttatgacctatgtgaagtatcttttaccaagcttggaccctcaggttcttggatgaaacctgaatctcaaaacatgtcatctggcccactagaaatggttcctggacatctagatctgaactctggacttctaaatatctaacctgtacttctgggaatgaaacgagatgttttagtcttagcacttgatccctaaatatggaatctgagtctaaatgtttggaatttggctatctgtggataaaat

SEQ ID NO: 2438 - DNA, 2622 bp, Homo sapiens
taaagcctaacattaaaagtatgggacctgatatctatgtgtaaaatttcaatctttgaaaatgaaaattagccctacaaacaaagaacctggcatctcatgggaggaaactctacctccatacatggaacctgaccctacatagagaatggaacatggtactataaaggtggaatcttaatctctaagaatgtaacctggccttacaagcattgatccaatttgtaaaatcctaaacctcaagcacggaacattgcctctatgtgagaagcttagcactcaagacacagagcctgacatttcagttagagaggttgtatccctaagatatggaacctggttttctaggcagtgaaccagagattgtgaaatctcaatctccaagcatgaagcctgagcctacaagaatggtacatggtgcttcatgtgtggaatctcagtctccaagcatgaaacaaggtcttacaattgtgcaatacrgcaatccagatcaggcatgaaaattggttctccactgagacttagtataactttcttagggtctaaacttcctgtaatggaacccagccctttaaggatgaaggctggccctctaagtgttgaatgtagctatttaaacatgagtcctgacccttcaagtatagaatcttactttataggcatggaaagtccatccaaatgtgaatcctgcccttccacacataggatcattcctataggatcattcctatagaatcactccttctagaatctcatgtggaatctggaattcaagatgtgaatcagagcctctagccatagaattagaccttggaggcaaaccatgacttcctacccgtttgatgtctctttctccaggcttaaaacatagccttctagtggtagaaccaaaatttaaagagatgttatgtagcccaacaactgtggaatctgatcatctaggcctaaaatatctaatctgaacttctaagtctgaaataaaaccttccagttttgatatttgactgtagacatggaatataattctccatgttcaaaactggccatctataagtaaaacctgaatttttgagtgtggtaaggtagttctccagacattgaacttgaccccccatttatagaactgtgccttgaggtatggaacatgtcacttcatgtgtggaatcacagtctccaaagatggaaacttatgagcatgaaacttggcatttccagtatgaagtctcaaattccatgcatggaacatgactccacatgcaaggcatatggcaaactatgtgtggccttacaagtatacagcctggcactttgtgtgcagactctcacttatcaaacatggaacactgatattacaagtgtggaaactggcaacctatacatggttggtacctgaattttcagttatagatgctgtgttatgtaaatgagccaaagatggcctctgtgtattggtccctaagttatttcttcactgctggttgagaaccattagctcaaaagcctactgatctcacacttaaatttttacacatttaattgttttaaaaatgctcccaaacaagcataattttggcatttagggccaacctgctttgcatattcaatgaaactacacccaatatctgctagccattgataaggtagagtcttgtggttataagacaccaaggtgctgctgctgcccttctgagttttctgacccagagacactctgttatgctgctgaatgaacatcacttagatacacagcctccctcttctatccccttaacccgaggttcccttgcctcctccttttctggatgatggcccactcaccataagcctctggatggactcatcctgtagggacttcccctctatgccaacctgtctaagcaccacacaataaagcttattgggtgttactgcatcttgtggtcatatctctttccctgattagccccaaatctcttaaaggaaccccttacatgttgccactctgagaaatggaaaccagtctcccaggcacaaaatctgatatgtcatatataaaatctcaatcttcaagcatggaacttggtcatacaacatggaatctggtcctccacatgagatatggccctaaaggcatagaactttgaccccatcatctccagcataaaatctagccctctaagcaggcacactggccttccaggtgtttaatgtggcccttaaaaatatcaaccctgactctccaagcacagaatctgattattcagacatggaatgtctctgcagaaataaatcctgcctctccaagcatacacacttaacctaggtatagagcctgagctgctatatatggatccttgtcttctggccatggagtagtctttcagatatgccacaggttatgacctatgtgaagtatcttttaccaagcttggaccctcaggttcttggatgaaacctgaatctcaaaacatgtcatctggcccactagaaatggttcctggacatctagatctgaactctggacttctaaatatctaacctgtacttctgggaatgaaacgagatgttttagtcttagcacttgatccctaaatatggaatctgagtctaaatgtttggaatttggctatctgtggataaaat

SEQ ID NO: 2439 - DNA, 2622 bp, Homo sapiens
taaagcctaacattaaaagtatgggacctgatatctatgtgtaaaatttcaatctttgaaaatgaaaattagccctacaaacaaagaacctggcatctcatgggaggaaactctacctccatacatggaacctgaccctacatagagaatggaacatggtactataaaggtggaatcttaatctctaagaatgtaacctggccttacaagcattgatccaatttgtaaaatcctaaacctcaagcacggaacattgcctctatgtgagaagcttagcactcaagacacagagcctgacatttcagttagagaggttgtatccctaagatatggaacctggttttctaggcagtgaaccagagattgtgaaatctcaatctccaagcatgaagcctgagcctacaagaatggtacatggtgcttcatgtgtggaatctcagtctccaagcatgaaacaaggtcttacaattgtgcaatacggcaatccagatcaggcatgaaaattggttctccactgagacttagtataactttcttagggtctaaacttcctgtaatggaacccagccctttaaggatgaaggctggccctctaagtgttgaatgtagctatttaaacatgagtcctgacccttcaagtatagaatctkactttataggcatggaaagtccatccaaatgtgaatcctgcccttccacacataggatcattcctataggatcattcctatagaatcactccttctagaatctcatgtggaatctggaattcaagatgtgaatcagagcctctagccatagaattagaccttggaggcaaaccatgacttcctacccgtttgatgtctctttctccaggcttaaaacatagccttctagtggtagaaccaaaatttaaagagatgttatgtagcccaacaactgtggaatctgatcatctaggcctaaaatatctaatctgaacttctaagtctgaaataaaaccttccagttttgatatttgactgtagacatggaatataattctccatgttcaaaactggccatctataagtaaaacctgaatttttgagtgtggtaaggtagttctccagacattgaacttgaccccccatttatagaactgtgccttgaggtatggaacatgtcacttcatgtgtggaatcacagtctccaaagatggaaacttatgagcatgaaacttggcatttccagtatgaagtctcaaattccatgcatggaacatgactccacatgcaaggcatatggcaaactatgtgtggccttacaagtatacagcctggcactttgtgtgcagactctcacttatcaaacatggaacactgatattacaagtgtggaaactggcaacctatacatggttggtacctgaattttcagttatagatgctgtgttatgtaaatgagccaaagatggcctctgtgtattggtccctaagttatttcttcactgctggttgagaaccattagctcaaaagcctactgatctcacacttaaatttttacacatttaattgttttaaaaatgctcccaaacaagcataattttggcatttagggccaacctgctttgcatattcaatgaaactacacccaatatctgctagccattgataaggtagagtcttgtggttataagacaccaaggtgctgctgctgcccttctgagttttctgacccagagacactctgttatgctgctgaatgaacatcacttagatacacagcctccctcttctatccccttaacccgaggttcccttgcctcctccttttctggatgatggcccactcaccataagcctctggatggactcatcctgtagggacttcccctctatgccaacctgtctaagcaccacacaataaagcttattgggtgttactgcatcttgtggtcatatctctttccctgattagccccaaatctcttaaaggaaccccttacatgttgccactctgagaaatggaaaccagtctcccaggcacaaaatctgatatgtcatatataaaatctcaatcttcaagcatggaacttggtcatacaacatggaatctggtcctccacatgagatatggccctaaaggcatagaactttgaccccatcatctccagcataaaatctagccctctaagcaggcacactggccttccaggtgtttaatgtggcccttaaaaatatcaaccctgactctccaagcacagaatctgattattcagacatggaatgtctctgcagaaataaatcctgcctctccaagcatacacacttaacctaggtatagagcctgagctgctatatatggatccttgtcttctggccatggagtagtctttcagatatgccacaggttatgacctatgtgaagtatcttttaccaagcttggaccctcaggttcttggatgaaacctgaatctcaaaacatgtcatctggcccactagaaatggttcctggacatctagatctgaactctggacttctaaatatctaacctgtacttctgggaatgaaacgagatgttttagtcttagcacttgatccctaaatatggaatctgagtctaaatgtttggaatttggctatctgtggataaaat

SEQ ID NO: 2440 - DNA, 686 bp, Homo sapiens
gacagcataaacaatttaagtcaaatcttaaattgaatagatttttctcattatgataaatgtaactaagatacttttaggtaatatatagatgagttatcactaatatatagtgcaaggcatcagaaagattataaaactaataacaggtgaaagttgaagccatttttwaaaaaatgtagacaccgtatgttgatatatttgtattatagcaccagatttttgacacttctttaaaaataccacaatttacctgagacttatccatgagaaattgaaggtcacttgagtcactcctggtcaagtagaccagagcctctgccccatcagcaccaatgccaaattgaccacaataatttttctttttaagactccagggaaacagcacaggattctacaactttcagctaaaattatggagtcctgaaatgttttggcaattggccaaatactggtaagttcagtgaaacatcctaattaatatgtgttagttaaacgtttacttctgtcaaacatgcagttaatagagccaatgtgaactttttgacaggatgttgaataggtcactatcttcctctctacataggaatttataaggcaaaacttcacctattgatacactataataaggaagtgaattgttccaaaagagtttttacataaaatctgaaggttaatagttaaac

SEQ ID NO: 2441 - DNA, 1270 bp, Homo sapiens
tgcataatgttctgacatccattaaaacagacaacaaaggaaaaatctctggccatctaaatgacagcattttcttggcagtttgtgttgttacagaaaatgccttacattggaaacrtctctgagtgtggtcacaaaactctaatggtgcacaatggcaggccagacagcccagcattcatttgaagagcaaggatctctgcagacaagctgctctagcaggcagcccacatgaaacaaacagctcacagcaaccaataagcccacccacacagccaggtccttgaaagcctgctgatgatgttcccctgcagacagcttctatcatgtgagatgcagcttaaccaaccctcactcctaccctccacctatctttaaggaatgagaaacaatggaaaatttcaaaaaaaaggcaacatcacatctcttcgttaggcatatagatttgtagtgtatacaacttcaagcccaaagatgaaagttgacctttgaggttgaaggtggatggaccttttaggaggcttccaatggtctatgatgtaatactccccaggctccacctttttattattctccaccttttattttaagtttaagggtacatgtgcaggatatacaggtttgttatatatgtaaatgtgtgccatggtggtttactgcaccaattatcccatcacccaggcattaagcccagcatccattagcttttattcctcatgctctttctcctctcaccctcaccctcccacaggcccagtgtatgctgttccccaccatgtgtccatgtgttctcatcatgttgctcccacttataaatgagaacatgcagtatttggttttctgttcctgtgttagtttgctaaggataattcagggtccaccttttagagaactgcatgggctcctgactgttaaagcctccaaattttatttctcaggcctgagatgcctcctcatgccattttcatgcaaggattcagattgcttttctgtaattctcagagctgtcgcctccccatttttcatcaagaggattcttttctctcaatactgaaacccagaatgctcagttccccctttccttgttgtccctgaaaataaatccccaggtcattttcactgttgctgaagtaaaccctaaggaggagagaggcaggcagagtccccagcaggtatgacagttcttagcttcctttcttaggtgatacccacaagcctaagtggcctccaatattctcctattattaaaaatgtgaagttgcttttgacc

SEQ ID NO: 2442 - DNA, 1319 bp, Homo sapiens
tttcctttagaaattaaatatttttagaaattatatagaaactgccttgacacaaaatttgacttgactaccatttttgtcggagaaaattagaaccagtttttctttttccaaaaaattataactaagaataaaccatttccatgtcatttgaaaaaatccctttaacattctctcctttataaattctccaaactttgctaatcttttaattatgaggcagaatttggcttgttgattctgcactcttcctccagggaagaatgcagtgccccaatccacactgcaggttgtggagtggcctgatttagaaggagatggtagtgatgccagtgaaatgccttcctaggaaagaagagtttttaaaaccactttgggttttttctctctccatatctttgtgagcttatcaaagattctcaaagcaagtaaatgggtttcagttaaagcaagtaaatgggtttcagtaattgttgaagtgaaaagcagacctaaaaatcagtgaatgataaggaaatccgatggctacaggttagttctaatatccaaatggaatcaataatcgtaggcccagtaatggtttagagtgagtcctggtaaaagtgtaagacttcaattttcagcctctaaaaatgtggtaaaaagcacacctgtataggatataatcaaatagtgtttcttagctttgtacataattcttcataatttttaaattctcaagaaataagtgtagcacagtatgtgagaatttcccagaacatctatactaagggggtgattacagagaaaggctaaggagaagaaaaccagatgttacaaaatctaagttttggaagttgctgaaaatacaaagagctgtcaagaccatttaggagaaaagaagggcatcagaggcatggctgtactaggaagagaatgggaaagcaggactcctgggaatggaaacaatcagatggtcaggaagggcgagggtgtcaggggatagaaccctgggcagctcagtgggaccaggaagtctgacaacagaattctccctgacttcagtgtttcccattatagatagctgcagattttcctgattgatcccacaattagtaagaactctctggagtttaaacttcatgccccttgccctcttggggaaggagattatcttcctctaaaatatgagagggtaaagagaagtccttgaggctgaataagcagttatttgatctgcgggggactcaagttttgcctgcctggcatctattcacctttattctgaaacagcatcctrgttctattttgcattatgttttcttgaaaatgctgatttg

SEQ ID NO: 2443 - DNA, 666 bp, Homo sapiens
agtggaaaggagtgatctgactaaattgaatatgctttttgtacccattagtaaatgacagaggccaggttaaaaattaccttagattttgtacaactctgagacaattaaaagtattattaactctttttgcaaatagggaaaattaagcttgattctatccaaataaaaaagtatacacattcttcctctgtcaaattactacaaatactctaacatatgatattcaaatattacaytaactgaaaacattctctattagagattcttcctacttatcaagaatctgttctttttataaaagttccagaaataaatttaacaattcccaaatgctaccttaatttaaccttttgttctaatttaatttcgacacttttatgaattatactgatggatggaattcaaataacatagcaaaaaactgaaacaaactaagaaacataatatttcttttatttgggtgtctagatatcatcccgtattatgaaaaccaatatggaaggttgggtagcaatcccaacagatgaaagtatcctttctaatatcatgttagacttcattaccccataggaaagtggggcttcatcaggtttcaaaagtgcaatccaaagaagacctgtaagcacaggagtcatattaataccaagaggtgattattagaat

SEQ ID NO: 2444 - DNA, 666 bp, Homo sapiens
agtggaaaggagtgatctgactaaattgaatatgctttttgtacccattagtaaatgacagaggccaggttaaaaattaccttagattttgtacaactctgagacaattaaaagtattattaactctttttgcaaatagggaaaattaagcttgattctatccaaataaaaaagtatacacattcttcctctgtcaaattactacaaatactctaacatatgatattcaaatattacactaactgaaaacattctctattagagattcttcctacttatcaagaatctgttctttttataaaagttccagaaataaatttaacaattcccaaatgctaccttaatttaaccttttgttctaatttaatttcgacacttttatgaattatactgatggatggaattcaaataacatagcaaaaaactgaaacaaactaagaaacataatatttcttttatttgggtgtctagatatcatcccgtattatgaaaaccaatatggaaggttgggtagcaatcccaacagatgaaagtatcctttctaatatcatgttagacttcattaccccataggaaastggggcttcatcaggtttcaaaagtgcaatccaaagaagacctgtaagcacaggagtcatattaataccaagaggtgattattagaat

SEQ ID NO: 2445 - DNA, 452 bp, Homo sapiens
caagccacaggcactatggaggaagaggaataccggaggaggggaacagtgcctgcagatatgtgagaggctatctgtgtgcagcatatgatgtgtggtttccaactggaaatgaggactgtgggttatttcttcatttctcaaatactttgaacaattattgtgtgcaaggtgctggaaacacagctatgataacccacaggccctgccctcaaggaggttaccctctrggtaggagttgatgtatatgtggggagtagaggagtgaggtaaagaactgaagaggcaatgacactgcaaagtgaccagtgctgagatgggatagagaggattgtgggaacaggggatagcagggaggagccactgaggaggcgggagctgccagacagcttaatttatctcgctcatgatcagtatagcttcaacaaccagcaatgtttttactgtttatt

SEQ ID NO: 2446 - DNA, 408 bp, Homo sapiens
ggaggctgaggcargagaatcgcttgagctcaagaggtcaaggctgcagagagccatgattgcaccactgcatgtcagcctgcgtgatagaacaaggaccctgtctcaaaaaataaaaaatgacaataaagattgcttgttaaataaaagtgatttatttactttgcataaatactatgccttctgagaatgctgtaggtgcgggcatattttgtttttatcctaacgcagcccaaattccaagtacacactggattttgagcatttaaaggacttccggtgctattaaggattcccatttgtttgttcaagtttgctaaacgaattcagtcatgtcacttacttagttgttgtaagtattatattacagtgtgaagggggtaaaaagaactgctatgagtatctttc

SEQ ID NO: 2447 - DNA, 408 bp, Homo sapiens
ggaggctgaggcaggagratcgcttgagctcaagaggtcaaggctgcagagagccatgattgcaccactgcatgtcagcctgcgtgatagaacaaggaccctgtctcaaaaaataaaaaatgacaataaagattgcttgttaaataaaagtgatttatttactttgcataaatactatgccttctgagaatgctgtaggtgcgggcatattttgtttttatcctaacgcagcccaaattccaagtacacactggattttgagcatttaaaggacttccggtgctattaaggattcccatttgtttgttcaagtttgctaaacgaattcagtcatgtcacttacttagttgttgtaagtattatattacagtgtgaagggggtaaaaagaactgctatgagtatctttc

SEQ ID NO: 2448 - DNA, 1600 bp, Homo sapiens
gcattatgttacctttcaaaaatctgaaaaagtctggatttctaacacatcttgtttaaaggtttccctgcctcagtaaaagagcaaactagaaacaatgtcacgttttctttaatgactcggtagattaccttagaacagaggcacagtataataatcaataattcctattgtacaaagattgtacaataagatatagttaaatggcagaggactttttgctgaaagtgtactgacaaccatgatcatttttttaaggtaagtcctgagtcaacttgtttccatctcgcttgagtttctaaatagtagctaagcttgcaaaacaattatagtcaaatgatactattaattaactgatttgaattcactcaattttcatcattttgaatttattttttaggattaggtcatactctagctcatgggtgtataattaaatgtgggtgtacaattttaaaaatccagaaatcattgcaccaaaccataagcttatggagaaaagagaagtactttttgatctttcttccttcataatgctttgcctacacatagtagtcattcagttggtgtggaaatgaatattttagcctactgttatattttgagaaaatgccactgaaatctccatcatcagaaacaatttaaaactgccagaactttagtgtcaacattcctcttgctctagactgtgagtggctacacatctatctccacacatgagcttcttttctgttttaagcctaaaaacagcagccatatttgacattgagttttttcaatgtcatataaaataatcatgctcacttcagctcagattttattgaagccattattgaagcttaagtcttttgtggactcacttttgaattcaacatttcttcaagtgtctcacagccattcgttccacactgttggtcatccgaggagaaggaacaaaccctggggacactttcctcctttgagactagtggaccttgaggcaaaacgacacccacaattgtagtctgagcaccgggaattccatgtaaagaacattttaaaaatatttcaatgatgtcctgattagcctcatccaagtaaccaaaacaattctttatactcgcactcccttccacccaccctcctccctccactagccacgggctgggagaaaatatttgcaacacacatatcagatatagaatatgtatctagaatcaaaaacaaaacaaaacccaaaacactccttataattccaccatgaaaagataaacaatccaatttacaaatagacaacagataccttagtaaaaataatcacactcagaacctatttctatgtttcttttaacattctccaataaaagaactgtggctcctgagacaaatggctggtctcagggctggggcaagggctatactagatgagcctggcttatcttgtagtttcagaatgtgaggaagggctcgagaaaacacaatgatggggatatatcagatggrtacaggaactaagtaaagaatctcccaatggccaaagctgaaacaatgtgagcaacaaaatcaataatgaaatattgatttataatccatccaaagtggaaaataaatactgaatgca

SEQ ID NO: 2449 - DNA, 1314 bp, Homo sapiens
cttcaactaagttcattgtgtgatatggagacagtttctgaagatattattttcctacagtgttccctcctggaaagcattttctgtttcttttctcatgaaaatcccagtctatcatatgtcatgaatttatgtcctgataaagtctaagttttgaagacattctttttacaagtgaagggagaggaggcccacagagtctatgctctgctgtaaccatgaagaagctactcagtcatcttccctaagccctgttaccaaaatgagtggaccccaacataatattagtgtgatcctagattccccaacttctccatcatgccatgtctccaaattagcctaaatgccaatgaatcacttctcattttatctactttcaaaaatcctaaatatatcactgacttttgatgagaaatatttcttggggatgtctgttaccttggccattccacatagttttgttgctggtggataaagtaggagggaccttcggtctggtagaatcactaggagaggctgtaccctcccaaccaagtagcattagttatagaatcgtgtttttggaaacaaatcatggaagtaaagggggagacggatttcaggagagaggtaaaacacccatccacttgaatcttcaacatcatgataacccatggtcagtccgtasctggaatagctccacaactgctttatggcacatttgcctcagatcctcatacattcctcttaaaagctccctggaatgttccattctggctttgctttcattgagttgctgaaaaatgtcctcgccctccttttgcagcctctccaagtgacgttgctcttcttcatggaaaaatgcaaccatcttatgatattcagctctgattgcttctatccttaaactcacataatcctgcagtgacaattagtcaaaatagaaatgttttatccatcttctcttgaatttcactgattcctcttagcattctgaacacccaatattttaatcctcgatcttgtcaattctcagattccacaaaattttattcctttcatttctgtattaatatcaacatagttgtttctgcccagttatatttacttgattaatgataaaatgttttctaagatagttgtataaaaatggatttctctcttccacaccacatttatagaaagaaaacacagttttttcttaagaatcaaaatatcaagttatgctgactaggtaagaaaccattatttctattttggagaattggggcaagttatgtaaaaccattatatgacaaatgatgacatgaccacagactagcattgtcaactcaa

SEQ ID NO: 2450 - DNA, 1170 bp, Homo sapiens
tgcagcaaacactagatatctaaaatttttcaaaaatatattaaaaacttttggaacacacaaaatgacaacaattaataacctcatgtcataaaatgaatagcaataatatgagttacaaataagatcattaagtaagtttagacagttagatatttttatcactgtaatttactcttttaaaggaagagagaaataattttctccatataagttgcactcaccccaaggttctatgaatgtttcctgcagtaattcttccaagaaaaaattcttttaagtattccccaagatcaggagttcattccctgcacagttgactttccaaggtcacctgaatgcagttaactctaagtgctgtcctcctctggagaaatatgagcttgtctcttctacatccttttatatgaatctttgaagaccacacccacctctttagtgatatttagggtattaagaatggtggagacagagatgattaggtttatgcaatatttagtacacaccttttcatcactgattaaattagcctcacactatcattgtaaaaaccactgcctgaatgaggcatatctatcatcaatcttattagagtaaacatatgctagaaattaactgaaattaatactatttcttgggtttcttccaaggcacaagcattcctctaagtgcacatttatttatttataccaaagaaagtttcaccctctggagtgcagtggcacactcttagctccccgcagcattgaattccagagctcaagtaatcctcccacttcagctttcaaagtaaaaaagactakaggtttatgccattggacctagctaatttttcatttattcatcaaaaatattttttaaattcttagttgattacatgtgtcacaatgaccagctggattagaattagattaggtttaaaacaatgaaagaatctgggagagggggcagagtgttggttgttaattagcacatggatcaaaggagattactgatgtgtttagaagccaaaacactgacagaataaaagccagaactaacaatccaattgtaaatctctttactgtggtattttctgccatttctgctccataagacacaccttaaccactttgttgtggtatctgcagtattctattttagtctaaatagcattttctctcaaatgca

SEQ ID NO: 2451 - DNA, 1170 bp, Homo sapiens
tgcagcaaacactagatatctaaaatttttcaaaaatatattaaaaacttttggaacacacaaaatgacaacaattaataacctcatgtcataaaatgaatagcaataatatgagttacaaataagatcattaagtaagtttagacagttagatatttttatcactgtaatttactcttttaaaggaagagagaaataattttctccatataagttgcactcaccccaaggttctatgaatgtttcctgcagtaattcttccaagaaaaaattcttttaagtattccccaagatcaggagttcattccctgcacagttgactttccaaggtcacctgaatgcagttaactctaagtgctgtcctcctctggagaaatatgagcttgtctcttctacatccttttatatgaatctttgaagaccacacccacctctttagtgatatttagggtattaagaatggtggagacagagatgattaggtttatgcaatatttagtacacaccttttcatcactgattaaattagcctcacactatcattgtaaaaaccactgcctgaatgaggcatatctatcatcaatcttattagagtaaacatatgctagaaattaactgaaattaatactatttcttgggtttcttccaaggcacaagcattcctctaagtgcacatttatttatttataccaaagaaagtttcaccctctggagtgcagtggcacactcttagctccccgcagcattgaattccagagctcaagtaatcctcccacttcagctttcaaagtaaaaaagactataggtttatgccattggacctagctaatttttcatttattcatcaaaaatattttttaaattcttagttgattacatgtgtcacaatgaccagctggattagaattagattaggtttaaaacaatgaaagaatctgggagagggggcagagtgttggttgttaattagcacatggatcaaaggagatkactgatgtgtttagaagccaaaacactgacagaataaaagccagaactaacaatccaattgtaaatctctttactgtggtattttctgccatttctgctccataagacacaccttaaccactttgttgtggtatctgcagtattctattttagtctaaatagcattttctctcaaatgca

SEQ ID NO: 2452 - DNA, 1309 bp, Homo sapiens
acaatgstagtctgggtcatgtcatcatttgtcatataatggttttacataacttgccccaattctccaaaatagaaataatggtttcttacctagtcaatataactcgatagtttgattcttaagcaagaactgtgttttctttctataaatgtggtgtggaagagagaaatccatctttatataactgtcatagaaaacattttatcattaatcaagtaaatgtaactgggcagaaacaactatgttgatagtagtacagaaaaaaaggaaaggaataaaattttgtggaatctgagaattgacaagatcgaggattaaaatattgggtgttgagaatgctaagaggaatcagtgaaattcaagagaagatggataaaacatttctattttgactaattgtcactgcaggattatgtgagtttaaggatagaagcaatcagagctgaatatcagaagatgcctgcatttctccatgaagaagagcaacatcacttggagaggctgcgaaaggaggacgaggacatttttcagcaactcaatgaaagcaaagccagaatgaaacattccagggagcttttaagaggaatgtatgaggatctgaagcaaatgtgccataaagcagatgtggagctactccaggtacggactgaccgtggggtatcatggtgttgaacattcacatacatgggtgtttttcctctctcctgaaatccatctcccccttcacttccatgatttgtttccaaaaacatgattcaataactaatgctccttggttgggagggtgtatcctctccttgtgattctaccagaccgaaggtccctcctactttatccaccagcaacaaaactttgtagaatggctaaggtaacaaatagccccaagaaatatttcccatcaaaagtcagtgatttatttaggatttttgaaagtggataaaatgagaagtgatccattggcatttaggctaatttggagacatggcaggatggagaagttggggaatctaggatcaccctaatattattttggggtccactcactttggtaacaaggtttagggaagatgactgagtagcttctttatggttacctcagagcatagactctgtaggcctcctctcccttcacttgaaaagagaatgtcttcaagacttagactttgtcaggacattaattcatgacatatcatagactgggattttcatgagaaaagaaacagaaaatgctttccaggagggaacattgtaggaaaataatatcttcagaaactgtctccaaatctcacactgaacttagtggaag

SEQ ID NO: 2453 - DNA, 1309 bp, Homo sapiens
acaatgctagtctgggtcatgtcatcatttgtcatataatggttttacataacttgccccaattctccaaaatagaaataatggtttcttacctagtcaatataactcgatagtttgattcttaagcaagaactgtgttttctttctataaatgtggtgtggaagagagaaatccatctttatataactgtcatagaaaacattttatcattaatcaagtaaatgtaactgggcagaaacaactatgttgatagtagtacagaaaaaaaggaaaggaataaaattttgtggaatctgagaattgacaagatcgaggattaaaatattgggtgttgagaatgctaagaggaatcagtgaaattcaagagaagatggataaaacatttctattttgactaattgtcactgcaggattatgtgagtttaaggatagaagcaatcagagctgaatatcagaagatgcctgcatttctccatgaagaagagcaacatcacttggagaggctgcgaaaggaggrcgaggacatttttcagcaactcaatgaaagcaaagccagaatgaaacattccagggagcttttaagaggaatgtatgaggatctgaagcaaatgtgccataaagcagatgtggagctactccaggtacggactgaccgtggggtatcatggtgttgaacattcacatacatgggtgtttttcctctctcctgaaatccatctcccccttcacttccatgatttgtttccaaaaacatgattcaataactaatgctccttggttgggagggtgtatcctctccttgtgattctaccagaccgaaggtccctcctactttatccaccagcaacaaaactttgtagaatggctaaggtaacaaatagccccaagaaatatttcccatcaaaagtcagtgatttatttaggatttttgaaagtggataaaatgagaagtgatccattggcatttaggctaatttggagacatggcaggatggagaagttggggaatctaggatcaccctaatattattttggggtccactcactttggtaacaaggtttagggaagatgactgagtagcttctttatggttacctcagagcatagactctgtaggcctcctctcccttcacttgaaaagagaatgtcttcaagacttagactttgtcaggacattaattcatgacatatcatagactgggattttcatgagaaaagaaacagaaaatgctttccaggagggaacattgtaggaaaataatatcttcagaaactgtctccaaatctcacactgaacttagtggaag

SEQ ID NO: 2454 - DNA, 1309 bp, Homo sapiens
acaatgctagtctgggtcatgtcatcatttgtcatataatggttttacataacttgccccaattctccaaaatagaaataatggtttcttacctagtcaatataactcgatagtttgattcttaagcaagaactgtgttttctttctataaatgtggtgtggaagagagaaatccatctttatataactgtcatagaaaacattttatcattaatcaagtaaatgtaactgggcagaaacaactatgttgatagtagtacagaaaaaaaggaaaggaataaaattttgtggaatctgagaattgacaagatcgaggattaaaatattgggtgttgagaatgctaagaggaatcagtgaaattcaagagaagatggataaaacatttctattttgactaattgtcactgcaggattatgtgagtttaaggatagaagcaatcagagctgaatatcagaagatgcctgcatttctccatgaagaagagcaacatcacttggagaggctgcgaaaggaggacgaggacatttttcagcaactcaatgaaagcaaagccagaatgaaacattccagggagcttttaagaggaatgtatgaggatctgaarcaaatgtgccataaagcagatgtggagctactccaggtacggactgaccgtggggtatcatggtgttgaacattcacatacatgggtgtttttcctctctcctgaaatccatctcccccttcacttccatgatttgtttccaaaaacatgattcaataactaatgctccttggttgggagggtgtatcctctccttgtgattctaccagaccgaaggtccctcctactttatccaccagcaacaaaactttgtagaatggctaaggtaacaaatagccccaagaaatatttcccatcaaaagtcagtgatttatttaggatttttgaaagtggataaaatgagaagtgatccattggcatttaggctaatttggagacatggcaggatggagaagttggggaatctaggatcaccctaatattattttggggtccactcactttggtaacaaggtttagggaagatgactgagtagcttctttatggttacctcagagcatagactctgtaggcctcctctcccttcacttgaaaagagaatgtcttcaagacttagactttgtcaggacattaattcatgacatatcatagactgggattttcatgagaaaagaaacagaaaatgctttccaggagggaacattgtaggaaaataatatcttcagaaactgtctccaaatctcacactgaacttagtggaag

SEQ ID NO: 2455 - DNA, 1140 bp, Homo sapiens
  misc_feature (1)...(1140): n = A,T,C or G
tnnnnnnnnnnnnnnnnnnnnnnnnnnnnnnnnnnnnnnnnnnnnnnnnnnnnnnnnnnnnnnnnnnnnnnnnnnnnnnnnnnnnnnnnnnnnnnnnnnnnttcttattttcttctcctctaccccttcacttttctctttgttttgcttcttatttttggttaagaaatactacttgagtcatgtgtggccacatgtgtcaaattacacagtgagaaggccctttcatgccctaacttgtgccagcttcgttttccttcagggctgtctttcctgckaacaacccctcttctgccccctggaactcatttttcttgctgtggtgttctgttgcaaagtaagtctgaagttattaagaaaggcaatgacaaaatgccaacaggaacatcgtatattacatgcagggcctactataaacaaatcactggaaatgctgcacaggtacaagtcactacattaaaacaacatatttttgtttgatcgagaaatactttttgagcatctattttgtgccagaactgttagtatcccattgtagctacccaacaaagggaagcaaaaataagagataatcatcatcccctcactaatacttttgattttctctgtttcaagtaaaatgaacatactcacttcattaaaatttcaaacattatacaagattgacataaaatgaaataaaaagatcttatccttctttccaaaattttcattaacattcctcagaagtaaagagtcttaacagtttactgtacatcctttcagaatatttatatatttatctaccatataaatctccttgggatgctataagaaaatgccatagacttaaaaacagattatttgtttctcacagttttgaaggctgggaagcctatctatcaagtcctatccatcaaggtcctatcaaggtcctggaaaatttgatttctggtaagggcccgctttctggcctgcagatggctgccttcttgcttctcacatggtagagagaaagtaatttcttttaaaaaattttatcatattttaagtttcaggatccatgtgaaggatgtgcaggtttgtttaataggtaaatgtgtgccgtggtagtttgctgcacctatcaacccatcacctaggtattaagctcagcatgca

SEQ ID NO: 2456 - DNA, 607 bp, Homo sapiens
caagacaaacacacacatacacacacacacacaggcacayatgcatacacaaatacattgcatacacacatgtcagttcaggggatagaggacactgactctgggccctgttgacccaagcagactcccatggtggtgggttgtgtcaccccacaatgtcactgttgctgagtccccatcgcctctgtgttgtggagcagttagagacacacagcagtgtctgtgagtagctctgcgtgaaggaccattttctagatgagaggcacatctcaacacagctcactgatcagattcaggtgagtgggacctgctcttttctcttcctcctggcttgggaaaagtcactatcaggtgggtggttttggcctctgggcagctactgagggtaatccctgaacactcaccagctgcctgttatgtgctgacagtcatctcattcatcctcgcagcaattccattctgcatcttttctgatcacctccgtgaccacacaggacaaccccatcagggccctgtcaccaggcccagtctagctccatgataaccaagacacaggtccagagacaatcgtcctacattgtgcctgcatctgaccccccttggtagg

SEQ ID NO: 2457 - DNA, 607 bp, Homo sapiens
caagacaaacacacacatacacacacacacacaggcacacatgcatacacaaatacaytgcatacacacatgtcagttcaggggatagaggacactgactctgggccctgttgacccaagcagactcccatggtggtgggttgtgtcaccccacaatgtcactgttgctgagtccccatcgcctctgtgttgtggagcagttagagacacacagcagtgtctgtgagtagctctgcgtgaaggaccattttctagatgagaggcacatctcaacacagctcactgatcagattcaggtgagtgggacctgctcttttctcttcctcctggcttgggaaaagtcactatcaggtgggtggttttggcctctgggcagctactgagggtaatccctgaacactcaccagctgcctgttatgtgctgacagtcatctcattcatcctcgcagcaattccattctgcatcttttctgatcacctccgtgaccacacaggacaaccccatcagggccctgtcaccaggcccagtctagctccatgataaccaagacacaggtccagagacaatcgtcctacattgtgcctgcatctgaccccccttggtagg

SEQ ID NO: 2458 - DNA, 607 bp, Homo sapiens
caagacaaacacacacatacacacacacacacaggcacacatgcatacacaaatacattgcatacacacatgtcagttcaggggatagaggacactgactctgggccctgttgacccaagcagactcccatggtggtgggttgtgtcaccccacaatgtcactgttgctgagtccccatcgcctctgtgttgtggagcagttagagacacacagcagtgtctgtgagtagctctgcgtgaaggaccattttctagatgagaggcacatctcaacacagctcactgatcagattcaggtgagtgggacctgctcttttctcttcctcctggcttgggaaaagtcactatcaggtggrtggttttggcctctgggcagctactgagggtaatccctgaacactcaccagctgcctgttatgtgctgacagtcatctcattcatcctcgcagcaattccattctgcatcttttctgatcacctccgtgaccacacaggacaaccccatcagggccctgtcaccaggcccagtctagctccatgataaccaagacacaggtccagagacaatcgtcctacattgtgcctgcatctgaccccccttggtagg

SEQ ID NO: 2459 - DNA, 583 bp, Homo sapiens
tcaattagtaacagaaggtgtcatgatccagctaccttcaagaacgaccagagggtttttggtccagtttgtttcatttgtttgtattttgatgcycaaattttctcatctttggctaataagatccttcagtttggctccaacgtcctttggacatgactctcctagcttttgataccttccttgatttctggctcatcaagataatccacactcatcttgtccatttcccaccccaaatacgaaatcagccatttcttcaagttctatttcatttctgtgaatagtggtatttagaaaccatcatctgggctccagtgctcagtgttacaagattggtgttgcttcaaggcctttttagaagatgtagttaggaaaaatgttgtaaatgagaaaaataaaagttaacattacagtattttaatctctttgattttatacctttctcgtttctttcacactaacaatcctggtagccaacaacattaacataatgacttatttcatttcccatcctatatacacagaatagtttcaaaacaactatgccaatatggttaataacagcagtcctgcagaattc

SEQ ID NO: 2460 - DNA, 583 bp, Homo sapiens
tcaattagtaacagaaggtgtcatgatccagctaccttcaagaacgaccagagggtttttggtccagtttgtttcatttgtttgtattttgatgctcaaattttctcatctttggctaataagatccttcagtttggctccaacgtcctttggacatgactctcctagcttttgataccttccttgatttctggctcatcaagataatccacactcatcttgtccatttcccaccccaaatacgaaatcagccatttcttcaagttctatttcatttctgtgaakagtggtatttagaaaccatcatctgggctccagtgctcagtgttacaagattggtgttgcttcaaggcctttttagaagatgtagttaggaaaaatgttgtaaatgagaaaaataaaagttaacattacagtattttaatctctttgattttatacctttctcgtttctttcacactaacaatcctggtagccaacaacattaacataatgacttatttcatttcccatcctatatacacagaatagtttcaaaacaactatgccaatatggttaataacagcagtcctgcagaattc

SEQ ID NO: 2461 - DNA, 583 bp, Homo sapiens
tcaattagtaacagaaggtgtcatgatccagctaccttcaagaacgaccagagggtttttggtccagtttgtttcatttgtttgtattttgatgctcaaattttctcatctttggctaataagatccttcagtttggctccaacgtcctttggacatgactctcctagcttttgataccttccttgatttctggctcatcaagataatccacactcatcttgtccatttcccaccccaaatacgaaatcagccatttcttcaagttctatttcatttctgtgaatagtggtatttagaaaccatcatctgggctccagtgctcagtgttacaagattggtgttgcttcaaggcctttttagaagatgtmgttaggaaaaatgttgtaaatgagaaaaataaaagttaacattacagtattttaatctctttgattttatacctttctcgtttctttcacactaacaatcctggtagccaacaacattaacataatgacttatttcatttcccatcctatatacacagaatagtttcaaaacaactatgccaatatggttaataacagcagtcctgcagaattc

SEQ ID NO: 2462 - DNA, 1336 bp, Homo sapiens
catttgatggaagtagtgtgtttgacactgttaatggaactattcattatgattatcaattattttactaaatcagcggcagcaacatattttttttccactcccaccacctgttccttaagtagaagagtgacagtagcgtattttaggagggacagtgggtaaaggacggaagtgcctgtgaaaagcatctcttaacccacagaactagaaaattcacccaaaggggctttttctgtgtgggccagattctcttccaattaagattaaaacatatttatagtttactgtgtctttcctattaaatgatatagctctctttttttttagagtcaaataactggggtgttatatgcctagaaactattaaaagaattttaaagcatgtaatcccaaggagcagaacacttatttttgaaaatagaggtctctcaaatagtccaccaagtggagcgtatataaaaataatgtgatactgacaaaacattagcagaaataagcagagatcaaaaatcatcagtgtgggccaggtgcagtgcctcacgcttgtaatcccagcacttcgggaggctgaggcaggcagatcacttgaggtcaggagttcgaggccagcctggccaacatggtgaaactccgtctctactgaaaatacaaaaattagctgagggtggtgccaggcatctgttatcccagctactcgggactgaggcacaagagtcacttgaatccaggaggtggaggttgcagtgagctgagaagacaccattgcactccagcctgggcaacagagtgagactccatctcaaaaaaaaaaaaaattgtgatgtgcatattgagaaataaattgtgttatatatgatcctgtaaaatatctttaattttacaatacagtaacaaactgcaaactattgtagaatagaaatatatctgacaaaaccatctgctcctcagcaaagaggaaggttcgacatggttttgatcagaggtatcattaatgaaagaacaatcacctgaaagattaataacatctgaaagggaagaatttccttttatctccttttgctttcctatcctttaatgtagatgttaatgagtattgaaatcgacaaaagggaaaaaataataataaggcacaggagaaaggggcacattggattttcatccttgaataatctgacttggwtggcgtgaccttccccatttgagcacctctgaaaatagtctgtgacgggaatttttcatgtctatttttgcgcagaaagtaaataatcatagaataagaaaaatattgcttaggcattttctgagatgatctctaggaaaattcagaattctt

SEQ ID NO: 2463 - DNA, 1336 bp, Homo sapiens
catttgatggaagtagtgtgtttgacactgttaatggaactattcattatgattatcaattattttactaaatcagcggcagcaacatattttttttccactcccaccacctgttccttaagtagaagagtgacagtagcgtattttaggagggacagtgggtaaaggacggaagtgcctgtgaaaagcatctcttaacccacagaactagaaaattcacccaaaggggctttttctgtgtgggccagattctcttccaattaagattaaaacatatttatagtttactgtgtctttcctattaaatgatatagctctctttttttttagagtcaaataactggggtgttatatgcctagaaactattaaaagaattttaaagcatgtaatcccaaggagcagaacacttatttttgaaaatagaggtctctcaaatagtccaccaagtggagcgtatataaaaataatgtgatactgacaaaacattagcagaaataagcagagatcaaaaatcatcagtgtgggccaggtgcagtgcctcacgcttgtaatcccagcacttcgggaggctgaggcaggcagatcacttgaggtcaggagttcgaggccagcctggccaacatggtgaaactccgtctctactgaaaatacaaaaattagctgagggtggtgccaggcatctgttatcccagctactcgggactgaggcacaagagtcacttgaatccaggaggtggaggttgcagtgagctgagaagacaccattgcactccagcctgggcaacagagtgagactccatctcaaaaaaaaaaaaaattgtgatgtgcatattgagaaataaattgtgttatatatgatcctgtaaaatatctttaattttacaatacagtaacaaactgcaaactattgtagaatagaaatatatctgacaaaaccatctgctcctcagcaaagaggaaggttcgacatggttttgatcagaggtatcattaatgaaagaacaatcacctgaaagattaataacatctgaaagggaagaatttccttttatctccttttgctttcctatcctttaatgtagatgttaatgagtattgaaatcgacaaaagggaaaaaataataataaggcacaggagaaaggggcacattggattttcatccttgaataatctgacttggttggcgtgaccttccccatttgagcacctctgaaaatagtctgtgacgggaatttttcatgtctatttttgcgcrgaaagtaaataatcatagaataagaaaaatattgcttaggcattttctgagatgatctctaggaaaattcagaattctt

SEQ ID NO: 2464 - DNA, 632 bp, Homo sapiens
gtgatttttaaagcgagagctgagagttgagtaggagttttagttctttggctgacagttgccaggaattgcatttcaggaattcatgcatgggaataaggaattaaagcctttgtggtaagaaagtacgtgctgaaattgaggaatggaaagatgattggtgtaaccagagtatggtgtagaagcaacagaagactgtaaggagaggcagggaggttagcaagggccacatcaaacaggagtattatagcgttcttttcctaagagtaatggtcaagtctttatggtcaagtaatggcatgatgctttttaaaagatcgttcaggggatagtgaactgagagtaaggaagaggagaagtagggagacaaaaaggtaatgctgcagcccagtgagagacaatggtygttcacttcagggtactggaggtagaaacattgatatgagtgcatttgtagagttggtttgccagaacttggtggcagattattgagatggtaaagaaaagagaaaaattaggaataactttcaaatgctacattaactaattagatactgttaccatttattgagatgacaaaaactatggagagatttatccaagaaggtcaattagtcagcttgggatgtttc

SEQ ID NO: 2465 - DNA, 632 bp, Homo sapiens
gtgatttttaaagcgagagctgagagttgagtaggagttttagttctttggctgacagttgccaggaattgcatttcaggaattcatgcatgggaataaggaattaaagcctttgtggtaagaaagtacgtgctgaaattgaggaatggaaagatgattggtgtaaccagagtatggtgtagaagcaacagaagactgtaaggagaggcagggaggttagcaagggccacatcaaacaggagtattatagcgttcttttcctaagagtaatggtcaagtctttatggtcaagtaatggcatgatgctttttaaaagatcgttcaggggatagtgaactgagagtaaggaagaggagaagtagggagacaaaaaggtaatgctgcagcccagtgagagacaatggtcgttcacttcagggtactggaggtagaaacattgatatgagtgcatttgtagagttggtttgccagaacttggtggcagattattgagatggtaaagaaaagagaaaaattargaataactttcaaatgctacattaactaattagatactgttaccatttattgagatgacaaaaactatggagagatttatccaagaaggtcaattagtcagcttgggatgtttc

SEQ ID NO: 2466 - DNA, 1208 bp, Homo sapiens
taaaacaagaaaaaaatttttatatcactgatcaagaagaccctaatgtgtaatgtaccttgctaggacctatgtatataatacctttttttacttacatttagattgaaaaaattaactttgctatgctttattttcttttattccataaatctgttaaataaattttatkcgcttcctgctaatcacttaaatattacaaattagctcacattcccatgtgctggcaatattttctcatatcgatgtaatacggcctgtacgatacatgtaatatggcctgtactctggaaaccatctgtgtataatatttcaaataatagttatgtggcaacttactttttatcctcaaatgaaatcagtttttacaataagaaaaaaatcatttcctcagactgtcgtatgctttattattgcaaataatactattacgcatgaagagggaatttaaattaatttgtgcactaaagttaattaagtcaaagtcttgacctcacattatttgttaatacttattggagttacacagcatgttcagttacatagcaaatatttatttgatgtaatctatgagccaggcattgttctaggctgagatgtggcagcgaatgtaaaagaccaaaacttcttggtgagtacattccagtttatggcaacatatcagtcaggaagactacctaggatgaaaggtggttctaaggctagcaagggaagaaaggctggcaaatattagggagtgcaggatgaatagctgcttttctttctttttctttttttttcttttgagacggagttttgctctgtcacccaggctggactgtaggggcatgatctcagctcactgcaacctctgcctcccgggttcaagcagttctcctgcctcagcctcctgagtagctgggactacaggtgcacgctgtcttttttgtattttagtagagacggggttttactgtgttgctcagactgttctcgaactcctgagctctggcaatctgctcacctcggcctcccaaagtgctagaattacaggcgtgaagctgcaatttgaaacagaattttcagagaaggactcactggagaagtgacctttcatttaataggaagacctgcagtaaatgaacaaagtaactacaggaatatgcactaaaagtgcaggggaaaagagctggtgagaaagccacagtgaagagcagagcttgctgatg

SEQ ID NO: 2467 - DNA, 1208 bp, Homo sapiens
taaaacaagaaaaaaatttttatatcactgatcaagaagaccctaatgtgtaatgtaccttgctaggacctatgtatataatacctttttttacttacatttagattgaaaaaattaactttgctatgctttattttcttttattccataaatctgttaaataaattttatgcgcttcctgctaatcmcttaaatattacaaattagctcacattcccatgtgctggcaatattttctcatatcgatgtaatacggcctgtacgatacatgtaatatggcctgtactctggaaaccatctgtgtataatatttcaaataatagttatgtggcaacttactttttatcctcaaatgaaatcagtttttacaataagaaaaaaatcatttcctcagactgtcgtatgctttattattgcaaataatactattacgcatgaagagggaatttaaattaatttgtgcactaaagttaattaagtcaaagtcttgacctcacattatttgttaatacttattggagttacacagcatgttcagttacatagcaaatatttatttgatgtaatctatgagccaggcattgttctaggctgagatgtggcagcgaatgtaaaagaccaaaacttcttggtgagtacattccagtttatggcaacatatcagtcaggaagactacctaggatgaaaggtggttctaaggctagcaagggaagaaaggctggcaaatattagggagtgcaggatgaatagctgcttttctttctttttctttttttttcttttgagacggagttttgctctgtcacccaggctggactgtaggggcatgatctcagctcactgcaacctctgcctcccgggttcaagcagttctcctgcctcagcctcctgagtagctgggactacaggtgcacgctgtcttttttgtattttagtagagacggggttttactgtgttgctcagactgttctcgaactcctgagctctggcaatctgctcacctcggcctcccaaagtgctagaattacaggcgtgaagctgcaatttgaaacagaattttcagagaaggactcactggagaagtgacctttcatttaataggaagacctgcagtaaatgaacaaagtaactacaggaatatgcactaaaagtgcaggggaaaagagctggtgagaaagccacagtgaagagcagagcttgctgatg

SEQ ID NO: 2468 - DNA, 1208 bp, Homo sapiens
taaaacaagaaaaaaatttttatatcactgatcaagaagaccctaatgtgtaatgtaccttgctaggacctatgtatataatacctttttttacttacatttagattgaaaaaattaactttgctatgctttattttcttttattccataaatctgttaaataaattttatgcgcttcctgctaatcacttaaatattacaaattagytcacattcccatgtgctggcaatattttctcatatcgatgtaatacggcctgtacgatacatgtaatatggcctgtactctggaaaccatctgtgtataatatttcaaataatagttatgtggcaacttactttttatcctcaaatgaaatcagtttttacaataagaaaaaaatcatttcctcagactgtcgtatgctttattattgcaaataatactattacgcatgaagagggaatttaaattaatttgtgcactaaagttaattaagtcaaagtcttgacctcacattatttgttaatacttattggagttacacagcatgttcagttacatagcaaatatttatttgatgtaatctatgagccaggcattgttctaggctgagatgtggcagcgaatgtaaaagaccaaaacttcttggtgagtacattccagtttatggcaacatatcagtcaggaagactacctaggatgaaaggtggttctaaggctagcaagggaagaaaggctggcaaatattagggagtgcaggatgaatagctgcttttctttctttttctttttttttcttttgagacggagttttgctctgtcacccaggctggactgtaggggcatgatctcagctcactgcaacctctgcctcccgggttcaagcagttctcctgcctcagcctcctgagtagctgggactacaggtgcacgctgtcttttttgtattttagtagagacggggttttactgtgttgctcagactgttctcgaactcctgagctctggcaatctgctcacctcggcctcccaaagtgctagaattacaggcgtgaagctgcaatttgaaacagaattttcagagaaggactcactggagaagtgacctttcatttaataggaagacctgcagtaaatgaacaaagtaactacaggaatatgcactaaaagtgcaggggaaaagagctggtgagaaagccacagtgaagagcagagcttgctgatg

SEQ ID NO: 2469 - DNA, 1208 bp, Homo sapiens
taaaacaagaaaaaaatttttatatcactgatcaagaagaccctaatgtgtaatgtaccttgctaggacctatgtatataatacctttttttacttacatttagattgaaaaaattaactttgctatgctttattttcttttattccataaatctgttaaataaattttatgcgcttcctgctaatcacttaaatattacaaattagctcacattcccatgtgctggcaatattttctcatatcgatgtaatacggcctgtacgatacatgtaatatggcctgtactctggaaaccatctgtgtataatatttcaaataatagttatgtggcaacttactttttatcctcaaatgaaatcagtttttacaataagaaaaaaatcatttcctcagactgtcgtatgctttattattgcaaataatactattacgcatgaagagggaatttaaattaatttgtgcactaaagttaattaagtcaaagtcttgacctcacattatttgttaatacttattggagttacacagcatgttcagttacatagcaaatatttatttgatgtaatctatgagccaggcattgttctaggctgagatgtggcagcgaatgtaaaagaccaaaacttcttggtgagtacattccagtttatggcaacatatcagtcaggaagactacctaggatgaaaggtggttctaaggctagcaagggaagaaaggctggcaaatattagggagtgcaggatgaatagctgcttttctttctttttctttttttttcttttgagacggagttttgctctgtcacccaggctggactgtaggggcatgatctcagctcactgcaacctctgcctcccgggttcaagcagttctcctgcctcagcctcctgagtagctgggactacaggtgcacgctgtcttttttgtattttagtakagacggggttttactgtgttgctcagactgttctcgaactcctgagctctggcaatctgctcacctcggcctcccaaagtgctagaattacaggcgtgaagctgcaatttgaaacagaattttcagagaaggactcactggagaagtgacctttcatttaataggaagacctgcagtaaatgaacaaagtaactacaggaatatgcactaaaagtgcaggggaaaagagctggtgagaaagccacagtgaagagcagagcttgctgatg

SEQ ID NO: 2470 - DNA, 1208 bp, Homo sapiens
taaaacaagaaaaaaatttttatatcactgatcaagaagaccctaatgtgtaatgtaccttgctaggacctatgtatataatacctttttttacttacatttagattgaaaaaattaactttgctatgctttattttcttttattccataaatctgttaaataaattttatgcgcttcctgctaatcacttaaatattacaaattagctcacattcccatgtgctggcaatattttctcatatcgatgtaatacggcctgtacgatacatgtaatatggcctgtactctggaaaccatctgtgtataatatttcaaataatagttatgtggcaacttactttttatcctcaaatgaaatcagtttttacaataagaaaaaaatcatttcctcagactgtcgtatgctttattattgcaaataatactattacgcatgaagagggaatttaaattaatttgtgcactaaagttaattaagtcaaagtcttgacctcacattatttgttaatacttattggagttacacagcatgttcagttacatagcaaatatttatttgatgtaatctatgagccaggcattgttctaggctgagatgtggcagcgaatgtaaaagaccaaaacttcttggtgagtacattccagtttatggcaacatatcagtcaggaagactacctaggatgaaaggtggttctaaggctagcaagggaagaaaggctggcaaatattagggagtgcaggatgaatagctgcttttctttctttttctttttttttcttttgagacggagttttgctctgtcacccaggctggactgtaggggcatgatctcagctcactgcaacctctgcctcccgggttcaagcagttctcctgcctcagcctcctgagtagctgggactacaggtgcacgctgtcttttttgtattttagtagagacggggttttacygtgttgctcagactgttctcgaactcctgagctctggcaatctgctcacctcggcctcccaaagtgctagaattacaggcgtgaagctgcaatttgaaacagaattttcagagaaggactcactggagaagtgacctttcatttaataggaagacctgcagtaaatgaacaaagtaactacaggaatatgcactaaaagtgcaggggaaaagagctggtgagaaagccacagtgaagagcagagcttgctgatg

SEQ ID NO: 2471 - DNA, 1271 bp, Homo sapiens
ggaacaagaatgctagagaagatacctcagtcagatcactggagccagttaatcgattttattaaataaactggctttgtgtgtgcttggccatgcactaaataagcagaatcayagcacatttttgttgtacctgacaaaatggctgaagtgataagaaactgcatccaatggcaatagaaaggaaatcacttggaaatggctgtgagtaaaattccccaaagacaagagcctgcacaaagctcgcaagtggatatattaggcctctaccagggaccccaggaagctacagatgagtgttaactaggattgacacctattatgctcttggattcacttatcctgtaacacaggcaactgtggaggacacaatgagtggtttggaacagtgaattatcattcaaaaaatctggacatactacttgcaggcaaattaggcattttactgcagctagtatgcagaaatgagcacggagacatagtgccacataaccttgtctcattcctcattcccctccaagtacagtggaccatctaaacacctgacagtcaaagcatctggtaaaaataaatttttaaagaattacatgtgtgccttcacactgcctaagggaggactctactggaagggtggagttggagctaagaagaaacattagcaagactgtagtgattactggcacttcggttaagcagtagatctgagctggtaatcccaactactggggaaagggtgtggatcaaaacagttaatacataacaatgggactggaagttagcaaatggaagagaccactaagtggacttccatgccaggagagggtgcaagcatactatttacatgagaacaccttagggaaagaaaacactcctcttgcttagatctggtgctgactcattggtaatattgggagaaaccttcagagctgatgtctatggagagtggaaattggactcctgaatctttgtaatcttgcaaataaatagtctatctggataattcagagaaaagaagtgcacagcacataggcccaatgtgccaggagctgaccatgtaagtgaatgtactacctagtaagtaataattagaattccaggtgatttctaagaaaaagagaagccagaaaacagggaaatatcttccaacgtttaaaatcaaaaggtcaactttaattgtaaatgcagaaaacatgttataaaagaacaaaagtgattatatgcatttttagataaaagaggaaaaggttcactactaactgatctttactaaa

SEQ ID NO: 2472 - DNA, 1271 bp, Homo sapiens
ggaacaagaatgctagagaagatacctcagtcagatcactggagccagttaatcgattttattaaataaactggctttgtgtgtgcttggccatgcactaaataagcagaatcatagcacatttttgttgtacctgacaaaatggctgaagtgataagaaactgcatccaatggcaatagaaaggaaatcacttggaaatggctgtgagtaaaattccccaaagacaagagcctgcacaaagctcgcaagtggatatattaggcctctaccagggaccccaggaagctacagatgagtgttaactaggattgacaccwattatgctcttggattcacttatcctgtaacacaggcaactgtggaggacacaatgagtggtttggaacagtgaattatcattcaaaaaatctggacatactacttgcaggcaaattaggcattttactgcagctagtatgcagaaatgagcacggagacatagtgccacataaccttgtctcattcctcattcccctccaagtacagtggaccatctaaacacctgacagtcaaagcatctggtaaaaataaatttttaaagaattacatgtgtgccttcacactgcctaagggaggactctactggaagggtggagttggagctaagaagaaacattagcaagactgtagtgattactggcacttcggttaagcagtagatctgagctggtaatcccaactactggggaaagggtgtggatcaaaacagttaatacataacaatgggactggaagttagcaaatggaagagaccactaagtggacttccatgccaggagagggtgcaagcatactatttacatgagaacaccttagggaaagaaaacactcctcttgcttagatctggtgctgactcattggtaatattgggagaaaccttcagagctgatgtctatggagagtggaaattggactcctgaatctttgtaatcttgcaaataaatagtctatctggataattcagagaaaagaagtgcacagcacataggcccaatgtgccaggagctgaccatgtaagtgaatgtactacctagtaagtaataattagaattccaggtgatttctaagaaaaagagaagccagaaaacagggaaatatcttccaacgtttaaaatcaaaaggtcaactttaattgtaaatgcagaaaacatgttataaaagaacaaaagtgattatatgcatttttagataaaagaggaaaaggttcactactaactgatctttactaaa

SEQ ID NO: 2473 - DNA, 1271 bp, Homo sapiens
ggaacaagaatgctagagaagatacctcagtcagatcactggagccagttaatcgattttattaaataaactggctttgtgtgtgcttggccatgcactaaataagcagaatcatagcacatttttgttgtacctgacaaaatggctgaagtgataagaaactgcatccaatggcaatagaaaggaaatcacttggaaatggctgtgagtaaaattccccaaagacaagagcctgcacaaagctcgcaagtggatatattaggcctctaccagggaccccaggaagctacagatgagtgttaactaggattgacacctattatgctcttggattcacttatcctgtaacacaggcaactgtggaggacacaatgagtggtttggaacagtgaattatcattcaaaaaatctggacatactacttgcaggcaaattaggcattttactgcagctagtatgcagaaatgagcacggagacatagtgccacataaccttgtctcattcctcattcccctccaagtacagtggaccatctaaacacctgacagtcaaagcatctggtaaaaataaatttttaaagaattacatgtgtgccttcacactgcctaagggaggactctactggaagggtggagttggagctaagaagaaacattagcaagactgtagtgattactggcacttcggttaagcagtagatctgagctggtaatcccaactactggggaaagggtgtggatcaaaacagttaatacataacaatgggactggaagttagcaaatggaagagaccactaagtggacttccatgccaggagagggtgcaakcatactatttacatgagaacaccttagggaaagaaaacactcctcttgcttagatctggtgctgactcattggtaatattgggagaaaccttcagagctgatgtctatggagagtggaaattggactcctgaatctttgtaatcttgcaaataaatagtctatctggataattcagagaaaagaagtgcacagcacataggcccaatgtgccaggagctgaccatgtaagtgaatgtactacctagtaagtaataattagaattccaggtgatttctaagaaaaagagaagccagaaaacagggaaatatcttccaacgtttaaaatcaaaaggtcaactttaattgtaaatgcagaaaacatgttataaaagaacaaaagtgattatatgcatttttagataaaagaggaaaaggttcactactaactgatctttactaaa

SEQ ID NO: 2474 - DNA, 1271 bp, Homo sapiens
ggaacaagaatgctagagaagatacctcagtcagatcactggagccagttaatcgattttattaaataaactggctttgtgtgtgcttggccatgcactaaataagcagaatcatagcacatttttgttgtacctgacaaaatggctgaagtgataagaaactgcatccaatggcaatagaaaggaaatcacttggaaatggctgtgagtaaaattccccaaagacaagagcctgcacaaagctcgcaagtggatatattaggcctctaccagggaccccaggaagctacagatgagtgttaactaggattgacacctattatgctcttggattcacttatcctgtaacacaggcaactgtggaggacacaatgagtggtttggaacagtgaattatcattcaaaaaatctggacatactacttgcaggcaaattaggcattttactgcagctagtatgcagaaatgagcacggagacatagtgccacataaccttgtctcattcctcattcccctccaagtacagtggaccatctaaacacctgacagtcaaagcatctggtaaaaataaatttttaaagaattacatgtgtgccttcacactgcctaagggaggactctactggaagggtggagttggagctaagaagaaacattagcaagactgtagtgattactggcacttcggttaagcagtagatctgagctggtaatcccaactactggggaaagggtgtggatcaaaacagttaatacataacaatgggactggaagttagcaaatggaagagaccactaagtggacttccatgccaggagagggtgcaagcatactatttacatgagaacaccttagggaaagaaaacactcctcttgcttagatctgrtgctgactcattggtaatattgggagaaaccttcagagctgatgtctatggagagtggaaattggactcctgaatctttgtaatcttgcaaataaatagtctatctggataattcagagaaaagaagtgcacagcacataggcccaatgtgccaggagctgaccatgtaagtgaatgtactacctagtaagtaataattagaattccaggtgatttctaagaaaaagagaagccagaaaacagggaaatatcttccaacgtttaaaatcaaaaggtcaactttaattgtaaatgcagaaaacatgttataaaagaacaaaagtgattatatgcatttttagataaaagaggaaaaggttcactactaactgatctttactaaa

SEQ ID NO: 2475 - DNA, 645 bp, Homo sapiens
actcatccttttttctggctgcatagtattccatggtgtatatgtgccacattttcttaatccagtctatcattgttggacatttgggttggttccaagtctttgctattgtgagtagtgtcgcaataaacataggtgtgcatgtgtctttatagcagcatgatttatattcctttgggtatatacccaataatgggatgactgggtcaaatggtatttctagttctagatccctgaggaatcgccacactgtcttccacaatggttgaactagtttacagtcccaccaactaaagagcttctgctcagcaaaagaaactaccatcagagtgaacaggcaacctacagaaaggagaaaatttttgcaatctactcatctgacaaacatttttactgctgcttaaaaacacagataagttcatgttcttcaacactctcccctgaaaacaaaaagtttaagtaatcaagtgttataatgtttattagttttcacaatacaaygctaaaatcacatcttgaattgtttataaatcacaagctttaggtatttgatttaatatccatttgatttaatgcccatagttttctactgttggtatttttagttcgtggaacatctttgttgctctgcatgtgttgtttatg

SEQ ID NO: 2476 - DNA, 1167 bp, Homo sapiens
gcatatttaacttcttcctctactctatgtttacttgagcttatgtaaactgaaggtttactgagcatgagacaaatacataattcataatggactgttcctctaccccttccttttcacgtgcaacatgtggattcagtgagcattaatcaaagcttcataagaatgtgaccatatgctccctcttttttttcttttctcctttctttccctgcttactttttccctcttaatattgaagccctcaaaatcctctttggaaaaagcatggaccacagatgcaactgtggcttgtgtctctttttcctagggatgtcctcaatcttgggaaaataaacctttaaattgattaagatctgtctcagacactctttttgctttacaccttccaataaaatgttaataaagccacaataaaaagaagaatataggccctgtagtgaaactgctgagtttcaaatgatgacttccacttgtgtgaccttgtatgtttggcccttgagttcttagaacctcagtttgtttcctctaaaatgggggtaatatttacctgataaggttttgcatagataaaatttaaaaaatcatgtaaagtacttagcactgtactggacacataaagaaagaactgagcaagagaacgcagacagaaaaggagaaaattctcaattcctagtaaggaggctgatgaaaaagtacagaacagtatgtttccatgtagaaataaaacaagtatgttgggatggaaagttttgataaaaaattcacagatctggcagggtgcggtggctcacgcctgtaatcccagcactttgggaggccaaggtgggtggatcatgaggtcaggagatccagaccatcctggctaacacggtgaaaccccatctctactaaaaatacaaaaaattagcygggcgtggtggtgggcgcctgtagtttcgctactcgggaggctgtggcaggagaatggcgtgaactggggaggcggaacttgcagtgagccaagatgatgccactgcactccaacctgggcgacagagtgagactccgtctcaaaaaaaaaaaaaaattcacagatctcccctgtgtccgccccccgcccctcaaaaaaagacagaaaaataaaacctggaaaaaaaaaagactagatcatagttttttgatgca

SEQ ID NO: 2477 - DNA, 528 bp, Homo sapiens
tgcaggtctccagacaagcagaggggaaaagtgcaaaggagcaggtcagcgtctgaaatgtgagagggtagcagtctctgaagtgtatgggaatgggargaaacctaatactgctcccaaggggagggggagcattgcatcatgtggaaataattgcaggcggtcagcacagcttggggtttggggaggcaggatagcccactgacccacttgcaaaagggctttgacacttttctgttgtaaagggtacttgcatggggacactaatccatcagcctgggtgcctgcagggactagagattagagcaggtcctaagagactagattctatgggattctgcttgcaggtggtttgaacccaaactagaattctgaaaggagccccagagttgagaactggagaggatggggcccacgaattagtcaaaactaccatttattgatgtattatttaatacatcctaagtacatacttcagttgatcctcacaataaccctataggtaggaattatcatccccattttatg

SEQ ID NO: 2478 - DNA, 528 bp, Homo sapiens
tgcaggtctccagacaagcagaggggaaaagtgcaaaggagcaggtcagcgtctgaaatgtgagagggtagcagtctctgaagtgtatgggaatgggaagaaacctaatactgctcccaaggggagggggagcattgcatcatgtggaaataattgcaggcggtcagcacagcttggggtttggggaggcaggatagcccactgacccacttgcaaaagggytttgacacttttctgttgtaaagggtacttgcatggggacactaatccatcagcctgggtgcctgcagggactagagattagagcaggtcctaagagactagattctatgggattctgcttgcaggtggtttgaacccaaactagaattctgaaaggagccccagagttgagaactggagaggatggggcccacgaattagtcaaaactaccatttattgatgtattatttaatacatcctaagtacatacttcagttgatcctcacaataaccctataggtaggaattatcatccccattttatg

SEQ ID NO: 2479 - DNA, 528 bp, Homo sapiens
tgcaggtctccagacaagcagaggggaaaagtgcaaaggagcaggtcagcgtctgaaatgtgagagggtagcagtctctgaagtgtatgggaatgggaagaaacctaatactgctcccaaggggagggggagcattgcatcatgtggaaataattgcaggcggtcagcacagcttggggtttggggaggcaggatagcccactgacccacttgcaaaagggctttgacacttttctgttgtaaagggtacttgcatggggacactaatmcatcagcctgggtgcctgcagggactagagattagagcaggtcctaagagactagattctatgggattctgcttgcaggtggtttgaacccaaactagaattctgaaaggagccccagagttgagaactggagaggatggggcccacgaattagtcaaaactaccatttattgatgtattatttaatacatcctaagtacatacttcagttgatcctcacaataaccctataggtaggaattatcatccccattttatg

SEQ ID NO: 2480 - DNA, 734 bp, Homo sapiens
agccattttttgcaatcaatctgacatggaaacccatcccagtcccaaaaacagatgaaaggcagtggcatttcccaatattctggactatgcccacttccttaccaaaaaccctttgcccactaactgccatttccctgcccagtctgtctgttttattaacactagactggggagggagagatataatgactctagaattgggcagataaaacaatgtgtctgacttcttttttaaaggtactaaaattcagactctttacccactgacttcatcrctgtagtttttataactacaaaagtttcattagaaagtatacttaaactttctcagtgagccatcccagcctggccatacttgtatgagaatgctgtcaaattccaggaaacagatgttcatttaataagatgaatttttactaatacttccaccccactgttaatactgtgtttgtgatttgaatttaagacactaaacttctgcaatttatttcctacagtgtggctgagatcataggcttcccagaggtacacctttgaaatcccctacatatgaaactattggcatgatatatgatatttttatgccaagaagtgactgttacaatgtattggaaagagcaatgggcttggaatcagaagacttggctggtgctgaagtcaatggagcatagtggtcaggcatactctctgatgtcccattgcctggatttgaattctggctctgtcatatg

SEQ ID NO: 2481 - DNA, 734 bp, Homo sapiens
agccattttttgcaatcaatctgacatggaaacccatcccagtcccaaaaacagatgaaaggcagtggcatttcccaatattctggactatgcccacttccttaccaaaaaccctttgcccactaactgccatttccctgcccagtctgtctgttttattaacactagactggggagggagagatataatgactctagaattgggcagataaaacaatgtgtctgacttcttttttaaaggtactaaaattcagactctttacccactgacttcatcgctgtagtttttataactacraaagtttcattagaaagtatacttaaactttctcagtgagccatcccagcctggccatacttgtatgagaatgctgtcaaattccaggaaacagatgttcatttaataagatgaatttttactaatacttccaccccactgttaatactgtgtttgtgatttgaatttaagacactaaacttctgcaatttatttcctacagtgtggctgagatcataggcttcccagaggtacacctttgaaatcccctacatatgaaactattggcatgatatatgatatttttatgccaagaagtgactgttacaatgtattggaaagagcaatgggcttggaatcagaagacttggctggtgctgaagtcaatggagcatagtggtcaggcatactctctgatgtcccattgcctggatttgaattctggctctgtcatatg

SEQ ID NO: 2482 - DNA, 734 bp, Homo sapiens
agccattttttgcaatcaatctgacatggaaacccatcccagtcccaaaaacagatgaaaggcagtggcatttcccaatattctggactatgcccacttccttaccaaaaaccctttgcccactaactgccatttccctgcccagtctgtctgttttattaacactagactggggagggagagatataatgactctagaattgggcagataaaacaatgtgtctgacttcttttttaaaggtactaaaattcagactctttacccactgacttcatcgctgtagtttttataactacaaaagtttcattagaaagtatacttaaactttctcagtgagccatcccagcctggccatacttgtatgagaatgctgtcaaattccaggaaacagatgttcatttaataagatgaatttttactaatacttccaccccactgttaatactgtgtttgtgatttgaatttaagacactaaacttctgcaatttatttcctacartgtggctgagatcataggcttcccagaggtacacctttgaaatcccctacatatgaaactattggcatgatatatgatatttttatgccaagaagtgactgttacaatgtattggaaagagcaatgggcttggaatcagaagacttggctggtgctgaagtcaatggagcatagtggtcaggcatactctctgatgtcccattgcctggatttgaattctggctctgtcatatg

SEQ ID NO: 2483 - DNA, 1188 bp, Homo sapiens
cacaagaatgctaagataaccaaatcttgaacaagtgaracatccagggctgctgcttcttctcaaacatgctggtgtctgcaatactgtgccctagtctcagaaaattagcagatttacaaatgttaataaaatgaaggtggatggagatgtgaaggaacagtcttattacctaggttggtatctctccgctgctacattcataaaatgaataccaatgcttcagtagatgtggagaacagatcagcctacctcccacccatgtaccaaaggtccctgcggggatacttgcatttggaggctataggaaaatccactttagaattccacagaattgaatttaaatcctgtctctgagatgaaacttctctcatcctcagtaaaatgtcactagtgtgtctactttacagtgttgtgaggattaaatgaaataaagcatctacaagcacttaatacatggcagatgtttgattatatatatatatatatatatatatatatatatatatatatatatatatatttcaaagtgcaaaagactcagcttacttccaggagatagctatgatgtaggtctacaggagcgcacagcaggacacttgagccttataggataacttggcttgtcctatctgcaagaactctcaccacagaagtgtagagaacttaattggaagaaagcaaaatcaagcaattaatattttctgtaatagacatttcataatcatagtgttgcataaaaatccatagtgcacatttcagcgaaagagctacaacactcccagcatctctcaaaattttacaaaacaatcagctgccttgcagaagctatctgctggcattatagctctggaaaactgattcaaccttcaagctctgagttcatgggtctttgaggctgcccaaaagatacccataaagtccagacctatcacctagaagccacacattgcttccaagcacacagagaggaaagcctcagcatcccgtttcatgccacctgccatttcggctctcctcagtaattcctagtggctcttccttctccgaggcagacatgaaagcagattggaacagactccaaaactcaggctgcctttcctgctactcaccctatagctgcatgggcaatactgacagcacacagagccaggcccactgtggacccttagtaagtgtttgttgaat

SEQ ID NO: 2484 - DNA, 1275 bp, Homo sapiens
ttggcggtatgcaaaaaaaaaaaaaaaggaaaggtaaatatgaactggagtgaagggactgagtgacaagactggtgtcaaagtgggtagggagatgtgacaatgactccttttttgtgtgaagaatacaaggccatctttttaggctccagcaaaaacagtggaaaacatggagcattcaaaaatttgagagacgggaaaagtgaggtgtgaagtcagcaaggagaagcaggaggagacagaatgccaagaacaagtcagctggaaggcaaagaggccacctctccctctaaaacagggagaaacgatggggayagtttatgtgtttttaactatagaaggaaagaaaggtaataaagtggctgcctaaaggtttctattttcttaagtcccagtgcagcaaaattatctactaagagtgaagaaaacaaagtgaggaggggacaaaagagtttgaaagaaagaataaagggccctgacagaaaactgtggataacccaaaaaattactgagttgtgttgaaatttactttatcaaaggagaagttatgttttagaagaattttgaatagcactttgaagtaacagccagcacagaaaaacctatataaaagttatgcctttattattatcttgattatggcatttctaaaaagcttcattttaaaactcctgttaatttatttagggtttggcatagattcatcaagacatggaaatttaagtatcaggtataaagaaataagatacagatgaaaaaatgcccagatgagaaaaattttaagttatctttatgcactcaatttacaattataactttaattagaacatcttaactgctccattacttgatgtgggttttttttttcctaattctatttttgccgccttaatagtttctgctctaaactgcatttaaaagattctatagttgtaaattctttagtagcactttgggaacaaaataaccaaaagaagagagctaatcagtaacatatatagaagagatcatggcgttttgggtcaaaaatatgatttaacttccctaccgtgccactgccatcttgtttgtggaactacacaatgattttttttaagtgtactgagaatgaggcatatataaatgatttaagaactagtttaactttgacaatcagagaattaagtcttaagttttgaggaaaacaatggaataagatccaaatttattgacatccacagtttccttgactttttcaaggcaaagcataactagacttgctttcacgctcatgca

SEQ ID NO: 2485 - DNA, 1613 bp, Homo sapiens
gcaacttagaaaactctgctaaatgacctatggtgggatttctctagttgatcttgtgaaactggagggagtctattctcaccacttttaatttggcttaggatttattttttccctcacaaaaataaaacaaaagatrttagttatatcataaacaatataggtagcaaattgatgccaaccaatgttatatgtagttgtatttgactctgtccagtgctttaaattttttcatatctcagcttcttttgttgataaaatgatgacaaaaatatcttccctacttttcttgaagggcaggtgctataaacttttgtgaatttgaaattttccaactgattaaatgtgttctgctatatgaacctgtgtgctatagaagaggctgtgttaatgtcaagtaaaaattatattaaataaaaaggctggattaagtaaaaaaaaggtaagagctttgaacagtatctgtgcaaagtaaatgtgtaataagagtgagatattattaataccattattattgttatggtaatttatagttgaaatcaattcagtgtgactgaactataatagtatgggctgttaggcccaatataaaaatatattttatggtaatatgacaaatatctgaaaatccagatgttttcatttttttcaactatgaattcctacagttctatacttacatagatactctatataaagaacagttttttttcccggacttttttttcttatcattggttttagccaactacaggatgttgtgcactctgtttaaacttgtagggaacatggcattatttctcaggtgttgtggccatataaagaaggcattttaactttattcaaaattcatattgggaaaaacatgaatacatatatatataatacaagcagaatgtcatgagttttatgagaggtttgaagagccatggaaatgctgagggcaaagatgaattctgtttgaagggatcactgcctccagatcgctaaaatagtttaccagttgaaattaattattcctaatgaccctcaatacattttttttgaccaagtctcactctgtcacccaggctaaagtgcagcggtgtgatctcagcttactgcaatctccacctcctgagttcaagcaattcttgtgcctcagcctcccaagtagctgggactacaggtgtgcaccaccaaacccggctaattttttgtattttttgtagagatggggtttcaccatgttggccaggctggcctggaactcctgacctcaggtgatccacccgcctcggcctcccacagtgttgggattataggagtgagccgccgtgcctggcgtacattctttttccacacgatttaactttagcccattttggttaaagaaaacactagaatgtgacatggttgtgagaggaatattaaatatatcataaatgatgtagttggtaaaaagttaatcttggtatcatcttaggactcaaaggagaacgtggggaccaaggagttccaggatacccaggaaaaccgggagcacaaggtagagcatgaaatgtatctactgtgtacagtcaggtgcgcagtatagcccttcattctcttcctgcttgtatttaaaattatca

SEQ ID NO: 2486 - DNA, 1613 bp, Homo sapiens
gcaacttagaaaactctgctaaatgacctatggtgggatttctctagttgatcttgtgaaactggagggagtctattctcaccacttttaatttggcttaggatttattttttccctcacaaaaataaaacaaaagatgttagttatatcataaacaatataggtagcaaattgatgccaaccaatgttatatgtagttgtatttgactctgtccagtgctttaaattttttcatatctcagcttcttttgttgataaaatgatgacaaaaatatcttccctacttttcttgaagggcaggtgctataaacttttgtgaatttraaattttccaactgattaaatgtgttctgctatatgaacctgtgtgctatagaagaggctgtgttaatgtcaagtaaaaattatattaaataaaaaggctggattaagtaaaaaaaaggtaagagctttgaacagtatctgtgcaaagtaaatgtgtaataagagtgagatattattaataccattattattgttatggtaatttatagttgaaatcaattcagtgtgactgaactataatagtatgggctgttaggcccaatataaaaatatattttatggtaatatgacaaatatctgaaaatccagatgttttcatttttttcaactatgaattcctacagttctatacttacatagatactctatataaagaacagttttttttcccggacttttttttcttatcattggttttagccaactacaggatgttgtgcactctgtttaaacttgtagggaacatggcattatttctcaggtgttgtggccatataaagaaggcattttaactttattcaaaattcatattgggaaaaacatgaatacatatatatataatacaagcagaatgtcatgagttttatgagaggtttgaagagccatggaaatgctgagggcaaagatgaattctgtttgaagggatcactgcctccagatcgctaaaatagtttaccagttgaaattaattattcctaatgaccctcaatacattttttttgaccaagtctcactctgtcacccaggctaaagtgcagcggtgtgatctcagcttactgcaatctccacctcctgagttcaagcaattcttgtgcctcagcctcccaagtagctgggactacaggtgtgcaccaccaaacccggctaattttttgtattttttgtagagatggggtttcaccatgttggccaggctggcctggaactcctgacctcaggtgatccacccgcctcggcctcccacagtgttgggattataggagtgagccgccgtgcctggcgtacattctttttccacacgatttaactttagcccattttggttaaagaaaacactagaatgtgacatggttgtgagaggaatattaaatatatcataaatgatgtagttggtaaaaagttaatcttggtatcatcttaggactcaaaggagaacgtggggaccaaggagttccaggatacccaggaaaaccgggagcacaaggtagagcatgaaatgtatctactgtgtacagtcaggtgcgcagtatagcccttcattctcttcctgcttgtatttaaaattatca

SEQ ID NO: 2487 - DNA, 1613 bp, Homo sapiens
gcaacttagaaaactctgctaaatgacctatggtgggatttctctagttgatcttgtgaaactggagggagtctattctcaccacttttaatttggcttaggatttattttttccctcacaaaaataaaacaaaagatgttagttatatcataaacaatataggtagcaaattgatgccaaccaatgttatatgtagttgtatttgactctgtccagtgctttaaattttttcatatctcagcttcttttgttgataaaatgatgacaaaaatatcttccctacttttcttgaagggcaggtgctataaacttttgtgaatttgaaattttccaactgattaaatgtgttctgytatatgaacctgtgtgctatagaagaggctgtgttaatgtcaagtaaaaattatattaaataaaaaggctggattaagtaaaaaaaaggtaagagctttgaacagtatctgtgcaaagtaaatgtgtaataagagtgagatattattaataccattattattgttatggtaatttatagttgaaatcaattcagtgtgactgaactataatagtatgggctgttaggcccaatataaaaatatattttatggtaatatgacaaatatctgaaaatccagatgttttcatttttttcaactatgaattcctacagttctatacttacatagatactctatataaagaacagttttttttcccggacttttttttcttatcattggttttagccaactacaggatgttgtgcactctgtttaaacttgtagggaacatggcattatttctcaggtgttgtggccatataaagaaggcattttaactttattcaaaattcatattgggaaaaacatgaatacatatatatataatacaagcagaatgtcatgagttttatgagaggtttgaagagccatggaaatgctgagggcaaagatgaattctgtttgaagggatcactgcctccagatcgctaaaatagtttaccagttgaaattaattattcctaatgaccctcaatacattttttttgaccaagtctcactctgtcacccaggctaaagtgcagcggtgtgatctcagcttactgcaatctccacctcctgagttcaagcaattcttgtgcctcagcctcccaagtagctgggactacaggtgtgcaccaccaaacccggctaattttttgtattttttgtagagatggggtttcaccatgttggccaggctggcctggaactcctgacctcaggtgatccacccgcctcggcctcccacagtgttgggattataggagtgagccgccgtgcctggcgtacattctttttccacacgatttaactttagcccattttggttaaagaaaacactagaatgtgacatggttgtgagaggaatattaaatatatcataaatgatgtagttggtaaaaagttaatcttggtatcatcttaggactcaaaggagaacgtggggaccaaggagttccaggatacccaggaaaaccgggagcacaaggtagagcatgaaatgtatctactgtgtacagtcaggtgcgcagtatagcccttcattctcttcctgcttgtatttaaaattatca

SEQ ID NO: 2488 - DNA, 1613 bp, Homo sapiens
gcaacttagaaaactctgctaaatgacctatggtgggatttctctagttgatcttgtgaaactggagggagtctattctcaccacttttaatttggcttaggatttattttttccctcacaaaaataaaacaaaagatgttagttatatcataaacaatataggtagcaaattgatgccaaccaatgttatatgtagttgtatttgactctgtccagtgctttaaattttttcatatctcagcttcttttgttgataaaatgatgacaaaaatatcttccctacttttcttgaagggcaggtgctataaacttttgtgaatttgaaattttccaactgattaaatgtgttctgctatatgaacctgtgtgctatagaagaggctgtgttaatgtcaagtaaaaattatattaaataaaaaggctggattaagtaaaaaaaaggtaagagctttgaacagtatctgtgcaaagtaaatgtgtaataagagtgagatattattaataycattattattgttatggtaatttatagttgaaatcaattcagtgtgactgaactataatagtatgggctgttaggcccaatataaaaatatattttatggtaatatgacaaatatctgaaaatccagatgttttcatttttttcaactatgaattcctacagttctatacttacatagatactctatataaagaacagttttttttcccggacttttttttcttatcattggttttagccaactacaggatgttgtgcactctgtttaaacttgtagggaacatggcattatttctcaggtgttgtggccatataaagaaggcattttaactttattcaaaattcatattgggaaaaacatgaatacatatatatataatacaagcagaatgtcatgagttttatgagaggtttgaagagccatggaaatgctgagggcaaagatgaattctgtttgaagggatcactgcctccagatcgctaaaatagtttaccagttgaaattaattattcctaatgaccctcaatacattttttttgaccaagtctcactctgtcacccaggctaaagtgcagcggtgtgatctcagcttactgcaatctccacctcctgagttcaagcaattcttgtgcctcagcctcccaagtagctgggactacaggtgtgcaccaccaaacccggctaattttttgtattttttgtagagatggggtttcaccatgttggccaggctggcctggaactcctgacctcaggtgatccacccgcctcggcctcccacagtgttgggattataggagtgagccgccgtgcctggcgtacattctttttccacacgatttaactttagcccattttggttaaagaaaacactagaatgtgacatggttgtgagaggaatattaaatatatcataaatgatgtagttggtaaaaagttaatcttggtatcatcttaggactcaaaggagaacgtggggaccaaggagttccaggatacccaggaaaaccgggagcacaaggtagagcatgaaatgtatctactgtgtacagtcaggtgcgcagtatagcccttcattctcttcctgcttgtatttaaaattatca

SEQ ID NO: 2489 - DNA, 2014 bp, Homo sapiens
cgtcacttgttcaaggaaacacagaacaggtctgctgaataggtgtgttgatctaagataatcagttctaattaaatgagctatatttgtattttcttgcataattccccgataactaattgattcaaaaataatatgaatcagagaaaaatacctatcactggaagcccatgttctgtcccaactaaacaaaaaaataaacaaaaaccatacaataatttgtcttgaaacatgatgggttatattctgaatcagaggaggaagcatgtctttttttgtcccctacagtaccacatggcttatcatattgcaggcattaatacatatgtgtttgataagtgattaaataagcatcaatacaaatatgagaggggacagagagagagagagagactgccagagagaaggtagatggagagagagagggagcaaaatgagaagtcataaaaaaaaaaactgaaggagtcatttgcaaagtgttaaaagataagccaattgaggtcaaggaattagatttcatctattctctttatacattcttattatgcatctgcagtttctaacactgtattaggcaggagaaattcaatggtgaataagacaaggcaacctgtttcctcatagagagtagagcccaaggaaaggagagagaataaagagcaattaccattcagtgtgttaagtgataggaaagggaacctgtgggattctaagaggaaatgaaacaatggcaaccaaactatatttggaaatcgaataaaactttccaagaaaactaacattgaggactaaatctaaggattgagaagagtgaaattgtaagaaggaattattggttgggtgaggtggctcagcctgaaatcccagcactttgggaggccgaagcsggtggatcaccagaggtcaggagttcaagaacagcctggccaacatggtgaaaccccgtctctactggaaatacaaaaattagccgggtgtggtggcgcttgcctgtaatcccagccactcaggaggctgaggcaggagaattgcttgcacctggaaggcagaggttggttacagtgacccaagattgtgccactgcactccagcctgggcaacaagaatgaaactctgtttcaaaaaaaaaaaaaagaagaagagattattaaaaaattgcccatttcagagttttcagatataatatttccttttcccaggtagatctgtagtagtctatatggaatgttgattcaactcagaagtttgtgtaagattcagaggagttaagggaaaagatcaattattattgtgtggctattcaattgccagactctctccatctcttctcttttcttcctacacaaacatgtgcttgttctaacctttttgttattgattgaacttcctctctgatggtagaaagtatgttgtattatacaaataatttttaggaaaattatctgtctccagctgtgagattacttgataatacagtatgcagataatgtctctattggcatcaatgtttattatttcaaaataaagattaaaaatgcatttgataaaattatgaaaaaacccttttatttataatctcaaaataagtaagtgtgcaatatagcaaaaaatgtgaaatttcatcatgtactatgcagaaaactactctgatatatgagctgtcatgtcaaattatttaaaatatttttctatataattaattaccttcattatcattaagaactccaaaattcaacattctcccttagtatttaatgattttcaatattgtgtgaatgctttgtcctttgaatcctgacagcacttatgtggtatatgctctcttgatattcttggtctatgtcatcccaatgaagaatggtgcttgaaggcagatactgtcctacacaactctctatctgctatgatgtttagtccagtggcttattatgtgattcaaatcttacaatatttgaaaattacaaaatgaaaagataaacctgacttctttaaaatatttttccacaaaatgaca

SEQ ID NO: 2490 - DNA, 1262 bp, Homo sapiens
atgcatgataaaaatgaacagaagatacaaattatgaaccacacatgtgctttagtaatctacttgtatttgtagttttgcattcccttaggttgtaggaagtacttaagtgatttcacttaaaggccacctgggagttgcataggtccagaagtaaattgtgaatagagccatcaaatgataatctcagattgtttaattctatcaaaaaaaaatcaaatatgaatagctgaaggtaactcacactcagactgagaaaaatctagttatagcaaatcaagactaggtttgcatagctctgtatctctaaaaatctwaatgtcttagtagcttgagcttgaccttaagagctgtctcagacacccaaggggagcatagcaccggtaaaagcctcagaaccaggaatcctccctccaagctctgaagtcacatgagtgcatctcagaggccgtagaggaagcatctggtagctgacaccttgcagaaatacaagcccagtactgccagatccttttttccaagagaactaaaaatctggatttttatgtgaatgctcccaatttttaaatgatggtagccaataagaattttttggaaaagtgggtagaccaaacaacacacaactgggtaccagatgtggctcaaaggccaacagtttgcactgtccaatttatataattcatcgtaactaaatatagccagtgctcctaaatacattaaacgtgtttttgtaagagagcttgttttcctcctcagctaaaaattgtttgtgtttttcttcttgttgcactctcaagtataattcaaagtgtgtaatttgtggattttaatcctccactcctggttacattttcttagcagtttcgaagagtgcttcttactgttttacaacataggcttccacttctaataacaaaaattatatatttttccactgcttgtttttcctggctttaagagaggaaaaaaagccatcctcatttacttttctaatgatggctagcatcatcattgatgtcaatagatccatgaagggaaaaggagggttaaattaaatttcttttgatgtttagtttttccatcaaacgagaagtgaatattctgaaaagtggttaaactcgtttaaacaatacaaaaagaacgctgttgttggttcaacaccaggcattttggtgaagcgataagatttttaaaaagcagagcttttcaccaggtgtatgacaccatttcacatagccatttgggtttaaatggaacgaaac

SEQ ID NO: 2491 - DNA, 1322 bp, Homo sapiens
attcagttgtyaaattaattgtccaaggtacacagagacaattcaagcctctctgttttttatgtctgttgtcctatgctatcactattgcaataagaaagcctgcactgttctgataactgggtcaatgtctcgtcaaaactcctcatttcgttccaacaggaacattgccagcactttcccccatgtgtggtgctgtggcatttctacagatttgggaagtgggagtgattctgctgcaaggcaaatgtggtttggctcatcataagccctttatgtagaaggcttcagagttttcctcagttatgtttttccccttgactaaagcttgcagctctatgctgtaatctgataggttccttggttctatgtgaggggccattaagtctgagggcatggaacatcaagacaagtatcctagagagggtcaggatgatcactaatgaagagcttgcatgtgaagcttcagcaggcaaagttggaccagagagacatttggtctgtattttgcactggactcatcagtgctcatccatcacacctcttatgggtagcagtgctcttatagtttggctgtggtcatcttatggtttttgcttgttttgatcatgttttgctctcataggtctccctagagtggacttgattctccacttccctttcctttctcctttctctgatccatacaaagctacctttgtttgtgttctaaggggctctttattttttcatttaccaactctgttgatgccctgtcaactctgctagacttgctgtggtaatctcacaagatggctgccacaattcttcctctccttctgtgcatgtgacacttctctccttacaaataaggcctagatcccttcccctgaaatctggcctggccttgtgacttgctttagtcaacagaatgtgaaagaagtgatactggactagttcagatcccagctgtcaagaggtctggaggcttccactttctttcttggaagccagctgtatgtaaaaactcgaactacctcgagaccactgtgttgtaaaaaaggcctggctagccactaggagagaccttgtgggaagagaaagagaaatagaaactcagccagccccctttgtttcagccatcacagctgaggcaccagacagctgagtgaaggagccatcttggatctcccagcaacgatcacggagagcaaagcaaccactcagctaggcctagaatagattacaaaattggagaaataattttttcgttgttttaagccactgagttttggagtgttttgttatgcagcagtaaataattgaaacagttgtttaaagca

SEQ ID NO: 2492 - DNA, 1227 bp, Homo sapiens
cctgcattctgaactttcatgtatcctgcttgccatagggaatagaagggaaaaaatactttgtagaccaaaagcttacaaaactttgggcttaaagataatttacagatttttcctgtccaacattctcattttctaggtaaagaaatgggttcagagaggttttgtgatttacattaggttaacacaaataaagcgtggcaaaaccagttctagatcctatgcgctctgatttcctgtttgttctgtttctgtaatgtggaaagggaacacaaaggaaaggaaaataacttcagcttattccttaatggaccagtaatctttctcaccaccctttacaaatttcctactgattttggtggctgttgtgtaccatttggaacttgggataatataatttatcttataaagctagataacaatggaaggcaatagatactcctcacccctgttctaaatagaaaatatgctttatgtaaatatatttctttttccctatgaaagtagataattagctgtatgttagtatttttcataataaaatgagtgattctcaagtgcttattttacattttaagtgtacctattcttgttcctttttttttctcttttccttttttttttttttttaagataggatcttgccctgctgctcaggctggagtgcagtggcacaatcatggctcactgcagccttgaattcctgggctcaagagatcttcccacctcagcctcccragtagctaggactacaggttcctgccactgtacatagcaaattattattttttgtagaggtgaggtctcacactatgtaggtcaggctggtcttgaattcctatccacaagtgatcctccagacatggcctcccaaactgctaggattacaggcataagccactgtaactggtcctctcatttcttttaatatgttttccttttgcataggtgttgtctggaggatggaggaatagacgtgtggcatcaacatcaatgaacagagaatcgtctaggtctcatgccgtctttacaattacaatagagtcaatggagaaaagtaatgagattgtgaatatacggacctccctactcaacctggtggatttagcaggatctgaaaggcaaaaagatacccatgcagaagggatgagattgaaggtaagaatgaaattatggtcttcaacttgtgtgtgagttcttactagcagtcaatacagtcgtgatgca

SEQ ID NO: 2493 - DNA, 1227 bp, Homo sapiens
cctgcattctgaactttcatgtatcctgcttgccatagggaatagaagggaaaaaatactttgtagaccaaaagcttacaaaactttgggcttaaagataatttacagatttttcctgtccaacattctcattttctaggtaaagaaatgggttcagagaggttttgtgatttacattaggttaacacaaataaagcgtggcaaaaccagttctagatcctatgcgctctgatttcctgtttgttctgtttctgtaatgtggaaagggaacacaaaggaaaggaaaataacttcagcttattccttaatggaccagtaatctttctcaccaccctttacaaatttcctactgattttggtggctgttgtgtaccatttggaacttgggataatataatttatcttataaagctagataacaatggaaggcaatagatactcctcacccctgttctaaatagaaaatatgctttatgtaaatatatttctttttccctatgaaagtagataattagctgtatgttagtatttttcataataaaatgagtgattctcaagtgcttattttacattttaagtgtacctattcttgttcctttttttttctcttttccttttttttttttttttaagataggatcttgccctgctgctcaggctggagtgcagtggcacaatcatggctcactgcagccttgaattcctgggctcaagagatcttcccacctcagcctcccgagtagctaggactacaggttcctgccactgtacatagcaaattattattttttgtagaggtgaggtctcacactrtgtaggtcaggctggtcttgaattcctatccacaagtgatcctccagacatggcctcccaaactgctaggattacaggcataagccactgtaactggtcctctcatttcttttaatatgttttccttttgcataggtgttgtctggaggatggaggaatagacgtgtggcatcaacatcaatgaacagagaatcgtctaggtctcatgccgtctttacaattacaatagagtcaatggagaaaagtaatgagattgtgaatatacggacctccctactcaacctggtggatttagcaggatctgaaaggcaaaaagatacccatgcagaagggatgagattgaaggtaagaatgaaattatggtcttcaacttgtgtgtgagttcttactagcagtcaatacagtcgtgatgca

SEQ ID NO: 2494 - DNA, 727 bp, Homo sapiens
tgattgtatttataaaagtgaatgaaaaaagccaccaaccaggtgagtgagatcaggcaccgtggggtgatttagctgtctttcaatgacggtgattctgacagacgagttcctcggaaagtcttattttgaggtttcaccaaattttagctcaatatttagttaacacagacgaatcattatggaacatgttaattctgtttttccatttttatacaatcagtctaacatttccttttcaaatacaatactctttcaggttttgctcctaagctttttctaactttctatttctatttcaatattttctgccacccagacatcaacagatggacagggacgtttcagtaccccccctcccgcccccccacccccaagttctcacgagcagcacacacaagtgctgagttccgcctcgctgcctgcttcttggcacaggcctttgattcctgaaatgctcagagcaaaccaagaaaaaaaaagtgtttctcaggtgagcctgtccaagaagtttttttccttaaagaataatttcttttcctgctgttcttcctccccacacttcaccaaaaagggtgaagacagacagaacccagaccctcccatagttttccttcagtgtccccttgggaatgatgtcaccttggtctggttgcccccacccatgggcgaggttgtgggtgataactccatgggccaygcagagcatgagggcagcctgcatgaa

SEQ ID NO: 2495 - DNA, 652 bp, Homo sapiens
acaaaattataattgcacaaaatggaaaacattaaaacattttgatattttatataatggagataagtgtagagttaaaatgtgatcttagcagctgtgctccaaaacatttacaacacccgttccaaaacttatgctcgcactaatattttcagaggaattctattattggttttattaatttgatttgttctccactccctgaattttgcttacagaataaaagttgtatggaaaatttcccacataattagagtccatacgcatttctattttccttttttcagcaatgacttaaactcgctttctaaaaaaagtctttaaagcaaataaaatccctgtcatctctcaagcccagcactgctgccacctccctcaggattgctgactgtctcaggatgtgggttttcacattgtgtgtctcgcacagtagtacacatctatgtcctcagatctctgactgctcagctccatgtaggctgtgctcgtggacatgtccctggtcatggtgactctgccctgraacttctgtgcatagcctgtcttaccattgccagagtagatccctcccatcctttcaaacccttatccaggggcctgtcgcacacagtgaatatcgtagctggtgaaggtgtatccagagctttgcggg

SEQ ID NO: 2496 - DNA, 1172 bp, Homo sapiens
cctctggttaaaatggaaattctcacttaattgatatttttctacgttaaacagaagttaaagttttgtactcaaagtaagaatggatattggtgagaaggcttgaagagagtgaaaaagtctataataattatttgggttaactaaaagaggaaatgattaaagaacattaaaaagattgataagcagctcctagcagctctgatgtgccagttgttatttgaaaaaaatattttgtagaaaaactaatttgcrcatttgcacaattataaacacctaaactccttgatataggagaagagaagacaaattttaagactttttccaaatttagtgactaataaggtaaacatgatagaaagaacacgatgctactcaaaagaatattttggcaattgaccattgcattcatagtgggagaaagcaaattcagttcagagctgatggactaagataaagaaaatcacaatagcctcagggagctggtgtaatgggagggagcgatttggaaaaaagtaggagatcatgatcacatagtaagatactgaacttcagccatcctgtggtgtagccatgggagtagcctgcttacatccaatacaggtgaatgtttgggaagtcaaggacctgtgaggaaaatgagtggtttatggactttaaagtcatccaagaaaatgggtaaagtaaaaacagaggataattgacaaataaggaagaatatcctttagattgacagatcatcaccatcaccatcatcatctgacaaacactaatatagctctttattaagtactgttctaagcacttcacagatattatgttatataatgctcaaaatctccctattaaaaatatagtattgttgaacttcatacattaggaaacagagacacaggaatattgaataacttgtatagaattacactgtaaataagtaaaggaattgagattgaagtacaaataatatgtttccataattcattattttgctactacaccgtggtacctggacattggacaaagaaaaggagagggtagactatggggactactaacaatataaagtattaagtgtgtgagccatgagattagtaacagccatttgagaaggccaaaagtaaaatggtgtttcttgaaaagatctgggtttcaattaagacaaggaactggta

SEQ ID NO: 2497 - DNA, 1172 bp, Homo sapiens
cctctggttaaaatggaaattctcacttaattgatatttttctacgttaaacagaagttaaagttttgtactcaaagtaagaatggatattggtgagaaggcttgaagagagtgaaaaagtctataataattatttgggttaactaaaagaggaaatgattaaagaacattaaaaagattgataagcagctcctagcagctctgatgtgccagttgttatttgaaaaaaatattttgtagaaaaactaatttgcacatttgcacaattataaacacctaaactccttgatataggagaagagaagacaaattttaagactttttccaaatttagtgactartaaggtaaacatgatagaaagaacacgatgctactcaaaagaatattttggcaattgaccattgcattcatagtgggagaaagcaaattcagttcagagctgatggactaagataaagaaaatcacaatagcctcagggagctggtgtaatgggagggagcgatttggaaaaaagtaggagatcatgatcacatagtaagatactgaacttcagccatcctgtggtgtagccatgggagtagcctgcttacatccaatacaggtgaatgtttgggaagtcaaggacctgtgaggaaaatgagtggtttatggactttaaagtcatccaagaaaatgggtaaagtaaaaacagaggataattgacaaataaggaagaatatcctttagattgacagatcatcaccatcaccatcatcatctgacaaacactaatatagctctttattaagtactgttctaagcacttcacagatattatgttatataatgctcaaaatctccctattaaaaatatagtattgttgaacttcatacattaggaaacagagacacaggaatattgaataacttgtatagaattacactgtaaataagtaaaggaattgagattgaagtacaaataatatgtttccataattcattattttgctactacaccgtggtacctggacattggacaaagaaaaggagagggtagactatggggactactaacaatataaagtattaagtgtgtgagccatgagattagtaacagccatttgagaaggccaaaagtaaaatggtgtttcttgaaaagatctgggtttcaattaagacaaggaactggta

SEQ ID NO: 2498 - DNA, 617 bp, Homo sapiens
gttcaaggatgttccagtcgaaatgggaagaaaggacgtggctttcttcagcagtgttcagttggtttaatattgccaagttgggttaagtgtctgaaaagtactagtgagatcagatgtcagggcccttctattccttccacttatctgcaggtctaccctagagatagcagtggatgcaggcagacagctaatacagaatttgggtagtttcctatataggaagaagattactttcttgttctcacacctgtgaagaactagtagcaactactttcatacaggttgccagggagagagcccctctagccctagagcagttaccagactgagttcttgggttcagatactcagactttccttcattcttgctgggktcagggagcaaagataaaagctgcagggtcctggaggaagtagatattgagtcgatattgaaagagctgcccaaaggagattctgttgtcccctgcctcactctccctggagccaaaggtgagccagagccttgtcctgagagaggctgccctgtcttttgatccatgatctcttccctctattttacccctatgttccgagggacttatcctctcaactcaaatggcttccctggaaat

SEQ ID NO: 2499 - DNA, 617 bp, Homo sapiens
gttcaaggatgttccagtcgaaatgggaagaaaggacgtggctttcttcagcagtgttcagttggtttaatattgccaagttgggttaagtgtctgaaaagtactagtgagatcagatgtcagggcccttctattccttccacttatctgcaggtctaccctagagatagcagtggatgcaggcagacagctaatacagaatttgggtagtttcctatataggaagaagattactttcttgttctcacacctgtgaagaactagtagcaactactttcatacaggttgccagggagagagcccctctagccctagagcagttaccagactgagttcttgggttcagatactcagactttccttcattcttgctggggtcagggagcaaagataaaagctgcagggtcctggaggaagtagatattgagtcgatattgaaagagctgcccaaaggagattctgttgtcccctgcctcactctccctggrgccaaaggtgagccagagccttgtcctgagagaggctgccctgtcttttgatccatgatctcttccctctattttacccctatgttccgagggacttatcctctcaactcaaatggcttccctggaaat

SEQ ID NO: 2500 - DNA, 617 bp, Homo sapiens
gttcaaggatgttccagtcgaaatgggaagaaaggacgtggctttcttcagcagtgttcagttggtttaatattgccaagttgggttaagtgtctgaaaagtactagtgagatcagatgtcagggcccttctattccttccacttatctgcaggtctaccctagagatagcagtggatgcaggcagacagctaatacagaatttgggtagtttcctatataggaagaagattactttcttgttctcacacctgtgaagaactagtagcaactactttcatacaggttgccagggagagagcccctctagccctagagcagttaccagactgagttcttgggttcagatactcagactttccttcattcttgctggggtcagggagcaaagataaaagctgcagggtcctggaggaagtagatattgagtcgatattgaaagagctgcccaaaggagattctgttgtcccctgcctcactctccctggagccaaaggtgagccagagccttgtcctgagagaggctgccctgtcttttgatccatgatctcttccctctattttacccctatgttccragggacttatcctctcaactcaaatggcttccctggaaat

SEQ ID NO: 2501 - DNA, 640 bp, Homo sapiens
catctcccttcttcttttggtgtgtatgcagattattccagatttttgctattaccaggaagctacataaagtattcttatacatgtcgcctagtgcatttatgcaagaattttctcctctaaggtatacctaaaagtgaaattttctatatcaaagagtatgtagatccccaactagrtattgcctaattgttttctcaaggggtttctcaacttacactcccactagctatttggttgtatttacttttactctcctctcagctgcctaagagttcttcttgttctggatcttctgtgttcctaatactgttcttgattgtttttatgagataaagctgttttctttgttacagtgatacacctgcatgtaaaaatggtcttttttaaagctaagcgttctgacttttatgtattcgccttatccagacagttgaatttctgaatgaaaagctggaaaaaagggaggctcagttattatctcttagtaaggaaaaagcacttctagaagaagcttttgataacctgaaagagtaagtattctgcaaatgtgaataatgttacacattttctggaagcctgtatactttgtacatatttaagaatgtttttgaaattaaaatgttttgtaattttatca

SEQ ID NO: 2502 - DNA, 602 bp, Homo sapiens
gtgagaagtaaagtggtttctgttatacaaacttggacagaagcagaagtttcattctgattgattttagttactttgggtgaaacattaccatgtttcaatgaggaagatatatatatatataattatactcagaaaatacttcccactattccttccagcacattcactctacctttcttttcaccctgttactgcctattcgctgtaggtaagaaatctcattagttttctggttgacccatttagttggctttttaaagtactaataactattacatgtrtattttttatatctcttcttcttatattaaagatagtcttttgcctttttttttttttcatttaacaacctatcctgaatatcagttcatagagattttcctcattcttcttggtagtttcctagtgttctactgtggatttactgtaattcagtcactctcctatgtctgggcatttaggttgttgcctaacttttgcatttacaaacaatgttgcaatgaatcatctgatacatttatattttcctattggaagtttagtaatcctggctcactttgggaatttctacaccaactaaatgatacaaaattggaatc

SEQ ID NO: 2503 - DNA, 1334 bp, Homo sapiens
gagctacttttgtgctttacagaccgtcttgtgcatggtttgtaccccatattaaatttgatgatggatatgaaagtattttataaacagaaaattgttatgcacattttagctattatgaaaataatgatgagtaaataacttcagttagtgaggctgtcattggaccaatttggaagcctctctctcctgtttcctcagtcctacccttggatgcagaagaaagaaaaacacacaagaaaggaattttaggagatggaaattttttaagttactgacatttactaatagtcatagaactgcaaattaaaaagtaaaattccatttcaagttataagagattggtaaataaataaaagattgaaaacaatcaatgttgacaacactatagtgaaataggcagtgtgaagtgttaaaatgttaaagatcctaattatgtgatataacaattccacttttgtgaatcatcctaccaaaaatgaaaacactagtcattatatcccattacatccatatatgtatagataggtaactagataaatagatataaatagatatctattgatgttcaatatgggattgtttgtagtgcagaaaactgaaaataaaaatccaaataatcattcataagtcaacagtttgttttgttttgctttgtttagttttttgaggcagrgtctcgctccatctcccaggctcgtgtgcagtggtgctatctcagctcactgcaacctccacctcccgggttcaggtgattcttgtgacttcagcctcccaagtagctgggaacacaggcatgcaccaccacagctggctaatttttttttttttttgtatttttactagagatggaatttcgccatgttggccaggctggtcttgaactcctggcttcaagtgatccacccaccttggcctcccaaagtactgggattaattataggcatgagccactgtgccccacaatcattcgtgaacaacaaaattttaatgtctttgcactaatgctcttccctcaagatatgctgtaatttactgagccttacacatatttgtcaatgtttaagctgattctaatatttcgccattataaaaacacagacataggcagccttgtatacaaatctcattctacaactctgattattcctgtgatgtttattcccagaaagggaaatgaataatatttcggattgtgatgtcaactgagtgaccataggacagagaacagggtggtttcgagcagggtttggcagtgcgcactggaggggaagggtgggggagaaacgttctctgaagagggggtacttgaccagaagacctacatgatggga

SEQ ID NO: 2504 - DNA, 1439 bp, Homo sapiens
ggggacaggaaatctggcaactattgcagaaactagacctaatggtgcacacaaacaatttgtcagtcttcttaaatgtgaatagctttccgcaaagtggctgctcttgctttgtttgaacaggctaaacttttcctttttggactttacatcttagaagtgaaatgtgatccacatattcaatcaaaatcatttaattcaaagcatattttgattggaacaaagttgacatggaaagaaactctagaataaaaaagttgaaaggactttatatcatatatttagcaggaaaatttgaaacagttctaattaggctgaaaaaaacagctttcttcaatgtaaattacaaaggtcatatatcaatgttaaggaaacattaccactagtgtttgaaatccarcacatgcaaacataacagaccagttcattttaaatctctgtgtgtatatgtgtttgtataggaagaaggccgtattacatggatttaaaatgaaaaatacttaaaattccaagtttataactttgtatattaccgccttgccaatctcaatgtcagttcctttaaaacatactgttatctatgttcaaatgaattaagactcttaattataagtacaattaaaattttacaaaatggatgtttcattcattataaatacgattaaatacatcttataagtaaatgtatttcaagtcaggagggttaatcagtgattttcattttctcatttgaaacttacagctatggtattttgtatctcagaacctttgtaccttgggccttctagaagcctgggagtggaagtagtggtacaggtgtgcagaaatgtatttctgggctgcctaggcctattctctctggttataaaaagtgtataaagaatatttgatctttttatttaactttttataaaaatcatttatcccatagatattgctagtttttatttagtttctttttttaatggagtggtatgagaatgtttagccaaagaataagtaaatattagcattaagctgggaatgacaagtatgagaaacataaataataaacaaataaggtttcttggtcttgaggtaaacaattatctaataatttcctttgttgattgaaattggttttcttgatttttacattggcaaaaatttggttttttgaaaataaaaggaaattgctagtgtatcactaatgcatgtgtagattaaatacatagttaatgccttttagtttagaatttttattctcaaatagcttagagtttcttggaaaaagctgtttctatatgttatcacattttttgactccactatagaaaataataattttatataacactttttataaagaaataatctatttcttaagtgagttagtttcaggaaagcatagattgtgttctttcagtgagatttgctaaacatgcacacagacacacaca

SEQ ID NO: 2505 - DNA, 1296 bp, Homo sapiens
tgcatctaatgggcttggatagcctgttcttcattcayggataattagaaagaaaaagattcctctatataaaaaagggagaatatatcatgcaagatacagaggaagagaataatactgataaagacattacaaaaaaaaagaaatattggtcagaaagacactctctgccttcaaaaatacagaatatgaaataaaatataagatgaagtgaaacaatactgtaaaataaaagataaactgttaagggcagtacaaaaaattttcctccaagaaaacaaaatatgttagagacgttaaaatgtatattagaagagaagaaataaaacagaaaattataacagatgaatgatacagagaatagaaaacaaagatcccaaacaagaatgattattaacttttaaagaagagtctagagcagacagaaaataagtaataaagacgtaaccattagatctatttctggactaaaaaagatatgaaggtgcagaacaaacggatttaccatacacaaagtaatgttactaaagaaataccaacatctagacatatttcagggcaacaaaattaaattccaaaaaaaaaaagagcaaatgcaaaacccaggcagaaagaaaaataattaatctcagatttctttttctcagtcttaaaaaccaaaggacagtagcgtaacatctattctacagagttcttttaaaaagtttgggtcttatgattttatatcagccaatttgtgtaatcagtcattgacatataaaggtgatgaaaaatatatacaaccagattaatctcaggcacagaggtggtctgacctcttgtgctccttctctggcccactccagccagtttggcttccataagcttctccaaaatagcatgcttactaccccatcttccccaaacttatttaacattacagctttagctggtgcaagagaacaaataataattcagtgatatgctgcataataatgttttagtcaacaatggaccacatatacaatggtggtcccataaggttgtaatggagctaaaaacttcctaccacctactgacactgtagctgtcctaacattgtagtgcaatgcactgcctttcctgcatttagagacacaaataccattgtgttacaattgcctactgtattcagaagagtaacatcctgtacgtgtttgtagcctaggagcaataaacaataccatacaggctaggtgtatagtaggctataccatgtaggtttgtttaagtatactctatgatattcacatagcaaccagattgtctgacaatgca

SEQ ID NO: 2506 - DNA, 1296 bp, Homo sapiens
tgcatctaatgggcttggatagcctgttcttcattcatggataattagaaagaaaaagattcctctatataaaaaagggagaatatatcatgcaagatacagaggaagagaataataytgataaagacattacaaaaaaaaagaaatattggtcagaaagacactctctgccttcaaaaatacagaatatgaaataaaatataagatgaagtgaaacaatactgtaaaataaaagataaactgttaagggcagtacaaaaaattttcctccaagaaaacaaaatatgttagagacgttaaaatgtatattagaagagaagaaataaaacagaaaattataacagatgaatgatacagagaatagaaaacaaagatcccaaacaagaatgattattaacttttaaagaagagtctagagcagacagaaaataagtaataaagacgtaaccattagatctatttctggactaaaaaagatatgaaggtgcagaacaaacggatttaccatacacaaagtaatgttactaaagaaataccaacatctagacatatttcagggcaacaaaattaaattccaaaaaaaaaaagagcaaatgcaaaacccaggcagaaagaaaaataattaatctcagatttctttttctcagtcttaaaaaccaaaggacagtagcgtaacatctattctacagagttcttttaaaaagtttgggtcttatgattttatatcagccaatttgtgtaatcagtcattgacatataaaggtgatgaaaaatatatacaaccagattaatctcaggcacagaggtggtctgacctcttgtgctccttctctggcccactccagccagtttggcttccataagcttctccaaaatagcatgcttactaccccatcttccccaaacttatttaacattacagctttagctggtgcaagagaacaaataataattcagtgatatgctgcataataatgttttagtcaacaatggaccacatatacaatggtggtcccataaggttgtaatggagctaaaaacttcctaccacctactgacactgtagctgtcctaacattgtagtgcaatgcactgcctttcctgcatttagagacacaaataccattgtgttacaattgcctactgtattcagaagagtaacatcctgtacgtgtttgtagcctaggagcaataaacaataccatacaggctaggtgtatagtaggctataccatgtaggtttgtttaagtatactctatgatattcacatagcaaccagattgtctgacaatgca

SEQ ID NO: 2507 - DNA, 755 bp, Homo sapiens
aaagatgtgtttttgacattgcaacttggaagtcacaatgcatttttcacaaaacagtgcagctagatgtagtaaaaatagtatgattagagctgtaatttgggwgtttgtgggttaaataagcttttgctcactgtctggaaatcataccaccaggaatgaagttgtcactgaggaagaatctactcaaggttgcaaccagcttatatgcagaattcaacctgggcttaaatggggcagtggactttgctggatttctcacagcaaagctttttctcaagcttaaaatatgcacccctttttgaatgactgaatctaacatgaatgatttttacttgttgccaacttacgtgccttgaaatcctgagacatgtcctttcatgttgaattttccttaggaattaaagaaatccttaataaatgtcttgcaattataatcaactttaattacttgttgctatggagttttgcttggttacaaattcttcatctgctgtttctaattcagctcaagtttctgtggctaaagggatattttgactctaatgagagaaaatacataaattttttaatagttttagtctttcttctagcaatggctatccaagcagtaccaagagaagaaagcagaacagggtagagtgatatttcataagagctctagtactgatcttttttttttttttttttttttttgagacggagtctcactctgttgcccaggctggagtgcagtggtgcgatctcggctcact

SEQ ID NO: 2508 - DNA, 1320 bp, Homo sapiens
ttttgtctccaactctaactaatagctgcttcataattctctgagcccaaagagctctattcagtaccaaaaacctctaacagcccaggagagacccaaaacctttatcagtgtttcaattcacaaccataggctgatttggattctatttctgtcttgtttacactcaaaatccttaaaaaccattaaatcgtacaacatggagtataaagattcctttaaactcatagtcagccaagttcaaataggctgtaccttgtacaactccagaggaaccattcacgtagaccctagtatggttgcaatgtagtggccctgcactcaggacatgtaagccacagtgcatcccagtgctggagtctactggttaaaaggctgggctctggagccacatcactggatttctgaatcttctctctaccattaatgaactttgagtaaatcatgtaacatttctgtgcatctgtttcctcaactgtaaaatgtagacagcagcatctattatacctcatagagttataagattaaatgagttcatccgtgcaaagtgcctggcaccgaccgagcactcaataaatgttaattgctgttagctgttttcattattattctgtcagaatgactgtttcctggtttgtttttggaaagaacaagttttcttgttcttctggagccatgcaaaaggtcctggatccccagacagaatttacttctctctgttcaattcctccaatagacgtgaaaccaaatgttgtgttagaattttaaaattaggcaccagggccggacgcggtggctcacacctgtaatcccagcactttgggaggccgaggcaggcagatcacctgaggtcaggagttcgagaccagcctcaccaatgtggcaaaaccccgtctctatcaaaagtacaaaaattagcccggcgtggtggcacatgcctgtaacccagctagttgggaggctcgggcagaagaatcacttgaacccggaaggcagaggttgcagtgaaccaaatggcgccactgcactccagcctgcctgagtgacagaactagactctatccamcaaaaaaaaaaaaaaaaaaaaaagaaaaaaaagaaaaagaaaaaagcaccaggacacctggattcaaattctgattctctagattcaaatacacttatcagttctgtgatcttggggaagccacttaaccttctgcatatacatatttttttctataaaaggaaagaatcattcttaggattgttgtcaaggattaaataagtaatgtgtgtgttagcttctatgggaggtctgacacctggtgggtgtctaat

SEQ ID NO: 2509 - DNA, 1631 bp, Homo sapiens
ataaggaactgttttaggcactatgggaaaattcaaaaatgaaaaataagaggctgggcacagtggctcatgcctaaaatcccagcactttgggaggccaagatgggagaattgcctgagcccaagagttcaagaccagcctgggaaacatagcgagacccccatctcaaaacaaaaaaaaaaaaaagagaagaaagatgaaatataaagattagtatctaacataaatattgaacatgaatcatatatgtagattagagctagagaattgtcaattgtaacacttctatttttaaaaagctgagaawatagatctctcaaaataaagcctacttgaggaaattctgatacagtcaatccttgtaattaaattatctaattttcaacactctaaaacttttaatgactacaatcgcattagtagtagaaccctcttatctgagaattcagttactcaaggcccacaatcaaccatagtctaaaaatattaaatggaaaactccaaaaataaacaattcataaatattaaattgtgtggctatcctgagtagcatgaagaggcctcatgtcaccccgttccatcccacccaggacataaatcatccctttgtctagcatatccacactgtattcactgccctctcgttggtcacttagtggccttctctgttaaaaacatagtatataggccagacgtggtggctcacacctgtaatcccagcactttgggaggccaaggtgggtggatcacctaaggtcaggagtttgagacaggcctggtcaacatggcaaaaccctgtctctactaaaagtacaaaaattagctgggcatggtggtgggtgcctgtaatcccaactactcaggaggctgaggcagaagaatagcttgaacctgggaggcggaggttgcagtgagatcgtgccactgcactccagcctgggcgacaagagagagactccatcttaaaaaacaaaaaaacaaaaaaaaaacatagggttcagtactatgtgaggtttcaggcatccactggaactatcctctgtgaataaggggaaactactgtaattgaatatccaacagcctgagcatttaatgcaggtagcataaaatgccttattccctctcagaaagcctagggcattcgggtcagtggcccaagctcagtttgtacctggcattcctcagtaagccaggctagcatgtgctagtccagtctcacatcctccctgcttccccatctcccaccaccacaagatcacttcctgtctagtaattcctttgcaattactagaatccaaaggcacttcagaaagtaggaagatctaagtcttatcttttgggtttccttcaagccacaagatgacactgggcccatgccatttgaatgtcagagtgcttttgtatatgaaaaaacaatccaccaaacatttttttaataaagaagtcactttgatggaaagtcattcattgcaaaaatattcagtacagtatctcttgatatagtgattagcagtagattttaaataattatatttacccagaaaagttaataaagtttcaaattctgctgcatgcagtgtagtatacttatagattcagaataaagtcatgaattatctaaccaaaaatg

SEQ ID NO: 2510 - DNA, 778 bp, Homo sapiens
ggaaagaggaggaaaatttcttagaaagtgatatttaagttgcatattgacaaataacagtgaaaggggagaagaatcatctcggttgaaggaccagtgtagacaaagaaaggcacaacaatatggaaatatgtaatatatttagggaagtgtattgaaataattacccctggggatgatacatcccagtctcacatcctcaaagtatcaccatgtgtacctgagggagtatcagcatgtttaacatgggttagggccagagagtaaggtatatgcctgctaaggaattgtaactttatgttctagggctctgcaaatctaacttgaggtaaagtgaattgacatttagctttcagccaagcacatgattaagtctctcatgatctatctatatctatatctacatctatctatggccaagatggaaaaatataggctctgcagtggcatattggatgtcatgtgatcatcttcagatattagaagaactstcaggtgaaagagggattttatattttatgcccatatccagaggaaaagctggaatcaataaattaaaattacagggaagcagattacttctttgggttagaaaaaaaagagaaatttctaggcaatggctaataattatgttaataggaaaaggaaatgcttcactgcacacatgttcttggtttggcagaggttgtcaatgttatcattggttttactagtgatatgttttggtttgatttttctgagctccaaaaattgttaaagagtggtacttttttagaac

SEQ ID NO: 2511 - DNA, 1622 bp, Homo sapiens
ttctcctgaattaaacatgatacatttgtacagagcatagttcactttcatttcagtgacccaaaatcctgctgaaagtgttcttccgaaacctcagagcaggaatgcttcctgtgcttggaaactccctggagacacctccaatcggagtaagcagcagaattatctgcacactcatagtcttgcagtcgagtatttttactgaaaaaaaaaaagccgtctgtttgaataggaaacgatgatatcatgtgactggctttctcctgccacccactaatttgacaacagatcagatcagaggaaaagttactcaagtcagaatttttttaaaaaaatcttttgggaacaaactcataaatggaagaaaggggagagtaacaaatgcagactgaatacatggcaggtccaggcttttactatcattgtttttagctcaccaggtaatcaaagcataaaacaaagggtgatttgtcaaagcttatgctgttgtccctgaaccaccaaggggggggtggctgctggactaattcgcttcacgtgggaatcagtgtttaccatttaagggtcctgatagaaagtgcacgattttcaaactggaaaacataaataataacgcgtgttgccactaaagtagtggcaccttgccgtatttctcttctgaatggaacaacctacatttcaaaggacagtctccttccacatgtaaatatttatttgcttgctgctgaggagtgtcaggaagtactaaagaacggtgtttagagtttcagaagcaaattgcttctgcgcacgccttgagtcactggattctgttgagctctctgcctctacgtcagggcttcattaatcttttcttttcttaaaaaaatagaaaagcttttcatttattgcttctaggaagccaggtgcattgcagtggatctcttcggcagaatcactgctttgtgtgaatatttattgtgtaattattgagcacctaccatgtgcagggcaaggcggggggcacccaggcgtccactctcctgcagaagtcctgggtcccaggcccgcatctttggggccaccttcaactgggagggtgttcgcttttctgtgacacagagaggcttaaatccctcagtgatttaaaaatctcgtctgtgagtccaaactgctaggttggcagccaggaagagaargttcccaggattttcagtggctgaagttctgggcaaacagcatttgcacaaaggagggggcgaggaaggggtgcagggagggctctccaagtgcctgttcggcatcagtttacaagtgtgcttaggttgtatttagatgttacgatgattttaaaagtgaaattttggcattttgcattcaatcctgactaaagctctttggtatatcgacttaaaaggtcttcagattgccaagattttgcagcttggataatatctttggaaaggttaaatgagtccattttctggagctttcgtcagcacaagcccatgattctctgccctgctgagaaaggaggaggcgagctgagttctagcagatcccctgcttccgtctccctcgggcgagcctgtgtcttccgtcccaggaagcccgctgccgagaagctgccgcgggtacatgca

SEQ ID NO: 2512 - DNA, 985 bp, Homo sapiens
ctatgtatctatctatctgtcatccatgtgtctatctagtgtgtgggggggttagggggtggaagattatgtatccaggacttgcagtgggagaataagacagagtgagtggactgatatcaggctttcttagaaggaggagcaatggttccctgacatttccctcctcacttcttataaacgtattttctgtacctgcatgcttgagggtggtcattcttaaacttcagcagcatgagagttactggagattttgtaaaaacacagattgctgcactccacccccagaatttttgattcagcgagattagggtaaaacataagactttgtttttgtaagaagttcccaggtgatgctgatgatgctggtgcaccttgagaaccgccacttaagggctaatgggaaagagacaaacaggtttacaagactccaggctggaagccagaatttgttttagctgatgggtaaggagtcaccttgcccttcctgggtgagaaatatggaggactgcctgtgccaaacaaagatagccactgttggcaggctctttcagatgcttaaagtggctctgagaggagtgtcacagtcaaacttccctttcagataccaacagacatagcacatcaatacatcttgggaaattgttcagagaaacttttattcactgtcrcctaggtgcagataatacagtttgtgctgaatttttatattgttcttatttcatatctgatatgtattttatgccgttttaattgcttcctctttatattgtaaatctcattaggagaagtgactctgcttgaattttaaaaactatactgcataactacctgtactacctataatccttattgtttaatacttctaagtactcacttttatcatgatggcaattgattaaaccttacagggtctcatgtttacttatggttcctccacactgagaatataaattacagatctttgaatagaaagggcagacat

SEQ ID NO: 2513 - DNA, 541 bp, Homo sapiens
cattaggggaaaaaaatcagactaaagtggactttcttacacttatttaattgcttagaattattgtaaaattttgattttacagtatatgtggaacacaatctttttagtgctttgatgtctctaagtgtcttaatctgaccctggttagccaatgccagccatgttctttcccttgagaatttttaaagacttaacaaaaattgtagttagtaggatgatggtgagtcctgatttaaaagaccacattgaactgaggccagagtttgcttcacaacaaggtaatattgcatgtcatctgaagtatggggaagcagaaacagccttgagaggggtcaacagaaaatagaacagacagacagatggactggagaggaccacacagtgccaggaagaggggaatgcagacaggaggtgactggagacattcacacttccctaaacccagactgcaatgycacaattaagttccatgagatgcccttgtatccttctaaaagactgcctttttatgagtttctttcagaggatttctgttttg

SEQ ID NO: 2514 - DNA, 404 bp, Homo sapiens
ggactccagcctgggagacagagccagactccatctaaaaaaaaaaaaaraaaaagaaaaacaaagaaagtatagtatatacataccatggaatactactcagccataaaaaggaataaaataatggtattcacagcaacctggatgcagttggagaccattattctaagtgaaggaactcagaaatggaaaatcaaatattgtatgttcccatttacaagtggaaaggtaagctgcgaggacacaaaagtataagaatgatataatggactttcgggacttggagggaagggtggaagaggtgaggataaaagactacacattgtgtacagtgtacactgcttgggtgatgaatgcaccaaaatcttggaaatcaccactgaagaacttatccatgtaatcag

SEQ ID NO: 2515 - DNA, 1244 bp, Homo sapiens
tacacactatgcgtggaatataatcaactagtattatccctatttgaattatctaagtttgatcatctatttgacaattaaaaatataaatccattatatcaaattatcactttatgttgttttgttcatgttttgttttcctaaagagattgaacttttcttttcacctgtccatttgtttgaaattttcattatatatttctactaaaaggacagattttctgtttgcttattataaagtacattttcaagaatttaatgtagatatttttaagtggaactgtatcttttttctttatgtcaaacccaaggcttgtttcttatttatttttccaatatcaactgtagtgtttctcaaagtatgatccctggaccagccacatcagcatcgtctgggaactcactagaaatgcagattcttggattgtaccccagacctaccgaatcmgaaattctggaggtggagcctccagaggttgagaaccactgacatagtattataaatatcaagtctaaatcagacttctttaataggggtcctttcattggatattaataagtatttgggaaaaaatcatttctctagaaatcactgataagtagatatgggtttttctgcaggactttttattgtctttaatggaatattaaattctattaatattctgagaaaacagctataatcaaaccaatttggccacagaatcttttaacagcattttatagggctagtattttgtggaaaacacttcaggaaacaggagttgaaagagttaatcctggagccagctgtaaatttgaatcctatttctgcaattactggtcatgtgatcttgggcatgtcacattgcctctctgagcttccatttcctcatctgcaaaatggggataataatataacctatgacattggctaatgtaagcagtaaatgagtatgaagtgcttcaaacagctcttagcatagagtaaaagcttcataaatgttagctgctatttaaaatcgtgatcatgttgatgatgacagtgatgataacaaatgatatcagagctagtggttacggtgaaaagaacaccccagtgccagttttagttctgtggctaactggctttatgatcttgagaagtcacctgattgctctggtcctaaactttcttctcagtgtaatgaaaagcttggatgaggccagtgttttttatactggggtatacatactgggtgacacacaaagattttccaatgca

SEQ ID NO: 2516 - DNA, 1181 bp, Homo sapiens
atatgcatatttcttgcaagtcaacaatcccctggttcttatgactcttaaaattttacatttcctgggtattataagaaaaatcagatgacagaaggtttcatttctcttataagtagatccattagcatgccttctcttgataactaaacaccaattgatgtacaagcatttcatatcccagcccactctacaacctcttttctccccctcctcattctcattctagaagaatgaccgactatcctgttttgttgggaacaagatgggaactttcaacactagaaccaggaaagtcccaggaaatgaggacaaattgtcaccctatttttctttggtggttcgtttgttctttctttttttattttttttattttttaaattaatttatttttttgagatggagtcttgccctgttgcccaggttggagtgcagtggtgccatctcggctcactgcaagctccgcctcccaggttcaagtgattctcgtgtgtcagcctcccgagtagctgggactacaggcgcctgccaccacacccggctaattttttgtattttcagtagagatggggtttcactgtgttagccaggatggtctctatctcctgcccttgtgatccgcctgcctcggcctcccagagtgatgggattacaggtgtgagccaccgcacccggcctctttctttcttccactgcagctaaccattctgtttgcctctcttggaacttgaacctctccaatatgtccctgaaacttcattctcttgatttctctcttcatctactcatttcatataaaatcatatcatataaatttatttaagaaggtgttcttgactctcagccaagtccttgaacatttatctattctggttcattggtacccaattctcatcaaaggattctttacccatcaataataaaatgagaaaaatgttgccagtggagtaaggtttacatgaagctaaacgtatttgattttaagmctgccctttattccaagattatatctttagcacatttttattgtcagaatatcctttgaatgtaggctatggaattaggctatctgggtaaaaaacctaaaaataccacttacaggcagtcatttaacctctccaagtctgtttgcttgtctgtaaaataggactataattatacataccaatagagttatatt

SEQ ID NO: 2517 - DNA, 1181 bp, Homo sapiens
atatgcatatttcttgcaagtcaacaatcccctggttcttatgactcttaaaattttacatttcctgggtattataagaaaaatcagatgacagaaggtttcatttctcttataagtagatccattagcatgccttctcttgataactaaacaccaattgatgtacaagcatttcatatcccagcccactctacaacctcttttctccccctcctcattctcattctagaagaatgaccgactatcctgttttgttgggaacaagatgggaactttcaacactagaaccaggaaagtcccaggaaatgaggacaaattgtcaccctatttttctttggtggttcgtttgttctttctttttttattttttttattttttaaattaatttatttttttgagatggagtcttgccctgttgcccaggttggagtgcagtggtgccatctcggctcactgcaagctccgcctcccaggttcaagtgattctcgtgtgtcagcctcccgagtagctgggactacaggcgcctgccaccacacccggctaattttttgtattttcagtagagatggggtttcactgtgttagccaggatggtctctatctcctgcccttgtgatccgcctgcctcggcctcccagagtgatgggattacaggtgtgagccaccgcacccggcctctttctttcttccactgcagctaaccattctgtttgcctctcttggaacttgaacctctccaatatgtccctgaaacttcattctcttgatttctctcttcatctactcatttcatataaaatcatatcatataaatttatttaagaaggtgttcttgactctcagccaagtccttgaacatttatctattctggttcattggtacccaattctcatcaaaggattctttacccatcaataataaaatgagaaaaatgttgccagtggagtaaggtttacatgaagctaaacgtatttgattttaagactgccctttattccaagattatatctttagcacatttttattgtcagaatatcctttgaatrtaggctatggaattaggctatctgggtaaaaaacctaaaaataccacttacaggcagtcatttaacctctccaagtctgtttgcttgtctgtaaaataggactataattatacataccaatagagttatatt

SEQ ID NO: 2518 - DNA, 460 bp, Homo sapiens
ttttgcagcttgggtcgcgcatcacggaacctgccgacatatgatgtctcccccagacacccagctttaaaatttctctcttttgtactctttccctttatttctcagactggctgacacttagggaaaatagaaaagaacctatgttgaattatcgggggtggttcccctgatacacatgaatttttggaggggacaaaaacgtttaaaccatagcaagtactaatctcatatcattcacgatctaatcacctcccaaaagtcctatctcctaatagcatcatcttaggagctagactttcaacatatgagttttgagaggaaacaaacattcagaccatagcaccagccaatgcttgcttaacttacaccctatatatcacaaaaataacagtgtaagtcccctttctgaagtgggtcttcctcttctctttaaaragaaatattgtgttcacccttt

SEQ ID NO: 2519 - DNA, 1278 bp, Homo sapiens
catttcttctaaggagaaccagtcggctataggcagaaatccagcaacatcaagaggcaccgagggagcgtgtcgagactgcccagcttctaccggtggctgaaacaagtacacacataaccacgttctcgagcgcctgctagacgcagctccataccctgatggtcccctttggtcctcaccactatcttatgtggctctgtaaaatgggcacatttcacagtgggagaacactgaggcgctgagaggtggagtgagttactgaaggtcacatagcctgggggtgacagacaggattccagcccaggctttgactccagagcaaggcccctggctagcaatactgcctcccaatgctgctgttgtcgttcagctctgagagcagcccagcaccgggacttggcctccggccaaagttggagtttcagtctccacgggcctaatgtccccgcctccctgccatgaatagccactgagtaccaacacactgcagcagtccccagtcaggtacgaggaggctgggacaggcccctgacctcccactctcccaagccacttccagggcctagctcttccctttttcccctcccctttctctcttaggtccaatatatctgggctggaagtaaagcaaaatgtatgtctcaaatgaaaccatcttggtgtagacacgaaaatgaaggcagggacaactggggacagagaaacatatccatcaatcaccactctgtgggactgactcgggccatgtactagaggcagaaatgacaggactcactgacagaatggatccaaggcaaggaaaagaggaatcgagaatgacaccgggttactggccaaccaagggggtggtgtcacttactgccaatggccaaccaagggggtgktgtcacttactgccaatggccaaccaagggggtggtgtcacttactgccaatggccaaccaagggggtggtgtcacttactgccaatggccaaccaagggggtggtgctacttattgccaatggggctggctgaggagcaggaggtgggggattcaagagttgtgtccgagcatgttcagtgtgggatgcccctcagatgtaggaggagaggctggataggtggtgggaggcctggggttcaagggaggtgtcagggctgggaagatgggtttgggagtcaacagtctagatgtgaagcccaatgatgggctcagataacttggagaaagagggcagacagacacaggcttgttttatgacaatctgttgaatgctacagttgttcttaga

SEQ ID NO: 2520 - DNA, 1211 bp, Homo sapiens
tgtgtgtgtgtgygtgcgcgcgtgagtgtgcaggcatatatgtgtgcttggtatcaaaatgtgcctatggttctgcaaatgctgtcttcacttagtggccctcaggaatatttctcgtgtcaaccaagaaacactcctccccagtctgatttttaatggccacacagtattctatgggatggatgcaccttcgtctattgagccaatttccaactgtgggacgttttggttgttaccaattatacattttcttttcttttcttttctttttttttttttttttgagacggagtctcgctctgtcgcccaggctggagtgcagtggcgcgatctcggctcactgcaagctccgcctcccgggttcacaccattctcctgcctcagcctcctgagtagctgggactacaggtgcccgccaccattcccggctaattttttgtatttttagtagagagacggggtttcaccatggtagccaggatggtcttgatctcctgacctcatgttctgcccgcctcggtctcccaaagtgctgggattacaggtgtgagccaccacgcccggccaccaattatacattttcacaaccacccagggttgttaaactgggacatgctaggctctctcgggggaagaaccctggtttgcagtgtttgcaaaaaaattgtcttagtgtgaatattcccaccatgaccgatttcaagctaccaatatcactgaagctgccaacatgtcaccgagagagcagcacagtccttgagagcctgtgtgagctggctctggcacaccaaaacctcaccaatgactctcttcataactgtgtccctaattatttccttaataaactccccagggtgaaagggctgtgtcgaaacatatgcacaaccccaaggcttttgatgcgcaatacccccttactctccagaaagacgttatcagtatgtgctccaccagcctcgtgcagtgcgagagatgcctgttcatccctccccacccctccaacaatggctattatcagggctttaaatcttgcccatctgatcgatggaatactagtagctccttgctattttcatgtgcatcgtttttagtgaataactgtttataaacttatggtcaaatgaagtgttagttgggcaactttagggacatttcatgaagcccttggggattataggtgtccagaaagcaactttggaatcatggctttg

SEQ ID NO: 2521 - DNA, 509 bp, Homo sapiens
tttaatccctcacagtaacccaatgagatgggtacttttaatatttccatattaaaatgagaaaattgaggcccagagatattattaagtaacttgctcaacttcatataggtgttaatagtagaggcaggattcaaacaagcagtgtggtgccagggctcatgttcttgacacctgccctacttccaaatgacgactagggaggcatgcgcaagtgccctagaagatcatgtcggaaatattcattgtgaaatgcatcaaaggagagcctgacctgggttcaaaacttggctccactctttactggctgtgtgaccttggtttgttattttaaattggtgtgctgcagtttcctgccttagatgaaatgggaaaatataatatctaacttggaattcttgtgaaaataatagatgatacagctgtaaagcgatatgtaaagcatctagcataaaatagaaaatggtctctacaaatcaattacmaatgctttaggtggatattggctt

SEQ ID NO: 2522 - DNA, 600 bp, Homo sapiens
ctactcattgaatcggttgcactaaaacagacttacattaacaaagtaaatttgtcaagattcactcagttgtaagtaacagaaatcctatatgccttagaaataagtatctgagaaaatctccattcctcatttgggcctaggctaaataaactaatgaaaacaacaacaaaatccatcttggtatgaaacttcttttcattttttctgaagtgcccgcaagagttaaatccacacaccatagctataaaggcgatgggtacaatttaaggctaattcagttgttttaatttaggtaacactgaatgtcaatgtataacaggttttatccatacattggcaaaagattggtgggtcacattttgcctaggagtcccaaatcctgtcagcctggcaactatgaagataggatctaaatcctttaattttttttaaatttagattcagagggaaggtttttaaaatgtatatattgtatatggtgaggtttgaacattgtacccaatgggtaattttttaaccctcaccacccccctccaccctccctgcttttggagttcccagtgttcattattaccattttatgtccawatgtaccca

SEQ ID NO: 2523 - DNA, 1076 bp, Homo sapiens
taatatttaagcctagccttactaaaaatgcaaaccaatttagctcatttcctgattagttttaggctaacagtcccattctktcttcctaaaaaataaaaaaaaggaataaattctccgtggaagaaaagaaatcatagacagcctctacaatttttttatgtagattgtattgcttttagttactgaaaagggaaaagaaaaaattgaaaaatagaaacagacccatagatgacacagctcttagatgaatcagaaaagaactatgaaattgctatgaataatatattcaggaaataaaagaacataagaaaaaataagcgaaaatatgtttattttcaccagaaatatggaggttttattttatcacagtcaataggaaatctagaactgaaatataaaagctgaaagtaagaattcaatagatgaatttaacagcagattagacaaagtagaagatgggattagtgaactagaagaaaggttaatagataatattcaggctgaagcaaagagaaaaaaagtgtgaaaaaaagagcacaatagaaacattacactgtaaaaatataacagttttatgaagaaagaggagagaagagaaaaggagcagaaatagtaaagatatgctgagaaatgtcaaagactaataaagacatcgagttagaattttgaaagttctgtggacaccaaacaaggtgactaactgaaacggatgcttcatcaatgaacataatcataaaactgaccaccaaaattacacgtgtgtgtgtgtgacagtgtgtgggtgtctgtatgagaaaaagacgtatcacatcaaagaacctaatttgagactgaggatttaccttgcaatagaagatttgaaagccaggaaacaaacaagtgcactttaaatgctggaaaaaaattcattcctaattcagaattttttaccaaatgcaaatataattcaaaaacaactctaaaataacattcttttcagataaaacaaaactaataaaatttttcgccagccaacttgctttaaaagaaatactaaataaaattatttaggcaaaatggaaaagatcctattc

SEQ ID NO: 2524 - DNA, 1076 bp, Homo sapiens
taatatttaagcctagccttactaaaaatgcaaaccaatttagctcatttcctgattagttttaggctaacagtcccattctgtcttcctaaaaaataaaaaaaaggaataaattctccgtggaagaaaagaaatcatagacagcctctacaatttttttatgtagattgtattgcttttagttactgaaaagggaaaagaaaaaattgaaaaatagaaacagacccatagatgacacagctcttagatgaatcagaaaagaactatgaaattgctatgaataatatattcaggaaataaaagaacataagaaaaaataagcgaaaatatgtttattttcaccagaaatatggaggttttattttatcacagtcaataggaaatctagaactgaaatataaaagctgaaagtaagaattcaatagatgaatttaacagcagattagacaaagtagaagatgggattagtgaactagaagaaaggttaayagataatattcaggctgaagcaaagagaaaaaaagtgtgaaaaaaagagcacaatagaaacattacactgtaaaaatataacagttttatgaagaaagaggagagaagagaaaaggagcagaaatagtaaagatatgctgagaaatgtcaaagactaataaagacatcgagttagaattttgaaagttctgtggacaccaaacaaggtgactaactgaaacggatgcttcatcaatgaacataatcataaaactgaccaccaaaattacacgtgtgtgtgtgtgacagtgtgtgggtgtctgtatgagaaaaagacgtatcacatcaaagaacctaatttgagactgaggatttaccttgcaatagaagatttgaaagccaggaaacaaacaagtgcactttaaatgctggaaaaaaattcattcctaattcagaattttttaccaaatgcaaatataattcaaaaacaactctaaaataacattcttttcagataaaacaaaactaataaaatttttcgccagccaacttgctttaaaagaaatactaaataaaattatttaggcaaaatggaaaagatcctattc

SEQ ID NO: 2525 - DNA, 1076 bp, Homo sapiens
taatatttaagcctagccttactaaaaatgcaaaccaatttagctcatttcctgattagttttaggctaacagtcccattctgtcttcctaaaaaataaaaaaaaggaataaattctccgtggaagaaaagaaatcatagacagcctctacaatttttttatgtagattgtattgcttttagttactgaaaagggaaaagaaaaaattgaaaaatagaaacagacccatagatgacacagctcttagatgaatcagaaaagaactatgaaattgctatgaataatatattcaggaaataaaagaacataagaaaaaataagcgaaaatatgtttattttcaccagaaatatggaggttttattttatcacagtcaataggaaatctagaactgaaatataaaagctgaaagtaagaattcaatagatgaatttaacagcagattagacaaagtagaagatgggattagtgaactagaagaaaggttaatagataatattcaggctgaagcaaagagaaaaaaagtgtgaaaaaaagagcacaatagaaacattacactgtaaaaatataacagttttatgaagaaagaggagagaagagaaaaggagcagaaatagtaaagatatgctgagaaatgtcaaagactaataaagacatcgagttagaattttgaaagttctgtggacaccaaacaaggtgactractgaaacggatgcttcatcaatgaacataatcataaaactgaccaccaaaattacacgtgtgtgtgtgtgacagtgtgtgggtgtctgtatgagaaaaagacgtatcacatcaaagaacctaatttgagactgaggatttaccttgcaatagaagatttgaaagccaggaaacaaacaagtgcactttaaatgctggaaaaaaattcattcctaattcagaattttttaccaaatgcaaatataattcaaaaacaactctaaaataacattcttttcagataaaacaaaactaataaaatttttcgccagccaacttgctttaaaagaaatactaaataaaattatttaggcaaaatggaaaagatcctattc

SEQ ID NO: 2526 - DNA, 599 bp, Homo sapiens
gcccggagaggccttccccttggagaagcagactctgagcttctcataattaagcagactctgagcttctcataattaagctcactcctcagcttttttatcatttagccacaagtccctttacctgctgccaaggagccatctgactttctccttacatcaatattccccactctcctstggcagattttctccaatgaattggcaacacccagcaccagtcagctcatcccacagccctctaattgctgtttccccagaccctctttccccagaccctctcaaacaccggagatggtgcaaccactaaagcagccccttccaccatcgcaccattccaatttccatctgtgggcatttggacaattgccccgtgtgttcatttgctaaggccactgtaataaaatacggccaactgtgggggacttaaacaagagacatttatgtcccacagttctggaaggagaagtcctagatgaatgtgtccacagggttggtttcttctacagcctctctccatggctcatagtcttctctctgtgggtctctgtgtccaaattccctcttcttatgaggaccccagttgtattgcattggag

SEQ ID NO: 2527 - DNA, 626 bp, Homo sapiens
aactttgggaggccgaggcaggtggatcacgaggtcaggagatcgagatcagcctggccaagatggtgaaaccctgtctctactaaaaatacaaaaattgaccgggtgtggtggcttacgcctgtagtcccagctactcaggargcttaggcaggagaattgcttgaacccaggaggcggaggttgcagtgagctgcgatcgcaccactacactacagcctggatgacagagtgagactctgtctcaaaaaaaaaaaaaaaaaaaatacacaactactgtgataaattccaagtttattacaaaggatttccatataatgtaaaattatggtacagagatttgaaacaaaaaaatagtaaaaaaattattagttcttattatttctaaagctgttaaatctcccagacatgtgcttgcatttgaagttgatttattgtttttttaaatgagtgatatgcagcactggtaatttattttgaaaagttcacataaaatcacaaactcagaaaacaaagaaaagaatattgattctggtgcttcagagaactgaatagaatttatagatgaagctggcagattttctagaagcataatagaatgtggatggcatatatgtggaagcaca

SEQ ID NO: 2528 - DNA, 1187 bp, Homo sapiens
tgtttaaagaacctcatgttggtacataattgaaacccaaatgtaaaattgttcttataaaggtttttcataacaatgaatcacaacttaaaaaaaaaaaaaagcctaccaaagagaagtgggtgaagggtgggtagaaacaactaacagtctcattgggccttccccacacgtagggccactgtagaaacaagccggtcactggggctcctctggatctccatctgaccccactcctttagatgaatgacagcccacattgtggcaaacatcagagagaaaccagcacaagtttgktattaggatttgacccaggagacttacagtatcctgaatcacatgccaattttatttgcagtacttggagtgagcatcagattcttatcaaccctgcctatgaaatgttcaacatattatttattcttatatcactctgggttctttactcgcgttttccttaaaattcaaagtttgtgatttttttaaagatgtagagaatagttagcatagtggttttgatatcgcacacagcaggcttcagatcctaattctgccacacactagctatgtgcccttgggagactaatttcttctctaagcttgagctgatttatctgaaaagagttggtgataaaaaccattgttatgagatttaaatctgaacaaattggagaatgctatttcccagtatttttttctttaaagatgcctcttctgctgctgctggctcttcaaatactggtgttacccaagcttcagcctgagcccttctcttttcctcctatgcagactctggactcaaagatggtaattataatgcagctttactttggtcacccactgtcttgccaaatttcctctgtggcactagttcttctcctctcactggaagactattccaactacagatgctccttgacttacaatggggttacattctgataaacccatcataagttgaggatattataatttgaaaatgtatttagatgcctaacctgccagacatcatagcctagcttagtttaaacatgcccaagccatttatattagcctacagtcaggcataatcatctaacacaaagcctattttatcataaagtattgactatctcatgtaatttattgaatactgaacatgaaaaacagaatggttatatgggtactcaaagtacagcttttactga

SEQ ID NO: 2529 - DNA, 520 bp, Homo sapiens
ggaactttgaattatgccatttactcctcactgacccctttaaccttcagccttttcttccttccaattaatttttaaatgtttctacaagaaatcatattaccaaacttctactttgactaaaatattgargtgacttctcaatacactgtagatttgaccctaggcatcttttttttccaaccaattttcattccttgctcgtaatttttactcctgtcaagtggacagggcatgcctttcctctgcatagctacttacccctctgcctgggaagtcattcatccattccacacaggttcatggctcccaacttctgtaccatgctgggtgctattgtttcgacaaaaaatgattttgattccatcagtcccccaaaggaactcatagcatcaaaaggacacaggcacaaaggtgtaattacaatacaaaaaagaggagtgctatcatgcagttgtgatgaacaagggcagatgagggatctccagaaggtgttgcaggaaaggcgatgcttgaacag

SEQ ID NO: 2530 - DNA, 520 bp, Homo sapiens
ggaactttgaattatgccatttactcctcactgacccctttaaccttcagccttttcttccttccaattaatttttaaatgtttctacaagaaatcatattaccaaacttctactttgactaaaatattgaagtgacttctcaatacactgtagatttgaccctaggcatcttttttttccaaccaattttcattccttgctcgtaatttttactcctgtcaagtggacagggcatgcctttcctctgcatagctacttacccctctgcctgggaagtcattcatccattccacacaggttcatggctcccaactkctgtaccatgctgggtgctattgtttcgacaaaaaatgattttgattccatcagtcccccaaaggaactcatagcatcaaaaggacacaggcacaaaggtgtaattacaatacaaaaaagaggagtgctatcatgcagttgtgatgaacaagggcagatgagggatctccagaaggtgttgcaggaaaggcgatgcttgaacag

SEQ ID NO: 2531 - DNA, 912 bp, Homo sapiens
aaattcaataaagttattttggtggggcatactgaaagacattgagcattgaaggaatagttagaagataagtgtggaatttgaaagcctggatcatagaaaaattaatgatacacagaagaagaaattgtatagcaggcacattttattgctgagcatattagtcaaatgtcggttgataatttctacccataacattagcaagaattttagtgaataaactatgcaaaggcatataagtttagaagactagctatgctctgtttttcctaattgttaaagcaaagggattaagattttatgaatacctgtttcctgctgtatattttatgtatattactaataattagtaatccttacaacccataaaaatgaattttaattacaactgccattttatggatgaaactgaccttcacaatcagaatcagaattttaaaatkaaaaacttaaaaatttaaaaaaattagaatttaaacttagatttttttttttgctccaataccttcacttcttccataatgccaagctgacctgataaaatcaagtcagaaataaacagagattgaattatcatgaaggaacatgagcatcggaatttttctgacattttgcttttcaacaattttcccaaaatgccatttctgcctccatataccttagttcaaggtttgggcagggatttgttgctcattactctttcttcagattccattcaaacatcttcagtgttttttaattgcctgcaaccatttaaggctcttctttattaattcagtcaccaagtatttattaagttcttactacctaggagatactgttctagatgctggagatacaaaataaacaaaatctacaaacatctctgctctcttggcgcttacatcagagagggagctgagaataaacaag

SEQ ID NO: 2532 - DNA, 1694 bp, Homo sapiens
ttattctttttttttttgagacagagtcttgctctgtcatcaggctggagtgcagtggcatgatcttggcttactgcaacctccacctcctgggttcaagcgattctcctgcctcagccttctgagtrgctgagattacaggtgcgcagccaccacacccaattaatttttttatatttttaatagagatggggtttcaccacgttggccaggatggtctcaatctcctgacctcatgattcgcctgccttggcctcccaaagtgctgggattacaggtgtgagccaccacacccggctgtgcatttattcttacatgaaatatcacaatatcacttatacatttttctattgtgttgcttatcttacatttgtaggagctctgagtacattaagcatactaatcttttgtctagtttatatgttgcaaatctttttgcatcagttgcttagttggccttacttattatatcatgctatattttttaaaagtatgtgttaagtaagctctgtgaagaagtccattccaaatgtagaaataaatcacaatgtcactgatctgagagcactgagtgaaagcattattgaaagttatgttcatctctatgtttaaaatgctcatattcagaaattacatgattcagggtgtgtaaatagaacacctcctggcttctctattgctatatgttgttcaaggagagatgggagctcgaacacacacaaacccagtccccttcaaccacaaggcgtcatctgtcactgaagcagctcagctccaccacttggtcaagcacagaaaccaatatccagcaatcctactcctggctatagatccaagcaaactgaaactaggatcttgcagagatatcaacactcccatgttcattgtagcactattcataatagccaagatatggacactacccaaatactcattgacatatgaatacagaaaatgcagtgaatacatacagtggaatattacccagtcttaaaaaagaaagaaatccatttatgacaatgtagatgggactggacgacattgtgataagtgaaataatcttgtcacaaaaggacaaatactgcatgatcccatttatatgaggtatctaaaatagtcaagctcacaaaagcagaaactagagtaattgttgccaggggctcaatgggtgtaaagttatatttgtacaagatgagtaagttctagatatctggtgtacaacacagtgcctatagttaataatacagtgctacgtacttaaaatcttgttgaggttagagcttatgttaagtgttcttacaaacaagcaagcaaacaaatataaaacaaaaccataaaatagccaagggacacaaggaaccttttggaagtaatgagtatatttattaccctgattatgatgatgatatcaagaggatacatgtatgtccaagctcatcaaactttataaattatgtacagatttttttgggtgcatcaaatatgcctcaataaagctgaaaaaaacataaagggttgttttgcctaaaaataaaaactctggatacaaccgctcttattcagataatctgtctaccgcaattacttctaattatgcaacattttcactttatcatagtatgacacttttattaaacttattttttcatataattataaaaagaaaaattgtaatagagaatcttatatgtgtt

SEQ ID NO: 2533 - DNA, 1694 bp, Homo sapiens
ttattctttttttttttgagacagagtcttgctctgtcatcaggctggagtgcagtggcatgatcttggcttactgcaacctccacctcctgggttcaagcgattctcctgcctcagccttctgagtagctgagattacaggtgcgcagccaccacacccaattaatttttttatatttttaatagasatggggtttcaccacgttggccaggatggtctcaatctcctgacctcatgattcgcctgccttggcctcccaaagtgctgggattacaggtgtgagccaccacacccggctgtgcatttattcttacatgaaatatcacaatatcacttatacatttttctattgtgttgcttatcttacatttgtaggagctctgagtacattaagcatactaatcttttgtctagtttatatgttgcaaatctttttgcatcagttgcttagttggccttacttattatatcatgctatattttttaaaagtatgtgttaagtaagctctgtgaagaagtccattccaaatgtagaaataaatcacaatgtcactgatctgagagcactgagtgaaagcattattgaaagttatgttcatctctatgtttaaaatgctcatattcagaaattacatgattcagggtgtgtaaatagaacacctcctggcttctctattgctatatgttgttcaaggagagatgggagctcgaacacacacaaacccagtccccttcaaccacaaggcgtcatctgtcactgaagcagctcagctccaccacttggtcaagcacagaaaccaatatccagcaatcctactcctggctatagatccaagcaaactgaaactaggatcttgcagagatatcaacactcccatgttcattgtagcactattcataatagccaagatatggacactacccaaatactcattgacatatgaatacagaaaatgcagtgaatacatacagtggaatattacccagtcttaaaaaagaaagaaatccatttatgacaatgtagatgggactggacgacattgtgataagtgaaataatcttgtcacaaaaggacaaatactgcatgatcccatttatatgaggtatctaaaatagtcaagctcacaaaagcagaaactagagtaattgttgccaggggctcaatgggtgtaaagttatatttgtacaagatgagtaagttctagatatctggtgtacaacacagtgcctatagttaataatacagtgctacgtacttaaaatcttgttgaggttagagcttatgttaagtgttcttacaaacaagcaagcaaacaaatataaaacaaaaccataaaatagccaagggacacaaggaaccttttggaagtaatgagtatatttattaccctgattatgatgatgatatcaagaggatacatgtatgtccaagctcatcaaactttataaattatgtacagatttttttgggtgcatcaaatatgcctcaataaagctgaaaaaaacataaagggttgttttgcctaaaaataaaaactctggatacaaccgctcttattcagataatctgtctaccgcaattacttctaattatgcaacattttcactttatcatagtatgacacttttattaaacttattttttcatataattataaaaagaaaaattgtaatagagaatcttatatgtgtt

SEQ ID NO: 2534 - DNA, 624 bp, Homo sapiens
ccatattgtcttaaaggggaactaacatcactttatctaacacatgaaaataaagatcaagttcacaatagagattaaaggacttgggaagttcttgaagggaagttcttgaaaggtttgtaaagccaagcytggagtcacagagggtattttttgcagcactctaaagctgcattcaactgaccagtattttccaaccctggaggctacatccctgaataatcacacgctaccaccactttctttctgagatgttgacagtcaaaacaacttcccttttctctactgtagagcttctgctttccaaagaaaattttccctgataattaattctcatttctcctctgtaccaaaacagaaacactaccatcttgtttattaagttttcaccaggaagggagaatgtgagaatcttcctgtaaacgtaggctggggggagtcaacaggtgcaatctagaaagtaaacataggttaatgaagcacaaatagtgtttggagctaagaatgtccttgggacattttaaaccatatctaaggattacgcttactggaagctctgctggcctcctatccacacagctgatatcacataggtcatactgcagggttaatttcacttctgcc

SEQ ID NO: 2535 - DNA, 1213 bp, Homo sapiens
tagcctattatgaatcattttatatattaacttttaatttatttgaccctacagagccatcgggttttgaactaattgacagaagaaattagatctcactcacttcaatattaatcttcaactttgtgctcaaaattaagcacactcctatcttatttagcaaaataaaattataaaagtacgtactttaaaatccacttagaaaatatctatggccagaaatatttgcaaaaattagaaactcatgtgttactttattcataactttatttatttcatacatattgagcccctgctgtgggccagacattgtgcatgttattatttcatttaatgtactcactcctgaacctttcaataatacagtgcactttttgaatacaaaataaagttttacaagggaagaaaactcctggaccttttaaatacctggttatcaatggcaaatatatcaatttaatatcaaaattgaggtatgaaaaacaaactccattatggcatctcatcattcattccttttcccaccaattcccttgtggcttactcaagtattcctgacatgaatggtgctggagtggtcacagctcataagtgaagcttctcctatccagatttcattgtcattagaatttactctattgtcaacaaagcaatactgctgatggttggagaaaaacaactgccacggtatccaagtgtgggagaaagctttgtttgagcttggctcactttttggaagaaaggataaaaggctgcagagttcaagtgcacaggacgtgcctygattcctgcaagatggggtgcagaactcaagtgcctagcctgttaagaaggctctcctagagcagcctcccaggaaagcagccctctagtgaaaaaagacagcataatatctctgagtggccattccatgacacgccaggctcagagaaacagtttcacgggttgctagtacagtatggcatcgcctgttaagattgtggtcaatgacggactacatatatgatggtagtaccataagattataatggaactgaaaaattcttatcacttggtgatgtagtagccatcatgaggtcataatacaatgtattactcacatgtttgtggttttctgatgtaaacaaacctactgtactgctagtcatatagaagcatagcacatatagaagcatatattatgctcctatatgtcatatagaagcatagcaca

SEQ ID NO: 2536 - DNA, 657 bp, Homo sapiens
tttttaaaaattttaaaattagctagttagttcaataaaaggactcatttttacaatttattttactgaatttatcatttarcagtaaagtaaacttagtttcagccagttgaggatgtagaatttggaaatgaaaatttagtgccaactgtatgatctgccttccgttcttgacttctctccctgctggttgggcttaaaaatgagcctgtcaccatctgtctgtgtctgccccatttctgttcctcagaggcaggcatgggtgcaatcacacagacaccccttgattccacacataatcaagaggaaaattcaaaaccccaggaaaaaagcttttcacagaacaagaattgcatcctcgatctttacatgctagaaacagccttcaattttctccatggagatctgttttatgtgttattttggtttgcttctaaccctgttttctactgcaaaaaggcaatttctattactggactcttgattcgatgtgcagttaaatgctacatcacagctgagttttaatatttcacagtggatggggaaagtattaacaaagtttatgtttccctccacatataataaccactaattcaccggagttaggggtttcggtggtctgactctgtacttccctaacagcatattttctacctg

SEQ ID NO: 2537 - DNA, 657 bp, Homo sapiens
tttttaaaaattttaaaattagctagttagttcaataaaaggactcatttttacaatttattttactgaatttatcatttagcagtaaagtaaacttagtttcagccagttgaggatgtagaatttggaaatgaaaatttagtgccaactgtatgatctgccttccgttcttgacttctctccctgctggttgggcttaaaaatgagcctgtcaccatctgtctgtgtctgccccatttctgttcctcagaggcaggcatgggtgcaatcacacagacaccccttgattccacacataatcaagaggaaaattcaaaaccccaggaaaaaagcttttcacagaacaagaattgcatcctcgatctttacatgctagaaacagccttcaattttctccatggagatctgttttatgtgttattttggtttgcttctaaccctgttttctactgcaaaaaggcaatttctattactggactcttgattcgatgtgcagttaaatgctacatcacagctgagtttyaatatttcacagtggatggggaaagtattaacaaagtttatgtttccctccacatataataaccactaattcaccggagttaggggtttcggtggtctgactctgtacttccctaacagcatattttctacctg

SEQ ID NO: 2538 - DNA, 617 bp, Homo sapiens
ggaagatggcctagaaagggaaactgctacttgggaatgacgtgtgacttctcttttatctcctatttagtagcctcacttttaagagttgtctgtatttcctgacattggacttacctattttttaaaaaaaaatttaattttttatattaatttttgtgggtacatagttgatgtgtatactatggagcatgtgagatttttgatacaggcatgcaatgcatactaatcacatcatgtaaaatggggtatccattccctgaattcagttatactcttttaattatttttaaatgtacaattctattattattgattatagttatcctcgatttacttcttagtatgctctggtctggcttctcctcctatcactgcattggcactgttgcacttacaaacatgaatcttaaggacatcttcctgttctcaccttacttcctcttgctgcagcattttaaattgtcccytgctttctccacactcttctatgcgaattcttgcctctctaacaaaccttaaaatgtttgtatttctagggccgggtgccgtggctcacacctataatcccagcactttgggaggccaaggcaggcagatcacaaggtcaggagttc

SEQ ID NO: 2539 - DNA, 832 bp, Homo sapiens
tcctggtgttaatgacattaagcatcttttcctatttttatatcccattcaggttttctattttgtggtgcctgcttttttttcccccctcatttttctcttgggctttttgttttgtgagaattcctgtaactgtagtatctaatctcattaggaattattctatctcctacaacttctaagcgcagtaacagtgcaagtctgtgataatccttcacaggaaaaaaraaaaaaaaaagggcactgggaaggttttgctttgctgtttcgtattattaattgggatagtttcaactcccacaaagagaaaagcaaggcatgagcactcacccatgcttattgacttcctaggctctaagtgcagtgggtattaactgagcggattgactacaagattgcagccttctctcgccttgcacttcatcactccaaacgatgtcattcccaatgcaggactgacaggcactcatgtccagcctcggctctatatccctaatccattagtattggctcgaggtcagctttttgaagacaagatcaattctaatacagttacattgacttctttgtctatcagggagtagatagaaagttgagagggatcaataaattccaaacaacaaatcagaaaatacatagcatatagaagccagttagcatgcatggatttctctgtgctagtcattgattaaaatataggtagtccagaaataatgagtttggatccatacctgaaagccaaaatggaaatcaactgttcaagctacgtctttagccgaatagaaaataggaaatgacacaatccttggccttgggatcaaaatcttacatt

SEQ ID NO: 2540 - DNA, 1303 bp, Homo sapiens
acacatgtatgtatgtgtatatatatataccaagaattcatttttatcaccttttggaggcaacttgactcttaagtcccttctggcttatagaattaaacataatatttcaaaaagtagaaggtggctcactctctaaattcctaaggtatcgcagctcagcatcccgttcttgaattttctacaatgtctagaatatagaatattgaagaatatatatatagtctttccatactgacccttatcaacttaccatctccaaaccctaactgttgactctgatggaaagcctgtgcgaacaaggaatttgtttctgtcattctcttatatctgtgggtcccaaaagttgctgaagtgcccttgggcgccatggaaaattcacatgggtatcttggkatagtttaaatgtttcagcgaaatgcaacaatgtttgttagacatcccacaaaatactctcaaggcagctcacagtttgagcattagactgagcaattttcctctaggtgatgccggctgggatttgggaggttgctgtgatacaaagaaaacatgacatgaaaatcatcatggaacaggacacaagggtggcagtgcccaatctgattccaaggtttgacttttacagcatcctcaggtgcacatacctcattagtgactaattgtggttacttaaacatgagatgaaagttgtatgtgttctttccatgtgtgcatattgttttctttcaaatgacgactaagttgttaataaacacttgttaaattatttggacctagctaattaattaatttggtttggaggcactgtgttaatggtggcagccagacgggattcagtttttaaagatttataggacccaaaatgccagtacttacaaatctatgatttcttggaggaaaatgatataatttagaaacaacattaaaataagaacttgcatttgcagccaaaggctgccccacagtaaagggtgtggagagaccaggcatgagtgaaactttccacttgcttcaggaccatactggatacacttcctctcttggatcaggaccatgtcatcgtgtgcactggcacctcagaaccagggagttcactatggaggcttggccttggtttcttataccctgcttgttatctaggcatatttgttgttacataaatggctccaatggtagggccctcccgggggttcttgctgaaactaggggcaaaccatcatcttactgtttatcaataaaccatgccatcaaattgacacaaacatccttggacccattgttacaaaataacactattaatcag

SEQ ID NO: 2541 - DNA, 932 bp, Homo sapiens
ggtacagcccactgtggaaaatggtttagcagctccttaaaaatattaagcacagaattatatgatccaccaacaccctttaagtgtatatacccaaaataactgagagcagggactcaaacaggtatttgtacacccgtttaacagcagcattattcacagtggccaaaaggtagaaccaaccctaatgcccatcagtaggtgaatggataaagaaaatgtaatatatacatacacagagtattattcagccataaaaagaaaaatatctggccagattcaggggcttacacctgtaatcccagtattttgggaggccaaggtgggcaggtctcttgagccccaaattttgagaccaggctggacaacatggcacatttggtcagaagtgtttgaccataactactattcaagaaaaagatctactcattagaactataaatcataaaattataaattctacaaraacaaatcaaccttatctaccacccagtactacccaattacagaatgttagaacggaaggtctcaccatggactcaagagctgatatgagcaatgtcaccaccatcctgttctctgcggactcatcttcaacagactcatcttcaacggactcctcatctgccatggactcctcatcttcaatgggcagggtggaaactgcagcttgtgccatgatccctgtgcaagaaaagtagtaagaaattgaatggtagaaatccagtatcctaaactcacatccagagctgtgagagtttttcactggctggcaaattgtttttttgcatcagagaaaaaaacaaaacttggtaacttggtattcgatttgcccaaaactctcatcagatagaaagttaggggatgaattctctatctagtattatttccatgaagttagatgaatatcactcccaaaataaatccacgtg

SEQ ID NO: 2542 - DNA, 1286 bp, Homo sapiens
tgcatctggagggtctaactctgtggcattccaggcagcgcctgaacagaggaagcccatgtcaaatgtctttttattccattcatactccaggtccctgaaatacagttaccagtcatcttctaagcttcatttaaatgaaaataaatcagactataaaaatgatagcaaaccagacacatagcttgtttctaacacagatgatgaaaatttttgtaatgatactgaaaccaaaaaattaaggaacccagtaattatgattgaaatgaaagatgattaagagtttgacatgcaaatggcaaaaaatgtaaacccagataccactaattggaaattggacattaggcattggcctcagtctagagatccagaaagtctttttgatttgttgtttacccaccccaaagaaatgaagcatatgattcagatagaaagccacagtatttctgctgctacagatacttataaaaacagaaaaccaatacagcgtttattccagcagccactatatggcaatcccagtgctaacaactacagaagcatgaatcttgaattataaaatgtgagttattctttrccacatagtgagagaacatcaaaaatatagctagaagacttatgggaagatattccaaggtcaccaacatggcacatgaatagatatgtaacaaacctgcatgttgtgcacatgtaccagaacttaaagtataataataattaaaaaaaagaatgaggtaggcatgttacaagttgagttcctggctttggagaaaagcaagtccaacttcaaaaagacagaggttcacttgctgcttctttttcctctttatcaattatttgatttagtcaaattttctattcaagaaaatctcatgtgtacagttacagtggggttatctaaatgtgtaattatgtgtcaaagtagattagttctgctatctaaataatggttctggagaatgttctcataatgtttgttcattaatcaacctatgtctcactatcagtcttccaagtggcgtatgagctgggaaactaattaagccacataccatgtgaccttctgaaccagatcaacataaagaaattgctaaagaaacaagctctagattctagattcttttttcttgtattcatttagagatgatttacatttatttaatgatagaatgggaatacaatgggagggaagcaatgactgagacaagccacaaaaacacgtctagccttgagagttgcaacgaatattcccagccaaatgagtctgtttaatgtgttttcatgca

SEQ ID NO: 2543 - DNA, 1286 bp, Homo sapiens
tgcatctggagggtctaactctgtggcattccaggcagcgcctgaacagaggaagcccatgtcaaatgtctttttattccattcatactccaggtccctgaaatacagttaccagtcatcttctaagcttcatttaaatgaaaataaatcagactataaaaatgatagcaaaccagacacatagcttgtttctaacacagatgatgaaaatttttgtaatgatactgaaaccaaaaaattaaggaacccagtaattatgattgaaatgaaagatgattaagagtttgacatgcaaatggcaaaaaatgtaaacccagataccactaattggaaattggacattaggcattggcctcagtctagagatccagaaagtctttttgatttgttgtttacccaccccaaagaaatgaagcatatgattcagatagaaagccacagtatttctgctgctacagatacttataaaaacagaaaaccaatacagcgtttattccagcagccactatatggcaatcccagtgctaacaactacagaagcatgaatcttgaattataaaatgtgagttattctttgccacatagtgagagaacatcaaaaatatagctagaagacttatgggaagatattccaaggtcaccaacatggcacatgaatagatatgtaacaaacctgcatgttgtgcacatgtaccagaacttaaagtataataataattaaaaaaaagaatgaggtaggcatgttacaagttgagttcctggctttggagaaaagcaagtccaacttcaaaaagacagaggttcacttgctgctkctttttcctctttatcaattatttgatttagtcaaattttctattcaagaaaatctcatgtgtacagttacagtggggttatctaaatgtgtaattatgtgtcaaagtagattagttctgctatctaaataatggttctggagaatgttctcataatgtttgttcattaatcaacctatgtctcactatcagtcttccaagtggcgtatgagctgggaaactaattaagccacataccatgtgaccttctgaaccagatcaacataaagaaattgctaaagaaacaagctctagattctagattcttttttcttgtattcatttagagatgatttacatttatttaatgatagaatgggaatacaatgggagggaagcaatgactgagacaagccacaaaaacacgtctagccttgagagttgcaacgaatattcccagccaaatgagtctgtttaatgtgttttcatgca

SEQ ID NO: 2544 - DNA, 1286 bp, Homo sapiens
tgcatctggagggtctaactctgtggcattccaggcagcgcctgaacagaggaagcccatgtcaaatgtctttttattccattcatactccaggtccctgaaatacagttaccagtcatcttctaagcttcatttaaatgaaaataaatcagactataaaaatgatagcaaaccagacacatagcttgtttctaacacagatgatgaaaatttttgtaatgatactgaaaccaaaaaattaaggaacccagtaattatgattgaaatgaaagatgattaagagtttgacatgcaaatggcaaaaaatgtaaacccagataccactaattggaaattggacattaggcattggcctcagtctagagatccagaaagtctttttgatttgttgtttacccaccccaaagaaatgaagcatatgattcagatagaaagccacagtatttctgctgctacagatacttataaaaacagaaaaccaatacagcgtttattccagcagccactatatggcaatcccagtgctaacaactacagaagcatgaatcttgaattataaaatgtgagttattctttgccacatagtgagagaacatcaaaaatatagctagaagacttatgggaagatattccaaggtcaccaacatggcacatgaatagatatgtaacaaacctgcatgttgtgcacatgtaccagaacttaaagtataataataattaaaaaaaagaatgaggtaggcatgttacaagttgagttcctggctttggagaaaagcaagtccaacttcaaaaagacagaggttcacttgctgcttctttttcctctttatcaattatttgatttagtcaaattttctrttcaagaaaatctcatgtgtacagttacagtggggttatctaaatgtgtaattatgtgtcaaagtagattagttctgctatctaaataatggttctggagaatgttctcataatgtttgttcattaatcaacctatgtctcactatcagtcttccaagtggcgtatgagctgggaaactaattaagccacataccatgtgaccttctgaaccagatcaacataaagaaattgctaaagaaacaagctctagattctagattcttttttcttgtattcatttagagatgatttacatttatttaatgatagaatgggaatacaatgggagggaagcaatgactgagacaagccacaaaaacacgtctagccttgagagttgcaacgaatattcccagccaaatgagtctgtttaatgtgttttcatgca

SEQ ID NO: 2545 - DNA, 1286 bp, Homo sapiens
tgcatctggagggtctaactctgtggcattccaggcagcgcctgaacagaggaagcccatgtcaaatgtctttttattccattcatactccaggtccctgaaatacagttaccagtcatcttctaagcttcatttaaatgaaaataaatcagactataaaaatgatagcaaaccagacacatagcttgtttctaacacagatgatgaaaatttttgtaatgatactgaaaccaaaaaattaaggaacccagtaattatgattgaaatgaaagatgattaagagtttgacatgcaaatggcaaaaaatgtaaacccagataccactaattggaaattggacattaggcattggcctcagtctagagatccagaaagtctttttgatttgttgtttacccaccccaaagaaatgaagcatatgattcagatagaaagccacagtatttctgctgctacagatacttataaaaacagaaaaccaatacagcgtttattccagcagccactatatggcaatcccagtgctaacaactacagaagcatgaatcttgaattataaaatgtgagttattctttgccacatagtgagagaacatcaaaaatatagctagaagacttatgggaagatattccaaggtcaccaacatggcacatgaatagatatgtaacaaacctgcatgttgtgcacatgtaccagaacttaaagtataataataattaaaaaaaagaatgaggtaggcatgttacaagttgagttcctggctttggagaaaagcaagtccaacttcaaaaagacagaggttcacttgctgcttctttttcctctttatcaattatttgatttagtcaaattttctattcaagaaaatstcatgtgtacagttacagtggggttatctaaatgtgtaattatgtgtcaaagtagattagttctgctatctaaataatggttctggagaatgttctcataatgtttgttcattaatcaacctatgtctcactatcagtcttccaagtggcgtatgagctgggaaactaattaagccacataccatgtgaccttctgaaccagatcaacataaagaaattgctaaagaaacaagctctagattctagattcttttttcttgtattcatttagagatgatttacatttatttaatgatagaatgggaatacaatgggagggaagcaatgactgagacaagccacaaaaacacgtctagccttgagagttgcaacgaatattcccagccaaatgagtctgtttaatgtgttttcatgca

SEQ ID NO: 2546 - DNA, 1286 bp, Homo sapiens
tgcatctggagggtctaactctgtggcattccaggcagcgcctgaacagaggaagcccatgtcaaatgtctttttattccattcatactccaggtccctgaaatacagttaccagtcatcttctaagcttcatttaaatgaaaataaatcagactataaaaatgatagcaaaccagacacatagcttgtttctaacacagatgatgaaaatttttgtaatgatactgaaaccaaaaaattaaggaacccagtaattatgattgaaatgaaagatgattaagagtttgacatgcaaatggcaaaaaatgtaaacccagataccactaattggaaattggacattaggcattggcctcagtctagagatccagaaagtctttttgatttgttgtttacccaccccaaagaaatgaagcatatgattcagatagaaagccacagtatttctgctgctacagatacttataaaaacagaaaaccaatacagcgtttattccagcagccactatatggcaatcccagtgctaacaactacagaagcatgaatcttgaattataaaatgtgagttattctttgccacatagtgagagaacatcaaaaatatagctagaagacttatgggaagatattccaaggtcaccaacatggcacatgaatagatatgtaacaaacctgcatgttgtgcacatgtaccagaacttaaagtataataataattaaaaaaaagaatgaggtaggcatgttacaagttgagttcctggctttggagaaaagcaagtccaacttcaaaaagacagaggttcacttgctgcttctttttcctctttatcaattatttgatttagtcaaattttctattcaagaaaatctcatgtgtacagttacagtggggttatctaaatgtgtaattatgtgtcaaagtagattagttctgctatctaaataatggttctggagaatgttctcataatgtttgttcattaatcaacctatgtctcactatcagtcttccaagtggcgtatgagctgggaaactaattaagccacataccatgtgaccttctgaaccagatcaacataaagaaattgctaaagaaacaagctctagattctagattcttttttcttgtattcatttagagatratttacatttatttaatgatagaatgggaatacaatgggagggaagcaatgactgagacaagccacaaaaacacgtctagccttgagagttgcaacgaatattcccagccaaatgagtctgtttaatgtgttttcatgca

SEQ ID NO: 2547 - DNA, 697 bp, Homo sapiens
ctcatttaacagagagcttagtttaaacaaaacatttagagtaaacaatagaaatgtaataccagacgctaatgaactaatgaatttgtaatttgtcttctttgctatggcacattagccttctcaaaaagaaaaaagtttctcataatagatctcagatgaatgagtagcatatgcttccctcagaacagattttaaagttggttttgaaaaatgagatgtatttgatcaagggtgatcaagcttagtcttaggcttggaggcctggtacccaacaagtcagtgaaatagcacggatctggcagaakccatcaccatatgccaccctgatgatacttggagtcaaagataaatcctatagttgaacctggaatacaaataatgttatttgattatctctgggacattttccttccccaaagttcttgacagtacattggttttaaaaccttctaaaccatacgtaggaaactgatggatttgagattagggatttccagtatatacacaacagaggaatttaaatttcctgccactcagaaataaggtgttttacttgtgaaaggttgaaatgagcctccttggtctggtgattggaagaaagctggatgaaactcttacaatctcattctcccgaaatagaaaggtcattatgtcattaaattctatacagcattcacacttgtaacacaatgca

SEQ ID NO: 2548 - DNA, 697 bp, Homo sapiens
ctcatttaacagagagcttagtttaaacaaaacatttagagtaaacaatagaaatgtaataccagacgctaatgaactaatgaatttgtaatttgtcttctttgctatggcacattagccttctcaaaaagaaaaaagtttctcataatagatctcagatgaatgagtagcatatgcttccctcagaacagattttaaagttggttttgaaaaatgagatgtatttgatcaagggtgatcaagcttagtcttaggcttggaggcctggtacccaacaagtcagtgaaatagcacggatctggcagaagccatcaccatatgccaccctgatgatacttggagtcaaagataaatccyatagttgaacctggaatacaaataatgttatttgattatctctgggacattttccttccccaaagttcttgacagtacattggttttaaaaccttctaaaccatacgtaggaaactgatggatttgagattagggatttccagtatatacacaacagaggaatttaaatttcctgccactcagaaataaggtgttttacttgtgaaaggttgaaatgagcctccttggtctggtgattggaagaaagctggatgaaactcttacaatctcattctcccgaaatagaaaggtcattatgtcattaaattctatacagcattcacacttgtaacacaatgca

SEQ ID NO: 2549 - DNA, 697 bp, Homo sapiens
ctcatttaacagagagcttagtttaaacaaaacatttagagtaaacaatagaaatgtaataccagacgctaatgaactaatgaatttgtaatttgtcttctttgctatggcacattagccttctcaaaaagaaaaaagtttctcataatagatctcagatgaatgagtagcatatgcttccctcagaacagattttaaagttggttttgaaaaatgagatgtatttgatcaagggtgatcaagcttagtcttaggcttggaggcctggtacccaacaagtcagtgaaatagcacggatctggcagaagccatcaccatatgccaccctgatgatacttggagtcaaagataaatcctatagttgaacctggaatacaaataatgttatttgattatctctgggacattttccttccccaaagttcttgacagtacattggttttaaaaccttctaaaccatacgtaggaaactgatggatttgagattagggatttccagtatatacacaacagaggaatttaaatttcctgccactcagaaataaggtgttttacttgtgaaaggttgaaatgagcctccttggtctggtgattggaagaaagctggatgaaactcttacaatctcattctccygaaatagaaaggtcattatgtcattaaattctatacagcattcacacttgtaacacaatgca

SEQ ID NO: 2550 - DNA, 536 bp, Homo sapiens
gaaaaacaataaagacaaactggcagygccagaaaatcagttagaaaaaaactagacttgaacctttactctcacaaaatagctaatggtagtctttcgtttttaaaggtgggcttttgtttatttattcattcagcaaaaaatcacgagtactttctgcaacaccagggcttgaaggaagatacagcaccaaccccccaacggccgtgcagttctccgattcggccagcagagggagcgaagggccagctctgtgggaggacctgcagagctggacaccagctgaaccgcgtgggcagccacaccaccccctggccacgccacaaaatgcccaagacaaagaagtcccagctgtcctttaggtgtttagagctacagtgagggtaccctggggagatctgagaacagtcctgcagcatggttctgggaagatgaggagaggagggaatccttgggtagaaccaacatgccccacccagactaaagggtcggaggatctaagaactggcaagtcaaacctcagatacaaaacatag

SEQ ID NO: 2551 - DNA, 2205 bp, Homo sapiens
gaagtttggggctggagggagaaagcctagaattgtagcaccatgggtgatctcctgaggcttctggaaactgttcagtgaggtcttgggttctaagattgattgacttgatgctggtgaccaattgtaacctgttctcccctcctcttttctctttcagaattgaatgacagtgtgaatgaaaacagtgacactgttgggcaaatcgtccactacatcatgaaaaatgaaggtgtgaacattttagtgttccaaaacaattcagtattcctatcctttattaaaaacctgcttcgaagagtcaagatttatatagactctcttactgacttcacctaagctttctaacacctcagcttccagcattattcagctacgcaagtttcacatgagtgagttttctaagcgygagtcggtctaagcgttgcagagacccagccctggaggcgctgtcagctggtgttcaaatcctggcctcactgcttactggttgtgtgcaatttggggaaactatattgccttgtttcatgaggtagagtttcttcctgtaaaatgaggataataatatttacctcagcctggcacggtggctcacatctgtaatcccagcactttggaaggctgaggtgggaggattacttgaggccaggagttcaagaccagcctgggcaaaatagtgagaccccatctcttcaaaaaaagtaaatagccaggcatggtggcacattcctatgttcccagctacttgggaggctgacgtgggaggatcacttgagctcaggatttcaaagctgcagtgagctgtgatcacaccactgcactccagcatgggtaacagagcgagactctgtcaaaaaaagaaataataagaaacaataataataataatatttacttcacagcattgttgggacatagcacacatagagtgctcagtatggtaagtactcaaatattgtctgttcctttttcatgcgcttaaaaaaattgtggtaaaatacacataaaatttagtactgttaccattttaaagtgcacccttcagtgggattaagcacattcacagtgttgtacatgcatttccactgtctagttccagaactttacatcttcccaagctgaagctctggacactttaggcagccactccccattccctcctcccccgtccactggcagctgctgctgtgcttctgtttgtctactctatgtcatcctttctccagtgttaacacttttacaaagttgaacttttatgaaatttagtattttttcaccctgaaatgtattctaaattatcatcttaaatggaagattaatttaatcttgagtaaagaaactttacggttattgttctgagcactggttattccctccatagcacaccatgccctcagtgatatttgaggtgtgtgggattccttgcccacttactcaatagctgtggattctcacactgtgaattctcattacaatttaaaagaaaatgtttcccctgggctttgtctgtgctttagccagcatgggctcgtggactgatagagctcagcctgatagagctgagccatttgtctaaaggttgaaatacaccacactcatcagtaaatacctgctcctctgccctcaggccctgccctgggcaccccacactcccagatcctcactactccacaagagcacctgcctgcccagcctgtttgtcagtttgactctcttcaacggtttttgacttagagaaacagcagtttcgtatggttgagcataattttcattgctgtttttagaatgtgctttatgcttttggcatagatctgggtgctttatatacgtaatctcatttaatcttcaaaacatccctataaagttagttcagttacacccattttacagataaagaaagaaggttccaagtaattaaattcacatggttagtgagcagcccagctctgtctgtctggtttcaaattcagcatccttttcaaccacacgatattgtccctcctgtcttctaatatgcagttgtcaatttctgcagtctataaagtcagacaaccaaacttactcggatgatgtttaaaataacaaaaaagaccagaatacttggattttgatctctgtcttccagagaccttccttcagggcacagtagttggtgatactgttcttgagtactcaatcatggatgtttcttttatatgaaaaaaa

SEQ ID NO: 2552 - DNA, 2205 bp, Homo sapiens
gaagtttggggctggagggagaaagcctagaattgtagcaccatgggtgatctcctgaggcttctggaaactgttcagtgaggtcttgggttctaagattgattgacttgatgctggtgaccaattgtaacctgttctcccctcctcttttctctttcagaattgaatgacagtgtgaatgaaaacagtgacactgttgggcaaatcgtccactacatcatgaaaaatgaaggtgtgaacattttagtgttccaaaacaattcagtattcctatcctttattaaaaacctgcttcgaagagtcaagatttatatagactctcttactgacttcacctaagctttctaacacctcagcttccagcattattcagctacgcaagtttcacatgagtgagttttctaagcgtgagtcggtctaagcgttgcagagacccagccctggaggcgctgtcagctggtgttcaaatcctggcctcactgcttactggttgtgtgcaatttggggaaactayattgccttgtttcatgaggtagagtttcttcctgtaaaatgaggataataatatttacctcagcctggcacggtggctcacatctgtaatcccagcactttggaaggctgaggtgggaggattacttgaggccaggagttcaagaccagcctgggcaaaatagtgagaccccatctcttcaaaaaaagtaaatagccaggcatggtggcacattcctatgttcccagctacttgggaggctgacgtgggaggatcacttgagctcaggatttcaaagctgcagtgagctgtgatcacaccactgcactccagcatgggtaacagagcgagactctgtcaaaaaaagaaataataagaaacaataataataataatatttacttcacagcattgttgggacatagcacacatagagtgctcagtatggtaagtactcaaatattgtctgttcctttttcatgcgcttaaaaaaattgtggtaaaatacacataaaatttagtactgttaccattttaaagtgcacccttcagtgggattaagcacattcacagtgttgtacatgcatttccactgtctagttccagaactttacatcttcccaagctgaagctctggacactttaggcagccactccccattccctcctcccccgtccactggcagctgctgctgtgcttctgtttgtctactctatgtcatcctttctccagtgttaacacttttacaaagttgaacttttatgaaatttagtattttttcaccctgaaatgtattctaaattatcatcttaaatggaagattaatttaatcttgagtaaagaaactttacggttattgttctgagcactggttattccctccatagcacaccatgccctcagtgatatttgaggtgtgtgggattccttgcccacttactcaatagctgtggattctcacactgtgaattctcattacaatttaaaagaaaatgtttcccctgggctttgtctgtgctttagccagcatgggctcgtggactgatagagctcagcctgatagagctgagccatttgtctaaaggttgaaatacaccacactcatcagtaaatacctgctcctctgccctcaggccctgccctgggcaccccacactcccagatcctcactactccacaagagcacctgcctgcccagcctgtttgtcagtttgactctcttcaacggtttttgacttagagaaacagcagtttcgtatggttgagcataattttcattgctgtttttagaatgtgctttatgcttttggcatagatctgggtgctttatatacgtaatctcatttaatcttcaaaacatccctataaagttagttcagttacacccattttacagataaagaaagaaggttccaagtaattaaattcacatggttagtgagcagcccagctctgtctgtctggtttcaaattcagcatccttttcaaccacacgatattgtccctcctgtcttctaatatgcagttgtcaatttctgcagtctataaagtcagacaaccaaacttactcggatgatgtttaaaataacaaaaaagaccagaatacttggattttgatctctgtcttccagagaccttccttcagggcacagtagttggtgatactgttcttgagtactcaatcatggatgtttcttttatatgaaaaaaa

SEQ ID NO: 2553 - DNA, 2205 bp, Homo sapiens
gaagtttggggctggagggagaaagcctagaattgtagcaccatgggtgatctcctgaggcttctggaaactgttcagtgaggtcttgggttctaagattgattgacttgatgctggtgaccaattgtaacctgttctcccctcctcttttctctttcagaattgaatgacagtgtgaatgaaaacagtgacactgttgggcaaatcgtccactacatcatgaaaaatgaaggtgtgaacattttagtgttccaaaacaattcagtattcctatcctttattaaaaacctgcttcgaagagtcaagatttatatagactctcttactgacttcacctaagctttctaacacctcagcttccagcattattcagctacgcaagtttcacatgagtgagttttctaagcgtgagtcggtctaagcgttgcagagacccagccctggaggcgctgtcagctggtgttcaaatcctggcctcactgcttactggttgtgtgcaatttggggaaactatattgccttgtttcatgaggtagagtttcttcctgtaaaatgaggataataatatttacctcagcctggcacggtggctcacatctgtaatcccagcactttggaaggctgaggtgggaggattacttgaggccaggagttcaagaccagcctgggcaaaatagtgagaccccatctcttcaaaaaaagtaaatagccaggcatggtggcacattcctatgttcccagctacttgggaggctgacgtgggaggatcacttgagctcaggatttcaaagctgcagtgagctgtgakcacaccactgcactccagcatgggtaacagagcgagactctgtcaaaaaaagaaataataagaaacaataataataataatatttacttcacagcattgttgggacatagcacacatagagtgctcagtatggtaagtactcaaatattgtctgttcctttttcatgcgcttaaaaaaattgtggtaaaatacacataaaatttagtactgttaccattttaaagtgcacccttcagtgggattaagcacattcacagtgttgtacatgcatttccactgtctagttccagaactttacatcttcccaagctgaagctctggacactttaggcagccactccccattccctcctcccccgtccactggcagctgctgctgtgcttctgtttgtctactctatgtcatcctttctccagtgttaacacttttacaaagttgaacttttatgaaatttagtattttttcaccctgaaatgtattctaaattatcatcttaaatggaagattaatttaatcttgagtaaagaaactttacggttattgttctgagcactggttattccctccatagcacaccatgccctcagtgatatttgaggtgtgtgggattccttgcccacttactcaatagctgtggattctcacactgtgaattctcattacaatttaaaagaaaatgtttcccctgggctttgtctgtgctttagccagcatgggctcgtggactgatagagctcagcctgatagagctgagccatttgtctaaaggttgaaatacaccacactcatcagtaaatacctgctcctctgccctcaggccctgccctgggcaccccacactcccagatcctcactactccacaagagcacctgcctgcccagcctgtttgtcagtttgactctcttcaacggtttttgacttagagaaacagcagtttcgtatggttgagcataattttcattgctgtttttagaatgtgctttatgcttttggcatagatctgggtgctttatatacgtaatctcatttaatcttcaaaacatccctataaagttagttcagttacacccattttacagataaagaaagaaggttccaagtaattaaattcacatggttagtgagcagcccagctctgtctgtctggtttcaaattcagcatccttttcaaccacacgatattgtccctcctgtcttctaatatgcagttgtcaatttctgcagtctataaagtcagacaaccaaacttactcggatgatgtttaaaataacaaaaaagaccagaatacttggattttgatctctgtcttccagagaccttccttcagggcacagtagttggtgatactgttcttgagtactcaatcatggatgtttcttttatatgaaaaaaa

SEQ ID NO: 2554 - DNA, 1246 bp, Homo sapiens
tgcatagtattggggtggggcgcagagctttcctgccctctctgggtgcgccaccctcccggcacctgcacctgttcagccacctggaagctatcaaatcttgttgttcaagagttgttttgtccagtttaatttccagtcccagaaccctgccccgtcctcccctgctctgactttcctgaggtccctgggtagggctgaaagttccaaccctctaatcacttggtcttaatgatgactggccccaccctgagactgtytaggggctccaccccaagtcaccgcattagtgtaaacccaggtgtgatcaaaaggtgctcattatgaataacaaaagacactcctatcaggaaattccaaggcctttaggaactctgtgacaggaacccaggacaatgaccaaatctgttgcatattatgccacacctgcactctgactattttcctaatccaaagggttggatgtacggcagtgctagcttttaattcatctttctaaatagagccgaactgaatcgtgtctgggtagtcgctggagttttcttgcattgtatggatgtttggaaagtatctgggagtctgtagctgagttcctctgctaggcccttgaactggctgcttagtaaaaattgcagggagtactacagatagtcctcaagtgcttctggttagtgattagtacttctgatccctaggcaagagatgcctttgtgaagtttttgccttcaggcttcgtttatattttgccagaaaagattcctttataaatgactgtgagtaccgagtgggttctgaaactttctctgttgattatgcaacatgccatgaaccattattcaacctctgtccctttgggcggggacttggacattgaagggtaggaaggaagatgtcagggttaaaagcacccaccctggagtcagacagaccagggtttgtgtccaagcctgtcactctctagctgtgtgactccggccagtcagttacgatctttaggtcttagtctgtatacttgtaaaatgggggtgataattctacctactgttaaggtcatcagaaaagtccaacacgtaagatcggtaaagctttcaggcagtgactggcacgtgccggcgcttacattttggtgatggcaatgttagtttttgcttgggaaatttgccttaggtgtgaggaaaactttgaagagaatagtgatgggagagacagaagacatttttcttgcctgattttggctgtttcatgc

SEQ ID NO: 2555 - DNA, 1147 bp, Homo sapiens
tttgagatggagttttgctcttgttgcccaggctggagtgcaatggcaagatctcggctcactgcaacctccgcctcccaggttcaagcaattctcctgcctcagcctcttgagtagctgagattacaagcacctgccaccacgcccagctaattttttgtattttcagtagagatggggtttcaccatgttagccaggctggtcttgaactcctgacttcaggtgatctgcctgcttcggcctcccaaagcgctggggttacaggtgtgagccaccacgcccggccccgaggaggtggatttcttatacctgggcacagactttgcctggctaagttcacccaaacaccatatagcttaattagtttgaggagtaaaactccagtgataattaggactgtcattttgatagcagatttttcagaagtattctacaaaacatgagatctgttggttgttaataagtttgttatgagaaaaaaagttctgtagcccaataatgtagggaaataatcgggttaaacagagtgaaacagttccttctcataaccatgaatttcttcatctttaatttctgttgttcccaaacctgttttgaccagggagccttttccagggagaaaacccatgagcacttccctgcacacaaatatcccgtcaaagccagcgctagaccatgctaacacttctatcccagcacactggctattgagaatgcatgaaatggactatttgatggtgctgataacaaaagtctgcatataatccttttttttttttttttttgagacggagtctcgctctgtcgccycggctggagtacagtggcgccatctcggctcactgcaagctccgcctcccaggttcacgccattctcctgcctcagcctcccgagtagctgggactacaggcgcccgccaccacgcctggctaatttttttttttttttttttttttttggatttttagtagagacagagtttcaccgtgttagccaggatggtctcgatctcctgaccttttgagccgccgacctcggcctcccaaagtgctgggattacaggcatgagccaccgcgcccggctgtctgcatataatctttcaagttctctaaaataacagaagcttagcctctgtaggagaaaa

SEQ ID NO: 2556 - DNA, 1147 bp, Homo sapiens
tttgagatggagttttgctcttgttgcccaggctggagtgcaatggcaagatctcggctcactgcaacctccgcctcccaggttcaagcaattctcctgcctcagcctcttgagtagctgagattacaagcacctgccaccacgcccagctaattttttgtattttcagtagagatggggtttcaccatgttagccaggctggtcttgaactcctgacttcaggtgatctgcctgcttcggcctcccaaagcgctggggttacaggtgtgagccaccacgcccggccccgaggaggtggatttcttatacctgggcacagactttgcctggctaagttcacccaaacaccatatagcttaattagtttgaggagtaaaactccagtgataattaggactgtcattttgatagcagatttttcagaagtattctacaaaacatgagatctgttggttgttaataagtttgttatgagaaaaaaagttctgtagcccaataatgtagggaaataatcgggttaaacagagtgaaacagttccttctcataaccatgaatttcttcatctttaatttctgttgttcccaaacctgttttgaccagggagccttttccagggagaaaacccatgagcacttccctgcacacaaatatcccgtcaaagccagcgctagaccatgctaacacttctatcccagcacactggctattgagaatgcatgaaatggactatttgatggtgctgataacaaaagtctgcatataatccttttttttttttttttttgagacggagtctcgctctgtcgccccggctggagtacagtggcgccatctcggctcactgcaagctccgcctcccaggttcacgccattctcctgcctcagcctcccgagtagctgggactacaggcgcccgccaccacgcctggctaatttttttttttttttttttttttttggatttttagtagagacagagtttcaccgtgttagccaggatggtctcgatctcctgacctyttgagccgccgacctcggcctcccaaagtgctgggattacaggcatgagccaccgcgcccggctgtctgcatataatctttcaagttctctaaaataacagaagcttagcctctgtaggagaaaa

SEQ ID NO: 2557 - DNA, 1147 bp, Homo sapiens
tttgagatggagttttgctcttgttgcccaggctggagtgcaatggcaagatctcggctcactgcaacctccgcctcccaggttcaagcaattctcctgcctcagcctcttgagtagctgagattacaagcacctgccaccacgcccagctaattttttgtattttcagtagagatggggtttcaccatgttagccaggctggtcttgaactcctgacttcaggtgatctgcctgcttcggcctcccaaagcgctggggttacaggtgtgagccaccacgcccggccccgaggaggtggatttcttatacctgggcacagactttgcctggctaagttcacccaaacaccatatagcttaattagtttgaggagtaaaactccagtgataattaggactgtcattttgatagcagatttttcagaagtattctacaaaacatgagatctgttggttgttaataagtttgttatgagaaaaaaagttctgtagcccaataatgtagggaaataatcgggttaaacagagtgaaacagttccttctcataaccatgaatttcttcatctttaatttctgttgttcccaaacctgttttgaccagggagccttttccagggagaaaacccatgagcacttccctgcacacaaatatcccgtcaaagccagcgctagaccatgctaacacttctatcccagcacactggctattgagaatgcatgaaatggactatttgatggtgctgataacaaaagtctgcatataatccttttttttttttttttttgagacggagtctcgctctgtcgccccggctggagtacagtggcgccatctcggctcactgcaagctccgcctcccaggttcacgccattctcctgcctcagcctcccgagtagctgggactacaggcgcccgccaccacgcctggctaatttttttttttttttttttttttttggatttttagtagagacagagtttcaccgtgttagccaggatggtctcgatctcctgaccttktgagccgccgacctcggcctcccaaagtgctgggattacaggcatgagccaccgcgcccggctgtctgcatataatctttcaagttctctaaaataacagaagcttagcctctgtaggagaaaa

SEQ ID NO: 2558 - DNA, 1288 bp, Homo sapiens
cactgaatactgtggtrgtggccctctagggtctttctggttggccagtgtcctcaaaaaatggtacccggaactgaaaacacttaagatgtggtccaaataagaaaaaaaattattacttcttttgatttgggccttgcatttttaaaaaattaacaaagctatttccattatgtgtatttttttttagggttacatatggagactctgaatgaaaacaaatgaaaaaccctagtccacaagaaaaaagacctgagaatttttttttggctcatggtctcctctagtttataatgacacacacaatagatattttaccctgaagggaggactccattgcccttattaattttatcttgttagttttagtccattgttccaactcactgacaacttcctgaactcagatccttccatccaaaatatcagctgtctatgctatatcatgttaaatttgataagcagccctgccatcttcatccagatcactgaaaaaattgctaagtggaatcattagagaccttcctactggccaagctaaccacacaaggggggtggcaacatttcaggcatgtgaaggaaagcaattcaaaaacatcaaattcagcagtatcctttttcatgaaaatgaagaacctatcaatttcctttttattttttatttttatttatttatttttttgagatggagtttcactcttgtcgcccaagcttaggtgcaatggtgcgatcttggctcactgcaacctctacctcctgggttcaagtgattctcctgcctcagcatcccgagtagctgggattacaggcgtgcgccactacccccagctaattttttgtatttttagtagaaacgggatttcaccatgttagccaggctggtattaaactcctgacctcaggtcatacgcctgccttggcctcccaaagagctgggattacaggcgtaagccactacaccgggcaatttccttttcaatacaaaaaacagatggtataaagctcggcagaatcttgtctggtggagaagcacagaagacagactcaacagtagagggtggacaatgagatattaatgtttaaagaggaggtgtttaggatttaaaaaggctgtcaacactgatccagatggacactgtcctcatggatttcaactctcctggaatagctcttgggctatctatgaagcaacttaactgaaccattatccactcagtatttctccatcttgtccaaaaggctgagagaagaaacaatccgatttcttacaaactcagaatatatctat

SEQ ID NO: 2559 - DNA, 1225 bp, Homo sapiens
aggctgaggcaggagaatcacttgaacccaggaggtggaagttgcagtgagccaagatcatgccactgcactccagcctgggcaacagtgagtaacactctgtctacaaaaaataagaaagaaaaagaaaaaaaaaagaatcagtagataatacaatagtcaggtttcaaatagcttacacttttctgcagattgttgagaaatagtcctctgttcttaaagtatggttctgaaatgctctagaagaaagwcaataggtttaagaataacatgcagcaagttaaaataatgataattgccaccattactacacgatctaacacaaaaaggatagactttgaagtcactcatatgtagatccaaacctcaagtctgccatttacttatttacatattcacatgagatgatgattatgattggtgatacagatattctcaaaatgttactcctttcaacctcagttgattattatacaaatactatgatatctatcagtttcttttattaaccacaacaaactgggacaaaaatttactcatatgtaatttagagtaatactgaacaaaactaacaataaaaagtcaattaatcactttagttttcaaaatatttatgcatgatatatatttgtgtgaattactttctgtgggaaaaaatgtgagaatgtagtttttagtagtactatatttaaatgggctatcatcgcaatcggtataagttgcttctattctgtgtgtcaaaagctaaaagcaaattattgtataacttcagctccttccaaaaaagacagaacaaagcaaccatccaccttatggagcaatgattcacgaatgaaggccacacatagctactaaatagaaagctgtaactaagtatcctgacaacagaaacagaggtgaaacaaaagaatagacactaaagacatgtggtctgcaaggaagaagttagactgaggtaaatcattcttaaacaaaggggaaggagggagaaacaaacaaaaaaagagacatgaccagtcaatcaaatatgagcttaaaagaaaagcttgtgttcataatatatgcctaataatgctggttagcatttactcaacaatttgttttgtgtaaatacttatgtaataaaaagtttagtttgtttactataaaataacacatcccaagagttaaacatgatcattcacctgaaagctgaaacattcttactacaaagagagagagagag

SEQ ID NO: 2560 - DNA, 1225 bp, Homo sapiens
aggctgaggcaggagaatcacttgaacccaggaggtggaagttgcagtgagccaagatcatgccactgcactccagcctgggcaacagtgagtaacactctgtctacaaaaaataagaaagaaaaagaaaaaaaaaagaatcagtagataatacaatagtcaggtttcaaatagcttacacttttctgcagattgttgagaaatagtcctctgttcttaaagtatggttctgaaatgctctagaagaaagacaataggtttaagaataacatgcagcaagttaaaataatgataattgccaccattactacacgatctaacacaaaaaggatagactttgaagtcactcatatgtagatccaaacctcaagtctgccatttacttatttacatattcacatgagatgatgattatgattggtgatacagatattctcaaaatgttactcctttcaaccycagttgattattatacaaatactatgatatctatcagtttcttttattaaccacaacaaactgggacaaaaatttactcatatgtaatttagagtaatactgaacaaaactaacaataaaaagtcaattaatcactttagttttcaaaatatttatgcatgatatatatttgtgtgaattactttctgtgggaaaaaatgtgagaatgtagtttttagtagtactatatttaaatgggctatcatcgcaatcggtataagttgcttctattctgtgtgtcaaaagctaaaagcaaattattgtataacttcagctccttccaaaaaagacagaacaaagcaaccatccaccttatggagcaatgattcacgaatgaaggccacacatagctactaaatagaaagctgtaactaagtatcctgacaacagaaacagaggtgaaacaaaagaatagacactaaagacatgtggtctgcaaggaagaagttagactgaggtaaatcattcttaaacaaaggggaaggagggagaaacaaacaaaaaaagagacatgaccagtcaatcaaatatgagcttaaaagaaaagcttgtgttcataatatatgcctaataatgctggttagcatttactcaacaatttgttttgtgtaaatacttatgtaataaaaagtttagtttgtttactataaaataacacatcccaagagttaaacatgatcattcacctgaaagctgaaacattcttactacaaagagagagagagag

SEQ ID NO: 2561 - DNA, 1225 bp, Homo sapiens
aggctgaggcaggagaatcacttgaacccaggaggtggaagttgcagtgagccaagatcatgccactgcactccagcctgggcaacagtgagtaacactctgtctacaaaaaataagaaagaaaaagaaaaaaaaaagaatcagtagataatacaatagtcaggtttcaaatagcttacacttttctgcagattgttgagaaatagtcctctgttcttaaagtatggttctgaaatgctctagaagaaagacaataggtttaagaataacatgcagcaagttaaaataatgataattgccaccattactacacgatctaacacaaaaaggatagactttgaagtcactcatatgtagatccaaacctcaagtctgccatttacttatttacatattcacatgagatgatgattatgattggtgatacagatattctcaaaatgttactcctttcaacctcagttgattattatacaaatactatgatatctatcagtttcttttattaaccacaacaaactgggacaaaaatttactcatatgtaatttagagtaataytgaacaaaactaacaataaaaagtcaattaatcactttagttttcaaaatatttatgcatgatatatatttgtgtgaattactttctgtgggaaaaaatgtgagaatgtagtttttagtagtactatatttaaatgggctatcatcgcaatcggtataagttgcttctattctgtgtgtcaaaagctaaaagcaaattattgtataacttcagctccttccaaaaaagacagaacaaagcaaccatccaccttatggagcaatgattcacgaatgaaggccacacatagctactaaatagaaagctgtaactaagtatcctgacaacagaaacagaggtgaaacaaaagaatagacactaaagacatgtggtctgcaaggaagaagttagactgaggtaaatcattcttaaacaaaggggaaggagggagaaacaaacaaaaaaagagacatgaccagtcaatcaaatatgagcttaaaagaaaagcttgtgttcataatatatgcctaataatgctggttagcatttactcaacaatttgttttgtgtaaatacttatgtaataaaaagtttagtttgtttactataaaataacacatcccaagagttaaacatgatcattcacctgaaagctgaaacattcttactacaaagagagagagagag

SEQ ID NO: 2562 - DNA, 1939 bp, Homo sapiens
  misc_feature (1)...(1939): n = A,T,C or G
tgcatatatatgttggtaaaatacacaaatgggtaaaatttgttgtttggagctggaaatttcatcatggacccaacactaggttgtccctgcaattgttccaacagcaccaaaaatgtatatgaaatttctagaaaatgcaggttttttaaaaattggttttgattttaattttgttgcaaaatgcttaaaacaatagagtaaaatcacaatttattgcctaggttagagaagtaaatgaaatgtacttcctttatttattttttttcttttggaagcaataccactaatgccagtgctcgagcctttgagttgcttttatctcttgcttttgtcatccttcgtgattcctttcagtttttttttccccctcttaatcttgtttcaagtaccgccttcttctccctgatccccttcctcatctgtccctccaggcaagtctctgctacttgcttatcctcagacaacaatttcctgatacaaactagaccttgtataagatcctcttcctcctgggcttgaattatttcatttgaaaatataatgtttggactagatgatgtcccaaatatcatgtatatctaaaatttcatgattctggcaacctatggttttgccaattattaagagattatgccacagaatcccctgcaaagctgcaaattgcgaaaacaagttgcacacagagtaagtgacagagccaggaatagctccaagtctctgaccatcaagaatcacctgaggcaggagaatggcgtgaaccagggaggcggagcttgcagtgagccggggatctcgccactgcactcccgcctgggtgacagagcgagactccgtctcaagaagaaaaaaaaagaatcacctcaggccaggcgcggtggctcacgcctgtaatcccagcactttgggaggccgaggagggcggatcatgaggtcaggagatcgagaccaccctggctaacacagtgaaaccctgtctctactaaaaatacaaaaaaattagccgggcgtggtggcgggcgcctgtggtcccagctactcgggaggctgaggcgggagaatggcttgaacccgagaggcggagcttgcagtgagccgagatcgcgccactgcactccagcctgggcgacagagtgagactctgtctcaaaaaattaaataaataawtaaataaataaataaataaataaatatatatatatatatgaaccacctctccaagcctctccactctactgctttatgcatggtgtttagccttccttccttccttccttttccttcttccctttcctttcctttctctcttttctctctctcctttctttctttcctttctttctttcttatttccttccttccctcctccctccctccctacctccctccatccctcttcttccttccttcctccccttcctcccctcccttccttcctttcctccctccctccctgcttgccttcctgccttcctctnnnnnnnnnnnnnnnnnnnnnnnnnnnnnnnnnnnnnnnnnnnnnnnnnnnnnnnnnnnnnnnnnnnnnnnnnnnnnnnnnnnnnnnnnnnnnnnnnnnnactcacatcattaaccattattttagtccacatgaaagtgaacattttattctgaaatgatcgttaactttttttaatcttagaagaccaaagttatacacctctcctgccacagggagtcaagggatgcttggaacagacatagccatcttcccaaatacatatggtctcatttttccgccactttctctaaaattgtttaaatagtcatcttaataaactccatgtcagcatatggcctggccaatagttattaaggtatcattttggacaaaagctttgagctcgggaagataaaatattcctgctgttacttctccactctcctaccctaaccagctacatttctgaagttcaggtac

SEQ ID NO: 2563 - DNA, 1939 bp, Homo sapiens
  misc_feature (1)...(1939): n = A,T,C or G
tgcatatatatgttggtaaaatacacaaatgggtaaaatttgttgtttggagctggaaatttcatcatggacccaacactaggttgtccctgcaattgttccaacagcaccaaaaatgtatatgaaatttctagaaaatgcaggttttttaaaaattggttttgattttaattttgttgcaaaatgcttaaaacaatagagtaaaatcacaatttattgcctaggttagagaagtaaatgaaatgtacttcctttatttattttttttcttttggaagcaataccactaatgccagtgctcgagcctttgagttgcttttatctcttgcttttgtcatccttcgtgattcctttcagtttttttttccccctcttaatcttgtttcaagtaccgccttcttctccctgatccccttcctcatctgtccctccaggcaagtctctgctacttgcttatcctcagacaacaatttcctgatacaaactagaccttgtataagatcctcttcctcctgggcttgaattatttcatttgaaaatataatgtttggactagatgatgtcccaaatatcatgtatatctaaaatttcatgattctggcaacctatggttttgccaattattaagagattatgccacagaatcccctgcaaagctgcaaattgcgaaaacaagttgcacacagagtaagtgacagagccaggaatagctccaagtctctgaccatcaagaatcacctgaggcaggagaatggcgtgaaccagggaggcggagcttgcagtgagccggggatctcgccactgcactcccgcctgggtgacagagcgagactccgtctcaagaagaaaaaaaaagaatcacctcaggccaggcgcggtggctcacgcctgtaatcccagcactttgggaggccgaggagggcggatcatgaggtcaggagatcgagaccaccctggctaacacagtgaaaccctgtctctactaaaaatacaaaaaaattagccgggcgtggtggcgggcgcctgtggtcccagctactcgggaggctgaggcgggagaatggcttgaacccgagaggcggagcttgcagtgagccgagatcgcgccactgcactccagcctgggcgacagagtgagactctgtctcaaaaaattaaataaataaataaataaataaataaataaataaatawatatatatatatgaaccacctctccaagcctctccactctactgctttatgcatggtgtttagccttccttccttccttccttttccttcttccctttcctttcctttctctcttttctctctctcctttctttctttcctttctttctttcttatttccttccttccctcctccctccctccctacctccctccatccctcttcttccttccttcctccccttcctcccctcccttccttcctttcctccctccctccctgcttgccttcctgccttcctctnnnnnnnnnnnnnnnnnnnnnnnnnnnnnnnnnnnnnnnnnnnnnnnnnnnnnnnnnnnnnnnnnnnnnnnnnnnnnnnnnnnnnnnnnnnnnnnnnnnnactcacatcattaaccattattttagtccacatgaaagtgaacattttattctgaaatgatcgttaactttttttaatcttagaagaccaaagttatacacctctcctgccacagggagtcaagggatgcttggaacagacatagccatcttcccaaatacatatggtctcatttttccgccactttctctaaaattgtttaaatagtcatcttaataaactccatgtcagcatatggcctggccaatagttattaaggtatcattttggacaaaagctttgagctcgggaagataaaatattcctgctgttacttctccactctcctaccctaaccagctacatttctgaagttcaggtac

SEQ ID NO: 2564 - DNA, 1939 bp, Homo sapiens
  misc_feature (1)...(1939): n = A,T,C or G
tgcatatatatgttggtaaaatacacaaatgggtaaaatttgttgtttggagctggaaatttcatcatggacccaacactaggttgtccctgcaattgttccaacagcaccaaaaatgtatatgaaatttctagaaaatgcaggttttttaaaaattggttttgattttaattttgttgcaaaatgcttaaaacaatagagtaaaatcacaatttattgcctaggttagagaagtaaatgaaatgtacttcctttatttattttttttcttttggaagcaataccactaatgccagtgctcgagcctttgagttgcttttatctcttgcttttgtcatccttcgtgattcctttcagtttttttttccccctcttaatcttgtttcaagtaccgccttcttctccctgatccccttcctcatctgtccctccaggcaagtctctgctacttgcttatcctcagacaacaatttcctgatacaaactagaccttgtataagatcctcttcctcctgggcttgaattatttcatttgaaaatataatgtttggactagatgatgtcccaaatatcatgtatatctaaaatttcatgattctggcaacctatggttttgccaattattaagagattatgccacagaatcccctgcaaagctgcaaattgcgaaaacaagttgcacacagagtaagtgacagagccaggaatagctccaagtctctgaccatcaagaatcacctgaggcaggagaatggcgtgaaccagggaggcggagcttgcagtgagccggggatctcgccactgcactcccgcctgggtgacagagcgagactccgtctcaagaagaaaaaaaaagaatcacctcaggccaggcgcggtggctcacgcctgtaatcccagcactttgggaggccgaggagggcggatcatgaggtcaggagatcgagaccaccctggctaacacagtgaaaccctgtctctactaaaaatacaaaaaaattagccgggcgtggtggcgggcgcctgtggtcccagctactcgggaggctgaggcgggagaatggcttgaacccgagaggcggagcttgcagtgagccgagatcgcgccactgcactccagcctgggcgacagagtgagactctgtctcaaaaaattaaataaataaataaataaataaataaataaataaatatatatatatatawgaaccacctctccaagcctctccactctactgctttatgcatggtgtttagccttccttccttccttccttttccttcttccctttcctttcctttctctcttttctctctctcctttctttctttcctttctttctttcttatttccttccttccctcctccctccctccctacctccctccatccctcttcttccttccttcctccccttcctcccctcccttccttcctttcctccctccctccctgcttgccttcctgccttcctctnnnnnnnnnnnnnnnnnnnnnnnnnnnnnnnnnnnnnnnnnnnnnnnnnnnnnnnnnnnnnnnnnnnnnnnnnnnnnnnnnnnnnnnnnnnnnnnnnnnnactcacatcattaaccattattttagtccacatgaaagtgaacattttattctgaaatgatcgttaactttttttaatcttagaagaccaaagttatacacctctcctgccacagggagtcaagggatgcttggaacagacatagccatcttcccaaatacatatggtctcatttttccgccactttctctaaaattgtttaaatagtcatcttaataaactccatgtcagcatatggcctggccaatagttattaaggtatcattttggacaaaagctttgagctcgggaagataaaatattcctgctgttacttctccactctcctaccctaaccagctacatttctgaagttcaggtac

SEQ ID NO: 2565 - DNA, 1198 bp, Homo sapiens
tgcatttttacttcttcgattattctattattgaaaaactagtcttttaataacacttactttccagctcttctttcacatcttatgataggaatggccaagccaagtcagttgtagaatgaattacgtttttcctaaaattgagacctgttttttacttgttctaaagagaaaagaaataaaaatgacagtaagtggagaatttaggtgtagcagaaatatgttcaggcatggtggtgattttttagcactagaacggttaytctggcttacattttcagacgaattcagcaagtcagtctttgtcctttgcggcattttgccgctccagaatctttctctctactgatattgacagactcactgctgtctctggactataagaatgtctcccatgattttttttcaccgaaactaggagcattttgtcttcctttcttatttttcagaaggcattctctattacagtgcctaagagagcttagcttccctatgatcggtagaatcattcatctaattgatccagcttggaaatcttatttaagattttaaattatttagggtgaatcagtttgcctagatcacatcagtattttgaaatttcccaaagccacatttatacagactaagggataactgtatccttcttctttctcctctcccttccttatttcccctccttctcatgaaatgtttgctttcaaggagtgaatactaaccatgaagcaccttgtcttgcaggatgacttgaagttgtttttctcctgactaaagtattttctaaaagctgttatgagaattatagctacataaaaagaccagtgttcattttagataaaaattgaggattgtgaaggaacggttttttttcttggacatagctatccgaagcatgtgcaggggatgtcagagcacagaaggtgctagcaaaataccagtagcgggtctagaagaggatgtgcctattcattccttagagacctaaagagagtggcaggctgtctccaaagcaaggtgaactaaatattcaacttattctacttctttttcccaacgccactacagccttctgttgctatctggagcattgaatagggtcagggaagtcagtataggtaagtaagagagatgagggacagggaggagaaagatttatttatgcaaattttttgtttaaatataaaagcacataatattt

SEQ ID NO: 2566 - DNA, 1198 bp, Homo sapiens
tgcatttttacttcttcgattattctattattgaaaaactagtcttttaataacacttactttccagctcttctttcacatcttatgataggaatggccaagccaagtcagttgtagaatgaattacgtttttcctaaaattgagacctgttttttacttgttctaaagagaaaagaaataaaaatgacagtaagtggagaatttaggtgtagcagaaatatgttcaggcatggtggtgattttttagcactagaacggttactctggcttacattttcagacgaattcagcaagtcagtctttgtcctttgcggcattttgccgctccagaatctttctctctactgatattgacagactcactgctgtctctggactataagaatgtctcccatgattttttttcaccgaaactaggagcattttgtcttcctttcttatttttcagaaggcattctctattacagtgcctaagagagcttagcttccctatgatcggtagaatcattcatctaattgatccagcttggaaatcttatttaagattttaaattatttagggtgaatcagtttgcctagatcacatcagtattttgaaatttcccaaagccacatttatacagactaagggataactgtatccttcttctttctcctctcccttccttatttcccctccttctcatgaaatgtttgctttcaaggagtgaatactaaccatgaagcaccttgtcttgcaggatgacttgaagttgtttttctcctgactaaagtattttctaaaagctgttatgagaattatagctacataaaaagaccagtgttcattttagataaaaattgaggattgtgaaggaacggttttttttcttggacatagctatccgaagcatgtgcaggggatgtcagagcacagaaggtgctagcaaaataccagtagcgggtctagaagaggatgtgcctattcattccttagagacctaaagagagtggcaggctgtctccaaagcaaggtgaactaaatattcamcttattctacttctttttcccaacgccactacagccttctgttgctatctggagcattgaatagggtcagggaagtcagtataggtaagtaagagagatgagggacagggaggagaaagatttatttatgcaaattttttgtttaaatataaaagcacataatattt

SEQ ID NO: 2567 - DNA, 2341 bp, Homo sapiens
atttaataaagtaaagggtcacttgctgacataaagcacagtaggcaggaataggagaagagtcaacttagagaaaaaaatgctttgtgattttatttttatttctgcagtttggaaaacagtttaactgtttttgtgatgactcacaaaaatacaaaagagcattgaaaatacagagaaggacaacaattggggaacatttctggaggcttcacttactgaaacccaracataagcatacaagctaagacacagcaacaccaggcttcagcatgaaaccatacaaatctcctggaaaggacttccctctctgaatgcagctacctgtccacaggatgctctaggcccaggcacctttattcttccaactggaaagacatacaaaaatgccacaatatgacctcagaggcccaaacatttagccaaggctcctatgaagcaatctgctgtcttcatccaggtaaggccaacttcacattttaagacactatgatcatgggtaaatacagggtagactgagaggcagaagctccagcaaacacagtcctgtcattggaagatgaatgcagtacttactcctgcaaaaacagacccttccctctggccttgggcctagaacatgacttttttatagttgttggggaagaggcccttgggctttaacctgcaaacagcctcccttaaatccatgggctgcaatgggggcatttctccccacatctcacacatgtccagggcctcttccaccacctctccaacaaagaccttggctattccagccatggcaatggccatgttctcaggcaccgatctcccagtgatagaccacatcagacgtgcaacaagtgcttttgggaaagctaactggcgacacacttcatagcgggacagctgctcctcagacatggcagacagcagggttgtcatcctctgagcctcctctgcatccacactgggcttcctctccttctggcctttggtatctgttttctgtcttttggctgcaggaggagctgaggctgaggcctcattgtcaactactgtgaggtccatgacatcctcactcctgagctcacattcctgagccctgggttcttccaagttcccatctagggcctcagggattccatcctcgttgcagcccttcagacctcggggtatggcgaacatctcagcagacacacctgtttgcctgccggtctccatgggtgagattcaggttggctccatgacagcagctgtagaagcagaagttccacctggggtggtttgattatgcatctgaaatcagaacctttcacagattttagccgctatgtttctgctgagccataggttagccacaactggacacagctccctgcctcccctttccacacacaaacacatacactggttttctcacttccacaatgtgaagaaacttgtggatggacagtatattagttttagatcaatgcagaatcaattctcaccaattttggatatttaaaacaaacaccagctcacaggtcagaagttctactagaccaagtgactgcctcctgctcagagtcacacaagggacctccaggatagctctggctgtgtggtcgttgccttcacctgagaagggtctggctttgacctgattcgagattatggctttctcacaagaaatactactttggtgaaactctattgaaattatcagtactttaagtttccaatacttatcaagtacaatagttgaacatggcatggtagctgaaagtgtaagaggcagaatttggcagactccatttttttcaatttcaatggtttcaggttttttggtttccgccaaactaaagaatgtcctcacgagctgtgaattcacaggtcactacagacaatttttgaaactgaatcacactgtaatttttggcatatgatctgtgagctgtgctgggaaggttcacggtgattccataataaatctcgggtttttactctatagcgaaaaattactcttttccatcatgaaggtaaagcagagtatgtacaactagagtgtggaatatctttgtcactcgtgatgaaccgacttggtccaatgctttaacgacttctccaatgtcgccgtactcaggtttcattttctgagtggatcatcggcagaatgaataatatcaagaatcctctaaggcaatgtttggaactaaatttcagtgtctccggaagcactgcaaaaatcaccacgtatagccaaagtgaagtatcaataggccctctctgtgtcctttaaaccgcccatatgatcgttacaaatggcggcttgaggaaaggtggttttggaattggtttctctctagtcttacat

SEQ ID NO: 2568 - DNA, 2341 bp, Homo sapiens
atttaataaagtaaagggtcacttgctgacataaagcacagtaggcaggaataggagaagagtcaacttagagaaaaaaatgctttgtgattttatttttatttctgcagtttggaaaacagtttaactgtttttgtgatgactcacaaaaatacaaaagagcattgaaaatacagagaaggacaacaattggggaacatttctggaggcttcacttactgaaacccagacataagcatacaagctaagacacagcaacaccaggcttcagcatgaaaccatacaaatctcctggaaaggacttccctctctgaatgcagctacctgtccacaggatgctctaggcccaggcacctttattcttccaactggaaagacatacaaaaatgccacaatatgacctcagaggcccaaacatttagccaaggctcctatgaagcaatctgctgtcttcatccaggtaaggccaacttcacattttaagacactatgatcatgggtaaatacagggtagactgagaggcagaagctccagcaaacacagtcctgtcattggaagatgaatgcagtacttactcctgcaaaaacagacccttccctctggccttgggcctagaacatgacttttttatagttgttggggaagaggcccttgggctttaacctgcaaacagcctcccttaaatccatgggctgcaatgggggcatttctccccacatctcacacatgtccagggcctcttccaccacctctccaacaaagaccttggctattccagccatggcaatggccatgttctcaggcaccgatctcccagtgatagaccacatcagacgtgcaacaagtgcttttgggaaagctaactggcgacacacttcatagcgggacagctgctcctcagacatggcagacagcagggttgtcatcctctgagcctcctctgcatccacactgggcttcctctccttctggcctttggtatctgttttctgtcttttggctgcaggaggagctgaggctgaggcctcattgtcaactactgtgaggtccatgacatcctcactcctgagctcacattcctgagccctgggttcttccaagttcccatctagggcctcagggattccatcctcgttgcagcccttcagacctcggggtatggcgaacatctcagcagacacacctgtttgcctgccggtctccatgggtgagattcaggttggctccatgacagcagctgtagaagcagaagttccacctggggtggtttgattatgcatctgaaatcagaacctttcacagattttagccgctatgtttctgctgagccataggttagccacaactggacacagctccctgcctcccctttccacacacaaacacatacactggttttctcacttccacaatgtgaagaaacttgtggatggacagtatattagttttagatcaatgcagaatcaattctcaccaattttggatatttaaaacaaacaccagctcacaggtcagaagttctactagaccaagtgactgcctcctgctcagagtcacacaagggacctccaggatagctctggctgtgtggtcgttgccttcacctgagaagggtctggctttgacctgattcgagattatggctttctcacaagaaatactactttggtgaaactctattgaaattatcagtactttaagtttccaatacttatcaagtacaatagttgaacatggcatggtagctgaaagtgtaagaggcagaatttggcagactccatttttttcaatttcaatggtttcaggttttttggtttccgccaaactaaagaatgtcctcacgagctgtsaattcacaggtcactacagacaatttttgaaactgaatcacactgtaatttttggcatatgatctgtgagctgtgctgggaaggttcacggtgattccataataaatctcgggtttttactctatagcgaaaaattactcttttccatcatgaaggtaaagcagagtatgtacaactagagtgtggaatatctttgtcactcgtgatgaaccgacttggtccaatgctttaacgacttctccaatgtcgccgtactcaggtttcattttctgagtggatcatcggcagaatgaataatatcaagaatcctctaaggcaatgtttggaactaaatttcagtgtctccggaagcactgcaaaaatcaccacgtatagccaaagtgaagtatcaataggccctctctgtgtcctttaaaccgcccatatgatcgttacaaatggcggcttgaggaaaggtggttttggaattggtttctctctagtcttacat

SEQ ID NO: 2569 - DNA, 2341 bp, Homo sapiens
atttaataaagtaaagggtcacttgctgacataaagcacagtaggcaggaataggagaagagtcaacttagagaaaaaaatgctttgtgattttatttttatttctgcagtttggaaaacagtttaactgtttttgtgatgactcacaaaaatacaaaagagcattgaaaatacagagaaggacaacaattggggaacatttctggaggcttcacttactgaaacccagacataagcatacaagctaagacacagcaacaccaggcttcagcatgaaaccatacaaatctcctggaaaggacttccctctctgaatgcagctacctgtccacaggatgctctaggcccaggcacctttattcttccaactggaaagacatacaaaaatgccacaatatgacctcagaggcccaaacatttagccaaggctcctatgaagcaatctgctgtcttcatccaggtaaggccaacttcacattttaagacactatgatcatgggtaaatacagggtagactgagaggcagaagctccagcaaacacagtcctgtcattggaagatgaatgcagtacttactcctgcaaaaacagacccttccctctggccttgggcctagaacatgacttttttatagttgttggggaagaggcccttgggctttaacctgcaaacagcctcccttaaatccatgggctgcaatgggggcatttctccccacatctcacacatgtccagggcctcttccaccacctctccaacaaagaccttggctattccagccatggcaatggccatgttctcaggcaccgatctcccagtgatagaccacatcagacgtgcaacaagtgcttttgggaaagctaactggcgacacacttcatagcgggacagctgctcctcagacatggcagacagcagggttgtcatcctctgagcctcctctgcatccacactgggcttcctctccttctggcctttggtatctgttttctgtcttttggctgcaggaggagctgaggctgaggcctcattgtcaactactgtgaggtccatgacatcctcactcctgagctcacattcctgagccctgggttcttccaagttcccatctagggcctcagggattccatcctcgttgcagcccttcagacctcggggtatggcgaacatctcagcagacacacctgtttgcctgccggtctccatgggtgagattcaggttggctccatgacagcagctgtagaagcagaagttccacctggggtggtttgattatgcatctgaaatcagaacctttcacagattttagccgctatgtttctgctgagccataggttagccacaactggacacagctccctgcctcccctttccacacacaaacacatacactggttttctcacttccacaatgtgaagaaacttgtggatggacagtatattagttttagatcaatgcagaatcaattctcaccaattttggatatttaaaacaaacaccagctcacaggtcagaagttctactagaccaagtgactgcctcctgctcagagtcacacaagggacctccaggatagctctggctgtgtggtcgttgccttcacctgagaagggtctggctttgacctgattcgagattatggctttctcacaagaaatactactttggtgaaactctattgaaattatcagtactttaagtttccaatacttatcaagtacaatagttgaacatggcatggtagctgaaagtgtaagaggcagaatttggcagactccatttttttcaatttcaatggtttcaggttttttggtttccgccaaactaaagaatgtcctcacgagctgtgaattcacaggtcactacagacaatttttgaaactgaatcacactgtaatttttggcrtatgatctgtgagctgtgctgggaaggttcacggtgattccataataaatctcgggtttttactctatagcgaaaaattactcttttccatcatgaaggtaaagcagagtatgtacaactagagtgtggaatatctttgtcactcgtgatgaaccgacttggtccaatgctttaacgacttctccaatgtcgccgtactcaggtttcattttctgagtggatcatcggcagaatgaataatatcaagaatcctctaaggcaatgtttggaactaaatttcagtgtctccggaagcactgcaaaaatcaccacgtatagccaaagtgaagtatcaataggccctctctgtgtcctttaaaccgcccatatgatcgttacaaatggcggcttgaggaaaggtggttttggaattggtttctctctagtcttacat

SEQ ID NO: 2570 - DNA, 2341 bp, Homo sapiens
atttaataaagtaaagggtcacttgctgacataaagcacagtaggcaggaataggagaagagtcaacttagagaaaaaaatgctttgtgattttatttttatttctgcagtttggaaaacagtttaactgtttttgtgatgactcacaaaaatacaaaagagcattgaaaatacagagaaggacaacaattggggaacatttctggaggcttcacttactgaaacccagacataagcatacaagctaagacacagcaacaccaggcttcagcatgaaaccatacaaatctcctggaaaggacttccctctctgaatgcagctacctgtccacaggatgctctaggcccaggcacctttattcttccaactggaaagacatacaaaaatgccacaatatgacctcagaggcccaaacatttagccaaggctcctatgaagcaatctgctgtcttcatccaggtaaggccaacttcacattttaagacactatgatcatgggtaaatacagggtagactgagaggcagaagctccagcaaacacagtcctgtcattggaagatgaatgcagtacttactcctgcaaaaacagacccttccctctggccttgggcctagaacatgacttttttatagttgttggggaagaggcccttgggctttaacctgcaaacagcctcccttaaatccatgggctgcaatgggggcatttctccccacatctcacacatgtccagggcctcttccaccacctctccaacaaagaccttggctattccagccatggcaatggccatgttctcaggcaccgatctcccagtgatagaccacatcagacgtgcaacaagtgcttttgggaaagctaactggcgacacacttcatagcgggacagctgctcctcagacatggcagacagcagggttgtcatcctctgagcctcctctgcatccacactgggcttcctctccttctggcctttggtatctgttttctgtcttttggctgcaggaggagctgaggctgaggcctcattgtcaactactgtgaggtccatgacatcctcactcctgagctcacattcctgagccctgggttcttccaagttcccatctagggcctcagggattccatcctcgttgcagcccttcagacctcggggtatggcgaacatctcagcagacacacctgtttgcctgccggtctccatgggtgagattcaggttggctccatgacagcagctgtagaagcagaagttccacctggggtggtttgattatgcatctgaaatcagaacctttcacagattttagccgctatgtttctgctgagccataggttagccacaactggacacagctccctgcctcccctttccacacacaaacacatacactggttttctcacttccacaatgtgaagaaacttgtggatggacagtatattagttttagatcaatgcagaatcaattctcaccaattttggatatttaaaacaaacaccagctcacaggtcagaagttctactagaccaagtgactgcctcctgctcagagtcacacaagggacctccaggatagctctggctgtgtggtcgttgccttcacctgagaagggtctggctttgacctgattcgagattatggctttctcacaagaaatactactttggtgaaactctattgaaattatcagtactttaagtttccaatacttatcaagtacaatagttgaacatggcatggtagctgaaagtgtaagaggcagaatttggcagactccatttttttcaatttcaatggtttcaggttttttggtttccgccaaactaaagaatgtcctcacgagctgtgaattcacaggtcactacagacaatttttgaaactgaatcacactgtaatttttggcatatgatctgtgagctgtgctgggaaggttcacggtgattccataataaatctcgggtttttactctatascgaaaaattactcttttccatcatgaaggtaaagcagagtatgtacaactagagtgtggaatatctttgtcactcgtgatgaaccgacttggtccaatgctttaacgacttctccaatgtcgccgtactcaggtttcattttctgagtggatcatcggcagaatgaataatatcaagaatcctctaaggcaatgtttggaactaaatttcagtgtctccggaagcactgcaaaaatcaccacgtatagccaaagtgaagtatcaataggccctctctgtgtcctttaaaccgcccatatgatcgttacaaatggcggcttgaggaaaggtggttttggaattggtttctctctagtcttacat

SEQ ID NO: 2571 - DNA, 712 bp, Homo sapiens
cgtgtgatttcttatattattcaatatagttatttattttattcatttaatgagtgcctactatttgacatcatgtgaggaaccggagtacaagggtgagtatcagagggtcatgtactctcaaagtgctaagtggaggggaaaccaacagtaaggccgatgcccgccatttagaacagtgactttaaactgattttttactgtgacacacaataacacaataaggggtatgtgttacattgtgacctgatatgtgtgcatgtgyatatatataaaacactgaagcaaaagtttctggaaataatatttacattttattaacatttcttagttcgttttttttaaacatctcttgaacatgaagaggcaaaaagaggaagtaaatgatacgtccaggaagctctggagcatggaaggggaccatgtgaccaagctgcaggcatggaaggatgtggtctctgtccctgaggacctactgccagtgatccccattggccaagccaaaccagaagcgggggcagtggcatggtggcaagggtgcccaggtgtcatacagtacgtggaaggtggtatcccggtcaagagcaggatgatgaattaatgttggtgatagggaggagagggttggcaagaggagagtattagctagaccagatatttgtgcctactttacgtgatatactctgatattttctattctatcctatttcat

SEQ ID NO: 2572 - DNA, 712 bp, Homo sapiens
cgtgtgatttcttatattattcaatatagttatttattttattcatttaatgagtgcctactatttgacatcatgtgaggaaccggagtacaagggtgagtatcagagggtcatgtactctcaaagtgctaagtggaggggaaaccaacagtaaggccgatgcccgccatttagaacagtgactttaaactgattttttactgtgacacacaataacacaataaggggtatgtgttacattgtgacctgatatgtgtgcatgtgcatatatataaaacactgaagcaaaagtttctggaaataatatttacattttattaacatttcttagttckttttttttaaacatctcttgaacatgaagaggcaaaaagaggaagtaaatgatacgtccaggaagctctggagcatggaaggggaccatgtgaccaagctgcaggcatggaaggatgtggtctctgtccctgaggacctactgccagtgatccccattggccaagccaaaccagaagcgggggcagtggcatggtggcaagggtgcccaggtgtcatacagtacgtggaaggtggtatcccggtcaagagcaggatgatgaattaatgttggtgatagggaggagagggttggcaagaggagagtattagctagaccagatatttgtgcctactttacgtgatatactctgatattttctattctatcctatttcat

SEQ ID NO: 2573 - DNA, 736 bp, Homo sapiens
agttcactggcaatctctgagcttcctgtacctagatattgtcatctttccccagatttgaccatttttcagccattaatttcttatatatgctttctaggacttttcccctcttcttgttctgtaacttctattatgcaaaagttagtttgtttgatagtgtcccataattcccataggccttgttcattytttttttattcctttttctttttgttcctctgatcggtgaatttcaaatgtcttacatttgagctcacagattttgtcttctgcttgaccaaatctgctgttgaagtgttctattgaatttttcagttatatattctttctctctagaatttctattttgtattgtttctatttctttgtcaaacttctcattttgttcatgaattgtttcccaaattttaattttctgtctgtattttcttggagttttctgaacttctttaaaaggattattctgaactttttgtgagtcatttcatagatctccatttcttttggcccaattatggagctttattagtttctgttggtggagtcaaatttccctgatttttcataatttttctattctaatataatatatattatattatatatattacaaacaatatactattgtttataatctgcagttacaagacagggctgtgtgttatgctctaaggctaagtgaagtgtctggaattgctgtttggccatatagagtgggcagggcgagaagcta

SEQ ID NO: 2574 - DNA, 533 bp, Homo sapiens
gtacaaagtgtcagaagcacagtgccaggaggcacagcaaagggtagtagaggtgacatttgagcccagccttgaaaactgtctaggatttctcagcatttcagcaaagtaaggcaatttctgtctaaaatatataggcaaagtttttattaaaaatacgagaaattaattaaataacagattatgaccacaatgcagatttaaaaactaaggtatgatgagtgccgttgaccggttcatccagacagttcagagaacagaacatccatgtagatccttcttgtattacagaatacaaaggagcggaaaattttgcctcagtaactgccaggtcattctaattaaagtacctatacattgtaatataattcctccattaaggtaacagccaatcaggtggtacagagtctgtgccattcagtcaagaaattcactcccttaacctagactgtgctggaarttcattgacaaattttgttctttggttctccatttttcttcagaattcatgcagaccacttgacttccttagc

SEQ ID NO: 2575 - DNA, 568 bp, Homo sapiens
gtgcagtggcacaatcttggctcactgcagccttcgcctcccgggatcaagccactctcctgcctcagcttcccaagtagctgggaccacaggtgctcaccaccacaccccattaacttttttgtatttttagtagagacggggtttcaccacgttgtccaggctggtctcaaacttctgacctcaaatgatccacccgcctcagcctcccacagtgctgggattacaggcatgagccacggtgcctggcctagcctcagtctttcgatctggaaaatgggtaagttcagtaagttactattcttcatgtgcttaggtctcggggtgggggggaatggggactgttattatcagtgatcagctgttgccttttgtgctacatttcctctccaagttgctattggaaaaaccatcccaaggtcccccgtgccccmccgaccccgggtccagagtgaacacagccttccttgcctcccctagagcaaggaagaaatccctccagatttctggaattaaggcccaatgaggaaaaggggacatgagcaagtcctgtgcgtcggctgcaaga

SEQ ID NO: 2576 - DNA, 1327 bp, Homo sapiens
ttttcaacatttatggtaactaaagtagaatataataactgctagcattttcctatgagaaatctcgcagacatctgagaccgaagttcataaggcatttatttacaaaatgctccatcagtagtcccttttgtgtaaatttaataaatagatttgaaaagttaataaaaccrttattttaataaacatattttataatatagaacttgctgtaatatgttgttttaaaatgtagcttctttaaatgttgtaggtaggaagactctaagagaagagataaagtctaagagatctgaacgtttgttaagctacctcctgataaattcctgggttacagaaatttgatgagaaatagttgaaaatatatgttttagtcacaatcaacaactacttatgtttaagaattttcattaatgtttatagaaaatagtctaaatgtccaacaattggaacattttgtgttttcaatggaaatttcatatcaatgactttttttcttctatgttttttgcatttttaaaatttttatatatctatttttgtagagacagggtctcactctgttgcccaggatggtcccaaactcttaaaatcttcccaccttagcctcccaaagtgctaggattacagatgtgacgaaacttgcccagccattttttgcatttttgaaattttctgcagagcagacaaaacactgtgggtaggtattaaagcatagtgcccagcaatgaatgtttctttgcttagtaatttgagggatttttcagcgtgggggataagggatagaaggaggccaataggtatgatcttatttatgtaggaagacaaaagaaaacagaatctatttaagcaaagattaggtgcttgttaaaagcatctccatttgttcaacagattttcatataaaatttatctatcttcatgtttcagccatagctagttatctggaattaacataaagtcagccaagacttagagaaaaggtctgagattgtctcagctgggtgacaaaatgggcaaattaggatgagacttaaaagaagcagaaggataagaaaagtacagaaggagagaacaggatgagttatggaaaagtgaaaaaaaataaccagatggtgtggaggttggcagaattcatttgttttaagtacaatgtatagcctgaactttcattggctttggtgagctccatattgccaatgcaatgtttgcttgcatttatgaagtttccttttctattgattccagaaatgaatatgagattaaataccaataatgttgtaaacttcaaaccataggtaagctgtagatttttataagtaatgta

SEQ ID NO: 2577 - DNA, 1205 bp, Homo sapiens
ttgggaatacacatgaagattttggtgataaaaagagaaatggcaaagcactgatgaaaataaaattcatctatagccatcagttgactcaaccaggtgtgacatttcaccagccaccaccatacatgcaccttttccctaatccacatctaggcctcctcagccttccctagaaaagaagtcagagtattctggtgcccaccagttatcagcagaccagcctggcccagagcatgggctcctctcttcctcacccctttgcaagttgtcctacatgctccctgggtttggttcatggctgcaatgtaggctcacattttctgtgaccacatgactaaataacatatcagagttatttttctagaatttcaacagagattatatattattgtcccactcaaaagaagtttgggaggcttggaaaaaagtgaatataatttaattagagttaagattaatatgtatgagtgctaaaactgttgattaattctagggcacattctgaggtcaatttcagaaaattcggtgatgaataataagggatattacttgtaatttcaacaaatttcttcaaaatgattcatggtaasagtaaataaaatttggattcattagtccataaagaaaaatcctggcatataagggtctagtatagtcattaagacattgtctctctgtttacaaattagatatgtaaaacttaatagcatccaatttgtaaatttaccacatttaattaattttaattgttgaaaatctatgtttttgtatggatcactcttttcctactcttctgtcgtttactttaggatctaggaaggataaattctctacattttgaagttatttaggtttaacatgcagaatttaatgatctttgcctttatccattcctccagtaatatcattatttgcacaaagtaagctcaaagtaaatgtttaaataattaattttgggtttctttcccagcaacagaaagagaaaataaagtattgagatcttaggcccatttctcattttttatttatactctattagctaaaatgtcaacagccaatgttactaaagtcatctcaagtgttgaatgctttactaaatcagttactctatcaagatacaaaggaacaagtgtgtttaaatatgtttaagtatttataaaatacaaactgaaatagcacatgaatgtaaattataaaacagaaac

SEQ ID NO: 2578 - DNA, 1205 bp, Homo sapiens
ttgggaatacacatgaagattttggtgataaaaagagaaatggcaaagcactgatgaaaataaaattcatctatagccatcagttgactcaaccaggtgtgacatttcaccagccaccaccatacatgcaccttttccctaatccacatctaggcctcctcagccttccctagaaaagaagtcagagtattctggtgcccaccagttatcagcagaccagcctggcccagagcatgggctcctctcttcctcacccctttgcaagttgtcctacatgctccctgggtttggttcatggctgcaatgtaggctcacattttctgtgaccacatgactaaataacatatcagagttatttttctagaatttcaacagagattatatattattgtcccactcaaaagaagtttgggaggcttggaaaaaagtgaatataatttaattagagttaagattaatatgtatgagtgctaaaactgttgattaattctagggcacattctgaggtcaatttcagaaaattcggtgatgaataataagggatattacttgtaatttcaacaaatttcttcaaaatgattcatggtaacagtaaataaaatttggattcattagtccataaagaaaaatcctggcatataagggtctagtatagtcattaagmcattgtctctctgtttacaaattagatatgtaaaacttaatagcatccaatttgtaaatttaccacatttaattaattttaattgttgaaaatctatgtttttgtatggatcactcttttcctactcttctgtcgtttactttaggatctaggaaggataaattctctacattttgaagttatttaggtttaacatgcagaatttaatgatctttgcctttatccattcctccagtaatatcattatttgcacaaagtaagctcaaagtaaatgtttaaataattaattttgggtttctttcccagcaacagaaagagaaaataaagtattgagatcttaggcccatttctcattttttatttatactctattagctaaaatgtcaacagccaatgttactaaagtcatctcaagtgttgaatgctttactaaatcagttactctatcaagatacaaaggaacaagtgtgtttaaatatgtttaagtatttataaaatacaaactgaaatagcacatgaatgtaaattataaaacagaaac

SEQ ID NO: 2579 - DNA, 1205 bp, Homo sapiens
ttgggaatacacatgaagattttggtgataaaaagagaaatggcaaagcactgatgaaaataaaattcatctatagccatcagttgactcaaccaggtgtgacatttcaccagccaccaccatacatgcaccttttccctaatccacatctaggcctcctcagccttccctagaaaagaagtcagagtattctggtgcccaccagttatcagcagaccagcctggcccagagcatgggctcctctcttcctcacccctttgcaagttgtcctacatgctccctgggtttggttcatggctgcaatgtaggctcacattttctgtgaccacatgactaaataacatatcagagttatttttctagaatttcaacagagattatatattattgtcccactcaaaagaagtttgggaggcttggaaaaaagtgaatataatttaattagagttaagattaatatgtatgagtgctaaaactgttgattaattctagggcacattctgaggtcaatttcagaaaattcggtgatgaataataagggatattacttgtaatttcaacaaatttcttcaaaatgattcatggtaacagtaaataaaatttggattcattagtccataaagaaaaatcctggcatataagggtctagtatagtcattaagacattgtctctctgtttacaaattagatatgtaaaacttaatagcatccaatttgtaaatttaccacatttaattaattttaattgttgaaaatctatgtttttgtatggatcactcttttcctactcttctgtcrtttactttaggatctaggaaggataaattctctacattttgaagttatttaggtttaacatgcagaatttaatgatctttgcctttatccattcctccagtaatatcattatttgcacaaagtaagctcaaagtaaatgtttaaataattaattttgggtttctttcccagcaacagaaagagaaaataaagtattgagatcttaggcccatttctcattttttatttatactctattagctaaaatgtcaacagccaatgttactaaagtcatctcaagtgttgaatgctttactaaatcagttactctatcaagatacaaaggaacaagtgtgtttaaatatgtttaagtatttataaaatacaaactgaaatagcacatgaatgtaaattataaaacagaaac

SEQ ID NO: 2580 - DNA, 626 bp, Homo sapiens
cattagctttaagtttttcttaataaaagtcttctattacaatgataacatatactttaagtgcttttcccctatatttactactttacattaagggagktttaaatttaaggcaagatattaagaaacagaaaattgggaagaatagtaaaagcaattaaaattgctttatcttccttctggattcatttttcttcttcctgtaaagtgtccttcagaagttccttttctaaaatctgttgctatcgtatctttgcctttgttcttacaaagtttgggtacataattctacattatcagtcaatcacttttagcactttgaagatatcgttatcctgtcttctagttcccattcccattattgctactgtgaagtctactctcagtctaaagattattgttttgtaagcaatcggtccttttctgctgcatttgctctttgaagcctggaattaagattttcctcttcttttttcatcagtttcacaataatgtatcttcgtgaatattcctctgtttttaactttttaattgatatataacatgcaaataaaaagttgataaaccaaaacaccacacatatatatatacacacatatatgtgcaaacatatatataggggtgtg

SEQ ID NO: 2581 - DNA, 574 bp, Homo sapiens
tttgtattctcaaggtttctgttactgatgactaggcttctggtttcaatttaattttttttagcttttaattttgaacatattttaggtgtactgaaaatttgcaaaagtaatgcagagtctcaataaaccttttacccacctaaccccaatgttaacatcgtacataaccgtagtaccaaaaactaagaaattaacattggtacaatactattaactaaaccacagactttatttgaattcgctgatgttttccttactgcctgtttctgttctagcaccctctccaggaccccacattacatttagttgccatttctccctagttgcctctggcttctyggtctacccttgttttttatgaccttgacaatcttaaggaatatttgccagcctgggtttttctggcatttccccttgattatgtgggagttaggaatttttggaaagaacatcacagaacaaagtgcccctcccacctcactataagaagaggaatgtgacatctacatgacaccacaggtgatattaaccttcgtcatctagttaatgtcgtgtttgccaggtttttcca

SEQ ID NO: 2582 - DNA, 1029 bp, Homo sapiens
tcctcctcagaatcttgcctctcctattgctttgtgttattgaacgcggacttgtgcaagcagaagctctgcacctcttcctctgcagaagaggaaaggagctgggtcctttcctcttacacaccggggcacctccttattgcctcaccaaccagtttgttttacaacttgcaggagagtattattacatctgagcactcagaaattagatgctgacactgagtattgatttacataaaaatctacatatttgtggtttttcgagagctactcacttggaactttacaaggtcaggcatcccctgagcctaggaccatgcctgatacaaagggcgtgctcaacaaaaagttgctgaattaaaaatcatcttggaatgtaaaggtgactagcattatggaaatagtttatattgacatgattattattatttactttatttttttttatttaggtgctcactctgtctcccaggctgtagtgcagtggcgtgatctcagctcattgcaaccccygcctcccgggttcaagcaattatctccctcagcctcccaagtagttgggtttgcagacacgtgccaccacgcccggctaatttttgtatttttagtagagacagggtgtcaccatgttggccaagctggtctcgaactcctgacctcaagtgaactgcctgccttggcctcccaaagtgctggcatgagcccccgtgtctggcctatgttgacattactcatcctcctaaaataataataaaataactggaaaaaatagcttggagaaaattaagctttttgtctggaattttggagaatttcttttttttaaccgccttaagtgtttgtatcttttctttgtcctaatcacgaacaggaaatttcaaagcataacaaagacccaattcttgcagctctggtgtgtggctttggtgggaatttcagcagcggttctgttgattgtcctgactgatgcccccacttttgaacactggtaaatttaaacagtgtaaattgcatttgctgtttacaagg

SEQ ID NO: 2583 - DNA, 1029 bp, Homo sapiens
tcctcctcagaatcttgcctctcctattgctttgtgttattgaacgcggacttgtgcaagcagaagctctgcacctcttcctctgcagaagaggaaaggagctgggtcctttcctcttacacaccggggcacctccttattgcctcaccaaccagtttgttttacaacttgcaggagagtattattacatctgagcactcagaaattagatgctgacactgagtattgatttacataaaaatctacatatttgtggtttttcgagagctactcacttggaactttacaaggtcaggcatcccctgagcctaggaccatgcctgatacaaagggcgtgctcaacaaaaagttgctgaattaaaaatcatcttggaatgtaaaggtgactagcattatggaaatagtttatattgacatgattattattatttactttatttttttttatttaggtgctcactctgtctcccaggctgtagtgcagtggcgtgatctcagctcattgcaacccccgcctcccgggytcaagcaattatctccctcagcctcccaagtagttgggtttgcagacacgtgccaccacgcccggctaatttttgtatttttagtagagacagggtgtcaccatgttggccaagctggtctcgaactcctgacctcaagtgaactgcctgccttggcctcccaaagtgctggcatgagcccccgtgtctggcctatgttgacattactcatcctcctaaaataataataaaataactggaaaaaatagcttggagaaaattaagctttttgtctggaattttggagaatttcttttttttaaccgccttaagtgtttgtatcttttctttgtcctaatcacgaacaggaaatttcaaagcataacaaagacccaattcttgcagctctggtgtgtggctttggtgggaatttcagcagcggttctgttgattgtcctgactgatgcccccacttttgaacactggtaaatttaaacagtgtaaattgcatttgctgtttacaagg

SEQ ID NO: 2584 - DNA, 1029 bp, Homo sapiens
tcctcctcagaatcttgcctctcctattgctttgtgttattgaacgcggacttgtgcaagcagaagctctgcacctcttcctctgcagaagaggaaaggagctgggtcctttcctcttacacaccggggcacctccttattgcctcaccaaccagtttgttttacaacttgcaggagagtattattacatctgagcactcagaaattagatgctgacactgagtattgatttacataaaaatctacatatttgtggtttttcgagagctactcacttggaactttacaaggtcaggcatcccctgagcctaggaccatgcctgatacaaagggcgtgctcaacaaaaagttgctgaattaaaaatcatcttggaatgtaaaggtgactagcattatggaaatagtttatattgacatgattattattatttactttatttttttttatttaggtgctcactctgtctcccaggctgtagtgcagtggcgtgatctcagctcattgcaacccccgcctcccgggttcaagcaattatctccctcagcctcccaagtagttgggtttgcagacacgtgccaccacgcccggctaatttttgtakttttagtagagacagggtgtcaccatgttggccaagctggtctcgaactcctgacctcaagtgaactgcctgccttggcctcccaaagtgctggcatgagcccccgtgtctggcctatgttgacattactcatcctcctaaaataataataaaataactggaaaaaatagcttggagaaaattaagctttttgtctggaattttggagaatttcttttttttaaccgccttaagtgtttgtatcttttctttgtcctaatcacgaacaggaaatttcaaagcataacaaagacccaattcttgcagctctggtgtgtggctttggtgggaatttcagcagcggttctgttgattgtcctgactgatgcccccacttttgaacactggtaaatttaaacagtgtaaattgcatttgctgtttacaagg

SEQ ID NO: 2585 - DNA, 1029 bp, Homo sapiens
tcctcctcagaatcttgcctctcctattgctttgtgttattgaacgcggacttgtgcaagcagaagctctgcacctcttcctctgcagaagaggaaaggagctgggtcctttcctcttacacaccggggcacctccttattgcctcaccaaccagtttgttttacaacttgcaggagagtattattacatctgagcactcagaaattagatgctgacactgagtattgatttacataaaaatctacatatttgtggtttttcgagagctactcacttggaactttacaaggtcaggcatcccctgagcctaggaccatgcctgatacaaagggcgtgctcaacaaaaagttgctgaattaaaaatcatcttggaatgtaaaggtgactagcattatggaaatagtttatattgacatgattattattatttactttatttttttttatttaggtgctcactctgtctcccaggctgtagtgcagtggcgtgatctcagctcattgcaacccccgcctcccgggttcaagcaattatctccctcagcctcccaagtagttgggtttgcagacacgtgccaccacgcccggctaatttttgtatttttagtagagacagggtgtcaccatgttggccaagctggtctcgaactcctgacctcaagtgaactgcctgccttggcctcccaaagtgctggcatgagcccccgtgtctggcctatgttgacattactcatcctcctaaaataataataaaataactggaaaaaatagcttggagaaaattaagctttttgtctggaattttggagaatttcttttttttaaccgcctyaagtgtttgtatcttttctttgtcctaatcacgaacaggaaatttcaaagcataacaaagacccaattcttgcagctctggtgtgtggctttggtgggaatttcagcagcggttctgttgattgtcctgactgatgcccccacttttgaacactggtaaatttaaacagtgtaaattgcatttgctgtttacaagg

SEQ ID NO: 2586 - DNA, 605 bp, Homo sapiens
aatacatattctatgtatttctatttaaacatcatcctattttatttgtcttagttcctaactagctaagaaatagtcttcaatctgtcatccaacatatttactatctagccctcttactttcacatcatttgtaaactttgatagccacatattctatctctttaagttattgttaaaaatgttcaacaggacagactctaaaggaaactgctagaaagttccaagatcatactaatcctaatcagaaggttttgaattcagacattcaattaattataaagttgcctactacggtgacaactattactttcctgataccagtcagagattaccatggaattcttataaagccttgcagaaatacaaatatattaaasaaatagtaaaataacactaacaaaaatatgtatgattcctaaataaagagagccgagcaggctctgaaaatctaataccttagtaaaggaaaaagagtggtataaatgagcatacgattagtggtgaagacagcacaattatagtattgattaataaatgagaagcaagatacaggttaaattataaagacttgagacaaacgaaatgcagaagaaaaatataaa

SEQ ID NO: 2587 - DNA, 399 bp, Homo sapiens
ggaaattaattctatagtacccattcttactactgatattaaataccactgaaaatcactttatttagtacgtgaaaataaaaaytattgtgagagcttctcacggctttgccaatgaccctgaactttgattttcccttttaaggtaaaaacatcagccaagaacttgcaattattcttagtgtggccacccataagttccctctcagaagggattgcagacaactaatctgagtagttgaagataatttattgtgtttctgggccttacagcaacatttcaaggtatatatttttagtctgtcctagagttgagaaagctgaaactcagtttatgcaagctggagatgtacttcccactcctactttctggacaaagatttgtttcccttatccatg

SEQ ID NO: 2588 - DNA, 399 bp, Homo sapiens
ggaaattaattctatagtacccattcttactactgatattaaataccactgaaaatcactttatttagtacgtgaaaataaaaattattgtgagagcttctcacggctttgccaatgaccctgaactttgattttcccttttaaggtaaaaacatcagccaagaacttgcaattattcttagtgtggccacccataagttccctctcagaagggattgcagacaactaatctgagtagttgaagataatttattgtgtytctgggccttacagcaacatttcaaggtatatatttttagtctgtcctagagttgagaaagctgaaactcagtttatgcaagctggagatgtacttcccactcctactttctggacaaagatttgtttcccttatccatg

SEQ ID NO: 2589 - DNA, 595 bp, Homo sapiens
tgtgacctgtaccttgtgccgacctcctgtctcatcctgacttagaatgctttaactgtctgggaatgcagcccagtaggtctcagcctcattttacccagcccctattcaagatggagttgctctggttcatacacctctgacacaggtatattttctggatctaaacacaggtatatttctggatccggccattcacatgcagaacagaagagtaggatgcagcttaaagccaagcttctcagtaactacaaaggacaccaaagaactcttaagacaaaattaactaaaagacttcagttagacaagatgtacacataaaaagcgttggcaaacgctagcctccttagttttgcaaaataaagaagtcagttgtcattgtcctttgtaattccaacaagttctacagacactaattgcaaaataattgtctttataaactttcaacactaactcacaggcagggtttgatttttcaacttgaaggtttattttgraaagtagaaaaaaaagtttattttcccatggaagttgtctgggtttgcattctttagtgtaacaataaacttgaacttttcaaaatttattttagggc

SEQ ID NO: 2590 - DNA, 650 bp, Homo sapiens
aaacagagcattattataacaaggtaacacctatgtctttaggatatgaatggtccacatcatgttcagatgttacttgataatgatagatgctacataatttgatgacaactaaaatctgctgagcacttactgtatactaataactatagttgacagcattttccagtttgatcctcaaaaaaccctgagacataactgctattcctttccttttgtgtccagagttggttccttctggggggttcgtggtctccttgacttcaagaatggagctgcagacctttgaggtgagtgttacaactcttaaagatggcacagacccaaaaagtgagcagcagcaagatctactgtgaagaccgaaagaacaaagctttcacggcacccaagtgggttgccactgccggctggggtggccagttttattcccttatttgtcccttcccatgttctgtttctgtcctatcagagtgccctttattcagtccttcccacaattggctamctttagactcctgctgattggtgcattttacagagcgctgattggtgcgttttatagaccgctgactggtgcgttttacagagcgccgattggtgcattttgcagaatgctgattggtacattttacagagtgctgattgatgca

SEQ ID NO: 2591 - DNA, 1279 bp, Homo sapiens
tgcattctaaagaacattgagtaaacgaaaatagatttagagaatttgggcttttgaaatatcactgcattgattttcttcacatttcctagttacaaaaataatctttaggtagaagaaaattgtcaaggtatgagaaattgagggagaatttggtatctgagattggattcgacctgagatctaaccccaaatgttctgaccttactcagtttctttctwtgtaacatttggataaatatccaccataggatttttatgagaatttgtgagatttttactagaacgtaagaaaattaaataatataaacagatatattaaatgaacataataaccataataaatacaaaatttataacatcctaagagacaccatgaaggattttgaaaagccataaatatggcactttatagcttgaagctggatagggccagatagccttgtatctacaaatggggtttttgtctattcaactggttattatcctcaactctaatcttaccaatttctccaagtctctcatacctggcctagctacaatcatgacttgatctctctttctctttcttcccatgactcctgataacctttcgtgccacaactcacccttccccccgccgctacttccaacatagccaagggatgcttctctcacttggccttgtgcaagctcacttggaaagccctctgctgcccccgtcagtcatcgtgaggcagcgcccacagactcaagcttctctcctgtccaataaacaatgaaaatttggtttctactgggttgtattaaaaggaaatttaatctgaactttacaacagcagagataaagaaaacatattgtgttatgttaatttttatgggttgcctgtgcaatatcatcctgaagtatgtttctaaggcattacagggagtgacagagaacctcctaattcatccaaactctttacaaagctggcaagcccgtttgatgaattccaacaacagattctaggatggtcttgtggctaagtaagatgatagtaaggtggggcactgagaagcctgttgagtttgcagctcagtcctctacaaacaaaacagacagaaagagaaaatgagaaagagggagaaataagagcaaagtagtgattaagaattttgaagtcaaacagacctgactttgctctccctgataactgcaactttggacaagatacttacactttccaaaccggagtttcttctagaaaatggtaataactacctcatagcattattgtgagtattaaattagattatg

SEQ ID NO: 2592 - DNA, 1279 bp, Homo sapiens
tgcattctaaagaacattgagtaaacgaaaatagatttagagaatttgggcttttgaaatatcactgcattgattttcttcacatttcctagttacaaaaataatctttaggtagaagaaaattgtcaaggtatgagaaattgagggagaatttggtatctgagattggattcgacctgagatctaaccccaaatgttctgaccttactcagtttctttctatgtaacatttggataaatatccaccataggatttttatgagaatttgtgagatttttactagaacgtaagaaaattaaataatataaacagatatattaaatgaacataataaccataataaatacaaaattkataacatcctaagagacaccatgaaggattttgaaaagccataaatatggcactttatagcttgaagctggatagggccagatagccttgtatctacaaatggggtttttgtctattcaactggttattatcctcaactctaatcttaccaatttctccaagtctctcatacctggcctagctacaatcatgacttgatctctctttctctttcttcccatgactcctgataacctttcgtgccacaactcacccttccccccgccgctacttccaacatagccaagggatgcttctctcacttggccttgtgcaagctcacttggaaagccctctgctgcccccgtcagtcatcgtgaggcagcgcccacagactcaagcttctctcctgtccaataaacaatgaaaatttggtttctactgggttgtattaaaaggaaatttaatctgaactttacaacagcagagataaagaaaacatattgtgttatgttaatttttatgggttgcctgtgcaatatcatcctgaagtatgtttctaaggcattacagggagtgacagagaacctcctaattcatccaaactctttacaaagctggcaagcccgtttgatgaattccaacaacagattctaggatggtcttgtggctaagtaagatgatagtaaggtggggcactgagaagcctgttgagtttgcagctcagtcctctacaaacaaaacagacagaaagagaaaatgagaaagagggagaaataagagcaaagtagtgattaagaattttgaagtcaaacagacctgactttgctctccctgataactgcaactttggacaagatacttacactttccaaaccggagtttcttctagaaaatggtaataactacctcatagcattattgtgagtattaaattagattatg

SEQ ID NO: 2593 - DNA, 1279 bp, Homo sapiens
tgcattctaaagaacattgagtaaacgaaaatagatttagagaatttgggcttttgaaatatcactgcattgattttcttcacatttcctagttacaaaaataatctttaggtagaagaaaattgtcaaggtatgagaaattgagggagaatttggtatctgagattggattcgacctgagatctaaccccaaatgttctgaccttactcagtttctttctatgtaacatttggataaatatccaccataggatttttatgagaatttgtgagatttttactagaacgtaagaaaattaaataatataaacagatatattaaatgaacataataaccataataaatacaaaatttataacatcctaagagacaccatgaaggattttgaaaagccataaatatggcactttatagcttgaagctggatagggccagatagccttgtatctacaaatggggtttttgtctattcaactggttattatcctcaactctaatcttaccaatttctccaagtctctcatacctggcctagctacaatcatgacttgatctctctttcyctttcttcccatgactcctgataacctttcgtgccacaactcacccttccccccgccgctacttccaacatagccaagggatgcttctctcacttggccttgtgcaagctcacttggaaagccctctgctgcccccgtcagtcatcgtgaggcagcgcccacagactcaagcttctctcctgtccaataaacaatgaaaatttggtttctactgggttgtattaaaaggaaatttaatctgaactttacaacagcagagataaagaaaacatattgtgttatgttaatttttatgggttgcctgtgcaatatcatcctgaagtatgtttctaaggcattacagggagtgacagagaacctcctaattcatccaaactctttacaaagctggcaagcccgtttgatgaattccaacaacagattctaggatggtcttgtggctaagtaagatgatagtaaggtggggcactgagaagcctgttgagtttgcagctcagtcctctacaaacaaaacagacagaaagagaaaatgagaaagagggagaaataagagcaaagtagtgattaagaattttgaagtcaaacagacctgactttgctctccctgataactgcaactttggacaagatacttacactttccaaaccggagtttcttctagaaaatggtaataactacctcatagcattattgtgagtattaaattagattatg

SEQ ID NO: 2594 - DNA, 1279 bp, Homo sapiens
tgcattctaaagaacattgagtaaacgaaaatagatttagagaatttgggcttttgaaatatcactgcattgattttcttcacatttcctagttacaaaaataatctttaggtagaagaaaattgtcaaggtatgagaaattgagggagaatttggtatctgagattggattcgacctgagatctaaccccaaatgttctgaccttactcagtttctttctatgtaacatttggataaatatccaccataggatttttatgagaatttgtgagatttttactagaacgtaagaaaattaaataatataaacagatatattaaatgaacataataaccataataaatacaaaatttataacatcctaagagacaccatgaaggattttgaaaagccataaatatggcactttatagcttgaagctggatagggccagatagccttgtatctacaaatggggtttttgtctattcaactggttattatcctcaactctaatcttaccaatttctccaagtctctcatacctggcctagctacaatcatgacttgatctctctttctctttcttyccatgactcctgataacctttcgtgccacaactcacccttccccccgccgctacttccaacatagccaagggatgcttctctcacttggccttgtgcaagctcacttggaaagccctctgctgcccccgtcagtcatcgtgaggcagcgcccacagactcaagcttctctcctgtccaataaacaatgaaaatttggtttctactgggttgtattaaaaggaaatttaatctgaactttacaacagcagagataaagaaaacatattgtgttatgttaatttttatgggttgcctgtgcaatatcatcctgaagtatgtttctaaggcattacagggagtgacagagaacctcctaattcatccaaactctttacaaagctggcaagcccgtttgatgaattccaacaacagattctaggatggtcttgtggctaagtaagatgatagtaaggtggggcactgagaagcctgttgagtttgcagctcagtcctctacaaacaaaacagacagaaagagaaaatgagaaagagggagaaataagagcaaagtagtgattaagaattttgaagtcaaacagacctgactttgctctccctgataactgcaactttggacaagatacttacactttccaaaccggagtttcttctagaaaatggtaataactacctcatagcattattgtgagtattaaattagattatg

SEQ ID NO: 2595 - DNA, 1279 bp, Homo sapiens
tgcattctaaagaacattgagtaaacgaaaatagatttagagaatttgggcttttgaaatatcactgcattgattttcttcacatttcctagttacaaaaataatctttaggtagaagaaaattgtcaaggtatgagaaattgagggagaatttggtatctgagattggattcgacctgagatctaaccccaaatgttctgaccttactcagtttctttctatgtaacatttggataaatatccaccataggatttttatgagaatttgtgagatttttactagaacgtaagaaaattaaataatataaacagatatattaaatgaacataataaccataataaatacaaaatttataacatcctaagagacaccatgaaggattttgaaaagccataaatatggcactttatagcttgaagctggatagggccagatagccttgtatctacaaatggggtttttgtctattcaactggttattatcctcaactctaatcttaccaatttctccaagtctctcatacctggcctagctacaatcatgacttgatctctctttctctttcttcccatgactcctgataacctttcgtgccacaactcacccttccccccgccgctacttccaacatagccaagggatgcttctctcacttggccttgtgcaagctcacttggaaagccctctgctgcccccgtcagtcatcgtgaggcagcgcccacagactcaagcttctctcctgtccaataaacaatgaaaatttggtttctactgggttgtattaaaaggaaatttaatctgaactttacaacagcagagataaagaaaacatattgtgttatgttaatttttatgggttgcctgtgcaatatcatcctgaagtatgtttctaaggcattacagggagtgacagagaacctcctaattcatccaaactctttacaaagctggcaagcccgtttgatgaattccaacaacagattctaggatggtcttgtggctaagtaagatgatagtaaggtggggcactgagaagcctgttgagtttgcagctcagtcctctacaaacaaaacagacagaaagagaaaatgagaaagagggagaaataagagcaaagtagtgattaagaattttgaagtcaaacagacctgactttgctctccctgataactgcaactttggacaagatacttamactttccaaaccggagtttcttctagaaaatggtaataactacctcatagcattattgtgagtattaaattagattatg

SEQ ID NO: 2596 - DNA, 3421 bp, Homo sapiens
ctgtgattacgctcccctgtgggagattccccagcactggctgtgcacacccagggagcctcacggcccagacctgggcagcacgggtaggagctgagagcatcctcacggcagcaggcagaacaaacaagtgggcctggggctcacaaccctgaggcattgttgaattctgccaccaactcgaatcggatcgaagccagacccttctcaggtggaggcaacgaccgcacagccagacccatcctggaggtccctcgtgggactctgagcaggaggcagtcacttggcctagcagaacttctgacctgtgagctggtgtttgttttaaataccccaaattggtgagaattcgttctgcattgacctaaaactaacatactctccttccacaagtttcttcacactgtggaagcgagaaaattcagtgtgtgtgtttgtgtgtgggaaggggcggccgggagccgtgtccggttacggcgaaactggctcagcagaaacacagcagctaaaatctttgaaaggttctcatcgcagatccacaatcaaaccaccccagccggaacttctgcctgtacagctgctgtcacggagcagacttgaatctcacccatggagaccggcaggcaaacaggtgtgtctgctgagatgctcgccatgccccgaggtctgaagggcagcaagaaggatggaatccctgaggacctagacgggaacttggaagcacccagggatcaggaaggtgagctcaggagtgaggatgtcatggacctcacagaaggtgacagtgaggcctcagcctcagctcctcctgcagccaaaagacggaaaacacatacgaaaggcaagaaggagagcaagcccaccgtggatgcggaggaggctcagaggatgacaaccctgctgtctgccatgtctgaggagcagctgtcccgctacgaagtgtgtcgccggtcagcgttcccgagagcacgcgttgcgggtctgatgcgggctatcactggcagttcggtgtcggagaacgcggccattgccatggctggaatagccaagctctttgttggagaggtggtggaagaggccctggacgtgtgtgagatgtggggagagacgcccccgctgcagcccaagcatttaagggaggccgttcgcaggttaaagccaagggcctcttccccaacagcaactgcaaaagaatcatgttctaggcccacggccagagggcagggtctgtttgtgcaggaataagtaccgcgttcatcttccaatgacaggagtgtgtgcgccggagctcccgcatctcagtcccacctggatttacccacgatcttcgtgtcttaaaatgcgaagttgcccttacctggatgaagacagcagatcgcttcataggagccttggctaaatctttgggcattttaatgggatgtggaggcgtttctctatgtctttccagctggaggaatcaaggtgcctgggcctagagcatcctgtggacaggcagctgcattcagagagggaagcccttcccaggagatctgtatggtttcctgctgaagcctggtgtagctctgtcttagcttgtaggcttatgtctgggttccagtaattggagcttgcagaaatgtttccccgattgttgttcttctgtagaatttcaacgctcatatgtatttttgtgagtcaccacgaaaacagttaaactgatcaaccgttttccaaactgcagacaccaaawtgaaatcacaaagcactttctttttttcccctaagttgactcttctattcctgcctgctgtgctttatgtcagcaagtgaccctttcctgtattataatgcagtatagtatagatgcatcatgtaagaccagagagaaaccgattccaaaaccacctttcctcaagccgccgtttgtaacgaccatatgggcggtttgaaggacacagagagagcctattgacacttcactttcgctacacgtggtgatttttccagtgcttccggagacactgaaatttagttccaaacattgccttagaggattcttgattttattcattctaccgatgatccactcagaaaatcaaacctgagtacggagacattggagaagtcgttaaagtgttggaccaagtcggttcgtcacgagtgacaaagttattccacactctgcttgtacatactctgctttgccttcaggatggcaaagagtaatttttcgctatagagtaaaaacccgagatttattacggaatcagcgtgaaccttcccagcacagctcacagagcatacgccaaaaattacagtgtgattcagtttcaaaaattgtctgtagtgacctgtgagttcacagctcgtgaggacattctttagttcggctgaagccaaaaaacctggaaccatcgaaatgggaagaagtggagtctgccaaattctgcctcttacactttcagctaccacgccatgttcaactattgtacttgataaggattggaaacttaaggtgctgataatttcaatagagtttcaccagagtagtatttcttgtgagaaagccataatctcatcagtaacgcctttctaaaagatccaacagaaaatatgaactagcaactcatcctgacaaggaagtaaaactcaggaaaaatcctaaggcagagcagcttcaggcttcagtgtgaaactatcatagtctgggcgcggtggctcacgcctatagtcccttcactttgggaagccaaggtggggcagatcacctgaagtcagcagttcaagaccagcctgggcaaaatggcgagacctcgtctctacttgagcaaatacaaaaatttgcccggcgtggtagcgcgcacatttagtcccagccactctggaggctgaggcaggagaatccgttgagcctaggatgccgaggctgcagtgggctgagatgaggccgctgtaatccagcctgggggacagagcgaggcactgtctcagaaataaacaaataaaataaaataaactaaaataaagtgacgtaaaataaaattgaaataatattttcacgtttccctcacccagcccattttattttcagagtatttgataaaccgctttcttccctgtgcgttagagagttttttttctcagacatcgaagttttctaatgctcaacttcgtaaaatgtctcatttttactgtaaatagtttctttactgttgtgagatgtgaactttgcgattctgtgaagaggactgaattctgaaatgccccctgcatttcccgcccctcagagagtcgccctgtgtctgcccctcccttgggtgtgggcggaagcacgaattgatgtgcccgcccgacttcctcattagattggggggtatcctgaaccaacggctgctaagggctgggtctaatgcagtcatctgagccctttataagggag

SEQ ID NO: 2597 - DNA, 759 bp, Homo sapiens
aaaaaaaaaaaagctttttcgttgctatgttaacaattttggcttttatcctttaagcattggggaggcattaaataattttgaatagaagagtaacatccatttacatttttgaattattattctgatcattctgtagaggatggagatagacaaattaaaggaattactgcaatagtacaggaaagaaatgatgaccacctgaactgagggcagtgatagtgagaggagagagggtattaaggaagtagagtcagccagcaagtcttgatgattaattgtgcattgggttcagaatgttttttgcagtactcaagactgactgctgggtttctggcttaaactgctagtccttgacataggtattartggaaagaggacatagttttgggaatgggaggacttcagtagtaaacatgtctcatttgagatgtcggagaacactgtggttaggaatgtctagtacgcagttggatgtcttgagatctggaactcagatcatggtaattggaagttagcatactggtcccaaactcacttcattattttcattttttaagtttgttaatattcctctaagaaagggtaaagagaataaggagaatttagaacttaggttaaagaacttttggaaaaataaatgccgtgtagagcctatttcacacttaaggcaactgtttgagattcatttctcctgccagtaatttcaattctctgctaccagctgtctgtaggatcagtgaagtgttttaaggaaaa

SEQ ID NO: 2598 - DNA, 651 bp, Homo sapiens
tgcatgcacactctggtgcctggtgtacatgtgtgagcaaaacaaaatctctagaatgcttgccattgctgcttgcaatatccaccacacctttgatttatcccaaaagtactgtaaatgaagctcaaatgagttctagttttaaatggctattcaaagaaggaaacttttgagaagtgggaaaaaaaatctgaaataaatatcataaaatggaggttcaaaccctccttctgtcacttggccaattgtgtaaccttgacagccaatgaatgttatgcctagcattccacatcttccactatttctgagcttccaaatatgtttctattttttattgctgtgaaacaaaccaccccaatctcccaggcatagaataataatcatttattatcatctccttgttagagggtttactgggctcagctatgtrgttctcactcagggtgtctcaggcagttgaagcccagcagtgtctgtgcctggattcattaagaaggctggttcacatgtctcttggttcatgcaggctattggctaagaccacgctagcaactgtagccagaacacatactggatcctttccacgcgtcttgggcttcctcacagcatggcagttggtttctaagagtgagcattgcaagagagtcaggc

SEQ ID NO: 2599 - DNA, 565 bp, Homo sapiens
atctccaagcatgtgcatagcacatataccttaattatcattttttaaagtctatgttttaaaagtaactctaaagataataggcattttaacatacaagattcaacagagcatgtatcattcaataattcacattttgaagtggtaattcagaaaacactatgcttcatattttggtgtgtaccgccactgacaaatggcaagacctgtatctcaattgtgaaagttggcaaatatttagtgaactgaagctgtgtggatgtctaattagattaatccaggtttcaatgattgatttttgagtaattattttgtcaatttaagcaaaatcatgtttatgtttctgctgtactaactagatgaacataggaacataattgtagctacttttttttaagcattacgagtaaaaatactctttgaatataatgccagagaactcatatggtatcaaarcatatggcattcttaatataaaatggacatatatatggaataggatttatagaaggcattaaggcattcccttgggggttctcaataagttattgtgcaaatttaaatg

SEQ ID NO: 2600 - DNA, 681 bp, Homo sapiens
agattgcctgagctcaggagtttgagagcagcctgggtaacatggcaaaactccgtctctgcaaaaaaaatacaaaaattagccaggcatggtggcacacatgtgtggtcccagctacctggggggctgaagggggaagatggcttgagcctgagaggtcaaggcctcagtgagcctagattgtgcctctgcactccagcatgagtgacagagcaagaccctgtctgtttaacaacaacaacaacaaaaaaacccacttcatatattgtatgaaaacttcatattttttgataggtggatatttgaaagtcagacttctttaaatgccacaaaaacagcactgggttaagagtcattgtttttcatttgaatccttgtcttgcactttcgtgcagtgtggtgagttgggtacctctctgggctgacgttttctcatctcaaaaatgaaggcaytggatttgaaagtgcttttgcaagattataatttttaaaaaagcaatacttgtaaaacaggagtaaagaaccagttccattttcttgttaacatcaatagattaaatctctgaatctctcaaaaagacacttcgaggcttttgggccaaatctagagattggatggctcaattatttggatgaacataacatgtaagtctaacacattgtgggtccgtcctgttcaac

SEQ ID NO: 2601 - DNA, 2943 bp, Homo sapiens
tgcatgcagtgctctttttgccccatttgtggaacactgtcaggaacatacatttaaattaatcaacatgttctgatttcaatgtcgattagatgtcagatttctttgttattaatgatacaacaatataaaaatatttccatttctgatcacaatgattttatgacttaaaatctaatcctttttccattttacctttattttgaatgttagaagcaatttttccctcatgtcttgaaatatgttcatttgaagttctcattgaaaagaaatttcaagttataaaaacaagaaataaaaacaagaaatataaacaaaaaccaggagctccacagagaaattttctttctttttaatatatatgcaatgtgtgcatggaagcagacacagacacacatacctactgcacatatatcatttaaaatttcacatttaaagataaaatcaagaggttgcaggtcatatgcaccaatgtctcaaaaaatacttatttatccagcaccagcaattttgttttcaccaacatatgtttcaggtctgccctttagtttatagctgtagccttttttatagggcccacaaatttttgagtttaccgttgaatgcctcgcctcatgctaacattcgtctgccctcaggtgactagaggaagaggcactgtgctaccactaatagctagcaagtggtaatgactgaacactgcgtatctaccaggtactgagctgaaggcctcatgagcgctgccctcatttaatagtcacaatcatcatagaaggcaagaactataattattcccatttaacagctatgatgtggagaagttaatttgcccaagagtacaccattggtaagtaatagagcagggattggaattcaagttgatctcagtccagaagccacaatattaaaatactgctctctagatgatctctgaatttatgatgtctgtttcaaacagaatctcacagctgtgtttctgatataaatggatcctggacagtgccagaaatcaaagcaattcttaaacattgagtgtcccccaaactaccacatactcttattctaagatacacatgttttcatgtgttaacatctttgaaactgatatgcttctcatagtcagtgccatttcatagtttgtcaggattttccccttttcttacaggtacataaaatactaaagttgttttacttttgataaaatatggcaagaaatataaatgttttgaatcatgtaagaaaaattattgaacattcactgtgttccaggaatgtactaaacactttactgacattttctcttttaattgtcataactaacctgtgagttaaactatgtaaacatcaccatatacaaatgagaaaatataggctgggtgaactgtttttgtcttagttcccactgtcagttggtggttgaaaaagaaatctaacccagtcaggtggagtccagaggccttactcttggagtaagctagtttttgtattttgcctattttgctaacagagtttagaatagctaaattggtctaatctaataaacaagtaactttatgcaaaataatttttacactaacaagaagtttatttttctttaaaaatccctctttttctctttctttcctttcaaatatctctgaatgtctttctttgggctcaagttgcaccacatgcatctctgctttcaccccaatccctgaaagaaaaaaaattaaatagcatgctttctctccatatcgaatcaaccactgttgactgcttcaactcacttgagtatatacccaagtgtgattgctgaattgtatggtaagagtatgtttagtttgtaagaaattgccaaactgttgtccaaagtcgttgtactctttttcattccccccagtaacaaatgagaattcttatggcttcatatccttgctatcatttggtgttctcagtatttcaaattccatttcaaatgattacttaagcatggatgacttctatctcatctacatggcaatcatttgtccctctgctgggaacatccctagtttacatacatcgctccatcataattattaaaaatacccctttcattctccaaagtgtctggatgataaattatttcatcacccagcttgaatatccacttgaattataaaggaaaaatcacatttcatttttttctttccctcctggtttttaacagagtgctaagcatagggtatataatctttcagcacttcaggaatggatgaatggaaaatgcttgttgaaatgagctggctcctttcagtgtctactcttaggttatgtgcattagcattgcattatttgtgctgggcttcaaggtcacctaattcttcagcccactctgcctagagctgtactcctgctcatctgacagcagatctttgataacttgatgttgattgtcccttgcatatggtcagtgcagggtgagtgatcttttcagaggcttgtgccagctcctctggcttgcacacctgtcttaccactctatatgccttacagatgacatgggtgaaaatgtgcaagaaacagatatgaaggaattaatgcttctttcattggccttttttgaaagtctgagactggatattttttgaaagtctgagactagatamtattttggtaacaagctatgtctgttagccttccaaaggacaaactgtcttcttgattccagtttccttagtgcattcttagaccacggcttgaatatgcagctagcttcagaagcacctttccttccctgttgcattgaccctctgggtagaagctacctcacgaactgcacatctacactcaggccacaggccactgccctctgtaatgtgctgagatttgttgttgtttgacctgtttgtcctactgtagaaaatgttacataataatcaatgatagcccatttcttttaaaattatgaagtgtttcagc

SEQ ID NO: 2602 - DNA, 632 bp, Homo sapiens
tttgcccttttgaggctattttctagattttgtaggtgtgckttattgctttttaacctttctttgtctattccacactgatgagtagggaatgcaagcatgctgaaggcaggatggttcaaacaagagtccaaggctgaccaggtttttttttcagctttctctcataatgtcactaattaggtaagtcattattctcttgaaacgtctgatgggaagctgtactttcctaaggagtgagaattcctactgctttatagaaatgctcatagaaagtacttagacataatgagttggaatgcacaatcggaatatggaaaagcaaaattatattttatttaattctgaaacaggaggctgaatagtataggtttaggtgcatggatttcataggtggcagacctgttttgaattctagatccactagttgttatctgatctgtgtgttcgtaggaaatttatatagctctctgagacacagttacttcatccgaaaaatgaagataagaatatcccccttttagtgttgtgaaatttatataaaagggggcatattatgaaacaaatccagacttaaccatttcaggtgagaaatctgacaactagctttctaactggggtacacactgttg

SEQ ID NO: 2603 - DNA, 632 bp, Homo sapiens
tttgcccttttgaggctattttctagattttgtaggtgtgcgttattgctttttaacctttctttgtctattccacactgatgagtagggaatgcaarcatgctgaaggcaggatggttcaaacaagagtccaaggctgaccaggtttttttttcagctttctctcataatgtcactaattaggtaagtcattattctcttgaaacgtctgatgggaagctgtactttcctaaggagtgagaattcctactgctttatagaaatgctcatagaaagtacttagacataatgagttggaatgcacaatcggaatatggaaaagcaaaattatattttatttaattctgaaacaggaggctgaatagtataggtttaggtgcatggatttcataggtggcagacctgttttgaattctagatccactagttgttatctgatctgtgtgttcgtaggaaatttatatagctctctgagacacagttacttcatccgaaaaatgaagataagaatatcccccttttagtgttgtgaaatttatataaaagggggcatattatgaaacaaatccagacttaaccatttcaggtgagaaatctgacaactagctttctaactggggtacacactgttg

SEQ ID NO: 2604 - DNA, 632 bp, Homo sapiens
tttgcccttttgaggctattttctagattttgtaggtgtgcgttattgctttttaacctttctttgtctattccacactgatgagtagggaatgcaagcatgctgaaggcaggatggttcaaacaagagtccaaggctgaccaggtttttttttcagctttctctcataatgtcactaattaggtaagtcattattctcttgaaacgtctgatgggaagctgtactttcctaaggagtgagaattcctactgctttatrgaaatgctcatagaaagtacttagacataatgagttggaatgcacaatcggaatatggaaaagcaaaattatattttatttaattctgaaacaggaggctgaatagtataggtttaggtgcatggatttcataggtggcagacctgttttgaattctagatccactagttgttatctgatctgtgtgttcgtaggaaatttatatagctctctgagacacagttacttcatccgaaaaatgaagataagaatatcccccttttagtgttgtgaaatttatataaaagggggcatattatgaaacaaatccagacttaaccatttcaggtgagaaatctgacaactagctttctaactggggtacacactgttg

SEQ ID NO: 2605 - DNA, 632 bp, Homo sapiens
tttgcccttttgaggctattttctagattttgtaggtgtgcgttattgctttttaacctttctttgtctattccacactgatgagtagggaatgcaagcatgctgaaggcaggatggttcaaacaagagtccaaggctgaccaggtttttttttcagctttctctcataatgtcactaattaggtaagtcattattctcttgaaacgtctgatgggaagctgtactttcctaaggagtgagaattcctactgctttatagaaatgctcatagaaagtacttagacataatgagttggaatgcacaatcggaatakggaaaagcaaaattatattttatttaattctgaaacaggaggctgaatagtataggtttaggtgcatggatttcataggtggcagacctgttttgaattctagatccactagttgttatctgatctgtgtgttcgtaggaaatttatatagctctctgagacacagttacttcatccgaaaaatgaagataagaatatcccccttttagtgttgtgaaatttatataaaagggggcatattatgaaacaaatccagacttaaccatttcaggtgagaaatctgacaactagctttctaactggggtacacactgttg

SEQ ID NO: 2606 - DNA, 632 bp, Homo sapiens
tttgcccttttgaggctattttctagattttgtaggtgtgcgttattgctttttaacctttctttgtctattccacactgatgagtagggaatgcaagcatgctgaaggcaggatggttcaaacaagagtccaaggctgaccaggtttttttttcagctttctctcataatgtcactaattaggtaagtcattattctcttgaaacgtctgatgggaagctgtactttcctaaggagtgagaattcctactgctttatagaaatgctcatagaaagtacttagacataatgagttggaatgcacaatcggaatatggaaaagcaaaattatattttatttaattctgaaacaggaggctgaatagtataggtttaggtgcatggatttcataggtggcagacctgttttgaattctagatccactagttgttatctgatctgtgtgttcgtaggaaatttatatagctctctgagacacagttacttcatccgaaaaatgaagataagaatatcccccttttagtgttgtgaaatttatataaaagggggcatattatgaarcaaatccagacttaaccatttcaggtgagaaatctgacaactagctttctaactggggtacacactgttg

SEQ ID NO: 2607 - DNA, 983 bp, Homo sapiens
aaataaaacttaaaaagtaacagtacattaaaaagtttcaaacattaaaaaaatccacatgcacgtactcttttttttttttttttggcaataggtgtgggggtgcattttaaacatttatttaaatgctgaccctcaaagaatattctgatggccttaacagctgaccktaaccgctctcaactgatgtgggtattcactaaatagaccgcaggctatttaatgacttgatgactcagtttctctgtcaataaaattatgtcagtaattttacctaccccatagggctatttgcaatttgccacaaattttagggatgaaaggctgtaaatcactactggtgttattatttacttaacagctagagttcaattctcatcaacatgaacctcattaaccctggacttggatggttttgccagataaaatccttccaaatcatggggtctaaaaagaacctgtgcttctttttacgatgaagattgaaaaaatatctactagtgttaaggtaaaatctgaattgtatttatttattcactattaatgggctcatacatgattattttgacttttaatatggtatcctttatacatgctgaatttggtagcaaatacattttggcttaaacaaattagggattttttttttccttctctttatgaataaagaccagaaatactagtgtggtagctccaaaagtttattaaagacttaggccttttccatccttctgctctctcatctgtagtatctgagcttttatcttcaagataaaagatatttgcagaatctccagccactgttcctatgtttcagacaggaagaggaagagcaaggggcagaaaggggtgagttctagtcttcgtcatcttttaaggagtttcttggacatgttagtcaatgacctctgcttgcatttcattggccagaagttgactctgcatacctagctgcaagggaagctacaaaatgtcaaatcaac

SEQ ID NO: 2608 - DNA, 983 bp, Homo sapiens
aaataaaacttaaaaagtaacagtacattaaaaagtttcaaacattaaaaaaatccacatgcacgtactcttttttttttttttttggcaataggtgtgggggtgcattttaaacatttatttaaatgctgaccctcaaagaatattctgatggccttaacagctgaccgtaaycgctctcaactgatgtgggtattcactaaatagaccgcaggctatttaatgacttgatgactcagtttctctgtcaataaaattatgtcagtaattttacctaccccatagggctatttgcaatttgccacaaattttagggatgaaaggctgtaaatcactactggtgttattatttacttaacagctagagttcaattctcatcaacatgaacctcattaaccctggacttggatggttttgccagataaaatccttccaaatcatggggtctaaaaagaacctgtgcttctttttacgatgaagattgaaaaaatatctactagtgttaaggtaaaatctgaattgtatttatttattcactattaatgggctcatacatgattattttgacttttaatatggtatcctttatacatgctgaatttggtagcaaatacattttggcttaaacaaattagggattttttttttccttctctttatgaataaagaccagaaatactagtgtggtagctccaaaagtttattaaagacttaggccttttccatccttctgctctctcatctgtagtatctgagcttttatcttcaagataaaagatatttgcagaatctccagccactgttcctatgtttcagacaggaagaggaagagcaaggggcagaaaggggtgagttctagtcttcgtcatcttttaaggagtttcttggacatgttagtcaatgacctctgcttgcatttcattggccagaagttgactctgcatacctagctgcaagggaagctacaaaatgtcaaatcaac

SEQ ID NO: 2609 - DNA, 1240 bp, Homo sapiens
tttctgcatctctcagattgacttcctccacatagctggaggtgtggccactggcagtgtcatgccgcaccacatctcacaacttcaggaccaatgagggatgcgtttctctcccatggcccagtttgaaaaatccaaggggaaagtccttataggccttgtggaagtaatatatccacccttggaccaatcattgtgtgctataattgataactattactagtaccacatggttgaagttgggagaggagcaacttcctaacagaaagggacagtcatactcaaacaagaaaaggatatttggacatctgtactgtgtcctttacagatcatatagtgtagccatgtgtatggttagttgatgcaataacatattactatctttgggttatcasttccttgcatttataaagcagttcatgatttccagagacttttcttaactttatctcatttaaacctgtatcactctgtgaattaggtcaggcatccagctatttgggctcaggggaggtgtagtgatttgtccaagaccatctgttgaaatacttagtttggatcattcttgctacctttgatctattcactcagagaaaataagcatcaatccaccaatgccattctaggaatctgttctgagttaatattcacatatgtgtagcattgttcattgtagcaaaaaattagtcaccttcagggttcatcaatagaaaagtggctacataatttatagtacatccatttgatgaaacactgtgcatatgtactaatatggaaagaccgccaatatatttttaaatgaaaaagaaagttgcaaaacaatgaataaaacttaatctcatttatgtaaaagaaaaaacaaaccctacgtatgtgaagaaatatattgaaaaggactggaagaatagactttataagtagcggccaatgttggggagggaagtaaaaaacagatggaaacttggaggtcctttgtattttactctgtgtagttatgtagtgcctgaatttttaaaaggatgtatccacatactacttacataataaaaagcaaacagaaaaaatccaaagcatcccccagggaacccattgggctgggatgaaatttctctaggtctctgactgtgtcatttaaaaccttgtgcatcccttatgggttgggtctgaccccattcagttttgagcaaagttcttataaaacatccatggatacatgccttctaagtatctactacatgca

SEQ ID NO: 2610 - DNA, 570 bp, Homo sapiens
  misc_feature (1)...(570): n = A,T,C or G
ggatgaggaaatagattagcacagcctttggagcacaggagaaggagagatatgaatttgattacagacattagtgaaatataaaaacataaaattactgaatgtatagggtattgacacaacaaagattcactcaaatttacttttcacatctctatttctggctagtttgcatgactgactagtgggcatctgctgtggtttgaatatccccnccaaaagtcaagttgaaatctaactgccattgtaagagtatttagaggtgagamctttaagaggtgattatcatgagggctctgcccttgtgaagggataactaatgtcattactgaggtagtagggttgacatgtcaggggggttccttataaaagaatgagttcagcccccttctctatttctgccctctcatcttctgccatgggaggatgcagcangaaggccttcaccaaatgccagcaccttgacctgaaacttctcaccaatagaactgtgagactgtgagaaaaaaaattnctttttctttctttcttttattaagacagggtctcattctgtcacccaggtctgga

SEQ ID NO: 2611 - DNA, 627 bp, Homo sapiens
  misc_feature (1)...(627): n = A,T,C or G
aaggttgaagaatgtgtgtattagagaatataatctctactgtcctttctacactatggatatctgtttctattcctgtattattataggtgcagggcaaattcctacttcacagatttgcacccaattactaatatttcaaaaatctatcatttttataatttaattctaaaaagttcttttttctgaaataattacagtaaaatccttttacaatacatttaaaatacttatattgttgttttataagcttataactttggttaagtagcctaagttttctaaatttcagggtatacatgcctctcaaaatcatcctgaggatcgaatgataatatacctgaccattttgttaacttttaacctaaaaacrtaaagcatgacttttatatttttattttaatcctttttatattctatttcatttagctctatgtctttcacacacatctttgttgggtcacagaatcttcagtaccactaaattgctaataaggcagcataaattcatttcatttacttagcacagtgcctggaacatagtatgtgttgttcttgctaggatggccaccgttgttgnctactactattnatattaccatgntatttactgatgtattttcacat

SEQ ID NO: 2612 - DNA, 627 bp, Homo sapiens
  misc_feature (1)...(627): n = A,T,C or G
aaggttgaagaatgtgtgtattagagaatataatctctactgtcctttctacactatggatatctgtttctattcctgtattattataggtgcagggcaaattcctacttcacagatttgcacccaattactaatatttcaaaaatctatcatttttataatttaattctaaaaagttcttttttctgaaataattacagtaaaatccttttacaatacatttaaaatacttatattgttgttttataagcttataactttggttaagtagcctaagttttctaaatttcagggtatacatgcctctcaaaatcatcctgaggatcgaatgataatatacctgaccattttgttaacttttaacctaaaaacgtaaagcatgacttttatatttttattttaatcctttttatattctatttcatttagctctatgtctttcacacacatctttgttgggtcacagaatcttcagtaccrctaaattgctaataaggcagcataaattcatttcatttacttagcacagtgcctggaacatagtatgtgttgttcttgctaggatggccaccgttgttgnctactactattnatattaccatgntatttactgatgtattttcacat

SEQ ID NO: 2613 - DNA, 2148 bp, Homo sapiens
tgcatccctgcccaccccggacatgggctcacacataagaaagcccagccaggcacatgttccagaaggcaccctttgttcagagctgggcattcctttggtgtggggaaaggactgtatgatttcactggcatttccatatcagagaggaattcgactagaaagcgttgcatttgagctgtatgaggggaccactccagaagcaattttagaccagttatttgtcttttttgaggcttagatgctcatttgcacaaagggtacaaaatgaatagcagtaacagttaggaaacaggtgtggctattataacaagtcaaaataattgtggcttaaaagaagaaggcatttatttctctctcatgctagtctgaacataatcagtctagagctgagaggatggctccacagtctcgagaccagactcctcctggcctgttctgcatcttcaacactcagctttcatcttgtggctacattgtcttttctcaactcttgcctcacgttcaccttccagccagagggaaaggagaaggggagggagaaggcacaatccttccttatgggcataaacctcaagttgtttacaccttttctgttcacatccaatgagctagcacttagtcacatggccaccacaatctgtaagacaagctggaagatgtactctttagctgggataccatggacccagttaaaactcagtacttatttcattaacaaagcaaggaagaaggcatactcaagaacagccaacaattacccttaaacttccctgtgatcttctgctaaaatactacaggcagaatgtctcgcataaagtcaatgttcaatgctaattgttaacggtgttttaataagcaaaaatttaagtcagtcaatttgatttccttcttgataaagagataaaagaaaactataccttcacacasagacttacaataagggtcagattataaacgagtgacattaggagataaagtgacttgcttgtattggcctcctggacctgctcagttctgggtactgaaggctttatccatgggcccaggcttgcccagtgcctcaactaatcttaatgaggatttctctggcagggagtcttacagctctgtgttcagaatctggcatgtcttgggtgagtccaaattgcagctcccttaacactctattcatttttccaactcatgcatctgagcctctgtaccacttgttcccctcctccacttgtccaaatggaccttatgatcaagcccacccaaacattacacaagggaggtgacacacaactcttgcatatgtggcaattctgttattctttagagccatctgtctttcatgctctgatcccctatcaagttcaaaggaaagaaaggaaggagacaatcagaagctgaggtggacggacactgtgccagagagagatgtgccaggatagaagccaagaaaataagaacacatttagggcagtatgattttgcagtagtgagtggtcacacaacagtcctctgtaaacttcaggtcacaatatatgaaaagtccaccacattgaaggggaggactaagtggagtgggaggcaggaggaagttgattcccacatcattgcattctcaaatgattctgacactcagtaggacatccaagaaggatatacagtagtaaccccttacctgtcatctcattcctgtggtttcagttacctgtggtcaaccgtggtctgaaaatattaaatggaaaattccgacataaacaattcatacgttttaaactgtgtgccctccctccccatcttacccaggaggttaatcctctctttgtccagcgtcttcatgctatctaccctccctgcctgtgatttacttagtagatttcttggttaacagatctgttgtcatgatagcagagtgcttgtgttcaagggacccttatgttacttcataaaggtcctaaccacaagagtagtgatgcaaggcaatttggatataccaaaaagaaaccatagtcttctttacatgaaaaggaggaggttctcaacttaataagaaaaaaagaattgtatgctgaagttgctaaaacctacagtaaaaacagacctatctgttaaattgtggagaggaaaaaaaaaatgtgtgctagttttgctgttgcc

SEQ ID NO: 2614 - DNA, 2148 bp, Homo sapiens
tgcatccctgcccaccccggacatgggctcacacataagaaagcccagccaggcacatgttccagaaggcaccctttgttcagagctgggcattcctttggtgtggggaaaggactgtatgatttcactggcatttccatatcagagaggaattcgactagaaagcgttgcatttgagctgtatgaggggaccactccagaagcaattttagaccagttatttgtcttttttgaggcttagatgctcatttgcacaaagggtacaaaatgaatagcagtaacagttaggaaacaggtgtggctattataacaagtcaaaataattgtggcttaaaagaagaaggcatttatttctctctcatgctagtctgaacataatcagtctagagctgagaggatggctccacagtctcgagaccagactcctcctggcctgttctgcatcttcaacactcagctttcatcttgtggctacattgtcttttctcaactcttgcctcacgttcaccttccagccagagggaaaggagaaggggagggagaaggcacaatccttccttatgggcataaacctcaagttgtttacaccttttctgttcacatccaatgagctagcacttagtcacatggccaccacaatctgtaagacaagctggaagatgtactctttagctgggataccatggacccagttaaaactcagtacttatttcattaacaaagcaaggaagaaggcatactcaagaacagccaacaattacccttaaacttccctgtgatcttctgctaaaatactacaggcagaatgtctcgcataaagtcaatgttcaatgctaattgttaacggtgttttaataagcaaaaatttaagtcagtcaatttgatttccttcttgataaagagataaaagaaaactataccttcacacagagacttacaataagggtcagattataaacgagtgacattaggagawaaagtgacttgcttgtattggcctcctggacctgctcagttctgggtactgaaggctttatccatgggcccaggcttgcccagtgcctcaactaatcttaatgaggatttctctggcagggagtcttacagctctgtgttcagaatctggcatgtcttgggtgagtccaaattgcagctcccttaacactctattcatttttccaactcatgcatctgagcctctgtaccacttgttcccctcctccacttgtccaaatggaccttatgatcaagcccacccaaacattacacaagggaggtgacacacaactcttgcatatgtggcaattctgttattctttagagccatctgtctttcatgctctgatcccctatcaagttcaaaggaaagaaaggaaggagacaatcagaagctgaggtggacggacactgtgccagagagagatgtgccaggatagaagccaagaaaataagaacacatttagggcagtatgattttgcagtagtgagtggtcacacaacagtcctctgtaaacttcaggtcacaatatatgaaaagtccaccacattgaaggggaggactaagtggagtgggaggcaggaggaagttgattcccacatcattgcattctcaaatgattctgacactcagtaggacatccaagaaggatatacagtagtaaccccttacctgtcatctcattcctgtggtttcagttacctgtggtcaaccgtggtctgaaaatattaaatggaaaattccgacataaacaattcatacgttttaaactgtgtgccctccctccccatcttacccaggaggttaatcctctctttgtccagcgtcttcatgctatctaccctccctgcctgtgatttacttagtagatttcttggttaacagatctgttgtcatgatagcagagtgcttgtgttcaagggacccttatgttacttcataaaggtcctaaccacaagagtagtgatgcaaggcaatttggatataccaaaaagaaaccatagtcttctttacatgaaaaggaggaggttctcaacttaataagaaaaaaagaattgtatgctgaagttgctaaaacctacagtaaaaacagacctatctgttaaattgtggagaggaaaaaaaaaatgtgtgctagttttgctgttgcc

SEQ ID NO: 2615 - DNA, 656 bp, Homo sapiens
tctgttccatttcctggaaaggcaatttccagtgctttctgtgacacccacgccttctccacaagcccgcaccctttactctttcagcaggtggctctgcctttcatctcaatgacagccatccagaactttcagaatgaattcacttgttttggcagacccaaggtccagccccagtatgagcctggagaccctgacactcacaaggttgttaacagcttttctcataagaaaaaatgtgttcaccaacctyagatattgtcgttattctcaagtcagtcacacacaagtctgtgtgtgccatttgaagagataaatacatagacacacacacacacgcacacacacacaccccaaaacacagtgcagcattgagagagaatctgtaattgtttgcagttccagagggggagaccagtctttctaggcagaatgcttgcttgctctttcagtgctctcctagtgccttgagtgacatgacaaagctgtagttagatgtcactataaaccagccccaaattatacaggagtcatgattaactatgattgcaggcctaaggcaggtaataaaggggtcatgaagggcttgggtgtgtcttgttgacaaatccctctttgtgccccctttcatctgtgtgatcagcctgggctccagg

SEQ ID NO: 2616 - DNA, 1138 bp, Homo sapiens
attttgctcttgagctttcactatragtacatttataatgatgataagtaggtcttcttttaagtcacttataatttaaatatattaatatttttgggcatgtagtttttcaaaacttttcgatcattaaaactttaaattcttatgcagaataatttacaatctactataactctacagattcttcattgcagatgagactataagacttttctagtttgcactttaccaaatatttgatattacatttaaccaaacctataaggagaaggagaaaagcacagaagataaaggcaatggttggagctaaggggaaagtagagggaggtgaaggaggagaagaacaagcagaaggaggaggaaagaaacctgtagctacaacagcataacagtagtctagctagactatgagagcctcaagaatggatccttcttctcttcttttctttgaatttctggaatttggggcaatgccaggcacagtgtaggttagcaatgaatgcttgctaaaccaacctaaactgagagaatgacaaaggttactactgaagtaaacaatgccttcaccagtttttccaccttctggaggctttatagagaagaattaagcaaaataattttttaaggttcatttgagttaaaaattactctgaaatagtgtcaaataaagggtagtgctacctatagggtaaaagaaaatattaattgtaataatactaagaaagacttggagattgtgaacttgggagaatcatgataatatttccgtaattctaaatgtaaagcaaactgtaatgttatatacatatgtcctatttctggatcaaagtcacatacaaaaataattgataacctaatgtttaaggcaaagtaaatttaatttttttaggtttttaatgccaatttttgaggtttgtgaaggtaaggagattcccagccacccaccctgccacatacatccttgtttgtaatgcacaattaatgatggaaatctatgtcaaaaattgtggtgtgcttggctctggcacctctattacaacacttgctacaatcatctggttatttattaatctccttcaccctcttagaaacttgtctgcttttcacacttatttgtttatttcatgtgttcccatgc

SEQ ID NO: 2617 - DNA, 1138 bp, Homo sapiens
attttgctcttgagctttcactatgagtacatttataatgatgataagtaggtcttcttttaagtcacttataatttaaatatattaayatttttgggcatgtagtttttcaaaacttttcgatcattaaaactttaaattcttatgcagaataatttacaatctactataactctacagattcttcattgcagatgagactataagacttttctagtttgcactttaccaaatatttgatattacatttaaccaaacctataaggagaaggagaaaagcacagaagataaaggcaatggttggagctaaggggaaagtagagggaggtgaaggaggagaagaacaagcagaaggaggaggaaagaaacctgtagctacaacagcataacagtagtctagctagactatgagagcctcaagaatggatccttcttctcttcttttctttgaatttctggaatttggggcaatgccaggcacagtgtaggttagcaatgaatgcttgctaaaccaacctaaactgagagaatgacaaaggttactactgaagtaaacaatgccttcaccagtttttccaccttctggaggctttatagagaagaattaagcaaaataattttttaaggttcatttgagttaaaaattactctgaaatagtgtcaaataaagggtagtgctacctatagggtaaaagaaaatattaattgtaataatactaagaaagacttggagattgtgaacttgggagaatcatgataatatttccgtaattctaaatgtaaagcaaactgtaatgttatatacatatgtcctatttctggatcaaagtcacatacaaaaataattgataacctaatgtttaaggcaaagtaaatttaatttttttaggtttttaatgccaatttttgaggtttgtgaaggtaaggagattcccagccacccaccctgccacatacatccttgtttgtaatgcacaattaatgatggaaatctatgtcaaaaattgtggtgtgcttggctctggcacctctattacaacacttgctacaatcatctggttatttattaatctccttcaccctcttagaaacttgtctgcttttcacacttatttgtttatttcatgtgttcccatgc

SEQ ID NO: 2618 - DNA, 1138 bp, Homo sapiens
attttgctcttgagctttcactatgagtacatttataatgatgataagtaggtcttcttttaagtcacttataatttaaatatattaatatttttgggcatgtagtttttcaaaacttttcgatcattaaaactttaaattcttatgcagaataatttacaatctactataactctacagattcttcattgcagatgagactataagacttttctagtttgcactttaccaaatatttgatattacatttaaccaaacctataaggagaaggagaaaagcacagaagataaaggcaatggttggagctaaggggaaagtagagggaggtgaaggaggagaagaacaagcagaaggaggaggaaagaaacctgtagytacaacagcataacagtagtctagctagactatgagagcctcaagaatggatccttcttctcttcttttctttgaatttctggaatttggggcaatgccaggcacagtgtaggttagcaatgaatgcttgctaaaccaacctaaactgagagaatgacaaaggttactactgaagtaaacaatgccttcaccagtttttccaccttctggaggctttatagagaagaattaagcaaaataattttttaaggttcatttgagttaaaaattactctgaaatagtgtcaaataaagggtagtgctacctatagggtaaaagaaaatattaattgtaataatactaagaaagacttggagattgtgaacttgggagaatcatgataatatttccgtaattctaaatgtaaagcaaactgtaatgttatatacatatgtcctatttctggatcaaagtcacatacaaaaataattgataacctaatgtttaaggcaaagtaaatttaatttttttaggtttttaatgccaatttttgaggtttgtgaaggtaaggagattcccagccacccaccctgccacatacatccttgtttgtaatgcacaattaatgatggaaatctatgtcaaaaattgtggtgtgcttggctctggcacctctattacaacacttgctacaatcatctggttatttattaatctccttcaccctcttagaaacttgtctgcttttcacacttatttgtttatttcatgtgttcccatgc

SEQ ID NO: 2619 - DNA, 1138 bp, Homo sapiens
attttgctcttgagctttcactatgagtacatttataatgatgataagtaggtcttcttttaagtcacttataatttaaatatattaatatttttgggcatgtagtttttcaaaacttttcgatcattaaaactttaaattcttatgcagaataatttacaatctactataactctacagattcttcattgcagatgagactataagacttttctagtttgcactttaccaaatatttgatattacatttaaccaaacctataaggagaaggagaaaagcacagaagataaaggcaatggttggagctaaggggaaagtagagggaggtgaaggaggagaagaacaagcagaaggaggaggaaagaaacctgtagctacaacagcataacagtagtctagctagactatgagagcctcaagaatggatccttcttctcttcttttctttgaatttctggaatttggggcaatgccaggcacagtgtaggttagcaatgaatgcttgctaaaccaacctaaactgagagaatgacaaaggttactactgaagtaaacaatgccttcaccagtttttccaccttctggaggctttatagagaagaattaagcaaaataattttttaaggttcatttgagttaaaaattactctgaaatagtgtcaaataaagggtagtgctacctatagggtaaaagaaaatattaattgtaataatactaagaaagacttggagattrtgaacttgggagaatcatgataatatttccgtaattctaaatgtaaagcaaactgtaatgttatatacatatgtcctatttctggatcaaagtcacatacaaaaataattgataacctaatgtttaaggcaaagtaaatttaatttttttaggtttttaatgccaatttttgaggtttgtgaaggtaaggagattcccagccacccaccctgccacatacatccttgtttgtaatgcacaattaatgatggaaatctatgtcaaaaattgtggtgtgcttggctctggcacctctattacaacacttgctacaatcatctggttatttattaatctccttcaccctcttagaaacttgtctgcttttcacacttatttgtttatttcatgtgttcccatgc

SEQ ID NO: 2620 - DNA, 1138 bp, Homo sapiens
attttgctcttgagctttcactatgagtacatttataatgatgataagtaggtcttcttttaagtcacttataatttaaatatattaatatttttgggcatgtagtttttcaaaacttttcgatcattaaaactttaaattcttatgcagaataatttacaatctactataactctacagattcttcattgcagatgagactataagacttttctagtttgcactttaccaaatatttgatattacatttaaccaaacctataaggagaaggagaaaagcacagaagataaaggcaatggttggagctaaggggaaagtagagggaggtgaaggaggagaagaacaagcagaaggaggaggaaagaaacctgtagctacaacagcataacagtagtctagctagactatgagagcctcaagaatggatccttcttctcttcttttctttgaatttctggaatttggggcaatgccaggcacagtgtaggttagcaatgaatgcttgctaaaccaacctaaactgagagaatgacaaaggttactactgaagtaaacaatgccttcaccagtttttccaccttctggaggctttatagagaagaattaagcaaaataattttttaaggttcatttgagttaaaaattactctgaaatagtgtcaaataaagggtagtgctacctatagggtaaaagaaaatattaattgtaataatactaagaaagacttggagattgtgaacttgggagaatcatgataatatttccgtaattctaaatgtaaagcaaactgtaatgttatatacatatgtcctatttctggatcaaagtcacatacaaaaataattgataacctaatgtttaaggcaragtaaatttaatttttttaggtttttaatgccaatttttgaggtttgtgaaggtaaggagattcccagccacccaccctgccacatacatccttgtttgtaatgcacaattaatgatggaaatctatgtcaaaaattgtggtgtgcttggctctggcacctctattacaacacttgctacaatcatctggttatttattaatctccttcaccctcttagaaacttgtctgcttttcacacttatttgtttatttcatgtgttcccatgc

SEQ ID NO: 2621 - DNA, 1138 bp, Homo sapiens
attttgctcttgagctttcactatgagtacatttataatgatgataagtaggtcttcttttaagtcacttataatttaaatatattaatatttttgggcatgtagtttttcaaaacttttcgatcattaaaactttaaattcttatgcagaataatttacaatctactataactctacagattcttcattgcagatgagactataagacttttctagtttgcactttaccaaatatttgatattacatttaaccaaacctataaggagaaggagaaaagcacagaagataaaggcaatggttggagctaaggggaaagtagagggaggtgaaggaggagaagaacaagcagaaggaggaggaaagaaacctgtagctacaacagcataacagtagtctagctagactatgagagcctcaagaatggatccttcttctcttcttttctttgaatttctggaatttggggcaatgccaggcacagtgtaggttagcaatgaatgcttgctaaaccaacctaaactgagagaatgacaaaggttactactgaagtaaacaatgccttcaccagtttttccaccttctggaggctttatagagaagaattaagcaaaataattttttaaggttcatttgagttaaaaattactctgaaatagtgtcaaataaagggtagtgctacctatagggtaaaagaaaatattaattgtaataatactaagaaagacttggagattgtgaacttgggagaatcatgataatatttccgtaattctaaatgtaaagcaaactgtaatgttatatacatatgtcctatttctggatcaaagtcacatacaaaaataattgataacctaatgtttaaggcaaagtaaatttaatttttttaggtttttaatgccaatttttgaggtttgtgaaggtaaggagattcccagccacccaccctgccacatacatccttstttgtaatgcacaattaatgatggaaatctatgtcaaaaattgtggtgtgcttggctctggcacctctattacaacacttgctacaatcatctggttatttattaatctccttcaccctcttagaaacttgtctgcttttcacacttatttgtttatttcatgtgttcccatgc

SEQ ID NO: 2622 - DNA, 576 bp, Homo sapiens
ttttgctttaaagaatcatatgtattttaaataaataaagagaaaaagcaccagtcttttctatttatctaaaaattcactatttccaacaggatcgtttcycttcaggaaatactaaaggaatttcctttagtatttcttataatacagatctactggcgatgaattctcttagccttctgaaatgtctttattttgccttcattcttgaaggataattttgctacatatggaattctgggttgacaattttttgtggcacattaaagatgttgtttcactctcttttggcctccattgtttatcagaaatcagcaaatattgcttttttgtttcgtgtgatgtgccatttttatttagctgatttcaatcgtttttcccttatttatgaattcagcgtataactatgatatctctaggtattactctgcttggagtatcatgagcttcttgaatcaaaagttttatacctttcatcatatttgggaatttatttctgctccatttactctcttccctcctagaagtaagagtaccaattactagagtaactagaactccaattactcctatgtt

SEQ ID NO: 2623 - DNA, 576 bp, Homo sapiens
ttttgctttaaagaatcatatgtattttaaataaataaagagaaaaagcaccagtcttttctatttatctaaaaattcactatttccaacaggatcgtttcccttcaggaaatactaaaggaatttcctttagtatttcttataatacagatctactggcgatgaattctcttagccttctgaaatgtctttattttgccttcattcttgaaggataattttgctacatatggaattctgggttgacaattttttgtggcacattaaagatgttgtttcactmtcttttggcctccattgtttatcagaaatcagcaaatattgcttttttgtttcgtgtgatgtgccatttttatttagctgatttcaatcgtttttcccttatttatgaattcagcgtataactatgatatctctaggtattactctgcttggagtatcatgagcttcttgaatcaaaagttttatacctttcatcatatttgggaatttatttctgctccatttactctcttccctcctagaagtaagagtaccaattactagagtaactagaactccaattactcctatgtt

SEQ ID NO: 2624 - DNA, 555 bp, Homo sapiens
cttgcagggctcagagagctgcagtgacggggtgtccgctgtgcctgccgccccccttgccatggactctacttgcagaacttcacagctgagaggctggccctgagattcccctttatgcctcccaaagcttgcgattgcttaattatacgctgctgygtaccaatttccactttctctcccggtgtgttttgactgataactttgacttaacctcctgatgccagaaactatgttggctactgctctggcggcaggaaaaggccggttccagggaaggctgaatgcctattgttctggatcattttgagaaaaaaaaagagataccttgaagaaagatgaagacaaaatatggaagggtgctgaatttacaaaaagcctaaggggaaaaaactcaaatgtccctcaggagtggaatgagtaaacaaatcatggcgtgttcacacaatggaatgctacctaccaataaaaaggaatgaactgcggatgcacacagaaacatgggtgaatccactaggcatcatgttgtgtaaaagaaagccaacttggccaggc

SEQ ID NO: 2625 - DNA, 618 bp, Homo sapiens
atgttcacagtctcaaagaaagcctgcctctccactgaggggtcaccctggtgccgttgaattatgactgggcatggagagtccccggggctgtggttagggtgctatcaatgccttctgacacctgtagagactgatggaggaagccagccgcactgtgaaagggggtggatgttctagtactttctacagagaagctgttttcacttgcaggctgccmagttggggctgggctgctctgtcaagtggagagaggccctcctcccagctgctggagggaagaccagccagagcttggttctaagctgtctctggacctgcagaagttctctaacctcctgtagcctcagcccctccagaagtgctcctttctggcacctgggagtaaaatggaaaaagcacagctccctgctctccatctttattttgttctgcagtttaaaaattgagatataaattacatagaataaaatctatatgtaaaaagcaagttttatttatgtatgaccccatgcaaccatcacccactccaggatccagagcatttctgccaccctagagaaggagagagtcccctcctgtcccatctagtaaacccctctcctcaggagtaaccat

SEQ ID NO: 2626 - DNA, 593 bp, Homo sapiens
ctgaaataaaattgatattcttgggttaataatggtattgaggttaggaaggcaattgtccttatttttgggagacccaactgaagtgtttaagggtaaaattttatttgtctgcaaacaagtgttttgccaaggtggcttggcaaaaaggaagtgtctgtatatattgaaaagaagagacacatggaacaggagtgccaagatgttcagccagcaaacctggccagggggcagagaggtgctcatcacaccaccctttyaacatgaaaaataagtgaattttttaagagtttaaaaaaagaactggggctctaaagtcagccagtcctggctcccacatcctggctgtgcaaccctgagcacatgatttttcttctccagcttcaactcttccactgcaaaatggggataataatggaatctacctcataagcttgttgggggaattaactgagataaatatatgtaaaatgcttaacatagtgcctgacacatattaaatgttcaatacattgtgttttaaaaataaaaataagaaaaaggagggaggagggagaaggaaagggggaaaggtagaagaaggaggagaaaaa

SEQ ID NO: 2627 - DNA, 1091 bp, Homo sapiens
tgcattgtgttcgttagctctgttttggggctatctggagaattaagttcctccatttgaaatgaatggtaagtttttcaacattggcttccttagcagtgtttgaggtaagcttgctgttactctttcattttctttcaaaatattttggtctttagtatactgttaaatgaagaactggtgtggtgctttcatctcaaaggacacaccatgacatatccagctgataaaactgatggggaacttttctaagaacagaggtttggctcaagattaatatataacaactctaactaaaatacgtagtggagtgaagtatcctttttcttctacatcttattggagttatacgttaaattgactgaaatttattgcacagtgacgatacaagtagagctgcattacctaattgatatttaagacgcaagaaatctttattttaaaaaatcrgtcatgaaaatagcagcaatgttatattttaattagtagaatataaacacccaagaatcgaaactatcttgctcagaagtgaaaaagtaaaattataggtgaatttaaaattgaggattagaccgctccattttgtaggcagttagactcttgacagaaaggttaaatttagaaatgatctctacatatgcaggtgcatgtttaaggcttcttctatctgaatttacatttgatacctaaggaaaccaggctgataaaaaagtgaaaacatccttacctacatattcatggatggataacaagttgtatgtagatgtgcctaagagagcagtgtaagtgtgtgtgtggaatgaaagaatgtgtgataaatgaaaaaataataaaattattttaaacataagggaggttttgcatgaacagacaatggtaatgctctaggaataactgaattctctgtgtctaccaaaaaacactgaactgacaaaaattgatttgctcttagaaaattctatttttggaattctgttctcagtattacatttttaatttataaatttcaaataaaacaatataataatttagaataatatttcctgagcaagatgatagtgtacacagataaccatagttttaccttccta

SEQ ID NO: 2628 - DNA, 1091 bp, Homo sapiens
tgcattgtgttcgttagctctgttttggggctatctggagaattaagttcctccatttgaaatgaatggtaagtttttcaacattggcttccttagcagtgtttgaggtaagcttgctgttactctttcattttctttcaaaatattttggtctttagtatactgttaaatgaagaactggtgtggtgctttcatctcaaaggacacaccatgacatatccagctgataaaactgatggggaacttttctaagaacagaggtttggctcaagattaatatataacaactctaactaaaatacgtagtggagtgaagtatcctttttcttctacatcttattggagttatacgttaaattgactgaaatttattgcacagtgacgatacaagtagagctgcattacctaattgatatttaagacgcaagaaatctttattttaaaaaatcagtcatgaaaatagcagcaatgttatattttaattagtagaatataaacacccaagaatcgaaactatcttgctcagaagtgaaaaagtaaaattataggtgaatttaaaattgaggattagaccgctccattttgtaggcagttagactcttgacagaaaggttaaatttagaaatgatctctacatatgcaggtgcatgtttaaggcttcttctatctgaatttmcatttgatacctaaggaaaccaggctgataaaaaagtgaaaacatccttacctacatattcatggatggataacaagttgtatgtagatgtgcctaagagagcagtgtaagtgtgtgtgtggaatgaaagaatgtgtgataaatgaaaaaataataaaattattttaaacataagggaggttttgcatgaacagacaatggtaatgctctaggaataactgaattctctgtgtctaccaaaaaacactgaactgacaaaaattgatttgctcttagaaaattctatttttggaattctgttctcagtattacatttttaatttataaatttcaaataaaacaatataataatttagaataatatttcctgagcaagatgatagtgtacacagataaccatagttttaccttccta

SEQ ID NO: 2629 - DNA, 1296 bp, Homo sapiens
tttgtaagaaatcggattgtttcttctctcagccttttggacaagatggagaaatactgagtggataatggttcagttaagttgcttcatagatagcccaagagctattccaggagagttgaaatccatgaggacagtgtccatttggatcagtgttgacagcctttttaaatcctaaacacctcctctttaaacattaatatctcattgtccaccctctactgttgagtctgtcttctgtgcttctccaccagacaagattctgccgagctttataccatctgttttttgtattgaaaaggaaattgcccggtgtagtggcttacgcctgtaatcccagctctttgggaggccaaggcaggcgtatgacctgaggtcaggagtttaataccagcctggctaacatggtgaaatcccgtttctactaaaaatacaaaaaattagctgggggtagtggcgcacgcctgtaatcccagctactcgggatgctgaggcaggagaatcacttgaacccaggaggtagaggttgcagtgagccaagatcgcaccattgcacctaagcttgggcgacaagagtgaaactccatctcaaaaaaataaataaataaaaataaaaaataaaaaggaaattgataggttcttcattttcatgaaaaaggatactgctgaatttgatgtttttgaattgctttccttcacatgcctgaaatgttgccaccccccttgtgtggttagcttggccagtaggaaggtctctaatgattccacttagcaattttttcagtgatstggatgaagatggcagggctgcttatcaaatttaacatgatatagcatagacagctgatattttggatggaaggatctgagttcaggaagttgtcagtgagttggaacaatggactaaaactaacaagataaaattaataagggcaatggagtcctcccttcagggtaaaatatctattgtgtgtgtcattataaactagaggagaccatgagccaaaaaaaaattctcaggtcttttttcttgtggactagggtttttcatttgttttcattcagagtctccatatgtaaccctaaaaaaaaatacacataatggaaatagctttgttaattttttaaaaatgcaaggcccaaatcaaaagaagtaataattttttttcttatttggaccacatcttaagtgttttcagttccgggtaccattttttgaggacactggccaaccagaaagaccctagagggccaccaccacagtattcagtgctcagttactgtttgttggatgca

SEQ ID NO: 2630 - DNA, 788 bp, Homo sapiens
agcctgatccctccagctttgttctttttgcttaggattgtcttggctacaggctcttttttggttccatatgaaatttaaagtagtttttttttttctaattctgtgaagaaagtcaatggtagcttgataggaatagcattgaatctataaattaccttgggcagtatggccattttaacaatattgattcttcctayccatgagcatggaatgtttttccatttgtttgtatcctcttttatttccttgagcagtggattgtagttctccttgaagaggtccttcacatcccttgtaagtttttgggcatctcttcctgggtgcctctcagcagctgcaggtttgtatcatatccattgaataaccttaatcaaaagtcttttttcccccaagtaattttggcaacaatccaagaatcaattctccatgtactgaaatgggcatgcaactatctataattcagtctcagtggctattgaagttagatatgctgattggttaagcctggatctactccactgctggaacttacatgaagaagacagtttcttactacatggattgagagtgggagcggtggttccctaaaggaaaagtgtgatgctgttgccagaatatgagaaagtaggtgcttaaaaggctataactacagcatcactatagtagccttataagtcaaggcgccaggagctaaaagggcagatactctttgtggatgtgccatgatgcacacattgggacaatgctgtgatgaatcagagtccatgtcttgtgaggcaaatcaa

SEQ ID NO: 2631 - DNA, 788 bp, Homo sapiens
agcctgatccctccagctttgttctttttgcttaggattgtcttggctacaggctcttttttggttccatatgaaatttaaagtagtttttttttttctaattctgtgaagaaagtcaatggtagcttgataggaatagcattgaatctataaattaccttgggcagtatggccattttaacaatattgattcttcctacccatgagcatggaatgtttttccatttgtttgtatcctctyttatttccttgagcagtggattgtagttctccttgaagaggtccttcacatcccttgtaagtttttgggcatctcttcctgggtgcctctcagcagctgcaggtttgtatcatatccattgaataaccttaatcaaaagtcttttttcccccaagtaattttggcaacaatccaagaatcaattctccatgtactgaaatgggcatgcaactatctataattcagtctcagtggctattgaagttagatatgctgattggttaagcctggatctactccactgctggaacttacatgaagaagacagtttcttactacatggattgagagtgggagcggtggttccctaaaggaaaagtgtgatgctgttgccagaatatgagaaagtaggtgcttaaaaggctataactacagcatcactatagtagccttataagtcaaggcgccaggagctaaaagggcagatactctttgtggatgtgccatgatgcacacattgggacaatgctgtgatgaatcagagtccatgtcttgtgaggcaaatcaa

SEQ ID NO: 2632 - DNA, 788 bp, Homo sapiens
agcctgatccctccagctttgttctttttgcttaggattgtcttggctacaggctcttttttggttccatatgaaatttaaagtagtttttttttttctaattctgtgaagaaagtcaatggtagcttgataggaatagcattgaatctataaattaccttgggcagtatggccattttaacaatattgattcttcctacccatgagcatggaatgtttttccatttgtttgtatcctcttttatttccttgagcagtggattgtagttctccttgaagaggtccttcacatcccttgtaagtttttgggcatctcttcctgggtgcctctcagcagctgcaggtttgtatcatatccattgaataaccttaatcaaaagtcttttttcccccaagtaattttggcaacaatccaagaatcaattctccatgtactgaaatgggcatgcaactatctatmattcagtctcagtggctattgaagttagatatgctgattggttaagcctggatctactccactgctggaacttacatgaagaagacagtttcttactacatggattgagagtgggagcggtggttccctaaaggaaaagtgtgatgctgttgccagaatatgagaaagtaggtgcttaaaaggctataactacagcatcactatagtagccttataagtcaaggcgccaggagctaaaagggcagatactctttgtggatgtgccatgatgcacacattgggacaatgctgtgatgaatcagagtccatgtcttgtgaggcaaatcaa

SEQ ID NO: 2633 - DNA, 1402 bp, Homo sapiens
tttatgagaaatcataccaggaaatccatcgcccctgggtgcacacttgaaatcatcttttgagagcttatcaaatcaaccccaagatggaaggccagcttgagggacccctcaagaatgaccagttgtaactctctatgacatcttttatggtcatttttctctgtaacttctgcggcctatcactttaaaatctgaaaatttaatccgagtggccataagaacatggaactgcatacatttggaaaatatgagacaatgaaaaattaagtttcattataaaccactaccaggaagaatggtttagactaggcttggcaaatcctggacatatagtgctccattcccccctcccataccattctcactgtcattgctaaagaccatgacacttttcaactcagaaggaactttggaatcttgaagatattactccaggcacactagcagttggttttamcccccaagatcaaacccttttcttttactttcttactttcttttctttctttcttttttaatttttttttttagagacaactctccctttgtcatccaagctatagtgcagtggtgccatcatggctcactgcagccccaacctcctgggctcaagtgatcctcccacctcagcctcccaagtagctgggaccacaggcacgtgccaccatgccctgctagtttttaaattttttctagagatgaggtctcactatggtgcccaggctgttctcaaactcctgacctcaagtgatcctcccacctcggcctcccaaagtgctgggattacaggtgcgagccacttggtccccttttctatctctagttggacagtaagtgagacagagaagagggctgatcaggaagcaaaaatattggtgttggctggtgccattggggaatatttcatgaagaaaggaacatgaattgggccttgaacgatttggagaggtggtgagagggcacagatcattccagacagggcagtggcatgggtggaacaggaatgatcatagcagatatctgttggggaggaacatgtgtgtggtgggggagaagaggaatacgagacaatgaaatacccaccttgctagggtgaagaggatccactgattgctaaatttagatgggctgagactgtaaagagcctcgggaacctcaagggctaactgcttcatgtcctcacatgcctgttgactacttttctcatgatgattaaacagcttaagaaaaagaaactcagtatcttgggcatggggtaatttcttatgcatgacaatggttttcagcattgagctaaacttccaggatatgccatttcggcaaccacatgatctttctctttaggagcaagcctcttttgcagtcaacatatcctggaaactttgttctttggataggc

SEQ ID NO: 2634 - DNA, 1085 bp, Homo sapiens
ttttcaagaagttttaaagtaatttattgcttaatattaggtaactatttgtaccactatatccaactgatattctaaataattgaaacaaatatttagctcatattgtccatataatgaataaaaacaaaaatattaggaactgataataaccctctacaatgtaatacatttatgggactctacatgaatgtgtgcattggtgtagagcatctctttgaagtttgtgacatatattagttcctatttttgtatgatttcaaaaatcttaagcagtactcagttctatgtgggatataaatgaacaaatattttaatttatctgactctgttccagatattcttcattgtattgtgttcagactaccaacatatttgttagcgttccacagttgctcatattaccagccttatgcacttgctcttgccactgtgtgcctttctgttaattaagggtggaatacaggtttttttttttgccctgttttggaattgtatttacagcacaacattatgacaatggtttaacatttctgaaagcctatattcatcagaagtatgcttcatcactttatgttaacaaagcgcaaggaaggtaaacgtttgatctggtacagataaatgatagaacagagagtctatctataaatgagagtccaaacgtttctattttctaaaacttaaatggcataagccatttttaatagtaatgccataagagatacaatgcgtgaagtcatatttttatttatccttggacattaaaaattgtgctggctgtatacttctcattttaatactcttatattttcatttagctatctgataccagcactctctgaaacaatgctaataccaaattaatgtaatagtctctagaattgtagaaaaataacaccatgagatagggacagtgcctatcttgctcattgttgattttctattccctaagccagtacatggtactgtggaaaagacagataaattttgattaacaagtaaataccaccaacctgtatrttaaaagatgtgagagagataaatgtcagtcaaaaacacagaaaaagttagaaagcaaattatca

SEQ ID NO: 2635 - DNA, 1131 bp, Homo sapiens
aaactaggcaactgaagtaactatccatcttgcttttagaataattgcattttaaatgttatctcagagcagaataaccctagcaattaaccaccttgctttgtgagcaagcagtgtctttgcaagcagtctgtcattgaagcagaactaaggaaataaaataattttcagaatactattttttttcctgaagyagtttgtcccaattaattggctgaatacaggatgttgaatgaaccaaagtgtttgtgtattttaatggactaaaaacatgattctgtttgcaccattttatattcctttcagcaaaaagagagttattgctgtcaactattttcataaaacttgtgtttttctgagtgttttagggaagatttgattatattttactcttaccagtcttgagaatcaggttaatatattattcccactcatctgaatgattcaaatttttttctttgtcttctctgaaaataaatgaatactaagttttgatcatcacttacatgacagtgattaaataggccaaacttgctgagacaaaacaaatgttccaactctgactatatgggcaccctggctgcttgagtttttttttttttttaattcattggtagcaccctccagctactccatgtcaggtgttttgtctaaaagtacaattctgaatcatggtccccaaagttaataactttgactttaaatgagctaataaatacattatattaaaaaccattgaaaggattgcttagggcaaattttaaaataagagttaaaagaaattaccttttgcctgctataacatataccaataataagtatttttaaaataagtcagtacataaaatgttcacattttctagagagaataaatattcaataaagtctaattcaataaaattaatatttgttattaattattgcttaatttgttatattttaaaatttcatattgattatttcacagtgagcaccaatttactgaaaaaattctctgttgaaatgttttaggaattaaaatgaagttaatagtccatcgagtcaaacataaactttcaaactgattgatgatttttttttttttactccaaaatgctctgatcataggaatatttaacttctaattttaac

SEQ ID NO: 2636 - DNA, 1131 bp, Homo sapiens
aaactaggcaactgaagtaactatccatcttgcttttagaataattgcattttaaatgttatctcagagcagaataaccctagcaattaaccaccttgctttgtgagcaagcagtgtctttgcaagcagtctgtcattgaagcagaactaaggaaataaaataattttcagaatactattttttttcctgaagcagtttgtcccaattaattggctgaatacaggatgytgaatgaaccaaagtgtttgtgtattttaatggactaaaaacatgattctgtttgcaccattttatattcctttcagcaaaaagagagttattgctgtcaactattttcataaaacttgtgtttttctgagtgttttagggaagatttgattatattttactcttaccagtcttgagaatcaggttaatatattattcccactcatctgaatgattcaaatttttttctttgtcttctctgaaaataaatgaatactaagttttgatcatcacttacatgacagtgattaaataggccaaacttgctgagacaaaacaaatgttccaactctgactatatgggcaccctggctgcttgagtttttttttttttttaattcattggtagcaccctccagctactccatgtcaggtgttttgtctaaaagtacaattctgaatcatggtccccaaagttaataactttgactttaaatgagctaataaatacattatattaaaaaccattgaaaggattgcttagggcaaattttaaaataagagttaaaagaaattaccttttgcctgctataacatataccaataataagtatttttaaaataagtcagtacataaaatgttcacattttctagagagaataaatattcaataaagtctaattcaataaaattaatatttgttattaattattgcttaatttgttatattttaaaatttcatattgattatttcacagtgagcaccaatttactgaaaaaattctctgttgaaatgttttaggaattaaaatgaagttaatagtccatcgagtcaaacataaactttcaaactgattgatgatttttttttttttactccaaaatgctctgatcataggaatatttaacttctaattttaac

SEQ ID NO: 2637 - DNA, 543 bp, Homo sapiens
cgcagccatcacttgggccatggagaccaagagagcttccctgtcccacacaggtatggaagcccagagctccaggatcaccacacctgcccaatcatgcagaaagaggtgtcgagagggaaacgatcatgacacggacgcccacggggtttstccctggactgggaagtcttctttgttgaagacgttgagccagactaagaagccgccatgcttctcagagacggggcagacacagcaaaagggaggacagagcagaggccagagcccaggcaggatacggggccatgccaccaccacgggcatccggggaggagtgtcagacgggtgactcggccaggaaggccagcctttgagtgacagagatgcttgccccatccccttgccggcttccttctccgtccctgcgtcgagctgtggctccatttctccatgagggagagggcgagaggcgtgagaaccatcctcttgaaggtctgcgggcaccctcctgcgggtggacaatgagcgcctgggaggccgttgtccttgcttggggagcgg

SEQ ID NO: 2638 - DNA, 1125 bp, Homo sapiens
catatgtctcaataatttacctcccacatggcattctttyttataaagctgctaagggatgggctccaccgcaatttaagtgataaaccaacatagaaatggtttaggggatttaactcaggttgcaagagaagggacctgccagcacagtaatgagtgggactccctggttaagtgcaatgaaacaggacgagggggaaactggcccatgtaggatcagtagggccaagggctatagaagggatgtttcaagaaaaggagggcatgcagacattgcatgatggagactgtccttctaatacagtttgaacctaaattagaaattggaacaaattatgtaacaaccaaataagacaacagagaaaacaaacaaaaatatcgtacaagaagagaatgcaatcgttatacccataagtctccactgtgactatcacctgtgtgatcacaattaaggaaacactgatattttctctcaaaactgtaatataactgggtttggagtttgggtgtaggagaattgctggtgtatgtagaatgcgggcaacaaatctaaattctgaacttacaaaatggaaattcactagacactatcccaaccagaaacaaagagaaacaataatacgcaaatctcattcagagatatagaagcaactatcagaataatagctaaatatcagaatcaatatttgaaagtggctgcttctaaagatggaccacatgatggaggactgctatttttctcccttgtagaatggtttgattttttaacctaagtgaatgtgtaattttcataaagccaaaaacaaagaaatatattttgcaagtgatgaagttagatttatactaataccctgagtagtttcttgaaaacatgtaagggttgttttcttctccatggtttacatcaatctctaattcccatttctttcattttagcataatatttccagcctagtgataaatagtaagaatgaaattaaagaaacagaaagaaaatattagatttcaatagtgtggtttttctgacctaaaatatgtgccatttttgaagcataataaatatgtgcaattatggaatatgcacttctatggaaaatgactacaggattgcttgcttacttgtag

SEQ ID NO: 2639 - DNA, 1125 bp, Homo sapiens
catatgtctcaataatttacctcccacatggcattctttcttataaagctgctaagggatgggctccaccgcaatttaagtgataaaccaacatagaaatggtttaggggatttaactcaggttgcaagagaagggacctgccagcacagtaatgagtgggactccctggttaagtgcaatgaaacaggacgagkgggaaactggcccatgtaggatcagtagggccaagggctatagaagggatgtttcaagaaaaggagggcatgcagacattgcatgatggagactgtccttctaatacagtttgaacctaaattagaaattggaacaaattatgtaacaaccaaataagacaacagagaaaacaaacaaaaatatcgtacaagaagagaatgcaatcgttatacccataagtctccactgtgactatcacctgtgtgatcacaattaaggaaacactgatattttctctcaaaactgtaatataactgggtttggagtttgggtgtaggagaattgctggtgtatgtagaatgcgggcaacaaatctaaattctgaacttacaaaatggaaattcactagacactatcccaaccagaaacaaagagaaacaataatacgcaaatctcattcagagatatagaagcaactatcagaataatagctaaatatcagaatcaatatttgaaagtggctgcttctaaagatggaccacatgatggaggactgctatttttctcccttgtagaatggtttgattttttaacctaagtgaatgtgtaattttcataaagccaaaaacaaagaaatatattttgcaagtgatgaagttagatttatactaataccctgagtagtttcttgaaaacatgtaagggttgttttcttctccatggtttacatcaatctctaattcccatttctttcattttagcataatatttccagcctagtgataaatagtaagaatgaaattaaagaaacagaaagaaaatattagatttcaatagtgtggtttttctgacctaaaatatgtgccatttttgaagcataataaatatgtgcaattatggaatatgcacttctatggaaaatgactacaggattgcttgcttacttgtag

SEQ ID NO: 2640 - DNA, 598 bp, Homo sapiens
tcaaacctccttctccattttcaacatcttgttacaccccatcctctgtggtacctactgcctctgggagatgggaggagaaaatgggcttctcatcagtattctcctcagagtactttaactttcttcttctgataagataattatcactscaagtctgccgtttgccttttgtgtgtgtataaactttcaaatttaagagtgcataataaaatgaacatatcttaagtatataacctgataaatatttcacaaacgattagattcatttaacaagctcccaggtcgagatacagagcatttccagcactgcagaaatctctcttgtgcccccacaaaggtaaccactgttctataaatcagtctgtttgtattcatggctttaattcaccaaggttactttgaatacccattcattaattaaaatgttaaacaatgctgggctcagcatgggcctggcaggaacaacctcccagtgctggaaggtgagcacggacttggaggctccctctccgggtctgtcctacagcagagtcagctggtcctcttcatgtggaacatctagcccatgtcaaaatgttctcagtttattgagttg

SEQ ID NO: 2641 - DNA, 575 bp, Homo sapiens
ttaaatcaaccttatgagatagatatttgcatctccattttactaataaactgaggctgggtgctatggctcacgtctgtaatcccagcactatgggagtccaaggcgagtggatcatttgaggtcaggagttcgagaccagcctggcaacatggtgaaactctgtctctactaaaaatacacacaaaaaaytagctgggtgtggtggcaggtgcctgtaatcctggctgctcgggaggctgagccatgagaatcgcttgagcccaggaggcagaggttgcagtgagccgagatcgcgccactgcattccagccagggtgacagagcgagactccatctcaaaaaaaagaaaaaaggaaaagaaaaaagaaaaaaacaaattcaaagaagttaaatacgttgcccaaagttgtacaacacagaactgaagccaagacttttatggacacagaaaaagttggttagtcctacagatggaaatttcatctcagtaggattatatagctatttcttttattaataaaaattttctattaagtgtaccagagccacttttcagctctgaggataaggaa

SEQ ID NO: 2642 - DNA, 1143 bp, Homo sapiens
atttggggaacatgttggagctggaacagacaaacctggctatggatcagatatgaggcgtgaaggagggacaggtatgaaaagcactcctaggcttctggcttgagtaactgggtgaagggagttgtcattgacaaagatgggaaacctcttctatggacatcaaacccctcttatagcacttaaagcctactctacctcattctccggtggtgccaatatctccctacggtcaacctcaaagtaaaagtcacttcctggttttggttaacaaactttcttcaccctcttccactgttattacttattcactgagtgaccatctgtatgcttgccgtgcccagagcaactgggtcatcgttttaacgtgtaaattagtgaaagagttctttttactctataaacctatagacccaggtagaggatctagatgtggctctcagaacaaatgcaattgctttaaaatgatctttctagaagaacagtcatgaaacattgaaatattaagttaaaacctaataagaattctgcattcagaaaggtaaaagaagtgacaggaaataaacaccgacttcagccattttttttcactaatgaactggactacacaatattttcctctcgaatttctttttcttaaaagaattccaactattcttttttttttttttttttttttgagacagcgtctcactcttttgcccaaactggagtgcagtgacgtgaacacagcccagctcactgcagcctcgacttcctgggctcaggtgatcctcccacctcagcctctcgagtccctggggctacaggcatgcaccaccatgcctggctaatttttttattattgttattttttgtagagacaaggcctatgttgccctgactggtcttcaactcctggcctccagtgattctcctaactcagcctcctaaattgttggggttacaggtgtgaaccgctgtgcctagacaatttaaactgttttgatgccatttggagtggacttattgtataaaaacawaagatgtgatcaatttcttcaaaatatactccttggaacacaaagatatcagaagtattttcagcatggagtttgtgaggacattcctaccctttcagtttgctcaatgtaatgcatgaaa

SEQ ID NO: 2643 - DNA, 1798 bp, Homo sapiens
tgcatgaaaaaaggaaagagtatgcaagaactggtgataggacgaatggctttcttcatgaaaaaatagactttacttgcattagataaaaaaataaacttagctggattaaagacatgaaaaataggagtctaaacctattcaaatagaaggacagggattgatttcctaaaccatacacagaaaacagttatggctggccgcagtggctcacacgtgtaatcccagcactggctgaggcgggtggattacttgaacccaagagtttgagaccagccgaggcaacatggtgaaaccccatctctacaaaaattacaaaacttagcagggtgtggtggcgtgtgcctgtagtcccagctacttggtggctgaggtgggaggatggtttgaacctgggaggtggaaggctgcagtgagctgtgattgtgccactgcactccagcctgggtgacagagtaagaacctgaaaaaaaaagacagtwagaaaagaacaaaacaaagaaagaaagagaaagaaggaaagaaagaaagaaagaaaatggatacagtgaagaaaatgattcataaaattgacatcaaaactaaaaacatctttaaaaaatccaaaacttcattacaaagaaagggctagtatccacaatatataacatctataaataaataattgataatagataattgacagaagaggacacccgaatgaaaattctcaatctcaatagtaataagggatatacaaattaaaactacataagatatcatttcatgttcagactggcaagaacttgagttggaccatactaagttttagccactacataaatagatacctcaaacactcctggaagggcacattgatataatcactttggagagtaatttggcaacatctaatgaggttgaaaatgtacctatctgaagagtcaacaaattccactcctagatatactccctatttgtataccacccaaaaactcttgcctatgtacacaaggagacaagtattctgttcactgcagcattgttataataacccaattgtcaccaagtaggcaaagaaataaacataataaatggtaaatggagtatccacagcaattaaaatgaaataactagatttataggcattaacatggatagatgttggaaacgtaattttgagcctgaaaaataagttgcagaatgtcacatacagtgatatgatttatatacattttagaagcaacaacatgccacaatatagtatttatgaatgcatataatatatattatgtaataaatataaaaacatggtttggacacacatcaaattcatgatacggttgcctatgggcagagagaaaggacataggactggcaaggagaatctatggaactccatagacattaacattaatatatgatttctttaagtaaaggatctgaggtaaataaatgtggggaaagattaacatgtgttaatttttgtatcaagtatatctcttgatttttttctgtattaaaatgttcatatacatagtgtctgacctccagaattaaatacttctatggtagaacagacagaaaatagactaaaatgtagagaagctgagtgatggctgacttttatcatgcaaccttggccagttctcttaaccaagagaatctcggttatctgatctgctgaatgaggacactgcaaaccttaaggggagtgggtatgtgttgagaacacagcacgtgctaggcatgaatcacattaacacaagagttgagctgtgagctaaaaactaaatagtatattgtaaattcatcttag

SEQ ID NO: 2644 - DNA, 1047 bp, Homo sapiens
ttaccactaatgccttcaatttgccttcatgttaccactagtacgtactagtcacttcttaagcacaggtaaaatttaaacccattctattaggcactggggatataaatagcagtcactgactacgtgtggtggctcatgtctgtaattccagtgctttgggaggctgaggtggaaggatcacttgagcccaggagttcaagaccagcctgggcaatacagaaagaccccatstctacaaaaaaaaacccacaaaaattagttgggtgtggtggcacatacctatagccccagctactcagaaggcagaggcaggacgatcacttgagcttaggagttcaagggtacagtgagctatgatggcgccactgcactccagcctggacaacagagccagatcctgtctcttaaaaaacaaaaaacaaacaaacaaacgaaaacataacaacagtctctgtcatttttaagcactatttgccaagcactattctaaaaattacataaattaataaatttaattttacagcaatatgagaagttagtagtacttacattttacacatggggaaactggagcacagagaaactaagtagattgtccaaggttacagagctagtaagtcaatggcaaagctgagatttgaacccaggcagtttggcttcagagtcgctggccataatcacttttctacatggtctctttaaacgcaatgaagggtgaagcctggttcctgctaccagggaccttagaatgagggagatgcgaaagaaacataaaaagatgaataaaatagcaagcagcaattatttatgcttctattttggtgcattgtccgtcttctcttggcagaagaggctgtcttcctctgctctgcctctgctgccgactctttctctccatcatatattctggatgccctcttccctgcaacctgagcccctgaactcatcctcctctgcctccactcagaccccattcccttagttaccaagctctcttctcttacaacaacaacaggcagcacttgggtgagtgtttcctctagg

SEQ ID NO: 2645 - DNA, 1047 bp, Homo sapiens
ttaccactaatgccttcaatttgccttcatgttaccactagtacgtactagtcacttcttaagcacaggtaaaatttaaacccattctattaggcactggggatataaatagcagtcactgactacgtgtggtggctcatgtctgtaattccagtgctttgggaggctgaggtggaaggatcacttgagcccaggagttcaagaccagcctgggcaatacagaaagaccccatctctacaaaaaaaamcccacaaaaattagttgggtgtggtggcacatacctatagccccagctactcagaaggcagaggcaggacgatcacttgagcttaggagttcaagggtacagtgagctatgatggcgccactgcactccagcctggacaacagagccagatcctgtctcttaaaaaacaaaaaacaaacaaacaaacgaaaacataacaacagtctctgtcatttttaagcactatttgccaagcactattctaaaaattacataaattaataaatttaattttacagcaatatgagaagttagtagtacttacattttacacatggggaaactggagcacagagaaactaagtagattgtccaaggttacagagctagtaagtcaatggcaaagctgagatttgaacccaggcagtttggcttcagagtcgctggccataatcacttttctacatggtctctttaaacgcaatgaagggtgaagcctggttcctgctaccagggaccttagaatgagggagatgcgaaagaaacataaaaagatgaataaaatagcaagcagcaattatttatgcttctattttggtgcattgtccgtcttctcttggcagaagaggctgtcttcctctgctctgcctctgctgccgactctttctctccatcatatattctggatgccctcttccctgcaacctgagcccctgaactcatcctcctctgcctccactcagaccccattcccttagttaccaagctctcttctcttacaacaacaacaggcagcacttgggtgagtgtttcctctagg

SEQ ID NO: 2646 - DNA, 1364 bp, Homo sapiens
tacaaaagtatgtcttagtaaagtcatgcaagcaaagattacattttgaaagaattctttacctataatgtttatttaagtcaacagattaaagatttaagagaacaaaattagctgtcattcggtaaattcaaattcctctttagcataataaccatccttgaacaccttcaacatttgacaaaagaattcagcagagtggttatattaccttgagttgaattacctgtaagcaaattgaaagtgaagaaaattaaattcatatgctatgtaggcttctatacaaatctacaataattgtatttaaatttgaattctttcttaacaattgcatccctgtgagaattcatggaataattgtttagtggaacaaaatagatattcaatttctaagcaaatagaacttattttaaaagttatagaatacagttgcatattgaaacacagcattgcttacagttaataaattaaaaagccagttgttttaaatagatcatcttgaaagtcacccaatatgccttattacatggttttccttatatttgaactcaaaacttgactctcattagatagtcaagtagggatgattgcagagtatggagggcttgtaagtgctactagcttgggttttgatagctattagaagatagcctaaaaaattatataacataagaaaattatctcctctgtataacctaaatgaaaataatttggaagtagaattatgatttgattcacaatagggagaattcagttaaaattgtttaaactcattaatcatgatacaagctatcaaattagaaagacccaataaaccagatggattctgggttcttactggaggtatagagtctaccttttatccggtgtttttaaaaatgtgattcatagactatttacttcataatgctctgaaagacttattttaaaaatacagatttctaggactgtctcaggctactaaattaaaatatctatgggtgagcccaggaatccatatttttactaagtacctcaagtgatttttgaattttaaatgtaacaatacaatacagaaatctcaaatgtgcagctggataaatatttacatatgaatatacccatgtaactgtcattcagaatcaacagatggctaatttccctcactctaggaggttttttcatgctctttctaggcaataacacacccagaggaaaaatactactgttttgcctcttcttgaactttatacaaatggaatacataatatatgctttttgtagttgattgacttctttcaacatccggtattttagattcgtcrgtgttgttgagtttattaacagtgcattctgttttaattgctttatagttacatgatgca

SEQ ID NO: 2647 - DNA, 957 bp, Homo sapiens
tgcatagtgttattttttttaagtcaacatttctgagtgcttattttgtgctaggagttgtagttagtattttacaggtaaaatctcaatccagataagaattttgcagagtacgtactataattcagttttcacagatgagaagaaatgagtcccagaatagttaacaagtaactggacaaatgtaaacagcttgtaaatggaggagctaggaatgtacaaaagtggcgtgcatcatcaagccatgagttcactattagatcccgaaggcgggaccatctcatgccatcaggaaccggatattgccctttcgtatcttagaaggcttgctaacaagatggttcagctttcatgaattctgcatccgagattgctgtatcattgggaaaaagcagacttggcatttctgtaaagagaaggttgatttgaagaggatgatcagtaatccctgggagctcacacattttcctgtatggacaaatgctggattggcttgttttatttggtggcctggtaacctatggtaataggaataggtcaaagcattaagtatttactagggccggaatagtacagcagacttacctcagaagcaatatactgcatggttgaaatacttaataaatatttaaacgctgggttctacgaaacatatatgatatattaataaacatatgtaatgtttagttttagaatctgaatttcttaccacttgcataccaccacagttttttaataaatttccttctctgttatctgagaaaattaggacctgcaaggcaggatcacaaggggccagtttttacttcagtacatttcagaggtgaatgcacacacacccaccccacatacacaytttcagaaaaacaaatctaacaaaactagatgtctaatgaaaaagatactgtaaaaattagttatattcaccaaacagtgagtctgatgcctaagaagaaa

SEQ ID NO: 2648 - DNA, 553 bp, Homo sapiens
cacatgttataaaattctatttctgtcaagttcgaaagtattctatggtgatagaggttataaaagcatccaccttggagaaagaaaataatgactgggagcagatatgaaggaggcttctggggagctggtaattccctggtctgagaggtggttccatmaatgtgttccctttctataaatgcatcaactgtacacttcagatttgctcatttttctatgttaggcttcaattaaaaaggttccttcaaaaaaaattaccagaagaaagggcaaaccactaaagtgattcattcgttaccaaattctctgattcaaatagtttattagattcaaatgtcagatttgccacttattagaatgtgactttaagtaaggcatataaattcttctataaaattaatattcagtcattcgttcatccaacaaaagtgtattgagtgcctcctattatatgcacttgggatatagcaatgaacacaaaacaaccaaatccttaccctcatagaacaaatattctgaagggaaagaaaaaaatgactgctctacctac

SEQ ID NO: 2649 - DNA, 1276 bp, Homo sapiens
gcatcttccatgggatgaatgaaaataataatggtccttaattttctatgaactgggctgaaaagctgttctagagttacaaataaatataatgtgctacacaacaaagttcatacatgtagcgtacaattaaatatgcagaggtagtgaatattagagactacatcaggaacacgaattcttccttttgactacatcatcatgcagcaaaatgggtaaaagacacataatgcttttaaagtgagtgaaaaaatttgaccattattctttgggtaactaggaacatttaagtttttgagtggagtgtcaggaggctcatctagagcaataagatcctaattctctatggctgcttctgttttcttgtttttggcagactttcccctgtcccctcacaaactgtgctatatagccacagcagactcagtgacaagaatcgtttaactttggaaaagcctaatgcttgctttaataatatattgtagaggttaacacaactagacacaatcgaagttaccttgctgtaaagttctttgaatccaaaatcacttatataggctccttgagatacctataaaactaatttcttctgtgtgactaattttcttctcagtccctttttttgttgttgtttttttgagatggaatctcgcactgttgcccgggctggagtgcaatggcatgatcctggctcactgcaacctccgtctctgggttcacacgattctcctgcctaagcttcccgagtagctgggattacaggcacataccaccatacctggctaatttttattcttattttttatttttagtagagacagggtttcactatgttggccagrctggtctcaaactcctgacttcgtgatctgcccccctcggcctcccaaagtgctgggattacaggcgtgagccactgcgcccagcctgctcagtcactttaggcaggtgacaagcttgttagggaatcctgtgcacttaggctgatgtcaccctcattgagcccttgctcatagtttattggtaggaaaatggcatggactttaaccagtactcaaaattaggtgatgattcttccctatttcaccaagaagagggaagtaatgggatcagagctccactttaagggagactactgtgatgaagaccgaaggaaggaaaattacatatagggacagttaggaggcatttatgctctaatcagggagataggagctggaattataaacatataagagaagtgaatgcttttcaatgaggattttataatcaagtt

SEQ ID NO: 2650 - DNA, 1276 bp, Homo sapiens
gcatcttccatgggatgaatgaaaataataatggtccttaattttctatgaactgggctgaaaagctgttctagagttacaaataaatataatgtgctacacaacaaagttcatacatgtagcgtacaattaaatatgcagaggtagtgaatattagagactacatcaggaacacgaattcttccttttgactacatcatcatgcagcaaaatgggtaaaagacacataatgcttttaaagtgagtgaaaaaatttgaccattattctttgggtaactaggaacatttaagtttttgagtggagtgtcaggaggctcatctagagcaataagatcctaattctctatggctgcttctgttttcttgtttttggcagactttcccctgtcccctcacaaactgtgctatatagccacagcagactcagtgacaagaatcgtttaactttggaaaagcctaatgcttgctttaataatatattgtagaggttaacacaactagacacaatcgaagttaccttgctgtaaagttctttgaatccaaaatcacttatataggctccttgagatacctataaaactaatttcttctgtgtgactaattttcttctcagtccctttttttgttgttgtttttttgagatggaatctcgcactgttgcccgggctggagtgcaatggcatgatcctggctcactgcaacctccgtctctgggttcacacgattctcctgcctaagcttcccgagtagctgggattacaggcacataccaccatacctggctaatttttattcttattttttatttttagtagagacagggtttcactatgttggccaggctggtctcaaactcctgacttcgtgatctgcccccctcgrcctcccaaagtgctgggattacaggcgtgagccactgcgcccagcctgctcagtcactttaggcaggtgacaagcttgttagggaatcctgtgcacttaggctgatgtcaccctcattgagcccttgctcatagtttattggtaggaaaatggcatggactttaaccagtactcaaaattaggtgatgattcttccctatttcaccaagaagagggaagtaatgggatcagagctccactttaagggagactactgtgatgaagaccgaaggaaggaaaattacatatagggacagttaggaggcatttatgctctaatcagggagataggagctggaattataaacatataagagaagtgaatgcttttcaatgaggattttataatcaagtt

SEQ ID NO: 2651 - DNA, 714 bp, Homo sapiens
cactactacaactgttgtattctccatgaggcatgtttttgtgcctgaaataactcactaaaaatacaccgtaatttgtttctactcaataatatataaagagttatgtgtagtattttatctactcatgtattagccacatccatgtcaccaaaattttgctttcccttagaaaactgtgtatgagtgtgtgtttgtatgtaagtgataaaggtttgcttatacacataatcctggaagaaattgtggaaaattctggctccttcagataaccgtaaatttttctaaaagaagctgaggttctttatctggaaatggcacagataatatttctcttggtattatatctcagaagagggcctggcactattcatgaaatggcagttcttgacattrtgatacctgcacttgccctgtagaagagccttttttccctgaacagagcaagtattcccagattcatggacagacctagtgctttgacctttttcagacagcccatgttggccctcactccactccccatgcctgcttaagcagtgccctcccatcccaaattgtcaccttgtctatgatggtaaaatatgagcacaggagcccagcaataaggtacttggactcccacctctcaacacattgaaagctggcatacatcaaagaaacacaaccacctaggtcaagcaagtcagttgcttcaaaagaaaagaaagaaga

SEQ ID NO: 2652 - DNA, 714 bp, Homo sapiens
cactactacaactgttgtattctccatgaggcatgtttttgtgcctgaaataactcactaaaaatacaccgtaatttgtttctactcaataatatataaagagttatgtgtagtattttatctactcatgtattagccacatccatgtcaccaaaattttgctttcccttagaaaactgtgtatgagtgtgtgtttgtatgtaagtgataaaggtttgcttatacacataatcctggaagaaattgtggaaaattctggctccttcagataaccgtaaatttttctaaaagaagctgaggttctttatctggaaatggcacagataatatttctcttggtattatatctcagaagagggcctggcactattcatgaaatggcagttcttgacattatgatacctgcacttgccctgtagaagagccttttttccctgaacagagcaagtattcccagattcatggacagacctagtgctttgacctttttcagacagcccatgttggccctcactccactccccatgcctgcttaagcagtgccctcccatcccaaattgtcaccttgtctatgatggtaaaayatgagcacaggagcccagcaataaggtacttggactcccacctctcaacacattgaaagctggcatacatcaaagaaacacaaccacctaggtcaagcaagtcagttgcttcaaaagaaaagaaagaaga

SEQ ID NO: 2653 - DNA, 714 bp, Homo sapiens
cactactacaactgttgtattctccatgaggcatgtttttgtgcctgaaataactcactaaaaatacaccgtaatttgtttctactcaataatatataaagagttatgtgtagtattttatctactcatgtattagccacatccatgtcaccaaaattttgctttcccttagaaaactgtgtatgagtgtgtgtttgtatgtaagtgataaaggtttgcttatacacataatcctggaagaaattgtggaaaattctggctccttcagataaccgtaaatttttctaaaagaagctgaggttctttatctggaaatggcacagataatatttctcttggtattatatctcagaagagggcctggcactattcatgaaatggcagttcttgacattatgatacctgcacttgccctgtagaagagccttttttccctgaacagagcaagtattcccagattcatggacagacctagtgctttgacctttttcagacagcccatgttggccctcactccactccccatgcctgcttaagcagtgccctcccatcccaaattgtcaccttgtctatgatggtaaaatatgagcacaggagcccagcaataaggtacytggactcccacctctcaacacattgaaagctggcatacatcaaagaaacacaaccacctaggtcaagcaagtcagttgcttcaaaagaaaagaaagaaga

SEQ ID NO: 2654 - DNA, 772 bp, Homo sapiens
ctgtgcatgctggtactgggtaagtaggtgcacttggatgtttacatcactggaaagcgcacaactgggctgggcactgacgggcatatttggaagaaggggacaacctttggctttcctgatccgtgtggggacactagttagaggaggaagagcagtgtgttcttatgaatgaggcattttgatgatggaggcaaagaagggaggttggaagtgcagagaagtgctttsgaaagatgagaaggcgagaaagggacaggctgcacaacaggacaaggcaggaaccctcctctgtgagcaggagatagtgtgcaggtgaaggaccaggctctccttctgtcacgtggctgaggtccttgataagaacagggttgaagggagccctgccagccttccagagagaccggtaaaaactgcaagaagagtttccaatggactggtttccttttctctccactgccttccccagttcccatctcccttcttatcccatctccactttgaactctggtttctacttcctcactgctgcaaggctcccctcactacacagtctaattttttttaagtatacttgggaaaaaatatttcaactatcccccagtgacatacccagggcctggcttaaataatgtaaaagataggatgaagtgcattcttacagagggatgtctcactccatcggccttctggtcaaacaccctttatttcaggaaaatatctggttaattcaggaaaatatttcagggaaaatatctgattaattatgagg

SEQ ID NO: 2655 - DNA, 1229 bp, Homo sapiens
cttcagaagtgtaggagtggctcaaaggcaggacctgtgcaccattatccctggctatcttcctccccttgctgctcaaaacagagctcacagcagggaacttttgacaagacctgccttccaatacaacacctctggactccaagtgcagtgctggactggaaactgccttctgagcaaagcaggagacgaaacaggagagttgcccttgtgacccaagcccccaggctgcttttcccactccacaccctctggccatttagttacctgataatagtcctcctagcaataatgatagcaacactattaccctgcaattagccaataataacaccagcttggccaccaaacaaggctcaaggcctgaagttattgctgtaaaaacggaagctgagttttcctaatagagagaggaaacaagggtcctttgtgccaaccttccaaagccaaacaggaatagcaccccttccagtgttccctcctgtcagcacagacagccaagcaaggatagaacagaatgaacatgtgtgtgtgtgtgtgtgcacatgtgcacatgtgtgccttgcaggatggcaatcygggggtagtgaacaatactcagggaagatcttattagtgaatatttttaaagtttccaaacagaataaattccccatgaagtttattggagaggtgtgggagagagggtaaggtgggagtgggcaaccctttaaacaaaacacaggatgcaagatctccttcataaactggagggctccagggctctagtcacacccctcatagcccagcaggtcacactggacatcatttcaaactagactctgcctgaagtatggcccttatgatggatttgcttctgctatgtttttatactcattccggcagaaggggagacacctgaacccagcccaccctcaggttgctctccaggtggataatccacctggctttctcagggaatggggtggggccgggctggcacactttcaccctcccagtccccatagatcttcctctctcctcctcccttttgtggccacccagggtctacgaatccgtggaaggcagagagtccctctgccttagaataggtcataggaggccttgtaaaatgaaacaaaaacaacttcttgctaaacatggttgcagataatcagtaccatggctgacatccactaaggtggataactgagaattgatagtaatcatgtttcaaaaggtgtttatgc

SEQ ID NO: 2656 - DNA, 1960 bp, Homo sapiens
ttttggtccccacaatgccactgccactgagtgcagtgaatgagtcctgaattgatttcttcactccctgggagtgccaccacagagtaaaaatagagagtggcaggaatttctcacggtgttgtgagctgtgctgacaagcctgggagagctgcttgcctaatctcttgctttgataaggtgagcaaaaatgagccatgggaggttgtgttgtctgcaaacattttccagcctagagtcagaatccaaagggagctaaccagggttggcccctcagaggggcggagtctcaagggccgggggatttggaggaccctcactagtgtcacgtggtaggggagtgtcttcagggttccgttctgaccacacaaagcagtgggtttgcccctttacatggtgcccagaggaggaagcaggattctggagggtgtgtgtttttgggcgtgtgcgcctgcatgcggccgagcaaagtctggaggcagcatcactgctgctatcagggcactggagcagaggctccacagtgtctacctggctgaggaaaggtggaggctggtcattaccatgccaaggacaagccgcacactttgcacagccagccgcctccctgggccccgcatcttacctccatatccacagttttgggagaagaggtggtgaaaatattgggtgatgtccactctccatttcccgggaaatagcaagtgggtagttctcaaacacctgacaacccaaagtcctcactttggggcacttgaatgcattagacttttaaaaaatgaggacatttgccttaaaaattctgtctgcattataaaagcatttaaatgagttactttcctgacaaacatcccggcagacagcagaggtggtggtggctgcagggcaggggcacccaagcaagtgtgctcaggaattagtttaatgttctaagccaaattgatccttctctctttttctttcttcctctcctctatcacataatgcattttgaccacaaagagaaaggaaccttgatggtcatcagtgtctcagatgctccgaaacaccatttccttacgttggcatggataaattgagtgtggagggtgagtgctctatgatgtaaatgaaggaggtgatttaccttcaaaaccagagtgagcttagtgtcaattttaggcaagttgaccttacagccattggcagtcagaaaccacattgccctctgtgtgtctcaatcccgagaaaaggaagctctctgacccttggaggagccatcctgattctctgaggtctggatgtgttgagggggtatggatgctcctacttatgggggagctgctctgatccatggcctggggtggactggggtctcttgctcttaggtgcgattcctggagcagcagaaccaggtgctacaaacaaaatgggagttgctgcagcaggtgaacacctcaactggaaccaacaacctggagcccctcttggagaactacatcggtgacctgcggaggcaggtggatttgctcagtgcggagcagatgcgccagaacgcggaggtcaggagcatgcaggatgtcgtggaggactacaagagcaagtgagactccaggcagggcaaaacaggggagaagcatggccggaaactggtcacaggggcaagacattcggcttcagtgtttgtgtgtaagggtggggggcggggcatgcaggctctgcactgcacaactgcaggaggcrctgttttgtatgtggcaaccctgggtagaatgatattggcagccagctgtcaattgcattgggtggggaggggcaggatagcttcatggatgttgaaaccaagtaagcctgatttccagtgtggcctctgccacttactagctgcttacaaattcatctttttaagtttctagtgttcacattagtaatgtgggaatagcaagaaccttccttgttggattgttgtgggtagatctgt

SEQ ID NO: 2657 - DNA, 1280 bp, Homo sapiens
agggttcttgtcgagggggagacggttgaaggagacactggtggaaatgtgtgtggttcactcatactgcawtctcaaaggggaaaaggagaacccctccactgacgtgagttggattcagtgacttggtgtttggggagaaaggaggagagttgctgcagaccagtctgtgataaactcagccctcagtatgagggaacttgagtgcaggaaaggagacagcgtcatcaaggcaagaggacaccgatggtttccaggaagataacaaagcaagaaaaatggtgcatgacgacttccattgcccgacattttcttatccctaagatgctctcctttgccctctttccatctacctcagtcttctccctctacctacaggtctgaatcttcattcatgtattttaggcttgaaaggaatagggctgtcggtgagaatcccaatctttctacattgtttcttcgagggctcttgaagttctccttctttagggagcttattgcagtgggatatttcattctaggcagctcagcatctcttcgctttcttttggaagtagcacacgaatttcctcgttgagaacaactgatttaccgagtgatgcagttcagcatccctgtaaacccagtgattgttaacccgttctttccaagtcttttgggagatgaccttccccggaatccaaatcctgaactctttgataaaaagaccaagagaggccaacgttcattcattccagaaagtccctggaacgatgatcaaatattcgctgctcccgggtcctccgggggtgactgtccatacgatgtgcccagtcttcccgctggtcctgcaggcatcccctgatgcctgttccccggactcagtgtactctccctggcacacccttctttatggacaacaggaggaggtagggagtggagcaggagcgggagaaagccacgctgaatggggtctcattagacttccaggtgtcgagatggatgattagaaaatgagtccactgtcagtgtcaagcgttccctcatcaggcaccatgacagtgcagcaaagaggcaaagggaaaatcgtgctggctgctcaaaggtccatccctcaccgaaatgcacctgcgaggctcagctgggtcagctcaggagccccaaacgaaaggctcccagctctttcatttggacccagggtttgaggagagggagacagggaagggttagaagtggaaaaagactggattcaaaggagggaaaagtggtctgctggtgagaggcccccggatgcagatgca

SEQ ID NO: 2658 - DNA, 1157 bp, Homo sapiens
gcacaaaagcaaaagtggagctgcaagagacccccaaaacatttattcaaacattggctgaatcagtagctttcttataaacatgatcagtgagtttagaaggcatagggtgaaaaggaggggaagaagacaaggaaagaaatgaatatgaaggaagaaacagatccaaatatagatagtacatggttaagaattaagactacacgggtgaaaaggtgaatatctgagtaacagaataaagaagttaactggaacagtccctgattaatgaatgagttaagtgcccaaactaagtctgcaagtcgtactctaccacccctcaaattacttactcgaggactcctcaaacatttccaytggcaaaggacagtgaatacattccctggaggctacaacagcagagtctgcagcaatcctacaaatatgttgttttctttctaaaataaatgcaaatcgtatattctaatctccattttacccatgcttagccatacaggttttcctcaaatctagattgccgggcccagtgttccccattaatggcatagcttagcaaatctggcagtacacactgtaatcctgagtatacacagtccagtttggaaataagggaaggggaaatggatctccagctactaaggatgagccttgacctggacagaggactaaataaaaagtaccaacagcttggagaaacaaagagccttgggcttctatgaatatttcatcacagtttctgggccacagtaggcatgacattgatgaattaaagcaaattggtacctgagaaagaactgtaagagtagacataagcacagccatgaggggagtgaaatattagactgcagttttgatccagtgctttcttccagtctccactcctgacatcgctcaatatagtccacttgatctaatgcactcaatctagttaccaaattctagcctgcataagaaccacttgaagatcttatcaaaacacagattcctgggccccacaccaagggtttcctgcctgctcagtgggactgggatgtggtctaaggatctgcatttgtaacacattcccaggtgatgctgatgctgccgtcctgtggtccacactttaagagacactgatctaaacaattctttgctcaatgatccaggaaagggatgca

SEQ ID NO: 2659 - DNA, 673 bp, Homo sapiens
  misc_feature (1)...(673): n = A,T,C or G
agcgcagtttctggtgctagattgtcagggtcanaatcccacctcccacaactactgtctttttgactttaagcaagttacttaattgctctgttctttagtttcctcatctggaaatgtggaaagcaatagtgcctaactaacagggttgttggaaggatgaaatgatttatatttgttttaccttaaaagatgaataggcatctttagccagagtaatatgtggcattcaagtcttccagagttgtttctgaagttgtctctgaaatataaacttctggaggccaggarccatgcttactttacatactgtgtagattttccactaaatcatcatatttagcaagtggtctaatctgttatttgggtgattatggtggctaagcatgaataaaaattgttaacttttcttacttttcacatctgcttcctttgtcaaaatatgctgattgcaacctcatggctatattcacctttccttgggaaactgaagcaaattacatctaaccaaacgaaaatatgattcttttaaaatatatttatttggcatctactgtgggtaaagaaccttactggacagtggggaacagggcctggggaatgagaatacaaagatgcgtaaaaatgccctgttctcttaaagagcttcaactctatcaagacagataagaca

SEQ ID NO: 2660 - DNA, 570 bp, Homo sapiens
ataggaagaaagaaatgatgtaaaacagctgtctccggcctgcgtaggagctaggtctttgccactgttggggggtgtgtgtttttttgtgagacagagtcttgctctgtcgccgaggctggagtgcaatagcaagatctcggctcrctgcaaactccacctcgccggtttaagtgattctcctgcctcagcctcccaagtagctgggattacaggcatgcgcccctacacccagttaattttgtatttttagtagagatggggtttcaccgtgttggccaggctggtctcgaactcctgacctcaggtgatccacccaccttggtctcctaaagtgctgggattataggcatgagcaaccgtgcctggccatctttccacttgtacctgagattccaaatgtcccacattaaagaaggagtggtaatttcaaaatttagagcagtgctttgtggtgctaaagctatgctatccaagatggtagccactagcaacatatgggtatggaacacttgaaatgtgactggtccaaattgagatgtgcttatcactcaaatgggtgaactattt

SEQ ID NO: 2661 - DNA, 570 bp, Homo sapiens
ataggaagaaagaaatgatgtaaaacagctgtctccggcctgcgtaggagctaggtctttgccactgttggggggtgtgtgtttttttgtgagacagagtcttgctctgtcgccgaggctggagtgcaatagcaagatctcggctcgctgcaaactccacctcsccggtttaagtgattctcctgcctcagcctcccaagtagctgggattacaggcatgcgcccctacacccagttaattttgtatttttagtagagatggggtttcaccgtgttggccaggctggtctcgaactcctgacctcaggtgatccacccaccttggtctcctaaagtgctgggattataggcatgagcaaccgtgcctggccatctttccacttgtacctgagattccaaatgtcccacattaaagaaggagtggtaatttcaaaatttagagcagtgctttgtggtgctaaagctatgctatccaagatggtagccactagcaacatatgggtatggaacacttgaaatgtgactggtccaaattgagatgtgcttatcactcaaatgggtgaactattt

SEQ ID NO: 2662 - DNA, 570 bp, Homo sapiens
ataggaagaaagaaatgatgtaaaacagctgtctccggcctgcgtaggagctaggtctttgccactgttggggggtgtgtgtttttttgtgagacagagtcttgctctgtcgccgaggctggagtgcaatagcaagatctcggctcgctgcaaactccacctcgccggtttaagtgattctcctgcctcagcctcccaagtagctgggattacaggcatgcgcccctacacccagttaattttgtatttttagtagagatggggtttcaccgtgttggccaggctggtctcgaactcctgacctcaggtgatccacccaccttggtctcctaaagtgctgggattataggcatgagcaaccgtgcctggccatctttccacttstacctgagattccaaatgtcccacattaaagaaggagtggtaatttcaaaatttagagcagtgctttgtggtgctaaagctatgctatccaagatggtagccactagcaacatatgggtatggaacacttgaaatgtgactggtccaaattgagatgtgcttatcactcaaatgggtgaactattt

SEQ ID NO: 2663 - DNA, 1015 bp, Homo sapiens
tgcatacgaaaagagaagatgttaattgctcacctacaatccacctaaaaagctgatggaaaaacatctacaataaaatcagaacaatatcatttccagtacctgcatgatactcattttgatgagtcatcccaaaagactttttaaaagaaaatagagttttgattctatgtttgccattaacctgctatggagttgggcaaccacttggttcctcagctcccttccatcaaaaaaagtcaggaccaattatttgagtggagtgtaaagtggataggtgtgagttaaagaactttggaattgcagagataagaggttttctctcatggaaaaacaatattattaatattattgccatcatcattatttatgctcccagcacacgtattgtgaaaatccgttattcgcgtaactgctatgccctcaccatgtcatttgcaaaatcaccatgttcttctcacagaaatgtcagtgaaatgtcatttttacaatagctgcattatgaatctgctataacttgaattgctttacaatgaaaatgcaatttcttagcaattaaaattattccacccaccccagtcaaataatataaaatcgcctccctgcccaatgttgcttatagtgaactgcagaatactgcaaattgaacagagcatggcttctcacatgccagggaaggtctacatcttggccataccagtggttgcattatactatctgtgattatctgctatacctaatgtaaatyagtatagcatattactaaaactcttacaagattgaaagattgcactcagagtctttgagttttcccaggatcctaaccacatctaagtttgctataacaatgctagatcaaggtatgtaaaaaactaatgtcagttttcattataggaagaaattccttttataaatgcaagtcattatctttaggtctacttatatccccttctggtattaattggaaattttattcttcataactgcctctcagaaactgttgacttgacatgca

SEQ ID NO: 2664 - DNA, 851 bp, Homo sapiens
cctctttctttgttcccactttaaggaacagaatggaaaagtgttcccttcagtgacctaagaatgtactccataggacacagaatttcccccataaattcacaaagtagaaaagacttgagcaaataaggtcatgttcttcctaaaccttccctttcctttttcctaattccttccggtacatggctgtaatttctcaaaacccacaccatcaccccctgtgccttcaaatgattagaaaaaactgtaaggaagaggccaggcacggtggctcacacctgtaatcccagcactttggaaggctgaggcaggcagatcacccaaggtcargcgttcgagaccagcctggccaacatggtgaaacctcatctctactaaaagtacaaaaattagccaagggtggtggtgcatgcctgtaatcccagctatttgggaggccaaggcatgagaatcgcttgagcccgggaggtgaaggttgcagtgagccaagatcacgccactgcactccagcctgggtgacagagcaagactctgtctcaaaaaaaatgaaaaaattgtaaggaagagatggaaacaactgggaattacaattttcataatctggttttaagaacaagaggaagtgtctaacatttaaaatactgaattttttcaaagcatgaaaaattaactttgagtcttaaaatatttatcaatcttcaatgagtttttgttaaaccttgcctccatttcacaatttaatatttactctctgaatatcaatgcccttgagagcataaaatcttttaacctttcattctgtgaagagaaacagaaataaaatatattttcagtaataataataatatgca

SEQ ID NO: 2665 - DNA, 851 bp, Homo sapiens
cctctttctttgttcccactttaaggaacagaatggaaaagtgttcccttcagtgacctaagaatgtactccataggacacagaatttcccccataaattcacaaagtagaaaagacttgagcaaataaggtcatgttcttcctaaaccttccctttcctttttcctaattccttccggtacatggctgtaatttctcaaaacccacaccatcaccccctgtgccttcaaatgattagaaaaaactgtaaggaagaggccaggcacggtggctcacacctgtaatcccagcactttggaaggctgaggcaggcagatcacccaaggtcaagcgttcgagaccagcctggccaacatggtgaaacctcatctctactaaaagtacaaaaattagccaagggtggtggtgcatgcctgtaatcccagctatttgggaggccaaggcatgagaatcgcttgagcccgggaggtgaaggttgcagtgagccaagatcacgccactgcactccagcctgggtgacagagcaagactctgtctcaaaaaaaatgaaaaaattgtaaggaagagatggaarcaactgggaattacaattttcataatctggttttaagaacaagaggaagtgtctaacatttaaaatactgaattttttcaaagcatgaaaaattaactttgagtcttaaaatatttatcaatcttcaatgagtttttgttaaaccttgcctccatttcacaatttaatatttactctctgaatatcaatgcccttgagagcataaaatcttttaacctttcattctgtgaagagaaacagaaataaaatatattttcagtaataataataatatgca

SEQ ID NO: 2666 - DNA, 560 bp, Homo sapiens
aaaactgctcaccccaactccttagctgtgataaaaatcatccatgtttcccaaagagtaatttcattccacattcaccagctcccgtagagaccttagtctctaaaaccttgctaatcctctcaggccagcrgctgacgaccctttcttctgagtgtagatttacacagtaaaaaacaatggcttctgtgttcatcagtccacagcagcaaaaacacaaaaatgtaggaccccaaggttggctgtaactactacatgctgtctctaaggatgtcattatctgtctgtccttgtttatccatttgtctccgtgacaactattatgtttacaaattagtacaataaatgttgaacagtagattgttggtgacaaaccagtgccaggtaatggaaaatttcatacacatatttatttggaatctgggtgcttttccacagaaagcagcaagatgtcaaaatctaatactgttgtggggacctgccaagactatgaaaaaatgaaaacataagagagtccttaattattttgaaggcccatgtggggacacaaaacaaagcca

SEQ ID NO: 2667 - DNA, 2546 bp, Homo sapiens
  misc_feature (1)...(2546): n = A,T,C or G
ctggggagcctcttagcgggtcttgatagaatttgacccccatgtagctgtggcctcagtaacacaatctgatactgggttttcccctttccctctctccctcaccaagttttatcatttctgcttcccggaaccacctatctgaattatctgcactgaaggccttatttcaggctgtttttagggaaacccaagtgaagacagcctcataaaactgagtggtatacatcacgcgaaagcaaagccctctgcaaactcatcattctgaaaagtggattagtgacatgtggccttcctagaagaggtcattctgggtgctcctctttcctaggcaagggtcttcaatgggcaaatctcacaatcccctttgyttgggcagaagtgtagggctaagagtcagctgagtgagacagaagtggccaccacttgtttgtgagttgacccaattgcccataagaaaggagttcatgctcccaaatattttataaggggctcttcttcctaggtagctggaaacctggagttgtgcggagcaaagttgagaaggagaaatgccggtaggggccacctggcaaagtcttaagttccacaaggtcaaaactaagcatgtatctctccacttgcaaaagttttctaccacttgagtccagtgagacaaacactcacaaatcagacaaaacaactttattactcacagattgacagcaaagttaaacaaagcccaggattcatagcatgttggtcctccaaggctcaggaaagctgcccagggaagagggcgtcttgtctgttcatgccccagacgcagggcagctgaggaaccctgaaaccaccccattctggattttatatctgggcacagctgggctcattaagaagaagtgttgcagtgttttacccctctctgggagaaataaggtcacaatctggattgttctaacactttctccccatctcaggatgttgtactctgcagttattctgagaactacaaacaggagacaggaggccaagttggccaaggtcatctgggacctgtcctcctgtatcaccaagtccagagccaaagtcaggaaaggacagccatatctattctcattcaaaatctgaagctgtcctaggcccttcctgtcctcaccttccacatcattcagtcagtcattgaggtgcatcatttccacttcctaaagactgctggaatccatccacttctctccctcttcactgtcacttataacattgcaacagcttcctgtctgtcttctcaatgcatggttcccacataatacagtcctcgtgcacaggagcatgatttatcttaaaaaaaacccattcccctgctgaggctcttccatgattctccaattgctcaattgtgacctgcatgagcaggccctgcccttggactagcttctctccaccctctttcccagagctccaatagcagtttattctatttattttattttttcagttcgttgtgtactccaagcttcttctcaccactgggagctttagcacatgctgtcccctctcctgggaggccctctttatcctgaccccatacaacctggccaacatcaggtctcattgaaagttaatttcctcaggggtattaagttccctgttacacactttcatagcaccttgtgctttgcctttaaaatatttgccactatttatttttaattacttggttgtgcaattatttgttgtctgtctcattagactgtgagcaatgtggacagagttcatatctttctcattgattaatgtatatacaacatgtaaaatatttcctggaatatggtatccaattctgaggaagagagagagggaatgatggaaagaaagagagcacccattaattgggcactgaaaatgtgccaggcttaagtattacatagtcattaatctgaaatatacaatatataaggtaggcactattgtctcttcttagatgtgaagaagcaggcctggagacattaagtagcttgccagtcacagtgttagttattggcagatctgggacacagactaacttccatctgattcaaggcctctccactgagctatgtttttaggtgcacaggattcgcttggccatgtccttgttaaaggccagcaggactttacaacaggccttcccaatggaggaactgcaaattttagaaatagttttggtctaggcaggatgggctcactagttgggctggtcttgggcctccaggggtcggggctggagtgcttctgtaggctcagctgggagagctggcaaagacagagctgaggaaacaaggaccttccagaatgccagcagctgggatatagaagacaccctaggcagtgcttgcctttaaagaatttgtcattctattggggagagaggcttaataagccccattcaagacactaacaacatgaaagaggattgagttcaagtacaattgttgggagttacaaatacgcttcagtgtttagccagtatggcctggacgttagttttagaattgagttcttcattntccattcatggtaaggcatga

SEQ ID NO: 2668 - DNA, 2546 bp, Homo sapiens
  misc_feature (1)...(2546): n = A,T,C or G
ctggggagcctcttagcgggtcttgatagaatttgacccccatgtagctgtggcctcagtaacacaatctgatactgggttttcccctttccctctctccctcaccaagttttatcatttctgcttcccggaaccacctatctgaattatctgcactgaaggccttatttcaggctgtttttagggaaacccaagtgaagacagcctcataaaactgagtggtatacatcacgcgaaagcaaagccctctgcaaactcatcattctgaaaagtggattagtgacatgtggccttcctagaagaggtcattctgggtgctcctctttcctaggcaagggtcttcaatgggcaaatctcacaatcccctttgtttgggcagaagtgtagggctaagagtcagctgagtgagacagaagtggccaccacttgtttgtgagttgacccaattgcccataagaaaggagttcatgctcccaaatattttataaggggctcttcttcctaggtagctggaaacctggagttgtgcggagcaaagttgagaaggagaaatgccggtaggggccacctggcaaagtcttaagttccacaaggtcaaaactaagcatgtatctctccacttgcaaaagttttctaccacttgagtccagtgagacaaacactcacaaatcagacaaaacaactttattactcacagattgacagcaaagttaaacaaagcccaggattcatagcatgttggtcctccaaggctcaggaaagctgcccagggaagagggcgtcttgtctgttcatgccccagacgcagggcagctgaggaaccctgaaaccaccccattctggattttatatctgggcacagctgggctcattaagaagaagtgttgcagtgttttacccctctctgggagaaataaggtcacaatctggattgttctaacactttctccccatctcaggatgttgtactctgcagttattctgagaactacaaacaggagacaggaggccaagttggccaaggtcatctgggacctgtcctcctgtatcaccaagtccagagccaaagtcaggaaaggacagccatatctattctcattcaaaatctgaagctgtcctaggcccttcctgtcctcaccttccacatcattcagtcagtcattgaggtgcatcatttccacttcctaaagactgctggaatccatccacttctctccctcttcactgtcacttataacattgcaacagcttcctgtctgtcttctcaatgcatggttcccacataatacagtcctcgtgcacaggagcatgatttatcttaaaaaaaacccattcccctgctgaggctcttccatgattctccaattgctcaattgtgacctgcatgagcaggccctgcccttggactagctkctctccaccctctttcccagagctccaatagcagtttattctatttattttattttttcagttcgttgtgtactccaagcttcttctcaccactgggagctttagcacatgctgtcccctctcctgggaggccctctttatcctgaccccatacaacctggccaacatcaggtctcattgaaagttaatttcctcaggggtattaagttccctgttacacactttcatagcaccttgtgctttgcctttaaaatatttgccactatttatttttaattacttggttgtgcaattatttgttgtctgtctcattagactgtgagcaatgtggacagagttcatatctttctcattgattaatgtatatacaacatgtaaaatatttcctggaatatggtatccaattctgaggaagagagagagggaatgatggaaagaaagagagcacccattaattgggcactgaaaatgtgccaggcttaagtattacatagtcattaatctgaaatatacaatatataaggtaggcactattgtctcttcttagatgtgaagaagcaggcctggagacattaagtagcttgccagtcacagtgttagttattggcagatctgggacacagactaacttccatctgattcaaggcctctccactgagctatgtttttaggtgcacaggattcgcttggccatgtccttgttaaaggccagcaggactttacaacaggccttcccaatggaggaactgcaaattttagaaatagttttggtctaggcaggatgggctcactagttgggctggtcttgggcctccaggggtcggggctggagtgcttctgtaggctcagctgggagagctggcaaagacagagctgaggaaacaaggaccttccagaatgccagcagctgggatatagaagacaccctaggcagtgcttgcctttaaagaatttgtcattctattggggagagaggcttaataagccccattcaagacactaacaacatgaaagaggattgagttcaagtacaattgttgggagttacaaatacgcttcagtgtttagccagtatggcctggacgttagttttagaattgagttcttcattntccattcatggtaaggcatga

SEQ ID NO: 2669 - DNA, 2546 bp, Homo sapiens
  misc_feature (1)...(2546): n = A,T,C or G
ctggggagcctcttagcgggtcttgatagaatttgacccccatgtagctgtggcctcagtaacacaatctgatactgggttttcccctttccctctctccctcaccaagttttatcatttctgcttcccggaaccacctatctgaattatctgcactgaaggccttatttcaggctgtttttagggaaacccaagtgaagacagcctcataaaactgagtggtatacatcacgcgaaagcaaagccctctgcaaactcatcattctgaaaagtggattagtgacatgtggccttcctagaagaggtcattctgggtgctcctctttcctaggcaagggtcttcaatgggcaaatctcacaatcccctttgtttgggcagaagtgtagggctaagagtcagctgagtgagacagaagtggccaccacttgtttgtgagttgacccaattgcccataagaaaggagttcatgctcccaaatattttataaggggctcttcttcctaggtagctggaaacctggagttgtgcggagcaaagttgagaaggagaaatgccggtaggggccacctggcaaagtcttaagttccacaaggtcaaaactaagcatgtatctctccacttgcaaaagttttctaccacttgagtccagtgagacaaacactcacaaatcagacaaaacaactttattactcacagattgacagcaaagttaaacaaagcccaggattcatagcatgttggtcctccaaggctcaggaaagctgcccagggaagagggcgtcttgtctgttcatgccccagacgcagggcagctgaggaaccctgaaaccaccccattctggattttatatctgggcacagctgggctcattaagaagaagtgttgcagtgttttacccctctctgggagaaataaggtcacaatctggattgttctaacactttctccccatctcaggatgttgtactctgcagttattctgagaactacaaacaggagacaggaggccaagttggccaaggtcatctgggacctgtcctcctgtatcaccaagtccagagccaaagtcaggaaaggacagccatatctattctcattcaaaatctgaagctgtcctaggcccttcctgtcctcaccttccacatcattcagtcagtcattgaggtgcatcatttccacttcctaaagactgctggaatccatccacttctctccctcttcactgtcacttataacattgcaacagcttcctgtctgtcttctcaatgcatggttcccacataatacagtcctcgtgcacaggagcatgatttatcttaaaaaaaacccattcccctgctgaggctcttccatgattctccaattgctcaattgtgacctgcatgagcaggccctgcccttggactagcttctctccaccctctttcccagagctccaatagcagtttattctatttattttattttttcagttcgttgtgtactccaagcttcttctcaccactgggagctttagcacatgctgtcccctctcctgggaggccctctttatcctgaccccatasaacctggccaacatcaggtctcattgaaagttaatttcctcaggggtattaagttccctgttacacactttcatagcaccttgtgctttgcctttaaaatatttgccactatttatttttaattacttggttgtgcaattatttgttgtctgtctcattagactgtgagcaatgtggacagagttcatatctttctcattgattaatgtatatacaacatgtaaaatatttcctggaatatggtatccaattctgaggaagagagagagggaatgatggaaagaaagagagcacccattaattgggcactgaaaatgtgccaggcttaagtattacatagtcattaatctgaaatatacaatatataaggtaggcactattgtctcttcttagatgtgaagaagcaggcctggagacattaagtagcttgccagtcacagtgttagttattggcagatctgggacacagactaacttccatctgattcaaggcctctccactgagctatgtttttaggtgcacaggattcgcttggccatgtccttgttaaaggccagcaggactttacaacaggccttcccaatggaggaactgcaaattttagaaatagttttggtctaggcaggatgggctcactagttgggctggtcttgggcctccaggggtcggggctggagtgcttctgtaggctcagctgggagagctggcaaagacagagctgaggaaacaaggaccttccagaatgccagcagctgggatatagaagacaccctaggcagtgcttgcctttaaagaatttgtcattctattggggagagaggcttaataagccccattcaagacactaacaacatgaaagaggattgagttcaagtacaattgttgggagttacaaatacgcttcagtgtttagccagtatggcctggacgttagttttagaattgagttcttcattntccattcatggtaaggcatga

SEQ ID NO: 2670 - DNA, 2546 bp, Homo sapiens
  misc_feature (1)...(2546): n = A,T,C or G
ctggggagcctcttagcgggtcttgatagaatttgacccccatgtagctgtggcctcagtaacacaatctgatactgggttttcccctttccctctctccctcaccaagttttatcatttctgcttcccggaaccacctatctgaattatctgcactgaaggccttatttcaggctgtttttagggaaacccaagtgaagacagcctcataaaactgagtggtatacatcacgcgaaagcaaagccctctgcaaactcatcattctgaaaagtggattagtgacatgtggccttcctagaagaggtcattctgggtgctcctctttcctaggcaagggtcttcaatgggcaaatctcacaatcccctttgtttgggcagaagtgtagggctaagagtcagctgagtgagacagaagtggccaccacttgtttgtgagttgacccaattgcccataagaaaggagttcatgctcccaaatattttataaggggctcttcttcctaggtagctggaaacctggagttgtgcggagcaaagttgagaaggagaaatgccggtaggggccacctggcaaagtcttaagttccacaaggtcaaaactaagcatgtatctctccacttgcaaaagttttctaccacttgagtccagtgagacaaacactcacaaatcagacaaaacaactttattactcacagattgacagcaaagttaaacaaagcccaggattcatagcatgttggtcctccaaggctcaggaaagctgcccagggaagagggcgtcttgtctgttcatgccccagacgcagggcagctgaggaaccctgaaaccaccccattctggattttatatctgggcacagctgggctcattaagaagaagtgttgcagtgttttacccctctctgggagaaataaggtcacaatctggattgttctaacactttctccccatctcaggatgttgtactctgcagttattctgagaactacaaacaggagacaggaggccaagttggccaaggtcatctgggacctgtcctcctgtatcaccaagtccagagccaaagtcaggaaaggacagccatatctattctcattcaaaatctgaagctgtcctaggcccttcctgtcctcaccttccacatcattcagtcagtcattgaggtgcatcatttccacttcctaaagactgctggaatccatccacttctctccctcttcactgtcacttataacattgcaacagcttcctgtctgtcttctcaatgcatggttcccacataatacagtcctcgtgcacaggagcatgatttatcttaaaaaaaacccattcccctgctgaggctcttccatgattctccaattgctcaattgtgacctgcatgagcaggccctgcccttggactagcttctctccaccctctttcccagagctccaatagcagtttattctatttattttattttttcagttcgttgtgtactccaagcttcttctcaccactgggagctttagcacatgctgtcccctctcctgggaggccctctttatcctgaccccatacaacctggccaacatcaggtctcattgaaagttaatttcctcaggggtattaagttccctgttacacactttcatagcaccttgtgctttgcctttaaaatatttgccactatttatttttaattacttggttgtgcaattatttgttgtctgtctcattagactgtgagcaatgtggacagagttcatatctttctcattgattaatgtatatacaacatgtaaaatatttcctggaatatggtatccaattctgaggaagagagagagggaatgatggaaagaaagagagcacccattaattgggcactgaaaatgtgccaggcttaagtattacatagtcattaatctgaaatatacaatatataaggtaggcactattgtctcttcttagatgtgaagaagcaggcctggagacattaagtagcttgccagtcacagtgttagttattggcagatctgggacacagactaacttccatctgattcaaggcctctccactgagctatgtttttaggtgcacaggattcgcttggccatgtccttgttaaaggcmagcaggactttacaacaggccttcccaatggaggaactgcaaattttagaaatagttttggtctaggcaggatgggctcactagttgggctggtcttgggcctccaggggtcggggctggagtgcttctgtaggctcagctgggagagctggcaaagacagagctgaggaaacaaggaccttccagaatgccagcagctgggatatagaagacaccctaggcagtgcttgcctttaaagaatttgtcattctattggggagagaggcttaataagccccattcaagacactaacaacatgaaagaggattgagttcaagtacaattgttgggagttacaaatacgcttcagtgtttagccagtatggcctggacgttagttttagaattgagttcttcattntccattcatggtaaggcatga

SEQ ID NO: 2671 - DNA, 2546 bp, Homo sapiens
  misc_feature (1)...(2546): n = A,T,C or G
ctggggagcctcttagcgggtcttgatagaatttgacccccatgtagctgtggcctcagtaacacaatctgatactgggttttcccctttccctctctccctcaccaagttttatcatttctgcttcccggaaccacctatctgaattatctgcactgaaggccttatttcaggctgtttttagggaaacccaagtgaagacagcctcataaaactgagtggtatacatcacgcgaaagcaaagccctctgcaaactcatcattctgaaaagtggattagtgacatgtggccttcctagaagaggtcattctgggtgctcctctttcctaggcaagggtcttcaatgggcaaatctcacaatcccctttgtttgggcagaagtgtagggctaagagtcagctgagtgagacagaagtggccaccacttgtttgtgagttgacccaattgcccataagaaaggagttcatgctcccaaatattttataaggggctcttcttcctaggtagctggaaacctggagttgtgcggagcaaagttgagaaggagaaatgccggtaggggccacctggcaaagtcttaagttccacaaggtcaaaactaagcatgtatctctccacttgcaaaagttttctaccacttgagtccagtgagacaaacactcacaaatcagacaaaacaactttattactcacagattgacagcaaagttaaacaaagcccaggattcatagcatgttggtcctccaaggctcaggaaagctgcccagggaagagggcgtcttgtctgttcatgccccagacgcagggcagctgaggaaccctgaaaccaccccattctggattttatatctgggcacagctgggctcattaagaagaagtgttgcagtgttttacccctctctgggagaaataaggtcacaatctggattgttctaacactttctccccatctcaggatgttgtactctgcagttattctgagaactacaaacaggagacaggaggccaagttggccaaggtcatctgggacctgtcctcctgtatcaccaagtccagagccaaagtcaggaaaggacagccatatctattctcattcaaaatctgaagctgtcctaggcccttcctgtcctcaccttccacatcattcagtcagtcattgaggtgcatcatttccacttcctaaagactgctggaatccatccacttctctccctcttcactgtcacttataacattgcaacagcttcctgtctgtcttctcaatgcatggttcccacataatacagtcctcgtgcacaggagcatgatttatcttaaaaaaaacccattcccctgctgaggctcttccatgattctccaattgctcaattgtgacctgcatgagcaggccctgcccttggactagcttctctccaccctctttcccagagctccaatagcagtttattctatttattttattttttcagttcgttgtgtactccaagcttcttctcaccactgggagctttagcacatgctgtcccctctcctgggaggccctctttatcctgaccccatacaacctggccaacatcaggtctcattgaaagttaatttcctcaggggtattaagttccctgttacacactttcatagcaccttgtgctttgcctttaaaatatttgccactatttatttttaattacttggttgtgcaattatttgttgtctgtctcattagactgtgagcaatgtggacagagttcatatctttctcattgattaatgtatatacaacatgtaaaatatttcctggaatatggtatccaattctgaggaagagagagagggaatgatggaaagaaagagagcacccattaattgggcactgaaaatgtgccaggcttaagtattacatagtcattaatctgaaatatacaatatataaggtaggcactattgtctcttcttagatgtgaagaagcaggcctggagacattaagtagcttgccagtcacagtgttagttattggcagatctgggacacagactaacttccatctgattcaaggcctctccactgagctatgtttttaggtgcacaggattcgcttggccatgtccttgttaaaggccagcaggactttacaacaggccttcccaatggaggaactgcaaattttagaaatagttttggtctaggcagsatgggctcactagttgggctggtcttgggcctccaggggtcggggctggagtgcttctgtaggctcagctgggagagctggcaaagacagagctgaggaaacaaggaccttccagaatgccagcagctgggatatagaagacaccctaggcagtgcttgcctttaaagaatttgtcattctattggggagagaggcttaataagccccattcaagacactaacaacatgaaagaggattgagttcaagtacaattgttgggagttacaaatacgcttcagtgtttagccagtatggcctggacgttagttttagaattgagttcttcattntccattcatggtaaggcatga

SEQ ID NO: 2672 - DNA, 554 bp, Homo sapiens
tgagcccaggaaattagtcatccattagcggaggtctatgtcacaaagctgttcttcatagacttctctgacctgctggcctttgtcctgtgtttcttgccttcccctactgtgttcctgagcatacaaatattttctcactcatcrtttattattaaatcttattatttctatttttcattgtgatgaaatacatgtcatataaaatttatcaccttaatttttaagtatacagctcagtagtgctaagtacatttacattgttttgcaaccaatcttcagaagtttttcaccctgcaaaactgaaactctatatccactcatcaatagctttccattcctttccctcccccagcctctggcaaccaccctgctactttctgtctttatgagtttgactattctaggtaccaaatttaagtggacttatacagtatttgtctttttgtgaatggcttatttcacttagcataacgttcacatataaggttcatttatattatagcacatgtcaaaatctccttttagggttgaataaacttttatatagatac

SEQ ID NO: 2673 - DNA, 845 bp, Homo sapiens
ttgaatgggttaagtaaatgctgaaagggtgattagcttcagtcattgactaataatgattatagctcccatttagtaagcatttactatgtaccaggtaccatgcacagggcttacattcactatctcatttaatttgccatcttcagaattatcagccatgtgctgttatcatcattctaaagatgacactgaggctctgaaaagttcattatttgcctaagatctcctggtgaggaaatgatgaggtggggttagaactcaggagtgtttgacctcaaagctggtccacttcctcatgagactattccaatctgtgattatcatactgacagaagttttcaggaaaatgtactttataccactatctttttttttttttttctgatcactagaaaaaaagtgttcaagtatttaccagaatatctcaggttggctgccatttcacagcttagagaacyagtccagattggagctgagggatatttccggagagagaggagattcctggaattttttgaattcttaaaagactggatgatttttaagcattataaaataattttttgttaggaagataaaattttaaatctgtacacaaaagttattgttctatctgaaataagctaaaatatggcaaatttttgaggattgatgaagtataagaaaaaaatagtatccattttaccttgattctgagaacattctctttcaaacagctcagaagtcatgacaatggatctgcagataaagatactaaatatgagcacaccatttggcactgctataaagaaatttacttagtctcatttaagtaaacgcaatttattactttttaagtttta

SEQ ID NO: 2674 - DNA, 813 bp, Homo sapiens
  misc_feature (1)...(813): n = A,T,C or G
annnnnnnnnnnnnnnnnnnnnnnnnnnnnnnnnnnnnnnnnnnnnnnnnnnnnnnnnnnnnnnnnnnnnnnnnnnnnnnnnnnnnnnnnnnnnnnnnnnnaccaaagtggaatttctaagtacatttctcccatcatagaaaggacatggttaaacagaatccactgtgcaactatacaattgtttgttgttcactattggtcttccctcacttgaatggaagctctcaagagcagggactttgtttttgttccctgctttctgtttccccaaggcctggagcaatgccaggcacaacttagggcctcaactactatttgttgaatgaattaatgtaacaagatatttttctccaatcacagctttcagactggctctactaagccatcttttgctgtcctttaatgacatcttaggtagattctataacttcgtggtcactttcagcaattaaaggctcaatcccgtttaaaactgcacatgtaccctaaaacttaaagtataataaaaaaaaaataaaataaaaaaaaaacttcaacctcaaattcaatgcaaatctttcttctctcccaccaacagctatatttgtamcctgctcttttactcctcctcccagctcagtgccctgttgcagatgctgggcatgtcccgactctgacatccctcttcccacttccctgtgtggagacctaggtcctcaagtgtttggggatgggaggggagagaagaaagggactagctttttaaaaattgtattcaacctgctatcttcaacctgctttccatcgactgaagaatcttaattgcatagt

SEQ ID NO: 2675 - DNA, 503 bp, Homo sapiens
tcaccacaatcaagctacttagtatatccatcaccttacatagttaycttccttccttccttctttctttcatgtgtatattgtgagaatacttaagatctactctcttagcaaatttcaagtaaaaagggagtctttttttacctctcttatggatggtatttatttgaggccttagcagtgaatcctgattaaagaagcaagcagggcctttagacaaaggatagaccttgacagggagctttcttttcctgtcttgaccctgttactgaaaaacttcgagtagggcccttatcttggttccttctctttcctttaagagagaataatacctgtttggggaaggatcagtgattaaaatatgctgactcaatgcctgtggagaattttagaaggtcatacttttcttccctttgtttcattactggagagtttcctcaaccttgggttgctgaaatttagcatagtagaaaatgacttaacttgagaactgatgtttaaaa

SEQ ID NO: 2676 - DNA, 391 bp, Homo sapiens
taaatagacaaaatctataaaggcacctaaattatagaatttataataaataatgtccaaaatatgagtatacaaaaaccttttattagaartcattaaatgaatttttactttcagggggaagttgctgaagttatatttgtaggtgctaaccgaagaattcagtacaaaaccaggtaggtatcaatgattttcttttacaaatgtaaatccactttttagccattcattcatttaaatatccctctagaggttaataacataaagacaaaatgttccaacttgttttccatcttattttgtaggtacgggaaaatattcaataggtagttaatgtggattgagtctgggtaaaagcacacaggaaacataattggcttcacttaggacc

SEQ ID NO: 2677 - DNA, 592 bp, Homo sapiens
ctttattcttttttattgctgaagaacagtccatcgtatggttatacattttgtttatccagtcatcagttgatggacatttgggttgtttacactttcggctgttatgactaaggctgcaataaacactcatgtacaagtttttatatgaacaactaatttcatttctcttatgtatatacataggaatgaaactattatgtcatatggtgactctatgtttaacattttgaggaaatgccaaactactttccaaagtgactacaccattttacgttcccaccagcagtgtatgagggttccaattcctmcacatcctcacctcaacttcttcttgtgtgtgtaaagcttcttttgagatctgatgaaggtatgaattactttccatacacaaaacttgacagacaacttcgggaacaataggaggtaggatgtatctggagcagagaaagcattcctgaaagccaggtatggtgtgtggctggaaccaggacccacaaacaagatggggttcagactgccagatttatgaccttgtgtggggtgggggtagtggacactcatgggaataagctaacctggatacagtgca

SEQ ID NO: 2678 - DNA, 703 bp, Homo sapiens
  misc_feature (1)...(703): n = A,T,C or G
ctgtagcgagatcccttctccgtcttccaccacccactgctttggctcccctcttgctgttccctgcctgcatctgggcaggaagttccaatcctgacttgaccctttttcagctgtgtggcctaggactcattgctcttttctccccatttcatcatctgaaaatggaaaaaataatacctgactagaaagtgaaagtaaaaaagagatataatggacaatgtgcctcgcacagggcctggcatggagaagtccttgatgtacgtcttttccttcccttttatgcagccgtttccctcacacccacccattgattgatttttctgaagagactacttttgtcatgtcaccctctaatccccagactttaaactgggaggtagcagagtggtctgattaagaccttagacaagggtttcttgtctgggcgcagtggctcacgcctgtaatcccagcattttgggaggccaaggtgggcagatcacttgaggtcaggagttcgtgaccagcctggccaacgtggtgaaaccccatctccactaaaaatacaaaaattagccagatgtggtagcaggctcctgtaatcccagctactncggaagctgaggtggaagaatagcttgaacccaggaggcggacctcagcacttctgcctnggtgatgggagtaaatcctgtctaanaacaaacaaccaaamaaaaaa

SEQ ID NO: 2679 - DNA, 605 bp, Homo sapiens
gcatatatacagaaaataagctagaggataaagtgagggaaaatacctttaagacagcagcaaaataaagataaaaattttttggaaaaacttaagtgtttacattttatataagagaagttttagaacactgctgaatgtctcaaaagaagaastgaacaaattaaaagacgtcccttcttattgaatagaaaaaaatcaacactagaaggatgtaaatttccatcaagtttttaataatgtaaggcaatattaaaaaaataactaacatgcctttgtttttgaatttttgtgatgatggtttcttattttgttgtttgtatatttttgtttgtgcaatgaaactagaaaactaattttgaagttcataaataaaactaaaccagcaaggctaggcagaaaaatctcttaaaaagaaaagcaataaagtaaagagcctctttgctgacagatattaaaacatattacagatgctcctcaacttacaatagggttatgtcctgataaatccatcaaaagtcaaaatatcattagtataaaatgtgtttaatacctcaataagcccactggaaaataaaagaaatcatacgttgaaacatatttaa

SEQ ID NO: 2680 - DNA, 648 bp, Homo sapiens
ggtgtgtttcatagttaataaatactaaaaattttcttttataccaccttgacatttaagaaagattagccgctagaagaaaatcagggtggacacaaaagttggggacagaaaaaccatggacagaaagagtgagatggggccgggtgyggtcgctcatgtctgtaatcctagcactttcagaggctgaggtggacagatcacctgaggtcaggagttcgagaccagcctggccaacgtggtaaaactccgtctctactaaaaatacaaaaattagccaggcatggtggtgcgtgcctgtactcctagctacccaggaggctgagggaggagaattactggaacccgggaggcggaggctgcagtgagccgaggtcgcgccactgtactccagcctgggagacagagtaagactctgtctcaagaaaaaaaaaaaatgaaagaaagaatgagatgggaggggtcccagtgcttggttgtcctgttgtcctgggctgatttttgcctatgctaatgcgcaatacagtggagttcagaggagtaaattgattcagtgtaaaaatcttaccagctgttcttagccttatgtctggacaatgtaaataaaacaatactgtatggatctttgctcttttttaaataacatga

SEQ ID NO: 2681 - DNA, 1160 bp, Homo sapiens
ctctatctctcactgtatactattttgtacctttaaaattttatgatataaatatattacccaccaaataaaatgaaataagacattttaaaacttctctttatgtatgaatttcctcttatcacaactccataaagtgtctttgcctgcacttcacgatacagctcttcctgctgctgcaactgtttttgcttcctagagactcggaattactatctttccacttagtaactgaaaaaaaattgtattcatttatttgattgtcaagtacagtatctggatttaccagtttttaggtttcaagaattattttttccctctactttgtctttttcttcatgcttaaatgtttatcattaagttcatcaaagtatttttctaaaatatttacatttraaatgcacatttcggctgggcatggtggcttacccctgtattccagcactttgggaggcctaggtgggtggatcacctgaggtctggagttcgagaccagcctggccaatatggtgaaaccccatctctactaaaaacacaaaaaagtagccgggcatggtggtgggcgcctataatcccagctacttgggaggctgaggcaggcaggagaatcacttgaacccagggcagggggagccggggggaggcggaggttgcagtgagccaacatcacgccattgcactccagcctgagcaataagagcaaaactctgtctcaaaagaaaaaataaaagcacatttctcttattctttgacattctcttgtaatatacatttcagttacatgaaattgaaagacaaccaaatgcaatgtgccctctagtggttaaagaaaataatttacaatccacctctcctgagccaaatacacagatcaaatgtaatttttcaaagcctacattcagttatgtggataacttaattggttatttcagtgtggcttttgtcctcttatgaaaacatggcatatcaaaaaaattgtccatcttataaaataatcatttttctctatttgcaaaaacaaaaaaagtattgacctatttgcctgtttgttgaataaacaatatattaaaatagaccaaagaatggggagtgaaaagtaaatttcctcccacccctgaccctcagaagctaaagatggctttcctagtggcaagcacagt

SEQ ID NO: 2682 - DNA, 1160 bp, Homo sapiens
ctctatctctcactgtatactattttgtacctttaaaattttatgatataaatatattacccaccaaataaaatgaaataagacattttaaaacttctctttatgtatgaatttcctcttatcacaactccataaagtgtctttgcctgcacttcacgatacagctcttcctgctgctgcaactgtttttgcttcctagagactcggaattactatctttccacttagtaactgaaaaaaaattgtattcatttatttgattgtcaagtacagtatctggatttaccagtttttaggtttcaagaattattttttccctctactttgtctttttcttcatgcttaaatgtttatcattaagttcatcaaagtatttttctaaaatatttacatttaaaatgcacatttcggctgggcatggtggcttacccctgtattccagcactttgggaggcctaggtgggtggatcacctgaggtctggagttcgagaccagcctggccaatatggtgaaaccccatctctactaaaaacacaaaaaagtagccgggcatggtggtgggcgcctataatcccagctacttgggaggctgaggcaggcaggagaatcacttgaacccagggcagggggagccggggggaggcggaggttgcagtgagccaacatcacgccattgcactccagcctgagcaataagagcaaaactctgtctcaaaagaaaaaataaaagcacatttctcttattctttgacattctcttgtaatatacatttcagttacatgaaattgaaagacaaccaaatgcaatgtgccctctagtggttaaagaaaataatttacaatccacctctcctgagccaaatacacagatcaaatgtaatttttcaaagcctacattcagttatgtggataacttaattggttatttcagtgtggcttttgtcctcttatgaaaacatrgcatatcaaaaaaattgtccatcttataaaataatcatttttctctatttgcaaaaacaaaaaaagtattgacctatttgcctgtttgttgaataaacaatatattaaaatagaccaaagaatggggagtgaaaagtaaatttcctcccacccctgaccctcagaagctaaagatggctttcctagtggcaagcacagt

SEQ ID NO: 2683 - DNA, 584 bp, Homo sapiens
caacagccccagagtaattttgaagtacaatcttcaagaaacaatgaaataggtaaccctgtatcatcattgcggagtatgcagtcccaggcttttcgaattagtcaaaacactggccccccaccaattgaccgtcaaaagagattatcttacccaccagttcagagcatcccaacaggaaatggtattccatcaagggacagtgaaaatacttgtcaccaaagtttcatgcagagcttacttgcccctcacctcagtgatcaggtcattgggagccagaggtcactctcagaacatcagaggaatacacagtgtggtccatcctctgcaattgaatataattgtcccccaactcatgaaaatgtccatattagaagagagagtgagagtcagaatagggaaagttgtgacatgtcgttaggtgcaattaacaccaggaacagcaccttgaatattcctttttcaagttcctcttccycaggagatattcaaggtcgaaacacaagccccaatgtttctgtacagaaatccaatcccatgaggattactgagagtcatgccaccaagggccacatgaaccctcc

SEQ ID NO: 2684 - DNA, 536 bp, Homo sapiens
ggaataattttttttaacccagaatacagactgtgggatctgatagaactaggtttgaattctcttccagcacttattaactctggcccctaagagctcagttccttaacttcctcaaaagtaaatgagggcaatggctccaacttcacaagggtgatgttaaggatcaagtaagagaatgtatgcaaaatacctaccatccagcaaccacaggtttttggtgttggcaatttcctgcccctccttcattccttagaaattcttgaagtcarcatgcacacactgtctctgctacctgttcactacactagcagcccgcagtgtggaaatactctggggacttggtcagttgtgagctgtgtcttcctgtgttattagttaaacttacaaagtttatggctaattttagtatttctgtaaaatacaagacccaaaagcatgatgcccctcaggcatggacatgccgtagatgtctaaagagagtgtcacacctgtgaatgttgtatcttatgcattcccaaagtcaagattttgcc

SEQ ID NO: 2685 - DNA, 979 bp, Homo sapiens
  misc_feature (1)...(979): n = A,T,C or G
tgctcataataagataaatgtatactaatattatactgagatgccattttcaattatcagattggtgaaattccaaaagtttacaatattttgttggcgaggcatggggaatacaaaatggcanacagctatggaggggaacttgatattacttagcaaaactacatatgtatttctgtctttcaatcagtaatcccactttgatgaatttatcctcaggatatactaataaaaatatgacatgtcagggtagtgggaaagagtggagtcaactcaaatggccttcagtagggtgctggtagaataaatcatgatacatacatagtagatcagtaactatgctaaaattacgctctataacaaaccaccccagaaacctttgcagaaggtaggtttttaaggaattatagcagaaacacacacacacaggatagtacatatctttcattttacacaaataatagactatacacacttctttgtgccttgctgttatttcmcttaccaatatatattaaagataattttatatctgtgtataaaaagcttccctattttttgttgtggctatatgttatttcatggtatgaatacaccattatttattaaaccaatctcttattgaaagatgtttaagttgctttcaattctttattattaagaagtgctagtctgggcacggtggcccctgcctgtaattcagcattttgggaggccgagatgggtggatcacctgaggtcaaggagtttgagaccagcctgaccaacatggtgaagccccgtctctactaaaaatacaaaaattagccaggcgtggtggtgtgccctgtaatcccagctacttgggaggctgaggcaggaaaatcgcttgaacccaggaggcggaggttgcagtgagccaagattgcgccattgcacttcagtctgggtgacaagagtgaaactccacctcaaaaaaaaaaaaaaaagaggtgctgca

SEQ ID NO: 2686 - DNA, 599 bp, Homo sapiens
atcatgtttcttatcaagtcatgagacacttctacttggaggcataaagttccttgatttccatgtgttctcacttgaaatcatcttccagctttgtgtatcaaggaacagaaatttgggggatccaaagtttgyaaaatttttccagatctagatgcagtttagaggctcctggcttcctggcaacttgcccacctgtgctgataatgctgggcaagtcgtgatgcttgttatgtataatcatctgagttgatgttatggagagcagccatatctctacagcagaggaagagctatctgcagttggaagagtttagagcaatctttcagggccctgtgcctgagtgtggctggagtgtggccaggagactaataattgagcagttctgccagctttttcaaagggatccagtggacctctgccctcattgcatcatcctaaactggggaaatggatattattatttacactgaatattcttcacctgagtcagtctaggaggattgatatcagatcatcttagactttgtgacagaagactctgcatttacagactgactaagacaagttgctcaccttgtttgagcttagtttcctc

SEQ ID NO: 2687 - DNA, 599 bp, Homo sapiens
atcatgtttcttatcaagtcatgagacacttctacttggaggcataaagttccttgatttccatgtgttctcacttgaaatcatcttccagctttgtgtatcaaggaacagaaatttgggggatccaaagtttgcaaaatttttccagatctagatgcagtttagaggctcctggcttcctggcaacttgcccacctgtgctgataatgctgggcaagtcgtgatgcttgttatgtataatcatctgagttgatgttatggagagcagccatatctctacagcagaggaagagctatctgcagttggaagagtttagagcaatctttcagggccctgtgcctgagtgtggctggagtgtggccaggagactaataattgagcagttctgccagctttttcaaagggatccagtggacctctgccctcattgcatcatcctaaactggggaaatggatattattrtttacactgaatattcttcacctgagtcagtctaggaggattgatatcagatcatcttagactttgtgacagaagactctgcatttacagactgactaagacaagttgctcaccttgtttgagcttagtttcctc

SEQ ID NO: 2688 - DNA, 617 bp, Homo sapiens
cgcacagaaagatgaagtaacttgccttaaggtaatacagctagtaagtagtggattgttgattcgattctaggtctgtactgtgctgcctgtgtctataatagctctgcttaaggttaatggttaggttgtgtttctggaatgctcaacttctctgttggaacaaggttttgcatcagtatgggttggttaaaagcgtaaattctggttctggtacagccagtttataagctgtgtgacgataggatgtacaagttgtttcktatttttaatttataaaatgggattattaatgggtcccatcatagaggtttcataggaggaatgaaagaaatagtacagtctttttgccacaacatgtgcaggagcagtgtcagaatagtgtagaaattgcattggtttatatgttttatgccatcaggttggattagctgaagtcaaagtagactagcactgtttttcttggtctttacatttgggcaggttctccactttctcagtttttttccttttctttaggaaaagaggtgctgaccttgaggtttaggttgagattgccatgatagagtcagggctcccaaattgtgcttttagccttctttatatagtgttgaaca

SEQ ID NO: 2689 - DNA, 1217 bp, Homo sapiens
tgcatgcacatacacacacatgcgcacacacacatcttgaagcatacctctacaaaaggatcactgttctcttgtaacaacagtgattccgtatccatatgtagcagagactcattattcacaaacgtagtccttttcctctggtcatcactcaagtagtcagggagtcaggtagactcccagcctctttgcagctagaagtggctgtgtgactgagttctagcccatggaatgcaggcagaagcaatagatgacacttctaagtgagtgtgagattctgggtttcacctcctggggctcatggtcatgagccctcttcatcctccagtcctagcagggacagcagcttccggcagttgacatttggccaaccttactgaagcgctctttgctccttcagcccttctaacacctctgcaatcagccctgtggatgagattccctgtttaaaatgactgaagttatttctgttttccttactgagcactaatacagtgatctctgctgataccccaggattcttcagcattactggacaattgtttggaatcagaggcgaataatgaaaaaacagattccttgctcatttttccaattcacaaataacaaaggcacttataaacactcaaatggaaaccctttactaaaaaaaccataacttcgtggatatactaaaatgatcttaaacaaaaccagtagtaactcacactgtgaatgctcttatgtaggtttggcaattaatctaaactcaggcatgaacagagtcttccagtgaccacaaacgactacagcagtgattacggttctcagctgggtggggtgggtggggagagagaggcatccaaagctaggagtcactgtgtgcaatgaatctggacctggtgagcaaatgttatccataaacacaataaaaaggcagaaaamtcaagagtttagggaaaaatccaagatccagagtccacggggcatggctcctgaatggctgagaacaatgggtgcgcccaggatctagaaccaaaggctaaggccaacggcatgtgctcaaaaccaaaagggaggatcccagctcctcttccacctcctgtatcagacatccacagatcaagaaggggcctcgagaaatactcagggatctcaattcagccacatgggactgatgggccaggggaccccttgtgtctccgtcagtctccaactccgtaagcttcatttatgca

SEQ ID NO: 2690 - DNA, 1217 bp, Homo sapiens
tgcatgcacatacacacacatgcgcacacacacatcttgaagcatacctctacaaaaggatcactgttctcttgtaacaacagtgattccgtatccatatgtagcagagactcattattcacaaacgtagtccttttcctctggtcatcactcaagtagtcagggagtcaggtagactcccagcctctttgcagctagaagtggctgtgtgactgagttctagcccatggaatgcaggcagaagcaatagatgacacttctaagtgagtgtgagattctgggtttcacctcctggggctcatggtcatgagccctcttcatcctccagtcctagcagggacagcagcttccggcagttgacatttggccaaccttactgaagcgctctttgctccttcagcccttctaacacctctgcaatcagccctgtggatgagattccctgtttaaaatgactgaagttatttctgttttccttactgagcactaatacagtgatctctgctgataccccaggattcttcagcattactggacaattgtttggaatcagaggcgaataatgaaaaaacagattccttgctcatttttccaattcacaaataacaaaggcacttataaacactcaaatggaaaccctttactaaaaaaaccataacttcgtggatatactaaaatgatcttaaacaaaaccagtagtaactcacactgtgaatgctcttatgtaggtttggcaattaatctaaactcaggcatgaacagagtcttccagtgaccacaaacgactacagcagtgattacggttctcagctgggtggggtgggtggggagagagaggcatccaaagctaggagtcactgtgtgcaatgaatctggacctggtgagcaaatgttatccataaacacaataaaaaggcagaaaaatcaagagtttagggaaaaatccaagatccagagtccacggggcatggctcctgaatggctgagaacaatgggtgcrcccaggatctagaaccaaaggctaaggccaacggcatgtgctcaaaaccaaaagggaggatcccagctcctcttccacctcctgtatcagacatccacagatcaagaaggggcctcgagaaatactcagggatctcaattcagccacatgggactgatgggccaggggaccccttgtgtctccgtcagtctccaactccgtaagcttcatttatgca

SEQ ID NO: 2691 - DNA, 533 bp, Homo sapiens
cttctggtctggcctcttgggtcttgaggcctccccatcctccatcactagaattcccctgacaagtactaataagattgcttcttctgagttcttgaatatgtgtatcattgaacacagagggccatgcctgggaaaatcagatgagaaatgataatcagtacgggtccttgggagtcccagtagatacatagcttgtagtctataaatggcactgacatagttgctcagggcagtttctatatgccttgtgctcttcagagggttctgataggctaagaaaggcaatattttggctgttcaacccatatactgtagyccacactggatagtttgtcattggttttaggaaatacagtcatttgtctagtttctctgcctctattaatgttccatcagaggaatgttccattaggatgctaatgcttgggccataaaataatcaacaatgggagagacctgttaaccctagatcaaatccatatactcaccctttgaatatcattttccctcctggggaacccagatttttt

SEQ ID NO: 2692 - DNA, 1200 bp, Homo sapiens
gcatttaaaacttcagtctcaggtcaggcacagtggcttatgtctgtaataccaacattttggtaggctgaggtgagaggatcacttgaagccaagagtttgagactaacctgggcaatatagcaagaccccatttctactaaaaataattttttaaaattagccaggtgtggtggtggacacctgtactgctagccacttgggagcctgaggtgagaggatcacttgagcccaggaatttgaggttgcagtgagcttctgtgattgcatcactgcactccatcctgggtgacagtaagacctgactctaaaaacaaaacaaaacaaaaaaaaacaaaacaaaacaacttcagtctcagagacaggtactatttgagagaagaataatgcctcagaggattatcactttaaataaaacaccattaagccctttcagcccagttctcaattgcttttatgcccaaccaaagacaccaaataatctaaaatgtgttctggtatgaaatcagactttgcattgtaaaaatgagccatttattccaaagtttctttagccttgccagtaatgaaaagctgcctcactgcacacatgactttaatgtacatctattcaggagtgaarcaagactgtggtaaactaggtagacatggtaattcatggctactcatgggcagccagtctcatggactcacctgcagtggtagcctcttgccttatttcacttgtatttgttgaagaaaagcagcaacggacaaataagatatagctgctagcacagcaagatgtgaaacattttatgacctaaacacaataacccataatgcaaaaaacctgcaaaatagagcagagtgaatcaaattcactagagaattcctttatttttaccacaatggctgttatgctttagaatacttacttccaatcttggcccttaattatatcataagaaaaggtcaacacctttgggtgttgggatggaaatgtaggaaagtatgctttttaagttgaatttgtaatagaaacaaatgaaaaactaataagaaaaaaatgagagaattaaacatggagcagatccagatggggcaagacataaatatagagcagtttcaaagcaaaccttgcaagataccagtctggtaccttgtatgattttcctaggctgaggacctgacagattcttaaaaaataccttgtgacat

SEQ ID NO: 2693 - DNA, 1200 bp, Homo sapiens
gcatttaaaacttcagtctcaggtcaggcacagtggcttatgtctgtaataccaacattttggtaggctgaggtgagaggatcacttgaagccaagagtttgagactaacctgggcaatatagcaagaccccatttctactaaaaataattttttaaaattagccaggtgtggtggtggacacctgtactgctagccacttgggagcctgaggtgagaggatcacttgagcccaggaatttgaggttgcagtgagcttctgtgattgcatcactgcactccatcctgggtgacagtaagacctgactctaaaaacaaaacaaaacaaaaaaaaacaaaacaaaacaacttcagtctcagagacaggtactatttgagagaagaataatgcctcagaggattatcactttaaataaaacaccattaagccctttcagcccagttctcaattgcttttatgcccaaccaaagacaccaaataatctaaaatgtgttctggtatgaaatcagactttgcattgtaaaaatgagccatttattccaaagtttctttagccttgccagtaatgaaaagctgcctcactgcacacatgactttaatgtacatctattcaggagtgaagcaagactgtggtaaactaggtagacatggtaattcatggctactcatgggcagccagtctcatggactcacctgcagtggtagcctcttgccttatttcacttgtatttgttgaagaaaagcagcaacggacaaataagatatagctgctagcacagcaagatgtgaaacattttatgacctaaacacaataacccataatgcaaaaaacctgcaaaatagagcagagtgaatcaaattcactagagaattcctttatttttaccacaatggctgttatgctttagaatacttayttccaatcttggcccttaattatatcataagaaaaggtcaacacctttgggtgttgggatggaaatgtaggaaagtatgctttttaagttgaatttgtaatagaaacaaatgaaaaactaataagaaaaaaatgagagaattaaacatggagcagatccagatggggcaagacataaatatagagcagtttcaaagcaaaccttgcaagataccagtctggtaccttgtatgattttcctaggctgaggacctgacagattcttaaaaaataccttgtgacat

SEQ ID NO: 2694 - DNA, 765 bp, Homo sapiens
tgcattaggcatgttagtgaaaaatacatttattttctctaatacatacataaagatcacggtgcagtagctaccatataaatgaacattatttattattattaaatttgctgtaaccagataattgtatttatttgactaaaagaatactggaaatatttttagttttatctcaaggaataaatcaaaaagataaaccaaattaattctaagttcttttttagcacatgaaaattaactcgttatatatagaaaaactaagcacaaaattgaatggcaaacaaaaaactggtaaaaaagktatttgcagactatctagtagagctgatgtccattatatagggagaatcctaataataaataaagtaaatgaaaacaatttacaaaataaaaaatacatatggataataacgtgaaaagaaatacaacttcacttatcaggtaaattaaaatacaataatcaaatcaaattactaaaatatcctttcctgaacatcagactatattactcagtgcccataagaatgaaaaaagaaaagaacacggtagctcatgcctgtggtcccagcactttgtgaggccgaggcaggaggattgcttgagcctggcagtttcaaatgagaccagcctgggcaacacagcaagaccttgtctctacaaaaaactaaaaccaagaaaaggcagctgagcatggtggtgtacccctgtagtcccagctactcaggaggctgaggtgggaggattgcttgagcccaggagttggag

SEQ ID NO: 2695 - DNA, 765 bp, Homo sapiens
tgcattaggcatgttagtgaaaaatacatttattttctctaatacatacataaagatcacggtgcagtagctaccatataaatgaacattatttattattattaaatttgctgtaaccagataattgtatttatttgactaaaagaatactggaaatatttttagttttatctcaaggaataaatcaaaaagataaaccaaattaattctaagttcttttttagcacatgaaaattaactcgttatatatagaaaaactaagcacaaaattgaatggcaaacaaaaaactggtaaaaaaggtatttgcagactatctagtagagctgatgtccattatatagggakaatcctaataataaataaagtaaatgaaaacaatttacaaaataaaaaatacatatggataataacgtgaaaagaaatacaacttcacttatcaggtaaattaaaatacaataatcaaatcaaattactaaaatatcctttcctgaacatcagactatattactcagtgcccataagaatgaaaaaagaaaagaacacggtagctcatgcctgtggtcccagcactttgtgaggccgaggcaggaggattgcttgagcctggcagtttcaaatgagaccagcctgggcaacacagcaagaccttgtctctacaaaaaactaaaaccaagaaaaggcagctgagcatggtggtgtacccctgtagtcccagctactcaggaggctgaggtgggaggattgcttgagcccaggagttggag

SEQ ID NO: 2696 - DNA, 621 bp, Homo sapiens
agtactactctggagtaatcatcatgtgggtgtcattcttttgattttctataatgtaaaagttatctttaccttgcaatccacttttatccaaaaaattgcttaagttaaacaacgtgtttcttgaagccaaatactgaataaaacgctggaaaaaaaaaattacatcatattaaggtactgccatctcaccaactctaattcgaaaattaggaggaaaagttatggttaacacattctrttaagcttatctagtttaaatttctcatcctcactctttccattaactagttaccaaacctaaaaacataatacatatttttcactagcatgcgagaatttattaaagcctaatgcccacagatatagtattaagtcaaaacaataaaagcaaataggcagtggaagcagtagttttggttttattacagcatactaaaactatagctaatcatttttaggtggcatctgtattttaaacagccgtctggtaaaccaaagttttggctttaaaaaaaaaatacttctaaacatacaagaaagcaatagagatcctcttacccactgtccagattaaacaaattcacatgttcacttcacatcttatatagaatcaaaaca

SEQ ID NO: 2697 - DNA, 1298 bp, Homo sapiens
gcatacaatgtgtaatggtcaaagcagggtatttagaatatccattgattgaacatttatcatttctctgtgttgggaatacttcgaatctcttctagctattttgaaatacagaatatgtcaactacagccacgctactgtgctactgaacactagaactcatcccttctaactgtatggttgaacccactaaccaacctctctttacgccccaacccacctcctccccagcctctgtaactatcactctcttctctacctccatgagatcaacttttttagctcccacatatgagtgagaacacgggagctcctgtaatatttgtctttatttctctaaatcttgatctaatcttacacaattatttcaaattctaatgcccaacaatattaaaagttttaataaaaagttctgggcctggcrtggtggctcactcctgtaattccaacacgttgggaggccgaggcaggcagatgacgaggtcacgagtttgagaccagcctggccaacatggtgaaaccctgtctttactaaaaatacaaaaattagccaggtgtggtggcagctgcctgtagtcccagctacttgggaggctgaggcaggagaattgcttgaaaccggaaggcagaggttgcagtgagccgagattgcgccattgcactccagcatgggcaacaagagcgaaactccgtctcaaaaaaaatacaaaagttctgagttttgttgttgtttttgtgttttaaagccattctgagtagaaaactgctactttctttcaattaacctcacctacaggaaacctacttatttggatcacaaagcaagaacaaacatctacagcagtaaatcctacttgtacacaaagtacccagaagagatggctttctaaaagttggctctgcaaattcaaagttctaaagagacagtaagcttcataccattctatcctacttttgctgtctgaatgtgtggcaggagcttaggtataggtttgaactaaaattcttcatctaactattcctttctaaactgtccactacctccatcagtcacaatggccactaaatctaaatttatcaccatagggaaggatcaccaaggacaaacttgtgaggaagattgttggggtcacatgaggaagaatcagtgagtatctgaattgttcctggcttgttgttctggcttagctccagtttcttccaactagttctccagcccctacagtcctcgtaaccttgacagttatcacatgattaagtatatacgaaagctggtgcaacattctcacacatgcat

SEQ ID NO: 2698 - DNA, 1294 bp, Homo sapiens
gtctctactaaaatacaaaaaaaaaaaaaaattatccaggcatggtgatgcacacctgtagtcccagctgcttgggaggctgaggcaggggcatcacttgaacccgggaggaggaggttgtagtgaactgagatagcaccattgcactccagcctggtaacagagtgagactccgtctcaaaaaaaaccaacgaaacaaaatattactataataaaaagggttattgcataataacaaaagatttaactcaacagcaagatataataattctaaatataacacactaataatactgtttctgtttataaaaataaacattaactgaactacaatgaaaagtagaaaaatcaataatcacaaaggaagactttaacatatttcttctcagtgttggataaaacaagcatgtaaggaaaataaataagaatttggaagatttgaacaacacaattaacatgaacatatatgaaatacgtttcaagaacaagagggttttttttagttgactatattctgaacaaaaagcaaatatcaagaaatttcaaagaaataaattcttatatggtgtatactcagaacatagggcagttgtctcacaaataaataaccaggaaagaataacctagaaaatgtccatgattggaaatacagaaatatacttttaaataactcagggattaagaaaaatataagagaaatgagaaaatattgttaacaatcaaaatttccaggatacataccaagctgttcctacaggaaaatgtatatccttaaatgcatatttgaggggaaaaaagtctggaaattagagaagcatctatctcaacaaattaggraaaagggctgcaaaataaacccatacaaataagtagaaaaaatgaaataataaagaacaaaaattaatgctattcctcctaacaagtcatcaaatctggggtggtctttgggactcctaacacagactatagatagatgattgataaatacacagaaagatatagagagaaggaacaaacacttttaaaatcaggtttacattcaccagataaatgaatttgcatatctaatcattgtatttcttcttattgccaaaaaagaaacttatactcatattttttgattcaatatatgcatttactcacctttagtaacttgatttctcgcattgcaatctttttaaccattttgtcatcgtcactttctaagaacttctttatggccacaattcttccagtatctttattcctacacttcatcaccattccataactcccttctccaaccaaacccagg

SEQ ID NO: 2699 - DNA, 1294 bp, Homo sapiens
gtctctactaaaatacaaaaaaaaaaaaaaattatccaggcatggtgatgcacacctgtagtcccagctgcttgggaggctgaggcaggggcatcacttgaacccgggaggaggaggttgtagtgaactgagatagcaccattgcactccagcctggtaacagagtgagactccgtctcaaaaaaaaccaacgaaacaaaatattactataataaaaagggttattgcataataacaaaagatttaactcaacagcaagatataataattctaaatataacacactaataatactgtttctgtttataaaaataaacattaactgaactacaatgaaaagtagaaaaatcaataatcacaaaggaagactttaacatatttcttctcagtgttggataaaacaagcatgtaaggaaaataaataagaatttggaagatttgaacaacacaattaacatgaacatatatgaaatacgtttcaagaacaagagggttttttttagttgactatattctgaacaaaaagcaaatatcaagaaatttcaaagaaataaattcttatatggtgtatactcagaacatagggcagttgtctcacaaataaataaccaggaaagaataacctagaaaatgtccatgattggaaatacagaaatatacttttaaataactcagggattaagaaaaatataagagaaatgagaaaatattgttaacaatcaaaatttccaggatacataccaagctgttcctacaggaaaatgtatatccttaaatgcatatttgaggggaaaaaagtctggaaattagagaagcatctatctcaacaaattagggaaaagggctgcaaaataaacccatacaaataagtagaaaaaatgaaataataaagaacaaaaattaatgctattcctcctaacaagtcatcaaatctggggtggtctttgggactcctaacacagactatagatagatgattgataaatacacagaaagatayagagagaaggaacaaacacttttaaaatcaggtttacattcaccagataaatgaatttgcatatctaatcattgtatttcttcttattgccaaaaaagaaacttatactcatattttttgattcaatatatgcatttactcacctttagtaacttgatttctcgcattgcaatctttttaaccattttgtcatcgtcactttctaagaacttctttatggccacaattcttccagtatctttattcctacacttcatcaccattccataactcccttctccaaccaaacccagg

SEQ ID NO: 2700 - DNA, 1214 bp, Homo sapiens
tttccatgcacattaaagttctaggaccctggttatagtaaccttctcatctcccatgagagggcttggggatagcatttgcaagatgtttttacgaatcttcagaggcttagagttgatttgtgtacagaagagctagagggaattgaataactataactgaagagttgaaaggcattttgaatttttgttccagagggaaacaaaaactggcctattttaaagtttgtatttctgacaggctgaccccctccaacttcacaattcttcaccaaagaactctttaaacatacatcgtttcctcagatgtagaatacaggattgattcaatggcatctagatccaaaaggtcagagtgctgtctgcagattcctgattgatactgttatcatagtatcagtcagcaaaataaaacaaacaggatatacattccctgacctggtttcctcttccctcaccattctttcctatatcttttatttgcatgtatttttagttcattgcaacctgatttatctgcatccatcgttagcttccccaattagctcaacaaacaagaggcctgttgcaaaggctcatttccaccttctctatctgggaagaaaaagatcatactctgacagttggagaatctccagttcttttcttatgagtggggataggtaatgacgtatttccaaattattgagatactgtttcctcttatttgtgtgctctctttacaacttgcaggtattagatggttttgagtttacataggcagagtagactctgacaagtcagactttgtcagactgaataarcttgctgagtttctgaaatctgtatctgtcattaattctgtaggtgctaaagtagcagaagaccctctctggctctgacaagagagactgcattggaccagagactggccttctagcctcactttcctcatttagcaaaattaagtatttaaactccatttatattcatagtactcatatctcattctggctgttgagcagactgtaagggatagtccaaagtgaggtttatcttaaatgtaagtgaaaagagtgagtaaagacattccaaaaaattccaaagacttccactattgtcttccgtgagaaattccaattctactactgcaaggcagattggagtatcgcttacttactcacgcagaacagaggtacattaaatcaccataagaaagccccataaaagctgca

SEQ ID NO: 2701 - DNA, 653 bp, Homo sapiens
taaatgtcttgaaatattgtctcaggtgaagtctggagaaagtattctgttcaattatacaaggtagaagaagaggaacgktttatatgtgtgtctgagatttggatggcaaaatgaatcctctgacaatgtgtaatgtttctaatataggtttggtgtttgaattcataatactcctgtggcataggaactaagagaaaggtaaactaaaattaaaaaattatatttcggggagtgaaaattctgagtgtgtagaagaaagaaagaaaaattattacagagaaaaacacactcaaaccaagctacacagaattcccaatgaaaacgctgctgtgagttggagtacaaataaatataaaaaatacagtaggaaaacatttacttttgagtaagatttgcaggttatagagttttagatgataaagcagactgatagaatctatgaaatatgtaggtgtaaatacacaaagatatttaaaaagttacgtccacaataaagacaaaatattattaaaaaattagtagaaaaaaattgaaaagttactaataaacaccaactaaaaaacttcctgaaggaattgtgtgtttgtgtgtgtgtgtgtgtgtgtatgtgtgtatgtgtgtggagctatacaaaactaagcagcaatgca

SEQ ID NO: 2702 - DNA, 1025 bp, Homo sapiens
aggcgctgtgtacttgtcagttgccctgctaataccttctgaaaagctgtctataacaacatttattttgtttacaaaaggaaaagacaagcagcaaagaaaacaaaacattagtgtcacattaatgtatcactttagagtttgccatgctctttcaaaaagagtattttgttttctagttagagacaacaaaaggcacatatgattgttttaatttcactgtggagaaagtatggcctggtcgggttacagtactttctcaaggtcttagctagcagaggargtaataataacaggaatttaaataatactaattaactcttctgagacagccaagtgaagaataaatgaagggaatctgcaatgtttaatagctctagacatggtttgtgtgttttaaataactttgtctattaaaacaagtgaaagtatttctgttattgatttacatttggctctcaatccgtaaactcgtctgatggctttaatagaagagatgtaagtaattatctaatgtgttaggaaaagataaatggaaaaaaatttctggcttccttttcctatgtacatattgacttttacaatgagaactatttcatctctgcctacaaattgaaccccaccccagaagacaagaggaataattaaacagaacaacaacaacaacaacaaaaacctgtcaatactactactctgaatttgagaattttgaggaatttggatatttgggaggcatgcctaaaatacataattattttgttttgagtaaatagatttattattatttgaatttatgctctagatgtttttatttgcactttagaaagagtgtatattaattataaaatactattttgttcataactctgtttagaaaatatgtcatcccatttctgtcattaactaagggatcagactcccgatcagggattacaagaaattgaaaaaggcctaatatcctagtaatacactcaaactataagtgtgtgagtatcattaaaataactaataaatgactattgctt

SEQ ID NO: 2703 - DNA, 1025 bp, Homo sapiens
aggcgctgtgtacttgtcagttgccctgctaataccttctgaaaagctgtctataacaacatttattttgtttacaaaaggaaaagacaagcagcaaagaaaacaaaacattagtgtcacattaatgtatcactttagagtttgccatgctctttcaaaaagagtattttgttttctagttagagacaacaaaaggcacatatgattgttttaatttcactgtggagaaagtatggcctggtcgggttacagtactttctcaaggtcttagctagcagaggaagtaataataacaggaatttaaataatactaattaactcttctgagacagccaagtgaagaataaatgaagggaatctgcaatgtttaatagctctagacatggtttgtgtgttttaaataactttgtytattaaaacaagtgaaagtatttctgttattgatttacatttggctctcaatccgtaaactcgtctgatggctttaatagaagagatgtaagtaattatctaatgtgttaggaaaagataaatggaaaaaaatttctggcttccttttcctatgtacatattgacttttacaatgagaactatttcatctctgcctacaaattgaaccccaccccagaagacaagaggaataattaaacagaacaacaacaacaacaacaaaaacctgtcaatactactactctgaatttgagaattttgaggaatttggatatttgggaggcatgcctaaaatacataattattttgttttgagtaaatagatttattattatttgaatttatgctctagatgtttttatttgcactttagaaagagtgtatattaattataaaatactattttgttcataactctgtttagaaaatatgtcatcccatttctgtcattaactaagggatcagactcccgatcagggattacaagaaattgaaaaaggcctaatatcctagtaatacactcaaactataagtgtgtgagtatcattaaaataactaataaatgactattgctt

SEQ ID NO: 2704 - DNA, 1025 bp, Homo sapiens
aggcgctgtgtacttgtcagttgccctgctaataccttctgaaaagctgtctataacaacatttattttgtttacaaaaggaaaagacaagcagcaaagaaaacaaaacattagtgtcacattaatgtatcactttagagtttgccatgctctttcaaaaagagtattttgttttctagttagagacaacaaaaggcacatatgattgttttaatttcactgtggagaaagtatggcctggtcgggttacagtactttctcaaggtcttagctagcagaggaagtaataataacaggaatttaaataatactaattaactcttctgagacagccaagtgaagaataaatgaagggaatctgcaatgtttaatagctctagacatggtttgtgtgttttaaataactttgtctattaaaacaagtgaaagtatttctgttattgatttacatttggctctcaatccgtaaactcgtctgatggctttaatagaagagatgtaagtaattatctaatgtgttaggaaaagataaatggaaaaaaatttctggcttccttttcctatgtacatattgacttttacaatgagaactatttcatctctgcctacaaattgaaccccaccccagaagacaagaggaataattaaacagaacaacaacaacaacaacaaaaacctgtcaatactactactytgaatttgagaattttgaggaatttggatatttgggaggcatgcctaaaatacataattattttgttttgagtaaatagatttattattatttgaatttatgctctagatgtttttatttgcactttagaaagagtgtatattaattataaaatactattttgttcataactctgtttagaaaatatgtcatcccatttctgtcattaactaagggatcagactcccgatcagggattacaagaaattgaaaaaggcctaatatcctagtaatacactcaaactataagtgtgtgagtatcattaaaataactaataaatgactattgctt

SEQ ID NO: 2705 - DNA, 654 bp, Homo sapiens
cattttagtgaagtaggtattttctgaaaacttttgacataagaagtaagaaacctaaacagaaatataaccacaaaaagactgctttaaaagaaacttaaaaaagaatgtcaacragtgctactgaaacaacttccaggtgtcttagtcagtttgggctactatgacaaaaatatcatgggctgatttgcttaaaacacacctacttctcatgtttttaaaggctgggaagtccaccatcaatgccccagtttattcaattttttatgagggctcttttccttgtttgcagaatgaagcctgcttgtcatagatagagagagacagcactagtctcttttactttttacgaggacaatcatcatggagtttccagcctcatgactttatctaaacctacttaccttccaaagaccccacttcctaatatactctcccagcaccttgggagttaggctttcgacatgagaattctgggggaacagaaacattcagtccacaacagaaagtaaattatttatcacaaaaagtctttctcttaagaacggtttagtcctatgttataaagcagattttgacctgagaaattcataattgataattatgaattaattttatgacaccagcataacaataatgtcagaaaacacgtat

SEQ ID NO: 2706 - DNA, 623 bp, Homo sapiens
tgggatggcctcaccctcagaaccttctagctgcttcttttggatgatcttcaggtcccatgtccttttatttgggggaccatgtgcatggccacacatacccaggtacacctgagcccaaggctggagaggccaggctggccccagggggattggagcacagggattgatgctgtggtgagccatccctagagtcagccctgcagcagattccgccctggaccgccagagcctggtcccacgtgtcttagtcttagctcttcccaggatccactgatgctctaaacccctgacttctggagagagacagaacatgagaggttctagcccttcgactgaggagtatctrtgaatcaaacgcagcagcttccttttgcctggatatccctcggtgctttctctgatggactgtggggtggggttgtcaccatcactgtggcctccagaatacacctctctttgcctggtgtctgtggcttttaacctcattctgttggtcctgggtcactgatggctctgcccagcatgacagtgagtgccctgcacatgggcaggcaccatgagtggcttgtccattaccggggccccagcagaaggccgagcacgtaggaggttcttttctc

SEQ ID NO: 2707 - DNA, 603 bp, Homo sapiens
tgggaggccgaggctggcagatcaccttaggccaggggttcaagaccagcccggctaacatggtgaaaccccatctctactagtattacaacaattagccaggtgtggcgcacacctataaactcagctactcgagaagggctgaggcgggagaatcacttgaacctaggaggcggaggctgcagtgagccaagattgcatcgctgcactccagcctgggtgacagaatgagactctgtctcaaaagaaaaaacagtactacgaaactgggttagctgataccaactaaatggttcttagctcacrggtgctatttaggactataaaattcaacttgttagtaatgaggacttaatgaaggcatcatacatatggggttattttcttggcactgtatggcatggaagagaaatataaaacatggaatctgtcttgaaggaggtaagttagacaacagcaacactctttaaaaaaataataaagtagaaaatcaaatgcaaattgtgtggcaggctgtatgtgctataggaattgaggtcaaaaaatgggcatgattaaagcagtattcaaagtggaacactataaactggaaaggagttaaga

SEQ ID NO: 2708 - DNA, 1234 bp, Homo sapiens
aatggcatctcttaaacagagaaagaaaaaaactcaagaattccggggattaagtccgctttgttcactattttaaaccttgttactttgtaagttacttaaacaaatgaatatcgtatgtggcaractgcctagttacctaacaactaatcttcccttcttcctcattgacagaccctatttctgggtagtggcaatttgttttaccccagatgatgaattataattggtatatgccagtataattggtataagccctttccccttttccattgtttggtcaggcatctgtgtgaaacttgctttatattattttgaccagtaatagaaagggcctgagagcttctagggtctttccttaatgagtaagaagaacaaggagaaagccctttctcgaatgctctctctctactctatatattactatgatgatacgctcttttaggagctgtcttgctaccatgaaaggaaaaacagaagagcttcagagacctggcaatctaacactgacactgctgagccagagagccaaccctgggattgcctgcctcaagacttatttagtaataaatgttcttgtgttttcgatcactgttagttgtattgttatggccaagcaaatgctcttaaaaaatattaagcatgaagtcaaaatataattctatccagtgaaagataatcttacctggaaattttgccaagtttatcactagtctataacttatctctgcatctgtaaattgaaactacacgtttgtggcactttttctcaattaggctatcagaataggactcataatcttcagattaactccatttaacaagcttgacattttatgttttgcataccaacttgtccaagacacacaacaaactatgaagataggtggcattactagcttcattttaaatgaggaaacaaaataatttaagttatgtgacctaaatagtccatttatttacgtttttaaactaatttctgacaattttgttggcccttaaatactcaaataaatgaaggaactgggatttacaaccagatcatctagcatacagtctttagcatgagatcagaaagagcaggaaaacattggtttaaagttgttggggaaggcataaagaagtaaagctttaaatgtctatagaaggatattacaagattaggaaagaaaagttagtcactctaacatatcacaaaaagtttgggcctactaagaaaatgcttaatttatgc

SEQ ID NO: 2709 - DNA, 1234 bp, Homo sapiens
aatggcatctcttaaacagagaaagaaaaaaactcaagaattccggggattaagtccgctttgttcactattttaaaccttgttactttgtaagttacttaaacaaatgaatatcgtatgtggcagactgcctagttacctaacaactaatcttcccttcttcctcattgacagaccctatttctgggtagtggcaatttgttttaccccagatgatgaattataattggtatatgccagtataattggtataagccctttcccyttttccattgtttggtcaggcatctgtgtgaaacttgctttatattattttgaccagtaatagaaagggcctgagagcttctagggtctttccttaatgagtaagaagaacaaggagaaagccctttctcgaatgctctctctctactctatatattactatgatgatacgctcttttaggagctgtcttgctaccatgaaaggaaaaacagaagagcttcagagacctggcaatctaacactgacactgctgagccagagagccaaccctgggattgcctgcctcaagacttatttagtaataaatgttcttgtgttttcgatcactgttagttgtattgttatggccaagcaaatgctcttaaaaaatattaagcatgaagtcaaaatataattctatccagtgaaagataatcttacctggaaattttgccaagtttatcactagtctataacttatctctgcatctgtaaattgaaactacacgtttgtggcactttttctcaattaggctatcagaataggactcataatcttcagattaactccatttaacaagcttgacattttatgttttgcataccaacttgtccaagacacacaacaaactatgaagataggtggcattactagcttcattttaaatgaggaaacaaaataatttaagttatgtgacctaaatagtccatttatttacgtttttaaactaatttctgacaattttgttggcccttaaatactcaaataaatgaaggaactgggatttacaaccagatcatctagcatacagtctttagcatgagatcagaaagagcaggaaaacattggtttaaagttgttggggaaggcataaagaagtaaagctttaaatgtctatagaaggatattacaagattaggaaagaaaagttagtcactctaacatatcacaaaaagtttgggcctactaagaaaatgcttaatttatgc

SEQ ID NO: 2710 - DNA, 1234 bp, Homo sapiens
aatggcatctcttaaacagagaaagaaaaaaactcaagaattccggggattaagtccgctttgttcactattttaaaccttgttactttgtaagttacttaaacaaatgaatatcgtatgtggcagactgcctagttacctaacaactaatcttcccttcttcctcattgacagaccctatttctgggtagtggcaatttgttttaccccagatgatgaattataattggtatatgccagtataattggtataagccctttccccttttccattgtttggtcaggcatctgtgtgaaacttgctttatattattttgaccagtaatagaaagggcctgagagcttctagggtctttccttaatgagtaagaagaacaaggagaaagccctttctcgaatgctctctctctactctatatattactatgatgatacgctcttttaggagctgtcttgcwaccatgaaaggaaaaacagaagagcttcagagacctggcaatctaacactgacactgctgagccagagagccaaccctgggattgcctgcctcaagacttatttagtaataaatgttcttgtgttttcgatcactgttagttgtattgttatggccaagcaaatgctcttaaaaaatattaagcatgaagtcaaaatataattctatccagtgaaagataatcttacctggaaattttgccaagtttatcactagtctataacttatctctgcatctgtaaattgaaactacacgtttgtggcactttttctcaattaggctatcagaataggactcataatcttcagattaactccatttaacaagcttgacattttatgttttgcataccaacttgtccaagacacacaacaaactatgaagataggtggcattactagcttcattttaaatgaggaaacaaaataatttaagttatgtgacctaaatagtccatttatttacgtttttaaactaatttctgacaattttgttggcccttaaatactcaaataaatgaaggaactgggatttacaaccagatcatctagcatacagtctttagcatgagatcagaaagagcaggaaaacattggtttaaagttgttggggaaggcataaagaagtaaagctttaaatgtctatagaaggatattacaagattaggaaagaaaagttagtcactctaacatatcacaaaaagtttgggcctactaagaaaatgcttaatttatgc

SEQ ID NO: 2711 - DNA, 1234 bp, Homo sapiens
aatggcatctcttaaacagagaaagaaaaaaactcaagaattccggggattaagtccgctttgttcactattttaaaccttgttactttgtaagttacttaaacaaatgaatatcgtatgtggcagactgcctagttacctaacaactaatcttcccttcttcctcattgacagaccctatttctgggtagtggcaatttgttttaccccagatgatgaattataattggtatatgccagtataattggtataagccctttccccttttccattgtttggtcaggcatctgtgtgaaacttgctttatattattttgaccagtaatagaaagggcctgagagcttctagggtctttccttaatgagtaagaagaacaaggagaaagccctttctcgaatgctctctctctactctatatattactatgatgatacgctcttttaggagctgtcttgctaccatgaaaggaaaaacagaagagcttcagagacctggcaatctaacactgacactgctragccagagagccaaccctgggattgcctgcctcaagacttatttagtaataaatgttcttgtgttttcgatcactgttagttgtattgttatggccaagcaaatgctcttaaaaaatattaagcatgaagtcaaaatataattctatccagtgaaagataatcttacctggaaattttgccaagtttatcactagtctataacttatctctgcatctgtaaattgaaactacacgtttgtggcactttttctcaattaggctatcagaataggactcataatcttcagattaactccatttaacaagcttgacattttatgttttgcataccaacttgtccaagacacacaacaaactatgaagataggtggcattactagcttcattttaaatgaggaaacaaaataatttaagttatgtgacctaaatagtccatttatttacgtttttaaactaatttctgacaattttgttggcccttaaatactcaaataaatgaaggaactgggatttacaaccagatcatctagcatacagtctttagcatgagatcagaaagagcaggaaaacattggtttaaagttgttggggaaggcataaagaagtaaagctttaaatgtctatagaaggatattacaagattaggaaagaaaagttagtcactctaacatatcacaaaaagtttgggcctactaagaaaatgcttaatttatgc

SEQ ID NO: 2712 - DNA, 1234 bp, Homo sapiens
aatggcatctcttaaacagagaaagaaaaaaactcaagaattccggggattaagtccgctttgttcactattttaaaccttgttactttgtaagttacttaaacaaatgaatatcgtatgtggcagactgcctagttacctaacaactaatcttcccttcttcctcattgacagaccctatttctgggtagtggcaatttgttttaccccagatgatgaattataattggtatatgccagtataattggtataagccctttccccttttccattgtttggtcaggcatctgtgtgaaacttgctttatattattttgaccagtaatagaaagggcctgagagcttctagggtctttccttaatgagtaagaagaacaaggagaaagccctttctcgaatgctctctctctactctatatattactatgatgatacgctcttttaggagctgtcttgctaccatgaaaggaaaaacagaagagcttcagagacctggcaatctaacactgacactgctgagccagagagccaaccctgggattgcctgcctcaagacttatttagtaataaatgttcttgtgttttcgatcactgttagttgtattrttatggccaagcaaatgctcttaaaaaatattaagcatgaagtcaaaatataattctatccagtgaaagataatcttacctggaaattttgccaagtttatcactagtctataacttatctctgcatctgtaaattgaaactacacgtttgtggcactttttctcaattaggctatcagaataggactcataatcttcagattaactccatttaacaagcttgacattttatgttttgcataccaacttgtccaagacacacaacaaactatgaagataggtggcattactagcttcattttaaatgaggaaacaaaataatttaagttatgtgacctaaatagtccatttatttacgtttttaaactaatttctgacaattttgttggcccttaaatactcaaataaatgaaggaactgggatttacaaccagatcatctagcatacagtctttagcatgagatcagaaagagcaggaaaacattggtttaaagttgttggggaaggcataaagaagtaaagctttaaatgtctatagaaggatattacaagattaggaaagaaaagttagtcactctaacatatcacaaaaagtttgggcctactaagaaaatgcttaatttatgc

SEQ ID NO: 2713 - DNA, 1297 bp, Homo sapiens
gtgaatggtgtatgccagtgtgaagatgtgcaacaatgccttacatactcattaggaaaaaaaaaaaaagcatgcttccaaaaacagcaccttcggaaaaattaaaaatttaaaactaacaagcaacaataaaaccaaccaaaaaaagggcaagttttactgcagtgttggtaagcatcctagtgctgatgttagtcaaattaccgtgtaagacggttttgattctaacagggtggttccaaatcactcagtctagtttcaccactatttatctgaagaataaactctgatttctaaagagcaaatatctgaaaaactcctgatctaaatcaattctcctatttttcagatgaagaaactcagggagttgaataatttgcctacagtcacattgcaaaatgtgtatcagagctaagactagagcccaggaaatcttgcactgacttttccaccttacaagataatgttattaaataatgtttaacattctcagataagaggggcttttaagaaacaacattaytgattttaacctatgcctcaaaatgtaataaattgataggaaatgttcctggtatcaaaagtaaactagtaaagaattgaagtcagtgatacagagaaatctaaacaacactcattatcggttctgctctggatattttctgttctttacacattattactctaagtcagcaatacccaacctttttggcaccagggaccagttttgtggaagacaatttttccacagcccaggagtccaggagatggtttcgggatgaaactgttctacctcagatcatcaggcattagtcagattctcataagaggcatgcaacctagatccctcgcatgagcagttcacaatagggttcacggtcccatgagaatctaatgccaccgctgatctgacaggaggtggagctcaggcgctaatgctcactcacctgccattcacctcctgctgtgcggcccagtctgctggtaccagtttgtcgcccgagaattggggatctctgctctaagtaccatccccagacaagtgacatgagcatcccctaggaacttagatatggagaatctcaagccccaatcaagacctaatgaagcagaatctatacagtatcctcaagtcattcatttgtacattaatgtgtgggaaccagtgcacaaagtgttgtatattgttgagactgatgctttcaataaatgaagcagtgttaatatgttagtcctattgggaagagcaattcacttgtgtagatgaatcctggagtctaaaaattacttaaatgta

SEQ ID NO: 2714 - DNA, 1297 bp, Homo sapiens
gtgaatggtgtatgccagtgtgaagatgtgcaacaatgccttacatactcattaggaaaaaaaaaaaaagcatgcttccaaaaacagcaccttcggaaaaattaaaaatttaaaactaacaagcaacaataaaaccaaccaaaaaaagggcaagttttactgcagtgttggtaagcatcctagtgctgatgttagtcaaattaccgtgtaagacggttttgattctaacagggtggttccaaatcactcagtctagtttcaccactatttatctgaagaataaactctgatttctaaagagcaaatatctgaaaaactcctgatctaaatcaattctcctatttttcagatgaagaaactcagggagttgaataatttgcctacagtcacattgcaaaatgtgtatcagagctaagactagagcccaggaaatcttgcactgacttttccaccttacaagataatgttattaaataatgtttaacattctcagataagaggggcttttaagaaacaacattactgattttaacctatgcctcaaaatgtaataaattgataggaaatgttcctggtatcaaaagtaaactagtaaagaattgaagtcagtgatacagagaaatctaaacaacactcattatcggttctgctctggatattttctgttctttacacattattactctaagtcagcaatacccaacctttttggcaccagggaccagttttgtggaagacaatttttccacagcccaggagtccaggagatggtttcgggatgaaactgttctacctcagatcatcaggcattagtcagattctcataagaggcatgcaacctagatccctcgcatgagcagttcacaatagggttcacggtcccatgagaatctaatgccaccgctgatctgacaggaggtggagctcaggcgctaatgctcactcacctgccattcacctcctgctgtgcggcccagtctgctggtaccagtttgtcgcccgagaattggggatctctgctctaagtaccatccccagacaagtgacatgagcatcccctaggaacttagatatggagaatctcaagccccaatcaagacctaatgaagcagaatctatacagtatcctcaagtcattcatttgtamattaatgtgtgggaaccagtgcacaaagtgttgtatattgttgagactgatgctttcaataaatgaagcagtgttaatatgttagtcctattgggaagagcaattcacttgtgtagatgaatcctggagtctaaaaattacttaaatgta

SEQ ID NO: 2715 - DNA, 635 bp, Homo sapiens
tgttagcaaaaatttaaagaaggcaagggggttagccatacagttatctgcaaartatgtgttccaggcagaaggactagccggtgcaaaaactctaaaatcaaatgtgccccaggtgttcaagtaaaacagagagtactggatggctagagcagaatgagcaggcagggagaatggaaggaaatgagaactaaaggggtgaaatgggcttgttgcctgatcagtagagccttactgattgttgtaaggtctttggtttttactcagaatgaaatggcagtttttcgcagggtttagaggcattacatgatctgaataagcagagggatagggagagagagcagaaggtactattttaacgagaatggtgaggcctctccagaaaggtagttttaggcaaaaataagtgaaagagaagaaataatctaatgtagcatcttttataaaaatgactatttaaaatgccatattaatactttgtttatattaaatatatggagatcttagttttgagcataatttatgaatgctattttgtgtttttaagaggctctcctcctaagaaatatctatatatctaatctctgttactttatctttccaaaagtaagttattgtagattgggaacatgata

SEQ ID NO: 2716 - DNA, 576 bp, Homo sapiens
caacttcctgactctgaaatattgttcatttccaaggtctgtcctcagtccactgttcttacctagatgttcatggtataagccacccactgtatgctgaagactgccaaatttgacttctagctgtgaactgacctggtgtttctgattctsatttttacagctaggcttcttattgccatctccacatggatattccactagcagcttttaagtctctaaaactcaagtaattctcggccgagcgcagtggctcacgcctgtaatcccagcactttgggaggccaaggcaggcggatcacgaggtcaggagttcgtagaccagcccgaccaacatggtgaaaccccgtctctactaaaaatacaaaaattagccaggcgtggtggcgcatgcctgtaatcccagctactcaggaggcagaggcaggagaatcgcttgaacccgggaggtggaggttccagtgagccgagatcatgccactgcactccagcctgggtgacagtgagattccatctcaaaaaacaaacaaacaaacaaaaaccaaaaaaaaaaaccacacaaaaactcagtaattc

SEQ ID NO: 2717 - DNA, 1784 bp, Homo sapiens
tggtatgaaaataaatctttctgaagatgaactcagttgttagacgttatataccacaggagaagccacaatcacattcagcagatgccaaaatcatagaactaacaacttgagaactggtaacaaagagactttaaggtagatatgtttaaaatatgtaaaactgtagagaatagaacttataagccagaaatagtgaaaaaatagaatagattggattttataaagaatctaaaagtacatcctcaaagaaaaaactctatactaggtaggtaaattggaaaactataggtttaaaaaaatggtatagaagataaagtaaatcatcactgtacaaatttgtatagaaaatttaaaagatgacatggaggctagaatgagatgcacctccatggcaagtaggagctctgaaagagcagaattgattatgtaggagagataatattcaaatgaataaaagttgagaatgtcttagatttactaaaacatgcaacaacaaacaccatgtcatatacttaactcataataacaaaataaaaaataagcactaaaagccacyagagaatgggatgattagaaaataagtagaagtgtggcagactcaagcccaaccataataattacatgaaatataagtactttaaatactttgatatagaggcagatgttgttgtagtggataaaaagcaagacctgactatagtctgtctaaaagaaatgtactataaaagtaaagccacagttaaaaaatatggaaaattatatactatgaaactattattgaaaagctagatgacaatattaataccagactaagtagacttgagtacaaggcatattaccaaagataaaagaaacataatcgcgggagaatcaatttttcaagaaggtaacacttcaaatttgtgtacactcattgtcaagcaaaaattggcaaaactgaaggcagatatagacaaatccacaagtacaaatggagattttcagagttctctctcagtaattaatagaacaagtagaatcagtaaagatacagataatttgaacagtactatcaataactagacttaattgacatttatagagttaaatggcaattccacacaataacagatagaatacacatttatatgcatatgaaacatttagcaatacagattattgggctattaagtcttcataaatttccaaggatggaaatcatatagataaagttctccatccacaatggaattaaattacaaatcaacagcaaaaagatgtttggaaaactgcatgtgtttaggaattaagtaacattcttccaaatacaacacatgggccaaaaaacagatcatgaggaaaactttagaaaaaactttgaactgaatgataatgaacatacatataaaaatttgtgagatgtagctacagcagtgcctagaggtaaatttacagctataaatgcttacattagaagggaagaagggattaaaatcattgctctatacttccaccgtaagaagctggaagagcaacttaagccaaataagtggaaagaaggaaataataaagatgaatccagaaatgagtgaaataaaaaatagagaaaataatgaaagcaaatactagtactttcttttttacattttttattttatcttttttaaaaaatttcaatagtttttggggaacaggtggtgtttgattacaatgataagtactttagtggtgatttctgagattttggtgctcccatcacccaagcactgtgtactgtacacaatgtgtagtcttttatccct

SEQ ID NO: 2718 - DNA, 651 bp, Homo sapiens
atctcaaaagcatacttactctcaatttcgcttctcattcgtttttatgatgccagagaaattcagattatataggctttctttgtgctgagatggtaattttatatcactgtagattaatagcatttttagtgatatttggtatcactcatttgtctcctatggtcataaagatatatattttttctaatttggcttttccaacaaataaaaaataagagtctttttctgttgaatgagggaaaaagtcattctgatcatgaagaattattctcttttaacatacccacaatccaccatctaattgttttggttattgcagcaatacagtttctacaaaaatgtgtgtgtgcatgagtgcatatatacagtctgtcctgcagaagattttctcctttttgctacttgatctttgrgttctcattactgagaactctgttacagcttgttcatctaggtactcctgtttaggaagatgtaaactttcccttccttccccttcctctcccttgattctagagtttcgcccacattttactttgtgaacatattgatatttctggaattctattctgggaactgattctgcagtgctcacaggaacaagtacccattccagggatggttattatgaaacagaaaggcagtcag

SEQ ID NO: 2719 - DNA, 608 bp, Homo sapiens
gggctttggtcctgatgtttgattgcatgcactctaacaggactaaaaggaaacatcaggttttcagaatttgggttataatgattggattataggttttttatttctttagttttttggggggagggccaacaatgttcctgctatatgaaatacattttaaatatgactttacagaatatcaccatcaaaatagtttgccagccatcaytgaaaccaaggcttagtatttttcaagttgctctatatgaattcctttgttacaataatttgctacatgtccctcatcacgctagatactattaaagatgcaaaagaaacacatgatatagcccctgccttctgaaagctgacataaggtaaaataaagagcattataagaccaaaagggttcactgctaaaatgtgtacgatgagctacgcatgccatgaaaaaccagccagatggcaggtatgctgaggacaaagtaattaatgatggagggagctggatttgagaggatacctggcagaagatacaatggaaagagtagggtattcagttcagtgaactgtatatgcaaaaatgtgggaaaaccaaccaaaagaagatggagtgtggttttctt

SEQ ID NO: 2720 - DNA, 613 bp, Homo sapiens
ccttcctctctacctcgtccactgcctaagccttagttattcttcagttttcattttaacacattacttatttaaagagacttttcctattacctggatacatttgcattcccttctgctaaatgtttctagaagcaccttgtactttctttatcatctccattatcaaactgtattacagttatttatttagtgtctgttttactgaatagcctgtaattcatgaaggtggggaagatgacttcgttgytcaatcctgtatcaaatatctggttcctactgcagtgcccaggacaaagcaagacattaacaactttagcttgaatattaactaataatgtagttaggctcataaatatcctattatctgatgaccccaagtgctccctgaaatttccttggccacttgggctgctcctctgggatcctggacctccccttgacctagaaacttaaaggctagtactggcacagcaggggtcctccaggatctttcttcagtcctaaggcttggggccattctggttggttgttgtttaggacatagcagttgtaaaatagtttgaccccatccctgattatatgaatgaatgaattagatccagaagctcca

SEQ ID NO: 2721 - DNA, 593 bp, Homo sapiens
tgactggttctttcctgactatcacaatcttcatcagtaggggttkcaagcttctcactcttctccagttgccaactctaatcctctcaatctcaacagctgttttttgttgttttttttttttgagacagttttcactcttgtcgcccaggctggagtgcaatggcgcaatctcggctcactgcaacctccgcctcccaggttcaagtgattctcctgcctcagcctcccaagtaactgggattacaggcatgcgcctccacgcccgtctaattttgtatttttagtagagatggggtttctctatgttggtcaggctggtcttgagctcctgacctcaggtgatccacctgccttgggctccaaaagtgctaggattagaggcgtgagccaccgtgcccggcctcaacagctgtctttacctccaacttcactgggctcaaagcacctcagcatcttcctgtagaattactctccttttccttcattactgtttatgagtaataatcaactctttcttacatcctttttctatttccaatcccttctgcctcctcttggaccttctctttcttgcaaatggcttcccatct

SEQ ID NO: 2722 - DNA, 1168 bp, Homo sapiens
tgcattatctcatctgagcatcacagcaatgttacaagactatcctcatttgaaggaggggaaaatggcagttcaagaaaatgaagtgctctggctaaaaatctggcgtaaatacatttctatggtgtattaatgtgttaatctgctaataaaaacaactgcatgtatagaagtatgtgaagagaatgatataaatctggtatttcatagattctaacaagttattgattttcactaaagaaatatgtaaacaaaacatttttttcttcaagttctttttactaaatggtttctgatgagtcagtttctcttgccttttccatttccttcttcttctccctaaacatgtaagtacatacacgcacaccagtttgtactcacatatgcccttcttacaacacatgacacattttgacaggcatgctgtcatttggaatagtctgaaaattgtgcatagcaaagttaacttggtttctttcacagtgtgctttaatcaacaattgcatcaataccagctctaaacacattctgagtcaagaaacgttaatagatgaatggactaaagatggaattattacacctaatatctggaatgtatcactgcacactgattttgactattgggtactatatactgcaacaaagtcctattttctgatctagctttacaagactatatagccttaaattgaaaaattcaggaataactatgaataaaaagatggtactttaatatacggtttgcattctttttgtttgttttatttggtgtatttatttgtatgctcatttggtaatgttgaaattaaggagaagggaagctgtggcaggccgacatggtactgggggcaagaactggtacactaatggagtgaaatccttacctgttagaggggtacaggacactccagcatcttctttatggccacagttatgctctccccaggagctctttggacactgctcaattgaaagctcattcccagtgcagcgtacttcatccaacataactgggccagacccttccccaaaatatgcctgatgccatgctttggcaatgccactgaacaaataaaagaatgtaaggattctggattagataccaaagattggtcttttattttttttttgtccctagtraaagcattattattaatccccacttatt

SEQ ID NO: 2723 - DNA, 1275 bp, Homo sapiens
  misc_feature (1)...(1275): n = A,T,C or G
atttgggggaaccgtgccatgcgcccctcagagcaggagcaatcttgagaaggcgcaggcagagagcagcgggcggcttctccagagcaagtaattaagtcccgtgactccctagaactcagtgttcagttctgaaaaaaaacttcgggttcaaactccytaagtctatggtccttgcatcagacgcctcttccctgggattgctgggaactgaggaaggaagggcgctgcagagctaacgatagcaaggggctcagagctggccaccccagctccctggtggcaggagagctaatgtgagctgatggaaactgagaagcagcagataaaggaaaagccatctgccctgcctctattgcctaaaagtagaacataaatccgcaaaagtgaccatttccctctccaacagaaaggacagaaattcatcaccagggaccccaggccctcaacagcctggaaccagccccagaggcatttgtgtggcaaacctctgcagccccggcctcccttcctgtagttgccccagagaggcctcctcaaaacgtgtttcctgggaactcaaagtcctttgctttggtcttgcagcttcttggaaaatgattgttcttttgctgaggggctgtgcagcagagttctaacgatccattcgagtttccatcttggggcgctcagggggctccctcgtggaagcaggagtccaggctaataacccctgtgagttttcctcctgtgactctgccttttgtcagtctaatttcaatgccccagaaaattaatctaagatgcagggagagaaaaggtttcttcttcccctacagatggatgtcagtcatctctattcagccaagaagtagttaacctaaacaatgaaaacaccaccggttccagtagagacttgagactatctgatgagagttatgtgtctctgggaggaagttttcaatacagaaatggatttattttatgaaacttaaaagactaataatctgcaagcctataagaatgttttaattctgtaaaatattttacaataagaaaagaaactagagactaagcaacatatgatcagttaaacttgaataacaatatattaatattggtcaataacaaggaatgatctctctagtaactgccgtttccaagcatagtagagaaggataagcatgtttctttnnnnnnnnnnnnnnnnnnnnnnnnnnnnnnnnnnnnnnnnnnnnnnnnnnnnnnnnnnnnnnnnnnnnnnnnnnnnnnnnnnnnnnnnnnnnnnnnnnnntc

SEQ ID NO: 2724 - DNA, 1082 bp, Homo sapiens
gaatgtgaagaatatataaatgaatgtatcaaatatataacatgagcatacatatctgtagaggataggtaaagaaatatgtaaaacttattaaaaataaaggatttctcaagtataaaatattctacatttggaagaaaatggctcaatttataaggcataaattattctgcatttggaaggaaatatgagagaattagaatataaaagtcaattcaaagagaaaaaaatagaaattttttgtggaaaaaagtaggttccttttgttaaaaataaatacagattgttttgggtctaacattgtcatgatatccgggttccattggtatctgtcagtcaygcccgtgtgggaacaaccagcactgaggttctgtgtgtggcagctgcagagtcatgcaacacaaccagggctgagtctgcagagtctgaagctgcatcatggacaactggtattgggaggctttgcaaggcacatgacaaaagagtcaggcgtgactaggatgcaggctttgaaaatcctcccatgtatctgatatgtacacacttaaaaaatacaaggagtgaagtctacaagaatcgtgacaagataaataactttttaaaacatttggagtgtttgggaatataaatatttaaaaattagtggttttgtcataaattaccatcgcctttatggttataacatacattagtcattcgtattaaatgtgaccgatttagatgttctgcacaggaatgaaaggactaaggttctactaagaactgtttgtaacctgggcaacatttgtgaaggaaagatccgttttgtccttgaggtagactgaagagctgagactcttccagtttaaaagtctctaaggccaccacgcagctccgtacattagaggagaggagcttttattcttactgttgtgcaccagctgctacctcatccaggacacattggatgatgagtggtcagcagcggcaggaggcttggggacatggttacttctctatgtctgcagggaccataaggggagaataattctgttattaatacttcattaatctccagcacaccaaagtggctcaatttgcaa

SEQ ID NO: 2725 - DNA, 1082 bp, Homo sapiens
gaatgtgaagaatatataaatgaatgtatcaaatatataacatgagcatacatatctgtagaggataggtaaagaaatatgtaaaacttattaaaaataaaggatttctcaagtataaaatattctacatttggaagaaaatggctcaatttataaggcataaattattctgcatttggaaggaaatatgagagaattagaatataaaagtcaattcaaagagaaaaaaatagaaattttttgtggaaaaaagtaggttccttttgttaaaaataaatacagattgttttgggtctaacattgtcatgatatccgggttccattggtatctgtcagtcacgcccgtgtgggaacaaccagcackgaggttctgtgtgtggcagctgcagagtcatgcaacacaaccagggctgagtctgcagagtctgaagctgcatcatggacaactggtattgggaggctttgcaaggcacatgacaaaagagtcaggcgtgactaggatgcaggctttgaaaatcctcccatgtatctgatatgtacacacttaaaaaatacaaggagtgaagtctacaagaatcgtgacaagataaataactttttaaaacatttggagtgtttgggaatataaatatttaaaaattagtggttttgtcataaattaccatcgcctttatggttataacatacattagtcattcgtattaaatgtgaccgatttagatgttctgcacaggaatgaaaggactaaggttctactaagaactgtttgtaacctgggcaacatttgtgaaggaaagatccgttttgtccttgaggtagactgaagagctgagactcttccagtttaaaagtctctaaggccaccacgcagctccgtacattagaggagaggagcttttattcttactgttgtgcaccagctgctacctcatccaggacacattggatgatgagtggtcagcagcggcaggaggcttggggacatggttacttctctatgtctgcagggaccataaggggagaataattctgttattaatacttcattaatctccagcacaccaaagtggctcaatttgcaa

SEQ ID NO: 2726 - DNA, 1082 bp, Homo sapiens
gaatgtgaagaatatataaatgaatgtatcaaatatataacatgagcatacatatctgtagaggataggtaaagaaatatgtaaaacttattaaaaataaaggatttctcaagtataaaatattctacatttggaagaaaatggctcaatttataaggcataaattattctgcatttggaaggaaatatgagagaattagaatataaaagtcaattcaaagagaaaaaaatagaaattttttgtggaaaaaagtaggttccttttgttaaaaataaatacagattgttttgggtctaacattgtcatgatatccgggttccattggtatctgtcagtcacgcccgtgtgggaacaaccagcactgaggttctgtgtgtggcagctgcagagtcatgcaacacaaccagggctgagtctgcagagtctgaagctgcatcatggacaactggtattgggaggctttgcaaggcacatgacaaaagagtcasgcgtgactaggatgcaggctttgaaaatcctcccatgtatctgatatgtacacacttaaaaaatacaaggagtgaagtctacaagaatcgtgacaagataaataactttttaaaacatttggagtgtttgggaatataaatatttaaaaattagtggttttgtcataaattaccatcgcctttatggttataacatacattagtcattcgtattaaatgtgaccgatttagatgttctgcacaggaatgaaaggactaaggttctactaagaactgtttgtaacctgggcaacatttgtgaaggaaagatccgttttgtccttgaggtagactgaagagctgagactcttccagtttaaaagtctctaaggccaccacgcagctccgtacattagaggagaggagcttttattcttactgttgtgcaccagctgctacctcatccaggacacattggatgatgagtggtcagcagcggcaggaggcttggggacatggttacttctctatgtctgcagggaccataaggggagaataattctgttattaatacttcattaatctccagcacaccaaagtggctcaatttgcaa

SEQ ID NO: 2727 - DNA, 1082 bp, Homo sapiens
gaatgtgaagaatatataaatgaatgtatcaaatatataacatgagcatacatatctgtagaggataggtaaagaaatatgtaaaacttattaaaaataaaggatttctcaagtataaaatattctacatttggaagaaaatggctcaatttataaggcataaattattctgcatttggaaggaaatatgagagaattagaatataaaagtcaattcaaagagaaaaaaatagaaattttttgtggaaaaaagtaggttccttttgttaaaaataaatacagattgttttgggtctaacattgtcatgatatccgggttccattggtatctgtcagtcacgcccgtgtgggaacaaccagcactgaggttctgtgtgtggcagctgcagagtcatgcaacacaaccagggctgagtctgcagagtctgaagctgcatcatggacaactggtattgggaggctttgcaaggcacatgacaaaagagtcaggcgtgactaggatgcaggctttgaaaatcctcccatgtatctgatatgtacrcacttaaaaaatacaaggagtgaagtctacaagaatcgtgacaagataaataactttttaaaacatttggagtgtttgggaatataaatatttaaaaattagtggttttgtcataaattaccatcgcctttatggttataacatacattagtcattcgtattaaatgtgaccgatttagatgttctgcacaggaatgaaaggactaaggttctactaagaactgtttgtaacctgggcaacatttgtgaaggaaagatccgttttgtccttgaggtagactgaagagctgagactcttccagtttaaaagtctctaaggccaccacgcagctccgtacattagaggagaggagcttttattcttactgttgtgcaccagctgctacctcatccaggacacattggatgatgagtggtcagcagcggcaggaggcttggggacatggttacttctctatgtctgcagggaccataaggggagaataattctgttattaatacttcattaatctccagcacaccaaagtggctcaatttgcaa

SEQ ID NO: 2728 - DNA, 1082 bp, Homo sapiens
gaatgtgaagaatatataaatgaatgtatcaaatatataacatgagcatacatatctgtagaggataggtaaagaaatatgtaaaacttattaaaaataaaggatttctcaagtataaaatattctacatttggaagaaaatggctcaatttataaggcataaattattctgcatttggaaggaaatatgagagaattagaatataaaagtcaattcaaagagaaaaaaatagaaattttttgtggaaaaaagtaggttccttttgttaaaaataaatacagattgttttgggtctaacattgtcatgatatccgggttccattggtatctgtcagtcacgcccgtgtgggaacaaccagcactgaggttctgtgtgtggcagctgcagagtcatgcaacacaaccagggctgagtctgcagagtctgaagctgcatcatggacaactggtattgggaggctttgcaaggcacatgacaaaagagtcaggcgtgactaggatgcaggctttgaaaatcctcccatgtatctgatatgtacacacttaaaaaatacaaggagtgaagtctacaagaatcgtgacaagataaataactttttaaaacatttggagtgtttgggaatataaayatttaaaaattagtggttttgtcataaattaccatcgcctttatggttataacatacattagtcattcgtattaaatgtgaccgatttagatgttctgcacaggaatgaaaggactaaggttctactaagaactgtttgtaacctgggcaacatttgtgaaggaaagatccgttttgtccttgaggtagactgaagagctgagactcttccagtttaaaagtctctaaggccaccacgcagctccgtacattagaggagaggagcttttattcttactgttgtgcaccagctgctacctcatccaggacacattggatgatgagtggtcagcagcggcaggaggcttggggacatggttacttctctatgtctgcagggaccataaggggagaataattctgttattaatacttcattaatctccagcacaccaaagtggctcaatttgcaa

SEQ ID NO: 2729 - DNA, 1012 bp, Homo sapiens
cctggcatctagaacaatgactgcatagaaggagctcagacttttgaggatatgaaatgatcaaactcatctctgtatcccggcatctagaacgatgactttacakaaggagtacggacttctgaggatatgaaatgatctaacgcatctctgtatcccggtatctagaacaatgactttacagaaggggcacggacttctgagaatatgaaatgatctaacgcatctctgtatcccgacatctagaaaaatgactgcacagaacgggcatggacttctgagaatatgaaatgatctaactcatctctgtatcccggcatctagaacaatgagtttacaggaggagcatagacttctgagaatatgaaatgatcgaactcatctctgtatcctggcatctagaacatgactttacagaaggagcatggacttctgagaatatgaaataatctaactcatctctgtatcccggcatctagaacaatgactgcatagaaggagctcagacttttgaggatatgaaataatcaaactcatctctgtatcccagcatccagaacaatgactttacagaaggggcacggacttctgaggatatgaaatgatcaaactcatctctgtatcccggcatctagaacaatgactttatagagggagcatggacttctgaggatatgaaatgatcaaactcatctctgtatcccaacatctagaaaaatgactttacagaaggagcatagacttctgaggatatgaaatgatctaacgcatctctgtatcccggcatctagaacaatgactttacagaaggagcacggacttctgaggatatgaaatgatcgaactcatctctgtatcccggcatctagaacaatgactgttccacagtagaaacagtatttcttaaggaaagaaacatagttggaataggtgtatagtatagtgtatttttttgagagctatcaaaaggcaaatctttccaatagtctccccagttgatgcctctcctggt

SEQ ID NO: 2730 - DNA, 1012 bp, Homo sapiens
cctggcatctagaacaatgactgcatagaaggagctcagacttttgaggatatgaaatgatcaaactcatctctgtatcccggcatctagaacgatgactttacagaaggagtacggacttctgaggatatgaaatgatctaacgcatctctgtatcccggtatctagaacaatgactttacagaaggggcacggacttctgagaatatgaaatgatctaacgcatctctgtatcccgrcatctagaaaaatgactgcacagaacgggcatggacttctgagaatatgaaatgatctaactcatctctgtatcccggcatctagaacaatgagtttacaggaggagcatagacttctgagaatatgaaatgatcgaactcatctctgtatcctggcatctagaacatgactttacagaaggagcatggacttctgagaatatgaaataatctaactcatctctgtatcccggcatctagaacaatgactgcatagaaggagctcagacttttgaggatatgaaataatcaaactcatctctgtatcccagcatccagaacaatgactttacagaaggggcacggacttctgaggatatgaaatgatcaaactcatctctgtatcccggcatctagaacaatgactttatagagggagcatggacttctgaggatatgaaatgatcaaactcatctctgtatcccaacatctagaaaaatgactttacagaaggagcatagacttctgaggatatgaaatgatctaacgcatctctgtatcccggcatctagaacaatgactttacagaaggagcacggacttctgaggatatgaaatgatcgaactcatctctgtatcccggcatctagaacaatgactgttccacagtagaaacagtatttcttaaggaaagaaacatagttggaataggtgtatagtatagtgtatttttttgagagctatcaaaaggcaaatctttccaatagtctccccagttgatgcctctcctggt

SEQ ID NO: 2731 - DNA, 1012 bp, Homo sapiens
cctggcatctagaacaatgactgcatagaaggagctcagacttttgaggatatgaaatgatcaaactcatctctgtatcccggcatctagaacgatgactttacagaaggagtacggacttctgaggatatgaaatgatctaacgcatctctgtatcccggtatctagaacaatgactttacagaaggggcacggacttctgagaatatgaaatgatctaacgcatctctgtatcccgacatctagaaaaatgactgcacagaacgggcatggacttctgagaatatgaaatgatctaactcatctctgtatcccggcatctagaacaatgagtttacaggaggagcatagacttctgagaatrtgaaatgatcgaactcatctctgtatcctggcatctagaacatgactttacagaaggagcatggacttctgagaatatgaaataatctaactcatctctgtatcccggcatctagaacaatgactgcatagaaggagctcagacttttgaggatatgaaataatcaaactcatctctgtatcccagcatccagaacaatgactttacagaaggggcacggacttctgaggatatgaaatgatcaaactcatctctgtatcccggcatctagaacaatgactttatagagggagcatggacttctgaggatatgaaatgatcaaactcatctctgtatcccaacatctagaaaaatgactttacagaaggagcatagacttctgaggatatgaaatgatctaacgcatctctgtatcccggcatctagaacaatgactttacagaaggagcacggacttctgaggatatgaaatgatcgaactcatctctgtatcccggcatctagaacaatgactgttccacagtagaaacagtatttcttaaggaaagaaacatagttggaataggtgtatagtatagtgtatttttttgagagctatcaaaaggcaaatctttccaatagtctccccagttgatgcctctcctggt

SEQ ID NO: 2732 - DNA, 1362 bp, Homo sapiens
ttcagctttgtattttagcaagtgtggatacagttagttgctgtcatgttgtggatatatcacaatatatttaataatgaaacaaatagtttcctaaacaggagccctgaatgtatttacaaagattttcatttgcttttctctcctcaggttaggctagccatgaaaaatcaatatttgtcatcagtcattaccaggtaatactggttgtgatggtgtcagcrttttaaagcagaaagattctggaaaagggtttcaaaagtgatttaaaaaaaaaagacgtctttgttctgtctaattaaaattcccttctcgttgctcatgaaactcatacttaaaattttaaatgatttgccccctgtgcatccaaatcaataagggccccaaggggctgctctcatgctgcccactgaacttacctagagctgagtgttaaatggaaaactgatcttggggatgccattataatccattttcagagatcttcccacaacatacaggcagggccaaggagagaagccgtgggcctgtcctgtgctccctgccagagcttcttggtgtgtggtcatgacagccactttgtgatctctcagtaccctttcgctcactatctaaattatagctcttgatgacaaggagtttccttcatctctgcatcaatgcctaatacaatgcctgatacacagtatgtgcccccagattgttttgccgattgaataattaagcaaattgtcttgtcagatagtcatctagcctcctcttacatcctctcaatggcagacactccttacattctaagacggtctcttccttccatgttcttctctgttaatgctattcagtgtgacaatgtccatgtcacctaaatgtcattaagccatgcaaggttttgtcttgcagactttttattgtccaaacgctatctgtgctctcctacattaacgggattttatctgcatgtagttcccatttcatgcttccctgctctgtttcattataatactgcttggtttctgatacacacacacagattatcatatactaaatcaatgggttaattgtaaattaatgtaattaactgtaattgttatattaatatataatacaagtgttaattaatgtttgtgtaagaaaatatagtagtatatatttaaccaatctgagtgctatcatacatccactcttagtcaatgaatccccattctcctgagttaaatttgttcaacaacatttgattaaagttaaaattgtttggcaatatttttgtgctgctctgggctcactttctgccatttgtggtctgttctggtgaacaattctaagccgtaatgcctggtaagtgacaatgctgcataagctaca

SEQ ID NO: 2733 - DNA, 1248 bp, Homo sapiens
attctaccggcaattctgttttctttgtaagattaagtaaccctgcaattaattttatatttaaaagttgatgtttctttgaaaaaattgtgagccccatgtccaaaagacattctgtactttaaaattgacttccctgaataagtctcttttatgcacacatacaaagaattttatgttaaaagcatggatatcatcataccacagacttcgtttaatatttcttcctttctttcttcttttttattttttggcttgacttctccatcttcttcccctctgtccttcattcacatctcttgcccctgcgagtaactcttattgacaacctggtttatattctttcatgtgtttttaaaatattgaataatcataaacatttacatattctaagaggaatttttagtcaaaaaatggattatattttctctgagggttttctgtcaaaaaaacagatcatatctatacatttttcttcatcttggttttctcattggacagcaccttatggaaattccccaagttatttgtcatagctgtattttagtaacttttatttgtttaataatttcataataktacaaggtatggacatttaacagtttagtctgtctttcccctatgggtgctcatttgtttcgggttagtttttatgttactatgaaaaaggctataatatatattctttaaaaaatatccttatagacttatacttcaccttttatgagacagacatttatggactaacactgacttaacagatattagcatattgctttttccaaatggcagtaaaatacatactcctatcagctttggataagattatactttttcccataaataccaagtaataggtgtttatccattcaacaagagaaagcccctcccctcatgatgtctacattagtcatcaagatggataataactaaatagctctataaagtcacaaatgtgctgtgaggaaaaataaaatagggttaaggaataggaatggggatagctattttaaataaagatgtttatataaggccactccaaagagaatattttgggggctcaatgaagtgagggagtaggccatgtaatatgtggggtaggaggaggcttccaggagaaataataacaaatgtaagatgtcagaaaagagcttgacacttgtgtgaagactggattcgaagttattgtcaggtagtggaagtgaaagatgtggggacttggcctaaggtggtagctgtggagatgat

SEQ ID NO: 2734 - DNA, 730 bp, Homo sapiens
gaggcctcaggagacctataatcatagtggaagatgaagggagaagcaggaatgtcttacgtggctggagcaggaaagagagcatgggggtttcagggggaggcgctacacactttaaagcaaccagatctcacaagaactccctcattcactatcacaagaacagcagtaagggcatggtgctaacccgttcgtgagaactccatctctgtgatccaatcacctcccaccaggcctcacatccaacacaggggattacaattcaacatgagatttggtggggacacagatccaaaccatattataaatctaataagaagttagccaaaaayagtagaaattttgaagaatatacaagtattatttaatttatcctttttattttccagtttatatatgctttataatatacacaatatagtagtatattagtagactataattaagtagatgcgtgtaatatgaatgtgtttagtagttaactgatattgtttataatgaagcaacttctaagccattagtctataagttttatgagcttgtttgttcatatttatcacttagtacctagcaattaagtcatgtacagaatctctcaaagccaggccagatgctgttttctttattgtataccacaattctaaagacccctgttttttggaatagagtagattagtataatagtcaattcagccgaagtagttagtatgcagatattgtgatagaatta

SEQ ID NO: 2735 - DNA, 1261 bp, Homo sapiens
tctccaatcgtgtgataaatattcgctgtataggactgaaaacactgttgattttattaatctttcagttagtctggagtagatattttcattagatttacagaaaccactatacatttttgaaagtaacatttcttaatatgaatttgatgtggaagactatcatctcttttactcgaccaaaataaaactctttggagacactttatttttatttcgttttactaaagcaatgtttgtttaggttatgttgtgaagtatatacaaaccatgtggattttgatactgaaattcagttcaaatgtatatcttctataaacattaaaagagctctttcataaatgtcctaaaaacagtgattagaatcgtgcctgaaacagcatgattctctgattcatttgagttgttttaaaacaactcacataacattattgcctttggactctttcttcttttcatcagttgaaatgtgtacttttaaatcatttcttaatttaactttctcacttttttttcagtatgtaacttgtccatccttttrctgacctttataagtggttctctttgttataagaacaaagtaacagtgccctcttacttgataattatcaggaaactacaagatcaaagaaggaatagttaattttatgtcttcttctttctctaaatcttctatgctctttgatgtcactccttattgatcaggaaagaaagtctatctcaagtaggggtacgggtcagcaaacacaacttctgagctcaaagacatcatttaaaataaaaatagagattattttgttactgactaggataactacatatgtttattttttctgtcaaacacatagcaatcaggaaatattgaaattattttcattaaacctcacataatttttgcaatacagtattgaacttgcttatattaattagctgagtacaagtccatttcttacaaaatatattaggccaaagcctataacccctatctccattttataattatctatgcttagatagtgagcaaggactgaattcattgtcttatgttttttttaggtgcattcttttgcattagttagctatttgttctgctggataatttctattaattaaagttggtaatcccagaaaatgaagcccagtacattcatctcgagtcattatcgccttctctaagttttggataataagctcatctgcctctttgaaatgtctcatgactcagctgttcagagagattgtccatctaaagcagaatgca

SEQ ID NO: 2736 - DNA, 1251 bp, Homo sapiens
aaatgaacaaaatcaaaacagcacgggcttcagggtcagacagaactgagttcagtgctagaatagctaattattagctgtgtgtccttgaacaagttacttcacatctctgagtctcaatttcaaaacatgtaatattgagggtaccaataattatctccaagtgttgtcatgaagatgaaagtagggtcccctacaaaaagtgccccatgtagttgctggcaaagaagaagtactggatgaagcacttggaggaattggaaagactacctctgcctggcttgtttccttatccaaaaggagcccacagagcagctgattccagagagaattcactgatgaatttgtacgctgacttcccccatctgatagtatgcaacaaaggaataatacttatgtagatatgtgtttgaagcaccatttgccatcaacatgaacataaagaacctattagactctaaatacctcatgtaagctaaattactcatctgcacactgtggcaaagacttgccttggaattaggcactcaacttctaagtctggctctgcctgtcatcaatcatgtgtcctcggatcagtcacacccttgcaaaatcacaactttgcaaacaaatgtttgcaagaaacagataaaatcattgatgtgggatacaacatagagaagaggctcaatatattagaattctctacagtttttttgtagatcaatagtgccaaatttacaaactgtgagatgacaccaactgtaccctgaactgttatttcaaatcctttattcttcagtatgttttgggaaaaggrcttgttgatatttggacatgtttacaacatggttttgttttatgggctgccagtactaaatgttgtctgtatgcacgttcatcttgtttttatttgagcttttgcataaacttctcttctatgtggatttgaccttttcaaagccccattctccaagtgtttgagacaagatgaggatatgtagagtgatgaagctgaactcacgccttttagactgagaggggagtgagcccaggcaattgggttccatgccaggaaagcctattaaaatatcaaatgaggagttcatgacaggtttaactaggttcttgtggcatacctccaaatcttaacttagttaggctgggttttggctgaaacaaaccagctgtcacaagctgtgcgagaccattaattatgtacgtgagcattgataaattaatgcctgatggctaaaaaaattaggggtt

SEQ ID NO: 2737 - DNA, 591 bp, Homo sapiens
aggaatggggaattattgtgtaatgggcatggaatttcagtttaggataataaaaaagttgtagcaatggatagtggtgatggctggaaaactgaatttacttaatcccgttgcactgtactcttaaaaatagctaaaatggtaaatcgttttgtatgttttgccacaattaattttaaaagccacccacagtgattatgatacaattggttctcaactccactttgaaaaacactggatattaggtgtatcggggaaattcagccagatatcgggygaaattcacccccaatattttacataggttttttctattttccctaagtgtcggccggtctgagaaataaagagacagtacaaaagagagaaattttaaagctgggtgtctgggggagacatcacatgtcggcaggttccgtgatgccccctgagctgcaaaaccagcaagtttttattagcgattttcaaaaggggagggagtgtacgaatagggtgtgggtcacagagatcacatccttcacaaggtaataagatatcacaaggcaaatggaggcagggcgagatcacaggaccacaggaccggggcgaaat

SEQ ID NO: 2738 - DNA, 625 bp, Homo sapiens
caatatatcaggagttaagaaaaatgagggaaatgataaatgcaagaacaatgaaatttgacagctctgtctgggggcaactgtgtttagaaaaagataataaaatgctcttctcaatcagaataagaatatcacattttgagtgtgtgttgggggagcaaatattatgatctcgtaaagaactgtaaaatgcaagaatagtagtattcattaaatctctgcttaattcatcaaaatgtcttaaaagggcagatagatgttgaagactgatactagactcccactaaatagtagycctaatcgtagtaattaacatggctgcaattgtgaggtatgtgcctattaatctgtatgaatgcatgctcttttgcattcttaccagaaagaaggatcagaaacagtctatatttacaacctcaatccaagggtatgctgactcccctatcgtctgccatcatctagtctaaagacactagataaaatgttttacagaatgttgtattggttcctattcagccagcagtgttggcttcatagagagatgtaatggtgaatctgaggagccagacctggacctcttgcctcaattctgaaaaactctgaaagccatctcaatttctgctct

SEQ ID NO: 2739 - DNA, 601 bp, Homo sapiens
aaggaggcaacacagccaccgtatgcagtttgttttccatgcctgaactgaatagaagatgctcaatgaccaatcatggacagactaaaagttgtgacatgatcagtcactgatcataaagcacatctgttatttaggtagctgtttgcagactgaagagttggcagtggggtctgtatttatgaaattgctcactcttaattgtgagttaccgtggtaactgaaacttgaaccatgttgttgccagactggtggtgtttaactaagccttggtaaccagaattcattcacatcagaattgtgcagtgagggctgcttatgaaaactccttggaatgcaratgaccatataaatactatagagattgttagtagctaagttaatctattattgtagctttcatgctaattctattttttctaagctactctggtgatacaaatctctaattatttgattaaatatctagattaactgattaattgcttctgaatttactctaattaatcccagatttacctttgatctattgcctctgaacaccaaacctactactaactcactgagatgacttgagttattgtgatgtaactattatgca

SEQ ID NO: 2740 - DNA, 686 bp, Homo sapiens
tattatatgtacagcctgcaccactcattcatcacccggtcacatgactgtccccgtccaaactggactgtgaactctcagatggaagaaattcgctcttattcatccaatgattattaatatatatatatattttgagacagagtctcactgtgtcgcccaggctggagtgcagtggcatgatcttggctcactgcaacttctgcctcccaggctcaarcaattcacctgcctcagcctcccgagtagctgggactaccgccatgtgccaccaggcccggctaatttttgtacttttagtagagatggggtttgaccatggtggccaggccggtcttgaactcttggcctcaggtgatccacccacctcagcctcccaaagtgctgggaacacaggtctgagccaccgtgccctgcccaatgattattaattgaatgccaactccgtaccaggccctatatcttctgcttttttatgttcctcacaaaatctagcagaatgggtgatgcttgctggaaactcatcaaacactggctctgtggctgtacaaaagacaaaatgttctttaaataatggggttcctggatcattaaaatatcacttaattcataacttttttttttttttttttttgagacggatggtctcgctctgtcaccaggctggagtgcaggagtgcaatggc

SEQ ID NO: 2741 - DNA, 950 bp, Homo sapiens
gtgtctgcaacaggaggcactgcataactttctactatacttaacaatagaattaatgtttttttggtttggtttggtttttcaagacaggttcttgttccgtagcccaggtgggagagcagcggcgccatcatagctcgctgaagccttgatcccccggactcaagtgatcctcccacctcagcctccctgagtaactgggaccacaggcacatgccaccacacccagctaatcttttaatttttttgtagagacagggtcttgctatgttgcccaggctagtctcgagctcctggacttaagtgatctgcctgcatcagcctcccaagtgctaggactacaggcgtgagccaccgagcctggcctaatattgttaataattaataccgtaattgattgggcctctgtggttctaggtgcagggacagagtggtaaccaggaaaagcaggctccctgctctcgtggagtgtgcaccgaaatgggccagacataaacacgaaaataaataaacaagtaatttcagagagtcctaagtggtacagagagaggtgcaggggtcccaggaaggaagatctgccctcccaaaaagctccgggggcttccgtcccccacacagtgccacrttcccaagtgaggcgggtcatttgtttggcacagctgaattccctctgggatccaatccaacaggtctgattttcttccacacattgttaaaccagatctgagcattaagtattcaagaaagccccaatctgcaaatatttacctttcattcagcagcatctgaccctccccttgggaggcccgattaagacgaaggaggggacgacaggcagggtgacgctgggagggtttaattccagatgtttctcaggggtggggcaggaattggggggtgcaggccctccaatccagcaaacccaacacatgtgcatactggtccttcca

SEQ ID NO: 2742 - DNA, 1276 bp, Homo sapiens
  misc_feature (1)...(1276): n = A,T,C or G
ttggtcacaccaatgctatcctagtcttgcaccaagaactgaatttttcaggtgagcagatgaaaaaatgraattctccccccaaaaagataccacagcaagcattgtatttgcttaagtttaacctgcaccagaaggattcttttttatttttttagagacagggtctcactctgtcacccagactggagtgcatggcacaatcatagctcactgcagcctcaaactcctgggctcaagcaatcctcccacctcagcctcccaagtagctgggaacaaaggcacctgctaccatgtctagctatttttttatttttatttttgtagagatggggtctcactatgttgcccaggctggtcttcaactcctgctctcaagcgattctcctgccttgacctcccaaaatgttgggattataggcatgagccccataccttgccccacccaaacaattctgagttgtttatcatccctaataccctctatgaagagggccctgcaccctgggcagcaatgggttccactgagccccacgacaggcctgggttgtgagatgggaataggagcagggacagggctgaactgcacctggtagtcaaggatggagacttcccagctgtgtagaaggtggtctgagaggggacatgagtgctgtgaccgataaacctccatgctcagagatgtctcacgatgaaagttctttcttgctcacaggcagtccaaggtgagtgtttaggaggcagccttccacaccatggttcagggatccaggatccttccaactcgtggtggcctctgcgagtagacaaccacttaggtgaggtgacccacatcacgtccactcccatctcactggtgggaactggtcaaggggccccatctagagggaagggagactggggacatgacccttgccaagccagctgtatccatcacaactccatacaacgggaaaggagcaggagcctcctctggtggggatgaaggaagtcctggaggatgagagcagctactgaggctgggctgggctggagaggggtcggaaagagagcctccagagtccagcgaggatgtgtcagctggtggctgtgatgacatgaaaaccctcctntacatcctccctagaaactctcagtgatgtttatgggggatagctagaaaggcactgagttctgtgtggctcttacatgaaaagaactacaaataccagagccagcctgcatcaaacttacattacgtgaatgacaaccccaacttcaagatagcctgatgcta

SEQ ID NO: 2743 - DNA, 591 bp, Homo sapiens
gtggacctactgtatcagtcctggrttactcactttctgtcttttatggagagaataaaccatcctctttttaagttgctcttcccccctttgtttgtgatccctcttaccatagaccaaacttaattcctaatgaatagatctgccaaattgtttatatcagagatgacaacaggaacacatctgtttacattttcctttctcctgaagccccacctagtcccagagggtggtgtgtttcttcactgctattttgggcagaagctacccggctgtggtggttaaagtcagcactgctgttagcccttgtggggcctttgtgcaaattgaaaaaaggcattcatatcctaagacaccttcctgttctttgccagaaaaatgtctcgatgcaaattgacaatgtgtggacaggaatggaacatgcccttgagaagcagccctgcacaggatgccactgctcagctttgggtcaatgtccaggccagtatctgacctcgaacttctctctaggtcttccacctttacttagcacaggcctgagaacagtccagccaggggtctaggagagaaagtggctgagactgtgtgaga

SEQ ID NO: 2744 - DNA, 591 bp, Homo sapiens
gtggacctactgtatcagtcctgggttactcactttctgtcttttatggagagaataaaccatcctctttttaagttgctcttcccccctttgtttgtgatccctcttaccatagaccaaacttaattcctaatgaatagatctgccaaattgtttatatcagagatgacaacaggaacacatctgtttacattttcctttmtcctgaagccccacctagtcccagagggtggtgtgtttcttcactgctattttgggcagaagctacccggctgtggtggttaaagtcagcactgctgttagcccttgtggggcctttgtgcaaattgaaaaaaggcattcatatcctaagacaccttcctgttctttgccagaaaaatgtctcgatgcaaattgacaatgtgtggacaggaatggaacatgcccttgagaagcagccctgcacaggatgccactgctcagctttgggtcaatgtccaggccagtatctgacctcgaacttctctctaggtcttccacctttacttagcacaggcctgagaacagtccagccaggggtctaggagagaaagtggctgagactgtgtgaga

SEQ ID NO: 2745 - DNA, 591 bp, Homo sapiens
gtggacctactgtatcagtcctgggttactcactttctgtcttttatggagagaataaaccatcctctttttaagttgctcttcccccctttgtttgtgatccctcttaccatagaccaaacttaattcctaatgaatagatctgccaaattgtttatatcagagatgacaacaggaacacatctgtttacattttcctttctcctgaagccccacctagtcccagagggtggtgtgtttcttcactgctattttgggcagaagctacccggctgtggtggttaaagtcagcactgctgttagcccttgtggggcctttgtgcaaattgaaaaaaggcattcatatcctaagacaccttcctgttctttgccagaaaaatgtctcratgcaaattgacaatgtgtggacaggaatggaacatgcccttgagaagcagccctgcacaggatgccactgctcagctttgggtcaatgtccaggccagtatctgacctcgaacttctctctaggtcttccacctttacttagcacaggcctgagaacagtccagccaggggtctaggagagaaagtggctgagactgtgtgaga

SEQ ID NO: 2746 - DNA, 1281 bp, Homo sapiens
tgcatggcgagggctcaaagccccagcctgggggatgtctgcagtcctttccagttctctgattctgtgacccacctatctagaaggctgcagcctgtagcccattgggatgcagcacagatgagttgtgtgagtcataccgcatatgccctgaacacaatgcactcaccttggtcaacattctgagagtcattatcccagaccccctcaacctctacaaaattgccctctggtgcccctagtcagagtcagaatcctgacttataaggccactccggtgtyttaaggcacaggaaaaccaaacctaaactaataactgaacaactgctatgtaccaggcacatacatctataattgctaatccttacaaccaccttccaagacaggttctattattttcattctacaaaggaaacaaggggctcaggagggttaagcaactttaataaagcagtagctggtgaactaaggctgagattcaagctcaggttctggatccaaaccccacgttctttccattatacccacttggccaaagctagggccatgacttgggccaggagaagacagcgttacctaaggcaaaaccattgggttcagctgcgtcgctggctattaaaggtccgaagccccacagtcaggtgtgagctgggtcccatggcctgctcagctccaggcctccccgtgtggggagacagtccccttgtctaatacacatcaggctgccagcctcagtttgtatttttacagtccactaattaggccattttaactaatttgtttgcattttgtatgagcaagttgggcttttggattgactaatgtaattgcagctggtttctgccaaatacaaattactcagtctagtgtgggctagggagaaaagcaaatatttaatagacatcaatacccttgtagctttttagtggagcctttttttcccctatggaaagttgaagtaatttctccagcatctgattgaactttcatgttggggaattactttttaatcatttttttaaaaaataatgagacaaaggctttagtgactctgttgggttttatctctgatccatttgcccctaagcttgggaaactcacgggacttttacccgtccagcctggctccccacaatccctttctgcgtgggctagtccagcaactgcgaatcggtctgcgtcacaaattgtcacagccgaaaggggcctgagagatcatctagttcagtagttctccaagtgtattcctgggccggaagcactggccacacctgggaactt

SEQ ID NO: 2747 - DNA, 660 bp, Homo sapiens
atagttactcttcatatggctagaagagattctgaatctgtttgatacacatttgttaagggcttgggaatttggcccagtgtttccttgtttgcttgggttctcataggtttcacatccagagttgagagacccagtactgagaaacccaggtctgggtgaagagtaggttacagagatgagcaaaagagataacctctgagctccttcagtatcctcatgtgataccaatcctaagaatgagaagtttagagtagtcaagtcgtacgggatagtgatggttaaatgttatcctggcgggcagttgtgggggccaacctgagaaagctaactgaaaaaaaaaaaaggcaggggaataacctgaggggttcgtttggagaatgttttaaaatatgagataatgaatttaaataaactcaagagaaataacttgaatttactagaaaagataatattttataatcatagaactatgaaacattatactgtcttgatacatgagagagatacttcccaagaaaatcggaagatgctatatggttctaaggtaacactttgaaaaagaaaggaaagaattgcctaawctactaagaacctgatctttaaaatttcatatctaaggtatttgttgattgtatttatgccctgggagtttgccta

SEQ ID NO: 2748 - DNA, 1155 bp, Homo sapiens
cataaatatccagtaataaggaaatgatggattcataaagaagaatgttttccagtcactcaaaataatgttctcacaggctatctcgtggcattagaaaattctcacaaaacataatgttaggtcaaaattcaggagatgaaactatattcctaatccagtttgtacaaaagctctcagacaggcaggagcttagcctaagagcagtgtaaactattagagggattttagtaggggaatgacataccagattttcattttgtaatcttaccctgggctgcatgcagtggctcatgcctgcaatcccaacactttgggaggccaaggcaggcaaattgcatgaccctaggagttcaagaccagcctgggcaatatgacaaaactccatctctacaaaaaatacaaaaaattagctgggtgtggtggtgcatgcctatagtcccagcctacccagaaggctgaggcaggaggatcacttgagcccaggaggtcaaggctgtagtgagctgtgatcatgccacagcactccagcctgggcaatagagtgagaccctgtctcaaaaatawtaataataataaaataaaatcttaccctggctcccagttgcaaagagctagaagcagatatagggctgtcaggaggtttttgatagttcgggtctggggtagagttgttaaagtgatgagaaagactatcactgaagaccaggcttggaggtggagtaaacagtctgtggaatggaatgaatgtggtgtgtgagaaaagggaggtgtcaaggatgttcctaaatgtttgctttttgcgacagggtaaggaacactgctggagggattaaaatttagggatgtggaagatgttgggatatagaagtttgacatactagaaagataatccaagtagagatgtcaaataggctgttgaatttaaatcccaatgttataaatatggatgtgcccaaatgagctgagagaaaagtccacccagatcctaacagagggtttctctaagttgtcagagatttttattatcttttagtatagaattttatatttcctaaattttctataatgttgatgtgttatttttataatcaaatttaaatgttgctaacatatattcatcatagcattctttatactggtttaaaaatggga

SEQ ID NO: 2749 - DNA, 653 bp, Homo sapiens
aagtaatatcccagccctagttagataaatgccctattttcttttaatttcaaaaaaatcttaattctgaggcacatttggctgacagcatttcagataagggattttgaccctctaattcaatgatgtagataaatatcaccacttctactaccattgtctattactgaacacttaccatgggccaggtacagagtaggtatgaccttattatctctttggatccctagagagctctaaaaggcaggtacttttattgacgtcattttattgctggtcacccaagtggcaaggctgggctgatccattggtcaagttatgactgccgtgctcctcccccaaacttaaggcagaaatctcagtgcagatgatcctggacttacaagggggttatcctaaattgaataagactgtcctaaattgaaaatattgtaggcatataatacatctaaccatcatagcttcacctaamctaccttaaatgtgctcaggacacttacattaacgtacagttgggcaaaatcatctgacaacacagtctcttgcagagtatcggttgtttaccctcatgactgtgtggctaactgggagccgaggctcagttttgctgcccagcatctcaagagtatcatactgctttctactgaatgcat

SEQ ID NO: 2750 - DNA, 1391 bp, Homo sapiens
ttttggtcgttgcgaccaatcggtagcagataagtccatttgttgcaggactatggtatgttggcattgtcttgcaggaatccatcccatgacacaagtagcatttgtcaaggcatcaagggagtgattccattgttcctaacacagtgggactacctgacttaggtgtcctgcagaggtggttagtcatagaaaaccatctcaaatctgaagaaatcattcttcaaaactggagtttttgagctttttagtttggatgtttatctttgggtctagaaaggaggtgcccagtgcaagaaacttttctgtggtctcatttactgagaatggcttcctatgcccagaattgctaaaattgttattaattggccattgggttacattgttccaagtcaggccagacatctgtgcttytgtccattgtttaagtccctctaagtatgtctgtaagttatctaagcatgtccctgtgtgggggatatccaccagggcaagcctgagatgctagagaagggcaatagctcacaaatccagcaagaggacatcggcatagtcctgtgcccattgtaagaaaagatttgaacctccagcaatagtgaaaggaaggatagaagccccaaaatagacacaaataaaagagaagctacattctatagttatatcctgtaaggacatagatattgcttacccagagctgggacagactcataccagtaaaagtaaaagacgaccaggaggaggatcaggaagactaaccttgcccccaagcttatccagagcatcactttgtagtaagaagcttccaaggatttctcctgaagaggaagtatagaccttctactggctcacaagagtaaactagattagcagactgggtgtcagaagtgtagaccttctactggctcacaacggtagactagattagcagactgggcgtcggtagcttgtggggctccataagaaacaggtttaattcaagacaaatgtacctaactgtgaatcccttgcagtttaactgctattggagtgctcagagcacttgatatggacctttccacattggggaaagctggtcactagagacccttccattcaagtctttagtaaggttaaataccctagttgaactgaaacagaattttcctctcatgtggggagggaaagccttttatatccatattcacacaatgcattttgcacttgtcctagattgataacatatttttgtaattaatgaatcatttcatctattaggagatttgcagttaggaaaggccttccatatgttaatgcaaaaggacttaattataagtttccctttggagcagctcaaacctgcagtaaagctacaggcaatagagatagccaggtctctgatgtttcctggcaaa

SEQ ID NO: 2751 - DNA, 1391 bp, Homo sapiens
ttttggtcgttgcgaccaatcggtagcagataagtccatttgttgcaggactatggtatgttggcattgtcttgcaggaatccatcccatgacacaagtagcatttgtcaaggcatcaagggagtgattccattgttcctaacacagtgggactacctgacttaggtgtcctgcagaggtggttagtcatagaaaaccatctcaaatctgaagaaatcattcttcaaaactggagtttttgagctttttagtttggatgtttatctttgggtctagaaaggaggtgcccagtgcaagaaacttttctgtggtctcatttactgagaatggcttcctatgcccagaattgctaaaattgttattaattggccattgggttacattgttccaagtcaggccagacatctgtgcttttgtccattgtttaagtccctctaagtatgtctgtaagttatctaagcatgtccctgtgtgggggatatccaccagggcaagcctgagatgctagagaagggcaatagctcacaaatccagcaagaggacatcggcatagtcctgtgcccattgtaagaaaagatttgaacctccagcaatagtgaaaggaaggatagaagccccaaaatagacacaaataaaagagaagctacattctatagttatatcctgtaaggayatagatattgcttacccagagctgggacagactcataccagtaaaagtaaaagacgaccaggaggaggatcaggaagactaaccttgcccccaagcttatccagagcatcactttgtagtaagaagcttccaaggatttctcctgaagaggaagtatagaccttctactggctcacaagagtaaactagattagcagactgggtgtcagaagtgtagaccttctactggctcacaacggtagactagattagcagactgggcgtcggtagcttgtggggctccataagaaacaggtttaattcaagacaaatgtacctaactgtgaatcccttgcagtttaactgctattggagtgctcagagcacttgatatggacctttccacattggggaaagctggtcactagagacccttccattcaagtctttagtaaggttaaataccctagttgaactgaaacagaattttcctctcatgtggggagggaaagccttttatatccatattcacacaatgcattttgcacttgtcctagattgataacatatttttgtaattaatgaatcatttcatctattaggagatttgcagttaggaaaggccttccatatgttaatgcaaaaggacttaattataagtttccctttggagcagctcaaacctgcagtaaagctacaggcaatagagatagccaggtctctgatgtttcctggcaaa

SEQ ID NO: 2752 - DNA, 1391 bp, Homo sapiens
ttttggtcgttgcgaccaatcggtagcagataagtccatttgttgcaggactatggtatgttggcattgtcttgcaggaatccatcccatgacacaagtagcatttgtcaaggcatcaagggagtgattccattgttcctaacacagtgggactacctgacttaggtgtcctgcagaggtggttagtcatagaaaaccatctcaaatctgaagaaatcattcttcaaaactggagtttttgagctttttagtttggatgtttatctttgggtctagaaaggaggtgcccagtgcaagaaacttttctgtggtctcatttactgagaatggcttcctatgcccagaattgctaaaattgttattaattggccattgggttacattgttccaagtcaggccagacatctgtgcttttgtccattgtttaagtccctctaagtatgtctgtaagttatctaagcatgtccctgtgtgggggatatccaccagggcaagcctgagatgctagagaagggcaatagctcacaaatccagcaagaggacatcggcatagtcctgtgcccattgtaagaaaagatttgaacctccagcaatagtgaaaggaaggatagaagccccaaaatagacacaaataaaagagaagctacattctatagttatatcctgtaaggacatagatattgcttacccagagctgggacagactcataccagtaaaagtaaaagacgaccaggaggaggatcagkaagactaaccttgcccccaagcttatccagagcatcactttgtagtaagaagcttccaaggatttctcctgaagaggaagtatagaccttctactggctcacaagagtaaactagattagcagactgggtgtcagaagtgtagaccttctactggctcacaacggtagactagattagcagactgggcgtcggtagcttgtggggctccataagaaacaggtttaattcaagacaaatgtacctaactgtgaatcccttgcagtttaactgctattggagtgctcagagcacttgatatggacctttccacattggggaaagctggtcactagagacccttccattcaagtctttagtaaggttaaataccctagttgaactgaaacagaattttcctctcatgtggggagggaaagccttttatatccatattcacacaatgcattttgcacttgtcctagattgataacatatttttgtaattaatgaatcatttcatctattaggagatttgcagttaggaaaggccttccatatgttaatgcaaaaggacttaattataagtttccctttggagcagctcaaacctgcagtaaagctacaggcaatagagatagccaggtctctgatgtttcctggcaaa

SEQ ID NO: 2753 - DNA, 1391 bp, Homo sapiens
ttttggtcgttgcgaccaatcggtagcagataagtccatttgttgcaggactatggtatgttggcattgtcttgcaggaatccatcccatgacacaagtagcatttgtcaaggcatcaagggagtgattccattgttcctaacacagtgggactacctgacttaggtgtcctgcagaggtggttagtcatagaaaaccatctcaaatctgaagaaatcattcttcaaaactggagtttttgagctttttagtttggatgtttatctttgggtctagaaaggaggtgcccagtgcaagaaacttttctgtggtctcatttactgagaatggcttcctatgcccagaattgctaaaattgttattaattggccattgggttacattgttccaagtcaggccagacatctgtgcttttgtccattgtttaagtccctctaagtatgtctgtaagttatctaagcatgtccctgtgtgggggatatccaccagggcaagcctgagatgctagagaagggcaatagctcacaaatccagcaagaggacatcggcatagtcctgtgcccattgtaagaaaagatttgaacctccagcaatagtgaaaggaaggatagaagccccaaaatagacacaaataaaagagaagctacattctatagttatatcctgtaaggacatagatattgcttacccagagctgggacagactcataccagtaaaagtaaaagacgaccaggaggaggatcaggaagactaaccttgcccccaagcttatccagagcatcactttgtagtaagaagcttccaaggatttctcctgaagaggaagtatagaccttctactggctcacaagagtaaactagattagcagactgggtgtcagaagtgtagaccttctactggctcacaacggtagactagattagcagactgggcgtcggtagcttgtggggctccataagaaacaggtttaattcaagacaaatgtacctaactgtgaatcccttgcagtttaactgctattggagtgstcagagcacttgatatggacctttccacattggggaaagctggtcactagagacccttccattcaagtctttagtaaggttaaataccctagttgaactgaaacagaattttcctctcatgtggggagggaaagccttttatatccatattcacacaatgcattttgcacttgtcctagattgataacatatttttgtaattaatgaatcatttcatctattaggagatttgcagttaggaaaggccttccatatgttaatgcaaaaggacttaattataagtttccctttggagcagctcaaacctgcagtaaagctacaggcaatagagatagccaggtctctgatgtttcctggcaaa

SEQ ID NO: 2754 - DNA, 1322 bp, Homo sapiens
taacttcccctttttgtcacctatgttttagtactcaaatgaattgaagggaagatagagtgaggtagtgatattatttcagaagtagtgaaccaaggcctcctctgctggaactggaacttgaaataaattaggtttagttcagtctggagtattaattggatttaattatttatgagctaagtgtcataagggtccatgatccttaaaagaattaatcacatttcaaagggcattgaaaaccatataaacgcaataaagttgcatagtctattcatcagcacattaccttaaagtcctgtggaagaagcagtctatttaacattctaaaaattagtccagacttttgtatcagactttgtgcaatgtcatttactacccatgggaaagaaatgattacacacataccataacacaacacatatttcataaagatacaggcgtatttaacaacatatatatgagatacatgggtggatgactacctggaaggtggaggagattggctaaaaataaaataaaatgccttctggcaggtctggccggattcccactggattagcccgcttctagaggccgtgtgtcaccagcattggtgaccagcactacagttgcatccatctttctaacaaagacaatccacagacaagccccatcacttaagctcgtggccaggactgtccaggatgtggccctcagttctggttcttctgtaaaatctacaaccttcatagtggttggccacagaaaaagagaacgttttcctgatggaatgtattaggagaacaccactctarggagaacaatttacttttttttatcaatcctgaaataaatcagtgacaaaattcagtcagactctggctgtttatatttctaggaacctaaggaattgccaggtgactccatgtgaagctacccaggtaccaggatctgaacgtgttaacactggacactcaaagtggacagaagggcagacaggcctggaaagattgctccatgtccagcaaattccctgtggcctcatggtgttgcttgtaggtctggatagaccctccgtggtttctgcccatcatttttgcctggctctcacgtccatggaccacctctccagagagctgctctcatcatccttccaacctggggacacgattagcactgccaggacaggtagcccctctcttggcttttttttttttttttaatttacagattcccttttgtccccatgtgcatctccctcaccagtgtgtgagatgtgtctgtaagtaaggatacgaatgtccttaagaatatgtgatgtcattgtgtgtactgatgca

SEQ ID NO: 2755 - DNA, 1322 bp, Homo sapiens
taacttcccctttttgtcacctatgttttagtactcaaatgaattgaagggaagatagagtgaggtagtgatattatttcagaagtagtgaaccaaggcctcctctgctggaactggaacttgaaataaattaggtttagttcagtctggagtattaattggatttaattatttatgagctaagtgtcataagggtccatgatccttaaaagaattaatcacatttcaaagggcattgaaaaccatataaacgcaataaagttgcatagtctattcatcagcacattaccttaaagtcctgtggaagaagcagtctatttaacattctaaaaattagtccagacttttgtatcagactttgtgcaatgtcatttactacccatgggaaagaaatgattacacacataccataacacaacacatatttcataaagatacaggcgtatttaacaacatatatatgagatacatgggtggatgactacctggaaggtggaggagattggctaaaaataaaataaaatgccttctggcaggtctggccggattcccactggattagcccgcttctagaggccgtgtgtcaccagcattggtgaccagcactacagttgcatccatctttctaacaaagacaatccacagacaagccccatcacttaagctcgtggccaggactgtccaggatgtggccctcagttctggttcttctgtaaaatctacaaccttcatagtggttggccacagaaaaagagaacgttttcctgatggaatgtattaggagaacaccactctagggagaacaatttacttttttttatcaatcctgaaataaatcagtgacaaaattcagtcagactctggctgtttatatttctaggaacctaaggaattgccaggtgactccatgtgaagctacccaggtaccaggatctgaacgtgttaacactggacactcaaagtggacagaagggcagacaggcctggaaagattgctccatgtccagcaaattccctgtggcctcatggtgttgcttgtaggtctggatagaccctccgtggtttctgcccatcatttttgcctggctctcacgtccatggaccacctctccagagagctgctctcatcatccttccaacctggggacacgattagcactgccaggrcaggtagcccctctcttggcttttttttttttttttaatttacagattcccttttgtccccatgtgcatctccctcaccagtgtgtgagatgtgtctgtaagtaaggatacgaatgtccttaagaatatgtgatgtcattgtgtgtactgatgca

SEQ ID NO: 2756 - DNA, 600 bp, Homo sapiens
ctatttgcatcacttaagttttagtatgtggtgctttcattgttgtataattttaagggttctcatttcttcaactcacagattatttgtaagtaagccttttccttccttccttctttccttccttccttccttcctttcctttcttttctttccttcctttcattttctttctctttctttctctctctttctttctttctttctttctttctttctttctttctttctttctttctttctttctttctttctttctttctttcttcttctttcctttcaagatgaggtctcactatgttgctcacgctggtctagaactcctgggcataagcaaccctcccaccctggcctcccaaagtgctgtgattacacacacgagccactgtgcctgacyccttttcacttctaaatatatgggacttgtatttttttgttattattcctaattttattttattaaaatatgagtatttgtctaaacagtatccttgtcattggcacaaggttcaaaatgcaactttagtaaatactgtccatttgctcttccccttccctccaaaagaattattggttgcctgaaatgagaaaagtgttcca

SEQ ID NO: 2757 - DNA, 553 bp, Homo sapiens
tagagctttctctatgcaygtaatatgtacatatatagactcatacatatgtgtaatatatatatacaaaatactgttatactgttagtacctgctttatatatatgtgtagaaataatttcaaacttacagaaaagttgcaaaaataaaaatagtacaaataacactcatatacctttttcccagattcatcaattattaacatttaactccatttgctttatcatttgtgatatctgtctagatttttttccctggaaaccattcaagggtaaactttatatatcatggcactttgcccttcttttttaatgttttaattttttattaaaaaaaatttttgtagagactgggtctcactatactgtccaggctggtcttgaactcctggcttcaagcaatcctcctgtctcagcctccaaaagtgttcggattacaggcatgagccactgcattcagccccttaaatacttccactgcatggctaggttttcttctagggtttttatccattgtggaagacagtgtggcaattcctcaaggatctagaacc

SEQ ID NO: 2758 - DNA, 1799 bp, Homo sapiens
ctgaggttcttaaccagggagtgatggtctgcctgactgaacggtgggctacggagctgcaggaaagcacagaaaatgcagacagcacactgaccttcagaagcaggagacttagttgattatcccacctttttctctcttttttccttttgccttcgctcacgcacccctttgttgatacttcaacttccagaacacagagtctcccaaacgttaaagaactggaatttaggccgggcatggtggctcacgcctgtaatctcagcactttgggaggccgtggcaggtggattgcttgaggtcatgagtttgagaccagcctggccaacatggcaaaaccccatctctactaaaatacaaacattagctgggtgtggtggcaggtgcttgtaatcccagcaacttgggagcctgaggcaggagaatcatttgaacccgggaggcagaggttgcaatgagccgggatcgtgccattgcactccagtctgggtaacagagcaagactccgtttcaaaaaaaaaaaaaaaaaaaaagaactggggtttataatcttcatttggagaagccagaaatttaagtcaaaaaggaatgcatctgaagatacatggagtaactgaacttaggctacaaatgattccttacagaactgatacttaactcaggggcataaaggacagctggagaacttgggacagagaggcaaatgcagaggaatggaggatctcataaagtggcatgttgttctgcctgcactcctgagagaagaaagggctttctgcattattatatgcctgcgtgggtggcattcacaccactgtgagtcctgttgtattagtggggttgttgagtcctgtgggctcctgatcccagaaagcgctgcctccagtaagggtattgtgtgtatcctatgagctatgatgcttgggattgctttcccatcaacacctgragagcttccacagcccttccctgggccctgagtgtgcaaaatgtgacaatcagagttatttattaccagcaccttcctctccaggcggcggatcaattttcttttctccagatggctgtcataggccagccagagagaggactgggctggccatctgcttcctgttgccttttcaagctggctagccactcagtgaggctggcaaagcccaaggcaccagctgtcagtttaggctgcccctgcttggccttgcaccttgtcacactaggcaccgtagcacaggggccaggctgaaatcagtgtttgacactcacgaggcgggatgctttccttccaaaccatgccagccagcttctcgatggcaaacagaaaagatgcctgccctggaacttcctctaagaatgagcttccactgacttaattgactaagtgggatgactctggggaggggaaaggcagtgcttgtggtcaacagacggaacagaatgtgacataattccgaattccatacaagtaaaatgatttaatcagaatttccaattcactctcccattgggtttttttctattctttctaattagatgtttatttatttacaatgacaaattaactatgtgcatactgaagaaaatctgtaaattttttaaaaatcacctataattccattacccatagagataactgctatttattttttttcaaatatctcttcagtctttttttcctcctaaaaatgttgagatcacactattttgattttgtggcttaatattacaatacaaaatattttaagctttagtaaataaaaataataaatttctataaaatatttttgatgactaatattaca

SEQ ID NO: 2759 - DNA, 1799 bp, Homo sapiens
ctgaggttcttaaccagggagtgatggtctgcctgactgaacggtgggctacggagctgcaggaaagcacagaaaatgcagacagcacactgaccttcagaagcaggagacttagttgattatcccacctttttctctcttttttccttttgccttcgctcacgcacccctttgttgatacttcaacttccagaacacagagtctcccaaacgttaaagaactggaatttaggccgggcatggtggctcacgcctgtaatctcagcactttgggaggccgtggcaggtggattgcttgaggtcatgagtttgagaccagcctggccaacatggcaaaaccccatctctactaaaatacaaacattagctgggtgtggtggcaggtgcttgtaatcccagcaacttgggagcctgaggcaggagaatcatttgaacccgggaggcagaggttgcaatgagccgggatcgtgccattgcactccagtctgggtaacagagcaagactccgtttcaaaaaaaaaaaaaaaaaaaaagaactggggtttataatcttcatttggagaagccagaaatttaagtcaaaaaggaatgcatctgaagatacatggagtaactgaacttaggctacaaatgattccttacagaactgatacttaactcaggggcataaaggacagctggagaacttgggacagagaggcaaatgcagaggaatggaggatctcataaagtggcatgttgttctgcctgcactcctgagagaagaaagggctttctgcattattatatgcctgcgtgggtggcattcacaccactgtgagtcctgttgtattagtggggttgttgagtcctgtgggctcctgatcccagaaagcgctgcctccagtaagggtattgtgtgtatcctatgagctatgatgcttgggattgctttcccatcaacacctggagagcttccacagcccttccctgggccctgagtgtgcaaaatgtgacaatcagagttatttattaccagcaccttcctctccaggcggcggatcaattttcttttctccagatggctgtcataggccagccagagagaggactgggctggccatctgcttcctgttgccttttcaagctggctagccactcagtgaggctggcaaagcccaaggcaccagctgtcagtttaggctgcccctgcttggscttgcaccttgtcacactaggcaccgtagcacaggggccaggctgaaatcagtgtttgacactcacgaggcgggatgctttccttccaaaccatgccagccagcttctcgatggcaaacagaaaagatgcctgccctggaacttcctctaagaatgagcttccactgacttaattgactaagtgggatgactctggggaggggaaaggcagtgcttgtggtcaacagacggaacagaatgtgacataattccgaattccatacaagtaaaatgatttaatcagaatttccaattcactctcccattgggtttttttctattctttctaattagatgtttatttatttacaatgacaaattaactatgtgcatactgaagaaaatctgtaaattttttaaaaatcacctataattccattacccatagagataactgctatttattttttttcaaatatctcttcagtctttttttcctcctaaaaatgttgagatcacactattttgattttgtggcttaatattacaatacaaaatattttaagctttagtaaataaaaataataaatttctataaaatatttttgatgactaatattaca

SEQ ID NO: 2760 - DNA, 394 bp, Homo sapiens
agacacgaggccatagttttgcttattggctttacgccaaaagttttgccttctgcctctgtagctgacgctcataagactgaaatttattttcatgaaacccattttgccactggcagcgtaagacagggaggaggtctgggaaagaagatagctccatcaccctacggtacaaggcaaacagatgcagggcaggaccttggaggcctcccagmacccccacatgtttgccatattgccattagcaaacgacttaacctctttgaagtctcacttccctctcctgtagaagtgagtatcctgacccatacctctgtggggtcatcgggaaggttaaaataaccagcctatgcgaaagatccgggtgcatatagaaggaaaacgaaagtgagtt

SEQ ID NO: 2761 - DNA, 668 bp, Homo sapiens
tcattcccccagaatgcaactgggtcatgtgacttccccaaccaatcaccacatccaggggatgagattacactgattggccagacctgtgacacatttgcaaccctgaaccaatcactgaggctgtggtggaggtgggagggaggaagatggaggtcgtctgctgattggccagcccttgttcatgtgtagtgacccctagtaggagtggacccagtccatgatggagaaggagggagggaaggattctctaggaggaaattgaagattttgctcctaaagaggaagcaacggataccaactcttaggcatgttgtgataacctccttgtctccatcccttccgcttgcaggtgaaggcagagtatgtgcatctcaaccayccgctcaccctcgtgaccagagagcgcgatttggccgtgaaggagaaacaccagctccaagccaagctggagaacctagaacaggtcctgaaggtaagctggctttctgcatttgggaccgcttctgctctttgtgaggtcggtgtgaggaaggaggggctgcaggaccccgagcagaaggtatgtaaagctcctttggaagccatcatccacattcagagatgttggggctgtttttcccctttttgtggtataaaaagcaataaataacaaaattccagtgttt

SEQ ID NO: 2762 - DNA, 565 bp, Homo sapiens
acaactaatagccttctttcatttgttctcaaygtgtcattttaaaacaagactggggccgggtacggtggctcacacctataatcctagcactttgggaggccgaggtgggtggatcacctgaagtcaggagtttgagaccagtctggccaacatggtgaaaccccttctctatgaaaaatacaaaaattaggctgccgtgttggcgggcgcctgtaatcccagctactcgggaggctgaagtgggagaatcgcttgaacctgggaggcagaagttgaagtgagccgagatcatgccactgctctccagcctgggcgacagagcaagattccatctcaaaaaaataaataaaaataaataaataaataaataataaaataaaataaatcaagagtagaaacactggccaaaggcagaaaagttgaaaaaagaaaaaggctgccaaattcactaggtaccttgttactagcaggaaatgcagtggggtgcagtaggcagtggccccttaaaagaaaggaaatcaaaggccacgaaggcagaaggtttactacttttctgtgttga

SEQ ID NO: 2763 - DNA, 565 bp, Homo sapiens
acaactaatagccttctttcatttgttctcaacgtgtcattttaaaacaagactggggccgggtacggtggctcacacctataatcctagcactttgggaggcygaggtgggtggatcacctgaagtcaggagtttgagaccagtctggccaacatggtgaaaccccttctctatgaaaaatacaaaaattaggctgccgtgttggcgggcgcctgtaatcccagctactcgggaggctgaagtgggagaatcgcttgaacctgggaggcagaagttgaagtgagccgagatcatgccactgctctccagcctgggcgacagagcaagattccatctcaaaaaaataaataaaaataaataaataaataaataataaaataaaataaatcaagagtagaaacactggccaaaggcagaaaagttgaaaaaagaaaaaggctgccaaattcactaggtaccttgttactagcaggaaatgcagtggggtgcagtaggcagtggccccttaaaagaaaggaaatcaaaggccacgaaggcagaaggtttactacttttctgtgttga

SEQ ID NO: 2764 - DNA, 641 bp, Homo sapiens
ggcattattttataatgtgaagcaggcacacacaccctacagcacagccatcccactcctagaccttagaccgtggttcccaaagtggagtctggagcagcagcttcagcctcacctggaagcttatgaaaaatgcaacatctctggctccaccctagacccagtgaatcagaagtwctggggatggggcgcagccatatgtgttcttcccgagcaattctgatgccacctcacacttgtgaacaattgcaccagggaacgctcacacatgtgcctctaggagacatctgccaagagtgttcactatgccattgatcacaatggcaaaaacctggaaaaaagccccagtgcccccaaaccaggagaaggaataagtaaactgtggaatattcatatgatagcatattatatagaagcaaaaataaataggttctagtttagacacaatgtagatgaatcttggaaacctaagattgagactaaaaagaaggttgcagttgaccacatgtggcatgctgcttcttttgtaatctcaaagtcaaaagtgaagcaatacattgcttagagttacctacttatgtgataaaagtataaattttgaaaaaacaaaagaatgataattacccagttcagggtagtgg

SEQ ID NO: 2765 - DNA, 659 bp, Homo sapiens
atgccctaaatccgctgctctaaaatccctaacacaagcaagaagtattgcctcttcttgaccaactgcaaggaagtgcctgcttctccaggacacctacaagggcagctcacagagccatgcccctcgggggacttcttgaccttggtggtggaggccttggcagacgctcaggtgtttggttccatatttgcttccagataagactgtttagtagacatgcaactgcttagctatgccccaaggcatggggcaagccaccagccagggagggcccacttcctctgactcatctgcacacatgacaggccaccagccccatccgccaatagcaaggcaaagctgactcaggcaacatgagattacgagagcatctccctcccctcctacttcagtccacagcaatctgtgcctccaaccttctttgtgctacaaagataactcactggtccaggattatcatggtacctctgtgacaggctcatcagcagggctgctcttgccaatctcttactgctcagagcctggcccttgtagctctgccygctcttccctggtcctgaaccttgcttctgctccttggactcccaggttgggcttcttcctggtcagtcttatgcaggtctgaccacaactagtcccactatgaagcccatcag

SEQ ID NO: 2766 - DNA, 1223 bp, Homo sapiens
atggtgaactgctgtttatcccagggatgtaagaatggttttaacatatgcaaatcaagaaatgtgtccatcatatgaacagaatgaaggacaaaagccataggtttatctcaatagatgtaaaaaagaaaaaaagcacttgagaaaattcaatgtgcctttatgataacaactctcaacaaattagtcctatttttagttttttgagaaatctccatgttgtttttcataatatctgtactaatttatatycccactaacagtgtataagagttcccttttcttcacatccttgccagcatttgtaattttttgtctttttgataatagccattttaaggggtgagaatgatatctcattgtggttttgatttccatttccctaatgattaacgacgctgagcattttttatatacctgttggccacttgtttttcgttttttgagaaaacgatttctcatttttttaatgtgcatatgttggtattaaccacataattaccacatgagattatgactaatttgacagtttccccattcacctgcataatcccattctcaattctttcagataacacaagttaataagttagtgggtatccttccttaatttacccccatgttcatattatctagataagatgtagatacagacttattatacacaggtatattgtaataggctttgtcataattgctcttttcaaaccagagttatattttacacacggttttgcattttgcttttcgttataagattttgcaaattctgacctacccccatgcccagtctgtttacttgttgagtcctaattcattcttgttaatagttatatattattccatggtggatatgtaatatacaatgtatttaattacttctcatcactaatcatccattttatttcagttattttgccataataggcaaaaatccttgaatatataaccgtttcaactggggcatttatttctaaaggataggtttccacaagtgagatttttgtgttaaagaaataagaattgttttttcttaaaaaattttgcaagaataccttcataaagaagtataaaattgtagtttctattaagggtatatgatagtgcattttcccctacattattaactacattcattttaaactttttttctaaactagaagatataaagaaatatctcattaatttcaattccttttttttaaattctagtgactttatgc

SEQ ID NO: 2767 - DNA, 1223 bp, Homo sapiens
atggtgaactgctgtttatcccagggatgtaagaatggttttaacatatgcaaatcaagaaatgtgtccatcatatgaacagaatgaaggacaaaagccataggtttatctcaatagatgtaaaaaagaaaaaaagcacttgagaaaattcaatgtgcctttatgataacaactctcaacaaattagtcctatttttagttttttgagaaatctccatgttgtttttcataatatctgtactaatttatattcccactaacagtgtataagagttcccttttcttcacatccttgccagcatttgtaattttttgtctttttgataatarccattttaaggggtgagaatgatatctcattgtggttttgatttccatttccctaatgattaacgacgctgagcattttttatatacctgttggccacttgtttttcgttttttgagaaaacgatttctcatttttttaatgtgcatatgttggtattaaccacataattaccacatgagattatgactaatttgacagtttccccattcacctgcataatcccattctcaattctttcagataacacaagttaataagttagtgggtatccttccttaatttacccccatgttcatattatctagataagatgtagatacagacttattatacacaggtatattgtaataggctttgtcataattgctcttttcaaaccagagttatattttacacacggttttgcattttgcttttcgttataagattttgcaaattctgacctacccccatgcccagtctgtttacttgttgagtcctaattcattcttgttaatagttatatattattccatggtggatatgtaatatacaatgtatttaattacttctcatcactaatcatccattttatttcagttattttgccataataggcaaaaatccttgaatatataaccgtttcaactggggcatttatttctaaaggataggtttccacaagtgagatttttgtgttaaagaaataagaattgttttttcttaaaaaattttgcaagaataccttcataaagaagtataaaattgtagtttctattaagggtatatgatagtgcattttcccctacattattaactacattcattttaaactttttttctaaactagaagatataaagaaatatctcattaatttcaattccttttttttaaattctagtgactttatgc

SEQ ID NO: 2768 - DNA, 1223 bp, Homo sapiens
atggtgaactgctgtttatcccagggatgtaagaatggttttaacatatgcaaatcaagaaatgtgtccatcatatgaacagaatgaaggacaaaagccataggtttatctcaatagatgtaaaaaagaaaaaaagcacttgagaaaattcaatgtgcctttatgataacaactctcaacaaattagtcctatttttagttttttgagaaatctccatgttgtttttcataatatctgtactaatttatattcccactaacagtgtataagagttcccttttcttcacatccttgccagcatttgtaattttttgtctttttgataatagccattttaaggggtgagaatgatatctcattgtggttttgatttccatttccctaatgattaacgacgctgagcattttttatatacctgttggccacttgtttttcgttttttgagaaaacgatttctcatttttttaatgtgcatatgttggtattaaccacataattaccacatgagattatgactaatttgacagtttccccattcacctgcataatcccattctcaattctttcagataacacaagttaataagttagtgggtatccttccttaatttacccccatgttcatattatctagataagatgtagatacagacttattatacacaggtatattgtaataggctttgtcataattgctcttttcaaaccagagttatattttacacacggttttgcattttgcttttcgttataagattttgcaaattctgacctacccccaygcccagtctgtttacttgttgagtcctaattcattcttgttaatagttatatattattccatggtggatatgtaatatacaatgtatttaattacttctcatcactaatcatccattttatttcagttattttgccataataggcaaaaatccttgaatatataaccgtttcaactggggcatttatttctaaaggataggtttccacaagtgagatttttgtgttaaagaaataagaattgttttttcttaaaaaattttgcaagaataccttcataaagaagtataaaattgtagtttctattaagggtatatgatagtgcattttcccctacattattaactacattcattttaaactttttttctaaactagaagatataaagaaatatctcattaatttcaattccttttttttaaattctagtgactttatgc

SEQ ID NO: 2769 - DNA, 1027 bp, Homo sapiens
  misc_feature (1)...(1027): n = A,T,C or G
annnnnnnnnnnnnnnnnnnnnnnnnnnnnnnnnnnnnnnnnnnnnnnnnnnnnnnnnnnnnnnnnnnnnnnnnnnnnnnnnnnnnnnnnnnnnnnnnnnnaaaactgctgtcacaaagttggtttactgaggtaaatatttattgaataaataaatgagctaaaaaaaattcaaatctgaaaatgaaaatgaggcagtatgaaacatagtcragcaacaattttctacaagagtaaaaatgtccaggtgtatttacagataacatttttcattttacatgtattatgtgttgctatattaaaagtcatatgattaagctattaaataatttaatatttattcataatatttggatatttgagctctttattactagaaatatatattagaagttctacctttgtttagagttccttttctcttactttgttaaaaggacactcattccctagtgtcacataaaacttttttgtcagattttttcttaaggtaacatactctttggtaaaagtcaattacttatcaaaactaatctgctgtctattgtttttattggatatctgtggccagggagcagaaggaaaaggatattttatttccccttttattcgtttttcaatttacaaccatctggcataaacctgaaacttgtggcaggggtcccattaaaaagaggaatacaaaaacatgagccagggttattttcgtaactgaagattgagactatattcacatatttatggcgcctttgttgaaagatctagtatgattacatatttcagaaatctgactttaggctttgtcatgacttacaaaatgaggcagacatttgtgacttgtccataagaatagattattaaatggggactctattacttaataattaagggtataggtatgaaatttaaaacttggatttttttttctgccacattctatctagctgtgtgcctataggcactttaggatattcttatataaatggggatcataaggccacttcctcaaagggttgatttgctgatt

SEQ ID NO: 2770 - DNA, 1027 bp, Homo sapiens
  misc_feature (1)...(1027): n = A,T,C or G
annnnnnnnnnnnnnnnnnnnnnnnnnnnnnnnnnnnnnnnnnnnnnnnnnnnnnnnnnnnnnnnnnnnnnnnnnnnnnnnnnnnnnnnnnnnnnnnnnnnaaaactgctgtcacaaagttggtttactgaggtaaatatttattgaataaataaatgagctaaaaaaaattcaaatctgaaaatgaaaatgaggcagtatgaaacatagtcaagcaacaattttctacaagagtaaaaatgtccaggtgtatttacagataacatttttcattttacatgtattatgtgttgctatattaaaagtcawatgattaagctattaaataatttaatatttattcataatatttggatatttgagctctttattactagaaatatatattagaagttctacctttgtttagagttccttttctcttactttgttaaaaggacactcattccctagtgtcacataaaacttttttgtcagattttttcttaaggtaacatactctttggtaaaagtcaattacttatcaaaactaatctgctgtctattgtttttattggatatctgtggccagggagcagaaggaaaaggatattttatttccccttttattcgtttttcaatttacaaccatctggcataaacctgaaacttgtggcaggggtcccattaaaaagaggaatacaaaaacatgagccagggttattttcgtaactgaagattgagactatattcacatatttatggcgcctttgttgaaagatctagtatgattacatatttcagaaatctgactttaggctttgtcatgacttacaaaatgaggcagacatttgtgacttgtccataagaatagattattaaatggggactctattacttaataattaagggtataggtatgaaatttaaaacttggatttttttttctgccacattctatctagctgtgtgcctataggcactttaggatattcttatataaatggggatcataaggccacttcctcaaagggttgatttgctgatt

SEQ ID NO: 2771 - DNA, 869 bp, Homo sapiens
cagttagtctctgtagcaaatgctcacctctgacatagcacaaaagtggccatgcacaatacacgaacaaatgagcatatctgtgttccaataaaactttatttacaaaacatgcagtgggccggattcgacctgtaatgtaccaatccctaatctagtgggtaaaacaaaccccttcatggctacttataaaacaagagaggtgtgttataaataaaacgactttgcagcccaaaggaaagatagagtaatttagtctggccatggatgactggggaggcagcactggagtaggacaagtacttagttttctaggtctcagttaaaacgatggggctgaatcagaagcacatggacggcccttcttgttcccgtgttctctgacttggatgtggtgctcctttcctgcccagagtcttccaactgcacaaacaacgtggcctctcccaagctccctgggcctctcctcacctctaccatcaagwtttgaatgtcaattaaggaataaaaattcctaaatgatcctggaaggctgaacacacacacacacacgcacaaagtgtgtgtacatcctactgtgtccggaattggtgggttcttggtctgacttcaagaatgaagccgcagaccctcgcggtgagtgttacagctcttaaggtggcgcgtctggagtttgttccttctgatgttcggatgtgttcggagtttcttccttctggtgggttcatggtctcgctggctcaggcaggagtgaagctgcagaccttcgcggtgttacagctcataaaggcagcgtgggccccaaagagtgagcagcagcaggatttatcgcaaagagggaaagaacaaagcttccacagtgtggaagg

SEQ ID NO: 2772 - DNA, 575 bp, Homo sapiens
ttgaaaagccattcgtgacatttatgtacatttgtatatggaattttgtatgtgttatgtatttttgataatgcattcaaatttccttcttctctgtacctcttccttctactacaaataaaaaggatgaataaaaataaataaaaatgttataaatagtctaatatttcacaaaggcaatgggagaaggctgctatgacagatgagtaaaaaatatctaaacctctttaatcaaagagtacatttgtccttcttaaccattttttaaawttaaagatttatttagtatttaaaattcttacctagtcaatcagttttcttttgagagaatcttaaatcaaaaggtctgtataaagtgcttcaatacccagatgacaagtctgggtcttaattgatcatcttcacaaacattaatgacattttctactggataagtatgatttccttgaatgtctggatccatgtatatgaaacatgttctagattatctttaatgtcatgagaatatactctcttactctgaaataagtgtgtatttttaagtaaaggctctccataggctatgctatttgcta

SEQ ID NO: 2773 - DNA, 1251 bp, Homo sapiens
gctaacaacatctttcctccctctcccacccttatcctgccaccgtatttcaagcctttattcctttatgtgcaatataaaaacttcaattatctggcttttgtttgagtctcatatggatagtgacaggagacagacaaattcctaggcagacaaggacgtgtccccagagaaatccagtcttcaagccaaagacagcctgaaacctgaaaaacaagctgctggttccacagagagcccatgaccrgagtgagaacttcctcgatgccttttaaccaattgaatggtcctttttctaagaccactcatgaaccaatcagcacacactcccctattttatgagcccataaaaaccccagactcagctgcaaaaagggctacccacttttgggctccctcttgcagctgatggcaacctgacttcagggtgccatctcacattttagaactttccttctgtcacttaaaattcttctctgccttactcattctctggtgcccatgcaccttattcctcttggttttggaacaagagcccagaactcgctgagcttcaggcagcaggaacaaatgagtgtcaaccctcctgttcgcagagctgtgggcaatgggaatgagagagctgtaatatgcccccattctcctagctgtgggctcaaagaagtgaagccattgggtaccattccctcctggctggcttgctgtactacaaaagccgaaacatttcttggaggctcagagttcaggaatccccaggcgaaagctataacaccacctggggctccatggttgctggcatctctgagtttttgagtgccaccacattccccttgtctaaatacaggtgcccaatgtggaagccactcattgtacccctggtccagccatgggctgagcatggtgtctctgttctggtgtgggatctggggcaagctgtgagccgagcacagcctgccagactgagtggttagagcaagaccagcaagcccaagtgaggccccagaaaaagatcatggcagctgcagggacttccagcaggagaagtggcaccaaaggaatcctgtaacaatatttttggaattcctctatccatgtggctattaataaatttatatttgttcacattttcttccattaatctattgtcaattcatttcagctgacttaaactcttagactttagagagaaacttttaactttctgacagtatatataatatatatgtacacacatatacatggatatattta

SEQ ID NO: 2774 - DNA, 1251 bp, Homo sapiens
gctaacaacatctttcctccctctcccacccttatcctgccaccgtatttcaagcctttattcctttatgtgcaatataaaaacttcaattatctggcttttgtttgagtctcatatggatagtgacaggagacagacaaattcctaggcagacaaggacgtgtccccagagaaatccagtcttcaagccaaagacagcctgaaacctgaaaaacaagctgctggttccacagagagcccatgaccggagtgagaacttcctcgatgccttttaaccaattgaatggtcctttttctaagaccactcatgaaccaatcagcacacactcccctattttatgagcccataaaaaccccagactcagctgcaaaaagggctacccacttttgggctccctcttgcagctgatggcaacctgacttcagggtgccatctcacattttagaactttccttctgtcacttaaaattcttctctgccttactcattctctggtgcccatgcaccttattcctcttggttttggaacaagagcccagaactcgctgagcttcaggcagcaggaacaaatgagtgtcaaccctcctgttcgcagagctgtgggcaatgggaatgagagagctgtaatatgcccccattctcctagctgtgggctcaaagaagtgaagccattgggtaccattccctcctggctggcttgctgtactacaaaagccgaaacatttcttggaggctcagagttcaggaatccccaggcgaaagctataacaccacctggggctccatggttgctggcatctctgagtttttgagtgccaccacattccccttgtctaaatacaggtgcccaatgtggaagccactcattgtacccctggtccagccatgggctgagcatggtgtctctgttctggtgtgggatctggggcaagctgtgagccgagcacagcctgccagactgagtggttagagcaagaccagcaagcccaagtgaggccccagaaaaagatcatggcagctgcagggacttccagcaggagaagtggcaccaaaggaatcctgtaacaatatttttggaattcctctatccatgtggctattaataaatttatatttgttcacattttcttccattaatctattgtcaattcatttcagctgacttaractcttagactttagagagaaacttttaactttctgacagtatatataatatatatgtacacacatatacatggatatattta

SEQ ID NO: 2775 - DNA, 700 bp, Homo sapiens
taacctgttaggtakcagggataatttttcttcagcattagatggctgtttatgtatgatatatttctctgtgtccctgggacctaatgatcgttgaatacaggtgaatagaatgttatacagtagatggaacatgattatcaaagtcaggagacctagactcagttgctttctagcaaggcagtcattaattacatgttacgtcttttatcagaacctcagtttggatctataaaataggattactcatttccaccttggaactgtttttatgtaaccatcaagtaagccggtaaatatagttatctgtgtagttaactagctgctaacaaaggaatccagggtggcctttaatatatgttcggaatatatttattcaacaaatgtttcttcaattgttttccaagttagatttataaaaaatgagagcctggcaggcaagcaggcaagttggtagcttgggatgggatccactacagcacagaagtgcagccagagacttgctcctaactccccacggattgctacaaatccttgctccaactcgcagcttggcaagggatcttgctatcagccttctctcatggaacccattgtgcatatgaatatttgattagcttattccattttcattttatactattagttctccttgtggggttagatcctatgcacacacacacacacacacacacacaca

SEQ ID NO: 2776 - DNA, 1206 bp, Homo sapiens
tgcatttcttccttagtgacagtgtttcttacattttgagaaaaatatcttttcaaaactcagtaatgacagaaaaaatttccagctgctgctacacattgtagcacatatatgcccactacagatatgaaaacacccttcacaaagggcttttatactgctttattagaaataatattcatgataaaaataagtttctaattttattttcaccgagttcatagtttcctgcaaacagttgtcatttawtaaattctgctatatgattatccaaagacatggcagttcaaaaactacgttggcgattgggaataagtacaaagtagtgaaatttctaaaaccaattttgaattagtgaagctagtaaggcactattaaggaaataaattgtcactgttctgcttttgtctacattgaatctgtgagttccacaagggaagtaaccatatttgtttcctccccactacagcgctaatacctgtcatagtgtatatgggttgtatttagtcatgggccaggtttgcgggtgctcaaactatgcagttgcaaaaggactcacacttggttaaatgctttgctatcaccatcttgaaattcttaataaattttgaacaagggacccaaccatttcatttttgtacttgtccctataaattatatagctggttcctcacttagtacctgtgtggaaagaataaaaagctaattaacaaaagcagtgattatctagatttttcactatgagctccaaaattttcaatcatattttgagctcttcaaagttaggctctataatgtccctgaaagtcaatctagcctaaatattgaaagtctcatcaatgacctctctttagaaaaaaaaagaatgaaaagtacatatccatatgctatttcagtgtatttcaatgtatttttttcatactttcctaccactttgtgaggtattctagatatgacttttaatgtagagaaatcaagaaccaaagagataacacagaaatgaaattataatcttattcattcaacattcaaaaatatttgtttatgttgtaccatgtgctcaggcctgggatagaagagataaggaatttaaaaagaaacatgcagctcaatggttgttttaaaaagttgccaatctgcaagggaacaaggtagtgaggagaagaaagaagacaagaatatgacactttcaaacatcatttaaac

SEQ ID NO: 2777 - DNA, 1278 bp, Homo sapiens
cagtgaagaaaagtgtggtctttgttttcatgggcttcatactatactgggagaagacactaggtaaaggaataagatcatctcagtgttttgaagaagataaactgatgggaaattagtttgtatggtgtgtgtgtgtgtgtgtgtgtgtgtgtgtgtgtgtgtgtctgtctgtctgtctgttttgtagttactttagacaagctggttaagaaagacttctttgaggggtgactttaggcagtaatgattagaacaaatcagccatgcaaagaagtggacaagagtctttcaggaagagcaaatagcaactacaaaagccccaaagccagaatgagcttgacagtttacagaagtggaaagaagacatgtctgctttgggcaacactggtcatgatgaagaaaggtgtgagatgtggtcagagggctggtgaaggagagccttgagggcatagaaggtatttggattttatccctaataggtaatgggagctgctgaaggcctttaagcatgaagtgatataatgtgctttgtgttttcaaaagatcacttcattgaatgacaactatacctatgcattgtcaatatttgtggaatgaataatttagttatatttatatgttgcatataatgcatagataatctccaagtaacagagggccaaataacatgacttaaataagatagttcacttctaaactatcttattcaaagtagtgtaggtgggcaatccaggactgatacagaggttcagctagatgaagaactcagggtacaggaattctttcagctccttggtccactatccctaggtgtagctctcatccttatggtccaaaacagtagcaagagctctagctattgcatctatctttcaggcagcatgatagatcaagtgggaaagattatgtgtgaattgccttttaaggaaggttcctggggaatttgacatatgatacatctgcatctayctcattggtcagcacttggtcacatgtcctcacttaactgcaagaaagactgggaaatgtagtctttgttctggtcagctatgtgttcagccaaaactcaggagtttttactagtatgaaagaaaagggagggcagatactgccatttagtggtttagttggcatataatcttgtcattctatttagccatagtttattaaaactggaagtgactcagagatctggagggtcaaccccctcctgtggtaccatttttacaagccccgtttctcacaggtgctttaactgaggtccagagaggtgat

SEQ ID NO: 2778 - DNA, 1278 bp, Homo sapiens
cagtgaagaaaagtgtggtctttgttttcatgggcttcatactatactgggagaagacactaggtaaaggaataagatcatctcagtgttttgaagaagataaactgatgggaaattagtttgtatggtgtgtgtgtgtgtgtgtgtgtgtgtgtgtgtgtgtgtgtctgtctgtctgtctgttttgtagttactttagacaagctggttaagaaagacttctttgaggggtgactttaggcagtaatgattagaacaaatcagccatgcaaagaagtggacaagagtctttcaggaagagcaaatagcaactacaaaagccccaaagccagaatgagcttgacagtttacagaagtggaaagaagacatgtctgctttgggcaacactggtcatgatgaagaaaggtgtgagatgtggtcagagggctggtgaaggagagccttgagggcatagaaggtatttggattttatccctaataggtaatgggagctgctgaaggcctttaagcatgaagtgatataatgtgctttgtgttttcaaaagatcacttcattgaatgacaactatacctatgcattgtcaatatttgtggaatgaataatttagttatatttatatgttgcatataatgcatagataatctccaagtaacagagggccaaataacatgacttaaataagatagttcacttctaaactatcttattcaaagtagtgtaggtgggcaatccaggactgatacagaggttcagctagatgaagaactcagggtacaggaattctttcagctccttggtccactatccctaggtgtagctctcatccttatggtccaaaacagtagcaagagctctagctattgcatctatctttcaggcagcatgatagatcaagtgggaaagattatgtgtgaattgccttttaaggaaggttcctggggaatttgacatatgatacatctgcatctatctcattggtcagcacttggtcacatgtcctcacttaactgcaagaaagactgggaaatgtagtctttgttctggtcagctatgtgttcagccaaaactcaggagtttttactagtatgaaagaaaagrgagggcagatactgccatttagtggtttagttggcatataatcttgtcattctatttagccatagtttattaaaactggaagtgactcagagatctggagggtcaaccccctcctgtggtaccatttttacaagccccgtttctcacaggtgctttaactgaggtccagagaggtgat

SEQ ID NO: 2779 - DNA, 1159 bp, Homo sapiens
catatgtgaaatttattaacttcctaaaccttgaaaaattctgaattctaaaacccatttgtattcaagggttttaggaaagggactgtggagctgtagccagaaatgagtcttaattttattttttctgcatgcaaatacctactaataatgtcctaaaaggtactttgtttggataagttaaataatctttttaaaatttgatttagactattaatttgcttagtaaaaatcatatattgcacataggcaaattcagccctgtcgtggtaaaattatcacaagttataaattagttgcatctgagttaatgaggttttattataaacataaagcagcattacttccaatgtctgattttcattagtacaaaaaaagccaaataaagctgtagaaaaaaatgagttctctttattgtgtaccctgtgagtatgtgaagtgttgctgatttttttatttgyaaagaactgaaaagatatttacgttgcctgccactggtttgatttggattaaggctgccacaaaatccttttagttccagtggcctgtaaattatttctggactcctgttctcttatttttgaggtactaaggctaagagttttctcaacaaagcaaaaaggagaaagacaattttttaaaaaatgagaggacaggtgggatgcctggggcacagagggcatttgccaagtgtaaaagcaggtaaagctcaaggaggttaagggcagcattcaggacaagaggaaggtgggctggaaaggagcagaggaatggtgggggtttgtgctggggtccaggatctgggttgcacagtgccaactccacggctgagggcttatatttggatgcagagccctgaattccactctgacttctttagaatcagcgttgctcctgtttgtttgcaaagacgactgtatttttagttcctactgagtgaaaggaggtttcctgccttttaaccataaatccacacataaatactacataataatccctttattagacaaaaatggtttttatcttgaagcctatagggttattctcagagctgcgactcctttaaaatcttggccagctcacctttctctttttgcttgctgttctggactctctttctggtttctctttcagggggatgttgtcactattcttctcc

SEQ ID NO: 2780 - DNA, 1159 bp, Homo sapiens
catatgtgaaatttattaacttcctaaaccttgaaaaattctgaattctaaaacccatttgtattcaagggttttaggaaagggactgtggagctgtagccagaaatgagtcttaattttattttttctgcatgcaaatacctactaataatgtcctaaaaggtactttgtttggataagttaaataatctttttaaaatttgatttagactattaatttgcttagtaaaaatcatatattgcacataggcaaattcagccctgtcgtggtaaaattatcacaagttataaattagttgcatctgagttaatgaggttttattataaacataaagcagcattacttccaatgtctgattttcattagtacaaaaaaagccaaataaagctgtagaaaaaaatgagttctctttattgtgtaccctgtgagtatgtgaagtgttgctgatttttttatttgcaaagaactgaaaagatatttacgttgcctgccactggtttgatttggattaaggctgccacaaaatccttttagttccagtggcctgtaaattatttctggactcctgttctcttatttttgaggtactaaggctaagagttttctcaacaaagcaaaaaggagaaagacaattttttaaaaaatgagaggacaggtgggatgcctggggcacagagggcatttgccaagtgtaaaagcaggtaaagctcaaggaggttaagggcagcattcaggacaagaggaaggtgggctggaaaggagcagaggaayggtgggggtttgtgctggggtccaggatctgggttgcacagtgccaactccacggctgagggcttatatttggatgcagagccctgaattccactctgacttctttagaatcagcgttgctcctgtttgtttgcaaagacgactgtatttttagttcctactgagtgaaaggaggtttcctgccttttaaccataaatccacacataaatactacataataatccctttattagacaaaaatggtttttatcttgaagcctatagggttattctcagagctgcgactcctttaaaatcttggccagctcacctttctctttttgcttgctgttctggactctctttctggtttctctttcagggggatgttgtcactattcttctcc

SEQ ID NO: 2781 - DNA, 660 bp, Homo sapiens
tgcatgagatgctctgagacctgtgtggataagttgcttagagaaacacctcttggttcataaaaaatgcttgtttgacaagcttcttttgtaactagtatctagttttgcagaatataagatccatctctacctgcttccttagacttgaatttccagaacttgccaggtttcctggacacctaacctgggactgggaattagttcccacctcgttctttccacagctgagcattatccttgccttctcctatactcaggccatagcagatccacagatattctcttttccttgagaataggccagaataatattttaactttcatcttattattattgttatgtgaaaataaaaaaaattgtttttcttaatgattccattcattaatccatcyttttcattaatccattcattcattccattaattaatccaatctatgctctttgatacctggtatgagcaagattcatcagtcctttccctttactgctttattctagaaaaaagagataagccacatattataattgtatgcaaggtatttgtacaaagttccgtgtgagaatgttggggcattaaggtgtttgtggaataggtagcattgagacagatcctgaagggcaaaacatgctttaaaggcagagacagaaataactc

SEQ ID NO: 2782 - DNA, 654 bp, Homo sapiens
attagtcccttcctttcatccttttctccctctttggatcaggcttcaattattacaagtctccaagccactcgttttatctttaatatggcttcacttaaccattgtacatgttttggccagagtaatctcaccaagaggcaaatatgatcatactgttccattgctttaaggaagcatttgagtcttcctattgccwagagcataaatcaccaaattactgaataccattattggccctctaatttttcccctgtagttctctgatcttgatcttttatgctatttcatgccactttgcttttgggcattctgttccctctaactagaatgctttttttaaaaatcaatctttactcaaatgtctggttgggaattttctattcatctcaaagaactttcccaactatatcctcttctcctgagaagttccttccgtgctaaggaaagttggttgttccttcctttgtgctactagtgtacattgcacatatctctattaagataatttctggctgtcatttgaaacattcatatagctttttgattcttctactgggctaccattttattcttggcacctagtatttctactaaatgaaaaaaaaaaattggaatacaaagcaaattgctgtaactgctatcatacagtta

SEQ ID NO: 2783 - DNA, 1835 bp, Homo sapiens
tctatgtaaatgattagtggaataagtattaaagcataagatatcaattggcttttgttttaaaaatacatttacataaatacktaccaacattcatgtagaatctggccttggtacgaagatttagtggagatgaaatgcaccctgatggttatcatctgattcattaaaatactctctttactgctgagtatttgtaattcagttagatttatttcttgacatcatcctacacccccaccccccactcagggacccaatttcctctattttgcttgaaaggttgtaagtggccaagataactataagtgaaaattgtgatttcttctaaaatttagaagacacaaagtttagaagagaattggaagccagaagagattagaacatacatttcagaaacaaagtttgcaaatacgttcacgacttcggatttgcctcccctttacttctacttttgcatccataaaatttatgcacttaaaggatgacgtggtcattggctgatatataagacccataggttactggtaataatgcttccttcttttatacacaaaaaccaaaaaactcccataatataatttgatcttgagtatgcaagaatatgacagtactctgtaacactacaaatttatatcagacaaaacattcatttcttcacacatatattgggaagaatgatctctctttctacctataattaaccaaatgagcactgcctagaaggcaaaaaaaaaaaaacctacttacaaaatacagtataattttttgtacaatgtgtctaaattctacacctactgacagcttaagagtcaacagtagaaagcagatggttacttccttaaaggtatgcataattcctgtggcccaaaaacttggatgatcctgaaaatcatccagggtgctttttaaaaacagatttctggacgtggccccagacctcctgaatcagactctgcagggttacagccccaacaactggattttatacagcctgctaggcggttctggatgagtcacgcttgggaatcaatgatctagaggaaatgctgttagcacaactgcctaccaaagtcattattaaattgttttttacactaatgggatcatgtagccatttgaacacctaaatctaaggctcagggtcccaagtattgatatccactaaaaatgtaaacaaacttcacctttcacgaagtcaaaagattcccagcaagatttgaaagatgaaaaagtcagattccttccatgtgccacctcagctatcagcatgaatccaaatacggtctctgtctaacatatctacaaagattctggacaaaatctaagacaatatatccactatggctacttgagaactttgagtatgttggaagaaaagagcactggactgggagttaggagacaggagctccgtgcccttggggcaagttacttaaccactctggattcagattcctcatttgtgaaatgagggcagagctaaatgatttctaaagacaattacaaagataagagcctgtttttgtccagaatcagagaagtgatttagaggatattcctctgattttactcggatatttatttgtccctcagtttgctcatcttcatattgtacaagtgaagtagtcaagctgcacagctacttaagatacttaaatgacataaaggaaaaggaacatattggtggaaaatccatattttttgctttaaggtatcctcacaatgaaaaattcgctaatagttcatgtagatttgaactcagcacaaacatttccataaaagagctaattaaagtatacctgataatgtttggtttcagaattagtgagtag

SEQ ID NO: 2784 - DNA, 1835 bp, Homo sapiens
tctatgtaaatgattagtggaataagtattaaagcataagatatcaattggcttttgttttaaaaatacatttacataaatacgtaccaacattcatgtagaatctggccttggtacgaagatttagtggagatgaaatgcaccctgatggttatcatctgattcattaaaatactctctttactgctgagtatttgtaattcagttagatttatttcttgacatcatcctacrcccccaccccccactcagggacccaatttcctctattttgcttgaaaggttgtaagtggccaagataactataagtgaaaattgtgatttcttctaaaatttagaagacacaaagtttagaagagaattggaagccagaagagattagaacatacatttcagaaacaaagtttgcaaatacgttcacgacttcggatttgcctcccctttacttctacttttgcatccataaaatttatgcacttaaaggatgacgtggtcattggctgatatataagacccataggttactggtaataatgcttccttcttttatacacaaaaaccaaaaaactcccataatataatttgatcttgagtatgcaagaatatgacagtactctgtaacactacaaatttatatcagacaaaacattcatttcttcacacatatattgggaagaatgatctctctttctacctataattaaccaaatgagcactgcctagaaggcaaaaaaaaaaaaacctacttacaaaatacagtataattttttgtacaatgtgtctaaattctacacctactgacagcttaagagtcaacagtagaaagcagatggttacttccttaaaggtatgcataattcctgtggcccaaaaacttggatgatcctgaaaatcatccagggtgctttttaaaaacagatttctggacgtggccccagacctcctgaatcagactctgcagggttacagccccaacaactggattttatacagcctgctaggcggttctggatgagtcacgcttgggaatcaatgatctagaggaaatgctgttagcacaactgcctaccaaagtcattattaaattgttttttacactaatgggatcatgtagccatttgaacacctaaatctaaggctcagggtcccaagtattgatatccactaaaaatgtaaacaaacttcacctttcacgaagtcaaaagattcccagcaagatttgaaagatgaaaaagtcagattccttccatgtgccacctcagctatcagcatgaatccaaatacggtctctgtctaacatatctacaaagattctggacaaaatctaagacaatatatccactatggctacttgagaactttgagtatgttggaagaaaagagcactggactgggagttaggagacaggagctccgtgcccttggggcaagttacttaaccactctggattcagattcctcatttgtgaaatgagggcagagctaaatgatttctaaagacaattacaaagataagagcctgtttttgtccagaatcagagaagtgatttagaggatattcctctgattttactcggatatttatttgtccctcagtttgctcatcttcatattgtacaagtgaagtagtcaagctgcacagctacttaagatacttaaatgacataaaggaaaaggaacatattggtggaaaatccatattttttgctttaaggtatcctcacaatgaaaaattcgctaatagttcatgtagatttgaactcagcacaaacatttccataaaagagctaattaaagtatacctgataatgtttggtttcagaattagtgagtag

SEQ ID NO: 2785 - DNA, 769 bp, Homo sapiens
agtcttgtcctaagctagcctgttcatccttcagccacagctaaaaggagatgctcttactgttggctcccatgccatcaggaatggttgtaggagtgagggcgttgcgctgctgagggttgataagctggctcacagaaggcagcttgttcatgctgttcattttgttcagaggtggggagctgttaccatatgaagatggagactgtattgaggtcctaggaagacaaacatggaaatratggtgagcaagggacactgaagagtggggactattgattttcaacaggtctctgtttaaaacatggcctcaaaccaaacatttgaaaacattcttctaggattaatggtaagaagttaattttgtttccatctgagaatatttcctgaatagggagaaactgactgcgaggctatcatcaaatcatatttttcctgaatgtgcagagtgcaaggtttagtatttcctttgagaaagagaaaattcttgcctcctcttttcccttcagttgttttctccattcccttctcctcttttcccttcaactcaaatgagtttgaaaagcagttagggaaaagaattgagcaaagacttaaaggctgacgaaaaacatggatatcccaccctcaaactgcagctaaggcattccatttgtagctttctgtatattccatttgggatatgcagaaaatgactacaaacccaatcaaactgggcatttggcagctcatcttgctgtcatgcagaggcccctacttggaaacatgc

SEQ ID NO: 2786 - DNA, 1180 bp, Homo sapiens
tgcatagtggtccaaagaacagcagcagagactggaggctggaggggaggatgtccccagaaggtgctgtccaattgagtagagaaacactgacactgtgagaggttccccagaaatacatgggcacacaagctggaggtccttcatcagcagatggggctagagccagagaaatttgaatgaaggccatggcaatgatcccagataaactcacatactgacaccttggaaaatttgagttatattagatagatttcaaagatacctaccagaaaaataattaatgaataggtaagtacaatattacagttcagtgtggctttcagagaaatacagccagaggaaattaaaatttttcttttctatttttatctgcataacctaaggaacaccaaagaggatctaattcataattctgaascactcttctaaactgcctctgaggatcttttatttggccttgcattgatttgtaaatatttttatctccagaaccctccaaaggaaggagaggcaggcagtgatgtaggttctaaaaatggcctaggggtaaaattaaacctgtatcttcccccaccccccatcacccacatcttttatttatacaacaacaggtgaggaaccacctcctcttcttgacacagggaacattgcaatgtcacctaagagcttcatggaggaggaagggcgttgtggtggactgtattttccaaagatctcccaacaatatctcttgttccacatgctctttgagaaccttgtactctccccagcaagaggtggagactcttctccctttgaacctgggccggcctctgtaatttccctgatggttagggtatggcagaaatgagctatgcaacttccaaggctaggtttttaaaatgccatacatctggctggacgtgatggctcatgcctgtaatcccagcactttgggaggccgaggcgggtggatcatgatgtcaagagatcaagaccatcctggccaacatgatgaaaccctgtctccactaaaaatacaaaaattagccaggcttggtgcgtgcctatagttccagctactcgggaggctgaggcaggagaattgcttgaactggggagagggatgttgcagggagtcaagatcgtgctactgcactccagcctggtgacagagtgagactctgtcgaaaaaaaa

SEQ ID NO: 2787 - DNA, 1180 bp, Homo sapiens
tgcatagtggtccaaagaacagcagcagagactggaggctggaggggaggatgtccccagaaggtgctgtccaattgagtagagaaacactgacactgtgagaggttccccagaaatacatgggcacacaagctggaggtccttcatcagcagatggggctagagccagagaaatttgaatgaaggccatggcaatgatcccagataaactcacatactgacaccttggaaaatttgagttatattagatagatttcaaagatacctaccagaaaaataattaatgaataggtaagtacaatattacagttcagtgtggctttcagagaaatacagccagaggaaattaaaatttttcttttctatttttatctgcataacctaaggaacaccaaagaggatctaattcataattctgaaccactcttctaaactgcctctgaggatcttttatttggccttgcattgatttgtaaatatttttatctccagaaccctccaaaggaaggagaggcaggcagtgatgtaggttctaaaaatggcctaggggtaaaattaaacctgtatcttcccccaccccccatcacccacatcttttatttatacaacaacaggtgaggaaccacctcctcttcttgacacagggaacattgcaatgtcacctaagagcttcatggaggaggaagggcgttgtggtggactgtattttccaaagatctcccaacaatatctcttgttccacatgctctttgagaaccttgtactctccccagcaagaggtggagactcttctccctttgaacctgggccggcctctgtaatttccctgatggttagggtatggcagaaatgagctatgcaacttccaaggctaggtttttaaaatgccatacatctggctggacgtgatggctcatgcctgtaatcccagcactttgggaggccgaggcgggtggatcatgatgtcaagagatcaagaccatcctggccaacatgatgaaaccctgtctccactaaaaatacaaaaattagccaggcttggtgcgtgcctatagttccagctactcggraggctgaggcaggagaattgcttgaactggggagagggatgttgcagggagtcaagatcgtgctactgcactccagcctggtgacagagtgagactctgtcgaaaaaaaa

SEQ ID NO: 2788 - DNA, 1131 bp, Homo sapiens
ctaggtaactgactttcttctcacaaagtcttaaattttcctggatcctttttgggaaacaggctccaggttttggcattatcaaatctgcttccaggtgatgcaataattctagaaaaaaataaaattgaggctcagtcagtaacagctttagctattcccttccccagactggacaaggcagggctggaggtgctggctgggaaaggtgggaagagaagaaagagggagcccacatgcttccataggacccccaggtttttcagtcagtacgtactgaacgcgatgtgcatgtgaaaggacacgtgaatcattgtatgactgtgtgcactcaacgaacttcttgtgccttttttaactatcacatatttcagtattcacttcaatttaactaaacatattgctagagacagagagakgaatgtattttaatgcttttttttcggccacctaaaaagagcaaatgaaagagcaacaattgttaagccgtctctccaaccagaccccgaccaacacctgcaaatagacacacacacacacacatacacacgcacactcatacagacaccaacatccacgtttctgggaaaatgccccactcccaccccacccttcctgctggttccttagtttccgggaaggcaccctctccgggcttggtaacctccttgaagaaacctgttgctaagtctgaggtcctgtgtggacgcccccacctggtggccgaacctagaaaaacgtctctaaccaagaaaaactggcaggtagtgtaactaactccaaggctcctgagcccttccgaccacatcagtcatgggtgaattggaggagaatagagaggaaaatccactgctaaacgcgtgggggagagaggggggagggggggttgccaaggtcataggcaattccctgccaaaaccctggtacagtacagcttcctagaagcagccatcaggatgactaaaccagagccagaaggcagagcttgatggctggacgtgccctgccagctccgagatgggtgctgacagcacagatttccaatcttgaatgaggagcacccccaccatcctctcccccctcccaaatacgggtggattttccatccccagtggcaggtgcagagggagt

SEQ ID NO: 2789 - DNA, 1131 bp, Homo sapiens
ctaggtaactgactttcttctcacaaagtcttaaattttcctggatcctttttgggaaacaggctccaggttttggcattatcaaatctgcttccaggtgatgcaataattctagaaaaaaataaaattgaggctcagtcagtaacagctttagctattcccttccccagactggacaaggcagggctggaggtgctggctgggaaaggtgggaagagaagaaagagggagcccacatgcttccataggacccccaggtttttcagtcagtacgtactgaacgcgatgtgcatgtgaaaggacacgtgaatcattgtatgactgtgtgcactcaacgaacttcttgtgccttttttaactatcacatatttcagtattcacttcaatttaactaaacatattgctagagacagagagaggaatgtattttaatgcttttttttcggccacctaaaaagagcaaatgaaagagcaacaattgttaagccgtctctccaaccagaccccgaccaacacctgcaaatagacacacacacacacacatacacacgcacactcatacagacaccaacatccacgtttctgggaaaaygccccactcccaccccacccttcctgctggttccttagtttccgggaaggcaccctctccgggcttggtaacctccttgaagaaacctgttgctaagtctgaggtcctgtgtggacgcccccacctggtggccgaacctagaaaaacgtctctaaccaagaaaaactggcaggtagtgtaactaactccaaggctcctgagcccttccgaccacatcagtcatgggtgaattggaggagaatagagaggaaaatccactgctaaacgcgtgggggagagaggggggagggggggttgccaaggtcataggcaattccctgccaaaaccctggtacagtacagcttcctagaagcagccatcaggatgactaaaccagagccagaaggcagagcttgatggctggacgtgccctgccagctccgagatgggtgctgacagcacagatttccaatcttgaatgaggagcacccccaccatcctctcccccctcccaaatacgggtggattttccatccccagtggcaggtgcagagggagt

SEQ ID NO: 2790 - DNA, 585 bp, Homo sapiens
tcatatttgtcatcccaaccacactacagcgtaaccaaatccccttttcattttcctttagctgcacttactttgtgggggctgttgtgaggattgaaagagcacaggtaagcagctacaaatgtgcctggaaaatgcaaatgctcaataaacgttccttcctattgtcaaagaatttgacaagcactcctcctttttcctgggagctattctgccccctgttttgtagcagctgtcatgccatcttatgatcctttcacccaaagacacaggtggggaataagggttctgcagtaggcacctgaacccagctaagtcagtgggtccctaacttaggaaggcaattacttttcttcactgtaaagccacacccctcactcaggccttcttgatctcctttggggtccatgagcaagcaagatccctgggacgcctcagctggtttaagatgggyttctgctaccagcctctgaaagtgtcaagggagttcaaaagcaaacgtcatgtaggcgtaggtctctccagggctttcccagaacaagaagctgagctctaagggggaagaaggagaaatatgaaaaaaaa

SEQ ID NO: 2791 - DNA, 691 bp, Homo sapiens
ttgcccatggggcagtgcagtggcatgatgctagcccacggcagcctcgacctcctggactcaagtgatcctcccgcctcagcctcccagagtgttgggattatgggtgtaagccaccacgcttggccttctcttgttaatatatctttcgtctgtttaattcacaggtccccaaagactaaacctgagggtagataaaaagtttttcctcccagacactgtctacaaactgattctaaaatttacagagaagccagggcactgtgttttgcacctgtagtctcagttgcacacttgggagctacttgggagctgagacaggaagatcgctggaggccaggagtttgaggctataatacaccatgatcatgcctgtgagtagccaatgcactccagccygggcaacatagaaaggcaaaggtactagatttgccaaaacaattttttttttttttgagatggagtcgcgctctatcgcccaggctgtagtgcagtggcgccatctcggctcgctgcaagctccacctcccgggttcacgccattctcctgcctcagcctctcaggtagctgggactacaggcgcctgccaccgtgcccggctaattttttgtatttttagtggagatggggtttcacagtgttagccaagatggtttcaatctcctgaccttgtgatccgcctgcctcggc

SEQ ID NO: 2792 - DNA, 674 bp, Homo sapiens
atttttctgcaccatcctctttttctttccttatgggatgccaattccacaaatactagaccaaaaggtaccgtccccaagtcctctttcctgtcacttccattctattattgagcctatccagtaagtatcctgcccagtcttatattagcctcaggttttacattttcaaacaagtatttttttttaatacatgtagccagccagttagatcaataagggaaaactatgtgtgcatgttgtggtttgtgaacatgtccacaaactttttatcactttttttttttttttttttgagatagagtctcactctgtcgcctaggctggagtgcagtggcgtgatcttggctcactgccacccrcacctcctgagctcaggtgatcctcctatctcagcctcccaagtagctgggaccacaggcatgtaccaccacacccagctgatttttttgtattattttttgtagagatggggtttcaccacattgcccaggctggtctcaaactcctagactcaagctatccgcctgccttggtctcccaaagtgctgggatgacaggcataagccaccatgcccggcctaacacttttttcatcaaaaggtttgctttaactaccctcctctttaatattgttcagtgttatatttgtcatttgcatctgactaatagaa

SEQ ID NO: 2793 - DNA, 422 bp, Homo sapiens
tttttgtttcctcttaagatgtgctttcccttctgctatatctgtatctttgttaccatcacttagcttccagttattgagaacttactatgtgccagatactgcttacaactccagtctttgctcaatcaaatccacccagttgcttttattcattccatgaatatgtaggatagcatgatggttttgcagtcyctgtaggcattattataggtggaactctttgcaaagcctgcattttaaaagattctgaaatacttttgtgggtgtcctgtttcagatgctagaaagatgctaatggacccttctgactttctttttggtgcctctcttaggcagcattttcaaaagatcactaactcatacatgggctttacctctctagatgaagctgcacgatgtcaaggtaagcaaatgaccct

SEQ ID NO: 2794 - DNA, 422 bp, Homo sapiens
tttttgtttcctcttaagatgtgctttcccttctgctatatctgtatctttgttaccatcacttagcttccagttattgagaacttactatgtgccagatactgcttacaactccagtctttgctcaatcaaatccacccagttgcttttattcattccatgaatatgtaggatagcatgatggttttgcagtccctgtaggcattattataggtggaacyctttgcaaagcctgcattttaaaagattctgaaatacttttgtgggtgtcctgtttcagatgctagaaagatgctaatggacccttctgactttctttttggtgcctctcttaggcagcattttcaaaagatcactaactcatacatgggctttacctctctagatgaagctgcacgatgtcaaggtaagcaaatgaccct

SEQ ID NO: 2795 - DNA, 422 bp, Homo sapiens
tttttgtttcctcttaagatgtgctttcccttctgctatatctgtatctttgttaccatcacttagcttccagttattgagaacttactatgtgccagatactgcttacaactccagtctttgctcaatcaaatccacccagttgcttttattcattccatgaatatgtaggatagcatgatggttttgcagtccctgtaggcattattataggtggaactctttgcaaagcctgcattttaaaagattctgaaatacttttgtgggtgtcctgtttcagatgctagaaagatgctaatggacccttctgactttctttttggtgcytctcttaggcagcattttcaaaagatcactaactcatacatgggctttacctctctagatgaagctgcacgatgtcaaggtaagcaaatgaccct

SEQ ID NO: 2796 - DNA, 422 bp, Homo sapiens
tttttgtttcctcttaagatgtgctttcccttctgctatatctgtatctttgttaccatcacttagcttccagttattgagaacttactatgtgccagatactgcttacaactccagtctttgctcaatcaaatccacccagttgcttttattcattccatgaatatgtaggatagcatgatggttttgcagtccctgtaggcattattataggtggaactctttgcaaagcctgcattttaaaagattctgaaatacttttgtgggtgtcctgtttcagatgctagaaagatgctaatggacccttctgactttctttttggtgcctctcttaggcagcattttcaaaagatcactaactcatacatgggctttacctctctagatgaagytgcacgatgtcaaggtaagcaaatgaccct

SEQ ID NO: 2797 - DNA, 672 bp, Homo sapiens
aatagctgatcatattttgttggactcctagatggaaaatgcaaacacatagttcactttttgacaactttgtgatgtggattacctaactgaacaattattgagcatttactcatctctatgtgtttagtcaaccaaaaattatcaataagtagaaatagctttatagcagctctttgtctagcaagggatacagatgcacaaaccaataatttaaaaatccagtggaggaaagaggtatttacaagagcatacagatactggacactgaagacattcagaggccaggactggggcttggagggtgagctaaggagttaagaatttttatcactttgaccattgcctactttgtcaaatacgaagccaattataacagatatttatttcagagaacactgaaagaatgaagaaagtatawcatccaaggagagcagatttttattttacttacttaaaatataaggcatttttcttatgattttaaaatagtatacttgggaaaccattttctagtgcttctgtatttcaagcaaataggaccaattctcaacaacctggtgataaaaaccctttttttctaaaaccctaatatagattagaaagtttgcatgacgttttatagacaactttcatttctatggactgagcaaatataccaagttttttgtg

SEQ ID NO: 2798 - DNA, 672 bp, Homo sapiens
aatagctgatcatattttgttggactcctagatggaaaatgcaaacacatagttcactttttgacaactttgtgatgtggattacctaactgaacaattattgagcatttactcatctctatgtgtttagtcaaccaaaaattatcaataagtagaaatagctttatagcagctctttgtctagcaagggatacagatgcacaaaccaataatttaaaaatccagtggaggaaagaggtatttacaagagcatacagatactggacactgaagacattcagaggccaggactggggcttggagggtgagctaaggagttaagaatttttatcactttgaccattgcctactttgtcaaatacgaagccaattataacagatatttatttcagagaacactgaaagaatgaagaaagtataacatccaaggagagcagatttttatttyacttacttaaaatataaggcatttttcttatgattttaaaatagtatacttgggaaaccattttctagtgcttctgtatttcaagcaaataggaccaattctcaacaacctggtgataaaaaccctttttttctaaaaccctaatatagattagaaagtttgcatgacgttttatagacaactttcatttctatggactgagcaaatataccaagttttttgtg

SEQ ID NO: 2799 - DNA, 1284 bp, Homo sapiens
gcataaactacatgtgccaacaatacaatttatgctttctccctgaaactctggaattttagtacrtgctaagcagctggtgcctatgtgaccagcccccaataaaaaccctgggcactgagtttctaacgagcttgcctgtcaaacagcatttcacatgtgttgtcacagctcattggggaggaattaagtacatcctgtgtgacttcactgggagacgacttggaagcttgtcctgtttcctccctactttgctccatgcaccttttccctttgcagattttgctttatagtgtttcactgtaataaatcttagccatcagtacaactgtattctgtgtcctgtgaatcttcctagtaaatcaaacctggggatggtcttggggattcctgagacagcaagactcactggaaggactccagtagaaaacagctgctcagcattgacacagataagcacatatatttgttttaatttctatcttccagaataagacatttgattattttaggtgtatcttccttaacaactgtaactactcagaatctttcagattttaggaaggcactgaatataccatatattattaaatgccccaggaggcctggggaatacatactaatgtactcaaatacattagtatggctgcttttaatacatgaaaagtctcactaagaagaataaatagaggttatatgtagcctcacatcagtccaggtcagggctcaccaccagatgagtttctgccaaacttaggggaaaaacacttaaaatttttagagcattttgaattttcgcattgcagataagggattgtggacctgtattaccctccttcttttgcttatccggaaattaaggcttagaaaagttaattgatttgccaacagtagcacagcttgtatctgatctggatttcaaatttaggactgtctaggctacatgcccgagaactcttatctatcactctagactgtctttctagctacttattttaagaatatgtcttcagtgtctgcatactactaaggaggaagtaatgtgtgaacaagggagaatagaaaagaagaaagtaattatatttttttgacatggccatttacataatttactttccttcatgaaatggattcctaatatatatttattgttaccttctgtaagtctaactgcatgacaaggcccaaaagagaaatatccacccattctctctcctagggtatgtctgttatatccttatagtcattctcagagtgtgagtgagagagtgtgtgtgtgtctgt

SEQ ID NO: 2800 - DNA, 1284 bp, Homo sapiens
gcataaactacatgtgccaacaatacaatttatgctttctccctgaaactctggaattttagtacatgctaagcagctggtgcctatgtgaccagcccccaataaaaaccctgggcactgagtttctaacgagcttgcctgtcaaacagcatttcacatgtgttgtcacagctcattggggaggaattaagtacatcctgtgtgacttcactgggagacgacttggaagcttgtcctgtttcctccctactttgctccatgcaccttttccctttgcagattttgctttatagtgtttcactgtaataaatcttagccatcagtacaactgtattctgtgtcctgtgaatcttcctagtaaatcaaacctggggatggtcttggggattcctgagacagcaagactcactggaaggactccagtagaaaacagctgctcagcattgacacagataarcacatatatttgttttaatttctatcttccagaataagacatttgattattttaggtgtatcttccttaacaactgtaactactcagaatctttcagattttaggaaggcactgaatataccatatattattaaatgccccaggaggcctggggaatacatactaatgtactcaaatacattagtatggctgcttttaatacatgaaaagtctcactaagaagaataaatagaggttatatgtagcctcacatcagtccaggtcagggctcaccaccagatgagtttctgccaaacttaggggaaaaacacttaaaatttttagagcattttgaattttcgcattgcagataagggattgtggacctgtattaccctccttcttttgcttatccggaaattaaggcttagaaaagttaattgatttgccaacagtagcacagcttgtatctgatctggatttcaaatttaggactgtctaggctacatgcccgagaactcttatctatcactctagactgtctttctagctacttattttaagaatatgtcttcagtgtctgcatactactaaggaggaagtaatgtgtgaacaagggagaatagaaaagaagaaagtaattatatttttttgacatggccatttacataatttactttccttcatgaaatggattcctaatatatatttattgttaccttctgtaagtctaactgcatgacaaggcccaaaagagaaatatccacccattctctctcctagggtatgtctgttatatccttatagtcattctcagagtgtgagtgagagagtgtgtgtgtgtctgt

SEQ ID NO: 2801 - DNA, 680 bp, Homo sapiens
atcagaaatgaaagaagaaaccccaaagtaagatgatttatttgctttttggtaaactcgattctgttttgtaacatttgaaacatggattttatgagtgagtctattaaaatgtatactccctctagtgtgtgttaatcattatttctctgctgggcctacggattacctgtctgcattgtaatgcaacattccttaatatttacaatagaaataccagtggttcataagacatctcatatttctgtgaacaaaatgagatttacaagaaataaggacttgtctstagaaatacatttcaaaatattaaagtcctcataaaaattcctagatttatttaaatcagtattgatttagactaatgaaataaaatatctgaccccagtgattgtactttgatgctccaaaaggtagatgaaatcattgcaagtacagttttagtataaatataaacagagcaaaaaataggtacttcatttataattgtgttcaatgcatcagacatttattaagtctctactttgtgaaggtccttttcagtttctgggggaaggagaaggggaagggatgtagagatgaagtcagatccctgtccttgggtgaggaggactgagacagacatgagcacctgtaactatttttttagagtgtgaagatccattactataacataaaagcag

SEQ ID NO: 2802 - DNA, 230 bp, Homo sapiens
accttcacagtaaagtttttttattttgcttccaacccttccttttgtactgccttctagaatgttttggaatgagacttgtgagcaaacactatatgatgttsttctttgcattacagtgccaagtgcatggttggcatacagtatatttggtttaaacagatgaaagaagaaacagtcaatcaagggagtcaagtgaaaaagatttgtcactgaatacttccttaggg

SEQ ID NO: 2803 - DNA, 529 bp, Homo sapiens
ccgttagagtgcttgtgatacggagattagacaatagatagatgagtagttagatggatagttgaaaggcacgtatggataaatatccttgatgttctctagagaasactcaaaaagagatatcagggtcttttgccaagttacttgaatatgaattcaagacctaacatgacagctgataggctcttcctttaacatcctgttgggggacaatgagatattccaaaagtttgctcataccagaagaattgcaatagaaatcggaatcacttagatccagcaaaatacaggaatgaggcattatcagatgtgacattattgggtagtactgatatgaggagaagtctatttgaaagaagacaaaaggacgcatattagtttgctaggtctactagaataaaagcactacagacagggtagcttaagtaacacaaatttattttctcacagttgtggaggctagaagtacaaaatccaggggtcaaccagtttggtttcttcttaaatctctttccttggcttgcagatg

SEQ ID NO: 2804 - DNA, 529 bp, Homo sapiens
ccgttagagtgcttgtgatacggagattagacaatagatagatgagtagttagatggatagttgaaaggcacgtatggataaatatccttgatgttctctagagaacactcaaaaagagatatcagggtcttttgccaagttacttgaatatgaattcaagacctaacatgacagctgataggctcttcctttaacatcctgttgggggacaatgagatattccaaaagtttgctcataccagaagaattgcaatagaaatcggaatcacttagatccagcaaaatacaggaatgaggcattatcagatgtgacattattgggtagtactgatatgaggagaagtctatttgaaagaagacaaaaggacgcatattagtttgctaggtctactagaataaaagcactacagacagggtagcttaagtaacacaaatttattttctcacarttgtggaggctagaagtacaaaatccaggggtcaaccagtttggtttcttcttaaatctctttccttggcttgcagatg

SEQ ID NO: 2805 - DNA, 1690 bp, Homo sapiens
ttagctatttgccctgatgctctccctcccttccccaccaccaggccctggtgggcgttgtttccttccctgaatcagacacaaatttaaaacacaatttctaattagtgggatcaagctaaagaccatgcgtttataaatctcttaagtagtttttctatctttaaagtacacaaagagtttcctggacatgttcttaaaattccggttccaggtgtacaccacaagattctgactcagtaagtttggaaaagtagaataagaatctgcatttcaacagctactagctgatgctgatcatgatggtcgcatgtggcaccctctgaggaacaatggactgggctgtataacttatctgaactttagaaaagagtttttaatactcagttcttagcacatcaaattctccaaccggtagagagtaggtgaatgcttatacatgtttgcctatgaattaaattaaaattctgtttttctctttctgtctaatatagttatttcaacaaatggcctctataaatatatatgaacctcagaaaactccagggaagtaaattcaaatttctaaacataagaaatcagttttatgtgagagatatgtgaccaagcacctagaatcttttgacattaaatatgagaatgtttttatcatatgatatccaaaagatgattgaattttggcaaatgtttacattcactttattacttaaaacactcaaagtcaatgtaaaggtaaaaatacaagataaataatgatttgtaggaaaacttttgaagtatagaatgactccaattttattatgccaattatcactatttactagagaatgtgtaaaattttgataacatggtaagtattatttttgacatagcgttgttccatcttggacatatatttgttgaaaagtagtagatggtattctacagaaacatctttatcactgcaatcatttctatgcctggtttcctccagcgtgcttttccgttgtctgactcactcagggctagactaacactgggattagcatgtgatgggtccattcgctttccggttgctttgtcttcacaatgatctattgtaaaatcacctggttaagtttatttttagaatttgtagagacagattttgggcattactttccgtctcaatcatatgatctcctaattgatgctatttagaaaaacaaaagggagatttcaacgtgtttaaatacatcagccatatagaaaaggacatctcttgagacttcacttcagcttcactgacttcttgactctcctcttgagtaaaaggtaatatgttcaagtacaatctaatattatatattagcataagcttttgtttgctaaaatcaatagtaacccacttatgaaaatgtatattatctatttaaatctagtttacttgaattgcgtatttgcctaaataaataatttacatttttgtatattacctatagaataccataatttctaataggactgttcaaattagcatagatgatttatctaataaatatttcctttaaaaactcacacacaaattcattttattttattttattttactttcttattttactttaagttctgggatacgtgtgcagracatgcagatttgttgcattggtaaacgtgtgccatggtggtttgctgcacctatcaacccatcatctaggttttaagcccc

SEQ ID NO: 2806 - DNA, 1162 bp, Homo sapiens
tttcctgttgctgctgtaaacacattaccgcaaatttagtggcttaaaacaacgtaaatgtattgctgacacctgcatgtcagcacagtaaaactgattttggacttctggcttccaaaactgcaagagaataaatgtgtgggggtttttttgcttttgtttttgttttcatttttcttttgtagagacaaggtcttgctgtgttgaccaggctggtttcaaactcctggcctcaagccagcctccctccttagcctcccaaagtactgggattgtaggcatgagccactgcacccagccaaatgtgtgttgtttcaagcaaatctgtgataatttgttatagcagccatgttacactaatggagtaattgataagtatttggttttgaaatattttgattctatcctctcttgttcctcattgaaatttcaccctatttactattatattgattgttgttattagtgttattcttgctaacatatattgagcaattcctatgttccaggagctaagtactaaatgcacattatctaatttcatgatcaccataatcttatgggaatgatactttctgtatccatttcatagattaagaaactgatgcttagcgagggggaatcctgcccaatgtcacactgctcrtaaagggtgccactgggatttgaacctaggtagtctggctgcaaaatgcaccctctgaaccccttcacatactctctctcatcctcaggagtgatcttatcccctcactacagagatgaggaaactgtcccctgggaggaggagtgacactcttcagtcttcccagccatgtctcccgcctccatccccagccacctctccaccacacctgaataagctcagttatattgtcctcccctggtacctggcatccaagtgggaaaacccaggtctctctccttgcaaaccaagtaatcatccatgtcatttcactggagagaagtggaatttgtcacaaaatacaatgataacaagttgccaaggacctgaagttcctgcagactaaatctcagggtcaagcaaagcaaggcacgtgggagtctgggggcactgcctggggatgctctcatttctctgcagttcttgtgcgtgggctgtcttctcacagtgttgtcagctcagccagggcagcaacag

SEQ ID NO: 2807 - DNA, 659 bp, Homo sapiens
tttgtcactagggaaaaaaagagataaactaatggtgcaaacaagaatgagtggtgactgatgctgaagggtgcctacttgtcagtaagcgtttgcagaattgccatttagtgccctgtttgttgaagcaggctccccaaggaactttataaagtttggggagaatgtgatgaaatcagaaccctcatactctactagagggaatgcaaaattgtgcagccaccttgaaaaacagtatggtagttccttagaaaaaccaaagagttaccttatgacccagcaattccattcctggggaaaattaaactatatatccacacaaaaccttgtacaccaatgttcatagcagcatcattcataatagccaaaaagtagaaacaacccaaatgtctatcaactaatgaaaggataaacaaaatgtgctatatgcacacaatggaatttattccaacataataggactgaagtactgatccttgctacaacacggatgaaccttgaaaatattacattaaatgaaggaagccagacacaaaaggccacaygtttaatgattccatttctatgaaatgtcaggaacaggcaagtttatagagacagaaagtagatcagtggttgccttggactgtgggagggagattggagagaaatggggagtg

SEQ ID NO: 2808 - DNA, 525 bp, Homo sapiens
agctgtcacagtggctgaaaattgacatggttatatcagttgtctaaaggagaattggtaactaactgctttacaaacagatatactttgcaggcatccacattccagacggcaatcctgcttcagtacaacacagaagatgcctacactgtacagcagctgactgatwgcactcaaattaaaatggacattttggcataagtcctacagattttattaaagttgaagttattggtcttggaagatgaaaatgtaaatgctgatgaggtggaattgaagacagataccttaataaaattacatcttggttataaaaattagaaattaagggttaacatcaatgtgcccatgaaactgaacagaagcaggaacaagaaaacacaaacaaaaatattgaggaagactgcaaactactgattcagatggccatcatgagaatcatgaagatgaggaaggttttgaaacaccagcagttagttgatgaggccctcactcagctatcctccaggttcaaatcccgggtcc

SEQ ID NO: 2809 - DNA, 1859 bp, Homo sapiens
cagtgcctaaggttgaggcagctagagaaggctcagggaggaggtgggaaccgagctgggtttggagttgagagagctcttgaaaagcaccaggaaggcaggggaagatgcggccctgcactttctgagggggaccattaagagatcaagttgactaaagcagagactttgtgtaggtgatgagcctgggaaagtagctatggatgccagactgagcacccatagcaggaccacgggatggagatgggaggggtcaggggccagggtggggtggaatgtggggcagaggttcaggggaactgatcagagttgggaggtcatggagatggactatcttggggaatgggttcaaagcaaccagagttgcttctttctgacccaaaaacaaaaattaagaagatgagtgaagaagaagtaaaacagttgaaacagaaagaaagagaaaattatgagggagggaaggtaagggcagataagatttactgccacgttggtgtattttgttcagtacttcatcaatgccatgcccaaataactgaaagaggcagcaattctgagctctctggtccctcaagatagtcaatgatctttagcatttctcatttattaataaacatttgttttctttaaataaagaaaaatacttattggatttcctgcttcgttctgcagggcattccaatatcacagtaaagagcaacartgtgtgataatggctgaaaacaggaagtcctccataatcattaggatgagagatgcagttttatttgaaaagtaaagtgagtacattttcttcctcctcctcctactgtcctccccatcctcccactcttcctctttctctattctatctttaatttatgagaccagaggaggaaggcgctatggtgttgtaaaattgaattctgagttaggacaggatttgattactaactaaccatgtcagcttgagtatattacttcacctcctagatttaatttttttttgttcaaaaaatgaaaggattagatttacaaaatcacttctacctctatgaccctgaaaataagatttttaaaatattattttatatttaacaaggagatgggaagtctaagcattccttttggtcttggcttcttattctgcagggtgaccatggtccttgggccctaacatctggacgaagccttgtaaaacagaaatactgaggtgttttaatcctcagaaacatttagattgggacacaaatcttattttttactcttaaatttttcacattttgggggacatggtctatatttttctcagatttctgatatgttgtcttttaaaaatgtgtaaaagttacagttccttttctatagtttattttaaaatgtgggtcaatagtcccactgcttagaataagaggcacacaggatttcaatagaaattgcatgcctttttagatgtgcgaatgtttcattaagcgtatgaatatttgaagagatgtatgacactttaaaaactgtttcctctactgtgttggtggccaggtattaagactgttaataataacaatttagctctccaaatatcctgcatcacaggtgttaaagaggactggaaacaccttagttcttgtattcttgaggatgatttgccatattgtgtctagtatcacggcaaaactccaagtagcattttaaatagtatttatttgggttggaattatttctatgcattgactcatcttcctgggtttcattagctgtacgcattgtactttcttccttaccactatttatctcgaattcttgagattaaagtacagatgaaatctaaactttatctggtaaagttattagttcttacaagtagcaagcaaacggtaaac

SEQ ID NO: 2810 - DNA, 1859 bp, Homo sapiens
cagtgcctaaggttgaggcagctagagaaggctcagggaggaggtgggaaccgagctgggtttggagttgagagagctcttgaaaagcaccaggaaggcaggggaagatgcggccctgcactttctgagggggaccattaagagatcaagttgactaaagcagagactttgtgtaggtgatgagcctgggaaagtagctatggatgccagactgagcacccatagcaggaccacgggatggagatgggaggggtcaggggccagggtggggtggaatgtggggcagaggttcaggggaactgatcagagttgggaggtcatggagatggactatcttggggaatgggttcaaagcaaccagagttgcttctttctgacccaaaaacaaaaattaagaagatgagtgaagaagaagtaaaacagttgaaacagaaagaaagagaaaattatgagggagggaaggtaagggcagataagatttactgccacgttggtgtattttgttcagtacttcatcaatgccatgcccaaataactgaaagaggcagcaattctgagctctctggtccctcaagatagtcaatgatctttagcatttctcatttattaataaacatttgttttctttaaataaagaaaaatacttattggatttcctgcttcgttctgcagggcattccaatatcacagtaaagagcaacaatgtgtgataatggctgaaaacaggaagtcctccataatcattaggatgagagatgcagttttatttgaaaagtaaagtgagtacattttcttcctcctcctcctactgtcctccccatcctcccactcttcctctttctctattctatctttaatttatgagaccagaggaggaaggygctatggtgttgtaaaattgaattctgagttaggacaggatttgattactaactaaccatgtcagcttgagtatattacttcacctcctagatttaatttttttttgttcaaaaaatgaaaggattagatttacaaaatcacttctacctctatgaccctgaaaataagatttttaaaatattattttatatttaacaaggagatgggaagtctaagcattccttttggtcttggcttcttattctgcagggtgaccatggtccttgggccctaacatctggacgaagccttgtaaaacagaaatactgaggtgttttaatcctcagaaacatttagattgggacacaaatcttattttttactcttaaatttttcacattttgggggacatggtctatatttttctcagatttctgatatgttgtcttttaaaaatgtgtaaaagttacagttccttttctatagtttattttaaaatgtgggtcaatagtcccactgcttagaataagaggcacacaggatttcaatagaaattgcatgcctttttagatgtgcgaatgtttcattaagcgtatgaatatttgaagagatgtatgacactttaaaaactgtttcctctactgtgttggtggccaggtattaagactgttaataataacaatttagctctccaaatatcctgcatcacaggtgttaaagaggactggaaacaccttagttcttgtattcttgaggatgatttgccatattgtgtctagtatcacggcaaaactccaagtagcattttaaatagtatttatttgggttggaattatttctatgcattgactcatcttcctgggtttcattagctgtacgcattgtactttcttccttaccactatttatctcgaattcttgagattaaagtacagatgaaatctaaactttatctggtaaagttattagttcttacaagtagcaagcaaacggtaaac

SEQ ID NO: 2811 - DNA, 1859 bp, Homo sapiens
cagtgcctaaggttgaggcagctagagaaggctcagggaggaggtgggaaccgagctgggtttggagttgagagagctcttgaaaagcaccaggaaggcaggggaagatgcggccctgcactttctgagggggaccattaagagatcaagttgactaaagcagagactttgtgtaggtgatgagcctgggaaagtagctatggatgccagactgagcacccatagcaggaccacgggatggagatgggaggggtcaggggccagggtggggtggaatgtggggcagaggttcaggggaactgatcagagttgggaggtcatggagatggactatcttggggaatgggttcaaagcaaccagagttgcttctttctgacccaaaaacaaaaattaagaagatgagtgaagaagaagtaaaacagttgaaacagaaagaaagagaaaattatgagggagggaaggtaagggcagataagatttactgccacgttggtgtattttgttcagtacttcatcaatgccatgcccaaataactgaaagaggcagcaattctgagctctctggtccctcaagatagtcaatgatctttagcatttctcatttattaataaacatttgttttctttaaataaagaaaaatacttattggatttcctgcttcgttctgcagggcattccaatatcacagtaaagagcaacaatgtgtgataatggctgaaaacaggaagtcctccataatcattaggatgagagatgcagttttatttgaaaagtaaagtgagtacattttcttcctcctcctcctactgtcctccccatcctcccactcttcctctttctctattctatctttaatttatgagaccagaggaggaaggcgctatggtgttgtaaaattgaattctgagttaggacaggatttgattactaactaaccatgtcagcttgagtatattacttcacctcctagatttaatttttttttgttcaaaaaatgaaaggattagatttacaaaatcacttctacctctatgaccctgaaaataagatttttaaaatattattttatatttaacaaggagatgggaagtctaagcattccttttggtcttggcttcttattctgcagggtgaccatggtccttgggccctaacatctggacgaagccttgtaaaacagaaatactgaggtgttttaatcctcagaaacatttagattgggacacaaatcttattttttactcttaaatttttcacattttgggggacatggtctatatttttctcagatttctgatatgttgtcttttaaaaatgtgtaaaagttacagttccttttctatagtttattttaaaatgtgggtcaatagtcccactgcttagaataagaggcacacaggatttcaatagaaattgcatgcctttttagatgtgcgaatgtttcattaagcgtatgaatatttgaagagatgtatgacactttaaaaactgtttcctctactgtgttggtggccaggtattaagacygttaataataacaatttagctctccaaatatcctgcatcacaggtgttaaagaggactggaaacaccttagttcttgtattcttgaggatgatttgccatattgtgtctagtatcacggcaaaactccaagtagcattttaaatagtatttatttgggttggaattatttctatgcattgactcatcttcctgggtttcattagctgtacgcattgtactttcttccttaccactatttatctcgaattcttgagattaaagtacagatgaaatctaaactttatctggtaaagttattagttcttacaagtagcaagcaaacggtaaac

SEQ ID NO: 2812 - DNA, 1859 bp, Homo sapiens
cagtgcctaaggttgaggcagctagagaaggctcagggaggaggtgggaaccgagctgggtttggagttgagagagctcttgaaaagcaccaggaaggcaggggaagatgcggccctgcactttctgagggggaccattaagagatcaagttgactaaagcagagactttgtgtaggtgatgagcctgggaaagtagctatggatgccagactgagcacccatagcaggaccacgggatggagatgggaggggtcaggggccagggtggggtggaatgtggggcagaggttcaggggaactgatcagagttgggaggtcatggagatggactatcttggggaatgggttcaaagcaaccagagttgcttctttctgacccaaaaacaaaaattaagaagatgagtgaagaagaagtaaaacagttgaaacagaaagaaagagaaaattatgagggagggaaggtaagggcagataagatttactgccacgttggtgtattttgttcagtacttcatcaatgccatgcccaaataactgaaagaggcagcaattctgagctctctggtccctcaagatagtcaatgatctttagcatttctcatttattaataaacatttgttttctttaaataaagaaaaatacttattggatttcctgcttcgttctgcagggcattccaatatcacagtaaagagcaacaatgtgtgataatggctgaaaacaggaagtcctccataatcattaggatgagagatgcagttttatttgaaaagtaaagtgagtacattttcttcctcctcctcctactgtcctccccatcctcccactcttcctctttctctattctatctttaatttatgagaccagaggaggaaggcgctatggtgttgtaaaattgaattctgagttaggacaggatttgattactaactaaccatgtcagcttgagtatattacttcacctcctagatttaatttttttttgttcaaaaaatgaaaggattagatttacaaaatcacttctacctctatgaccctgaaaataagatttttaaaatattattttatatttaacaaggagatgggaagtctaagcattccttttggtcttggcttcttattctgcagggtgaccatggtccttgggccctaacatctggacgaagccttgtaaaacagaaatactgaggtgttttaatcctcagaaacatttagattgggacacaaatcttattttttactcttaaatttttcacattttgggggacatggtctatatttttctcagatttctgatatgttgtcttttaaaaatgtgtaaaagttacagttccttttctatagtttattttaaaatgtgggtcaatagtcccactgcttagaataagaggcacacaggatttcaatagaaattgcatgcctttttagatgtgcgaatgtttcattaagcgtatgaatatttgaagagatgtatgacactttaaaaactgtttcctctactgtgttggtggccaggtattaagactgttaataataacaatttagctctccaaatatcctgcatcacaggtgttaaagaggactggaaacaccttagttcttgtattcttgaggatgatttgccatattgtgtctagtatcacggcaaaactccaagtagcattttaaatagtatttatttgggttggaattatttctatgcattgactcwtcttcctgggtttcattagctgtacgcattgtactttcttccttaccactatttatctcgaattcttgagattaaagtacagatgaaatctaaactttatctggtaaagttattagttcttacaagtagcaagcaaacggtaaac

SEQ ID NO: 2813 - DNA, 1859 bp, Homo sapiens
cagtgcctaaggttgaggcagctagagaaggctcagggaggaggtgggaaccgagctgggtttggagttgagagagctcttgaaaagcaccaggaaggcaggggaagatgcggccctgcactttctgagggggaccattaagagatcaagttgactaaagcagagactttgtgtaggtgatgagcctgggaaagtagctatggatgccagactgagcacccatagcaggaccacgggatggagatgggaggggtcaggggccagggtggggtggaatgtggggcagaggttcaggggaactgatcagagttgggaggtcatggagatggactatcttggggaatgggttcaaagcaaccagagttgcttctttctgacccaaaaacaaaaattaagaagatgagtgaagaagaagtaaaacagttgaaacagaaagaaagagaaaattatgagggagggaaggtaagggcagataagatttactgccacgttggtgtattttgttcagtacttcatcaatgccatgcccaaataactgaaagaggcagcaattctgagctctctggtccctcaagatagtcaatgatctttagcatttctcatttattaataaacatttgttttctttaaataaagaaaaatacttattggatttcctgcttcgttctgcagggcattccaatatcacagtaaagagcaacaatgtgtgataatggctgaaaacaggaagtcctccataatcattaggatgagagatgcagttttatttgaaaagtaaagtgagtacattttcttcctcctcctcctactgtcctccccatcctcccactcttcctctttctctattctatctttaatttatgagaccagaggaggaaggcgctatggtgttgtaaaattgaattctgagttaggacaggatttgattactaactaaccatgtcagcttgagtatattacttcacctcctagatttaatttttttttgttcaaaaaatgaaaggattagatttacaaaatcacttctacctctatgaccctgaaaataagatttttaaaatattattttatatttaacaaggagatgggaagtctaagcattccttttggtcttggcttcttattctgcagggtgaccatggtccttgggccctaacatctggacgaagccttgtaaaacagaaatactgaggtgttttaatcctcagaaacatttagattgggacacaaatcttattttttactcttaaatttttcacattttgggggacatggtctatatttttctcagatttctgatatgttgtcttttaaaaatgtgtaaaagttacagttccttttctatagtttattttaaaatgtgggtcaatagtcccactgcttagaataagaggcacacaggatttcaatagaaattgcatgcctttttagatgtgcgaatgtttcattaagcgtatgaatatttgaagagatgtatgacactttaaaaactgtttcctctactgtgttggtggccaggtattaagactgttaataataacaatttagctctccaaatatcctgcatcacaggtgttaaagaggactggaaacaccttagttcttgtattcttgaggatgatttgccatattgtgtctagtatcacggcaaaactccaagtagcattttaaatagtatttatttgggttggaattatttctatgcattgactcatcttcctgggtttcattagctgtaygcattgtactttcttccttaccactatttatctcgaattcttgagattaaagtacagatgaaatctaaactttatctggtaaagttattagttcttacaagtagcaagcaaacggtaaac

SEQ ID NO: 2814 - DNA, 1859 bp, Homo sapiens
cagtgcctaaggttgaggcagctagagaaggctcagggaggaggtgggaaccgagctgggtttggagttgagagagctcttgaaaagcaccaggaaggcaggggaagatgcggccctgcactttctgagggggaccattaagagatcaagttgactaaagcagagactttgtgtaggtgatgagcctgggaaagtagctatggatgccagactgagcacccatagcaggaccacgggatggagatgggaggggtcaggggccagggtggggtggaatgtggggcagaggttcaggggaactgatcagagttgggaggtcatggagatggactatcttggggaatgggttcaaagcaaccagagttgcttctttctgacccaaaaacaaaaattaagaagatgagtgaagaagaagtaaaacagttgaaacagaaagaaagagaaaattatgagggagggaaggtaagggcagataagatttactgccacgttggtgtattttgttcagtacttcatcaatgccatgcccaaataactgaaagaggcagcaattctgagctctctggtccctcaagatagtcaatgatctttagcatttctcatttattaataaacatttgttttctttaaataaagaaaaatacttattggatttcctgcttcgttctgcagggcattccaatatcacagtaaagagcaacaatgtgtgataatggctgaaaacaggaagtcctccataatcattaggatgagagatgcagttttatttgaaaagtaaagtgagtacattttcttcctcctcctcctactgtcctccccatcctcccactcttcctctttctctattctatctttaatttatgagaccagaggaggaaggcgctatggtgttgtaaaattgaattctgagttaggacaggatttgattactaactaaccatgtcagcttgagtatattacttcacctcctagatttaatttttttttgttcaaaaaatgaaaggattagatttacaaaatcacttctacctctatgaccctgaaaataagatttttaaaatattattttatatttaacaaggagatgggaagtctaagcattccttttggtcttggcttcttattctgcagggtgaccatggtccttgggccctaacatctggacgaagccttgtaaaacagaaatactgaggtgttttaatcctcagaaacatttagattgggacacaaatcttattttttactcttaaatttttcacattttgggggacatggtctatatttttctcagatttctgatatgttgtcttttaaaaatgtgtaaaagttacagttccttttctatagtttattttaaaatgtgggtcaatagtcccactgcttagaataagaggcacacaggatttcaatagaaattgcatgcctttttagatgtgcgaatgtttcattaagcgtatgaatatttgaagagatgtatgacactttaaaaactgtttcctctactgtgttggtggccaggtattaagactgttaataataacaatttagctctccaaatatcctgcatcacaggtgttaaagaggactggaaacaccttagttcttgtattcttgaggatgatttgccatattgtgtctagtatcacggcaaaactccaagtagcattttaaatagtatttatttgggttggaattatttctatgcattgactcatcttcctgggtttcattagctgtacgcattgtactttcttccttaccactatttatctcgaattcttgagattaaagtacagatgaaatctaaactttatctggtraagttattagttcttacaagtagcaagcaaacggtaaac

SEQ ID NO: 2815 - DNA, 1859 bp, Homo sapiens
cagtgcctaaggttgaggcagctagagaaggctcagggaggaggtgggaaccgagctgggtttggagttgagagagctcttgaaaagcaccaggaaggcaggggaagatgcggccctgcactttctgagggggaccattaagagatcaagttgactaaagcagagactttgtgtaggtgatgagcctgggaaagtagctatggatgccagactgagcacccatagcaggaccacgggatggagatgggaggggtcaggggccagggtggggtggaatgtggggcagaggttcaggggaactgatcagagttgggaggtcatggagatggactatcttggggaatgggttcaaagcaaccagagttgcttctttctgacccaaaaacaaaaattaagaagatgagtgaagaagaagtaaaacagttgaaacagaaagaaagagaaaattatgagggagggaaggtaagggcagataagatttactgccacgttggtgtattttgttcagtacttcatcaatgccatgcccaaataactgaaagaggcagcaattctgagctctctggtccctcaagatagtcaatgatctttagcatttctcatttattaataaacatttgttttctttaaataaagaaaaatacttattggatttcctgcttcgttctgcagggcattccaatatcacagtaaagagcaacaatgtgtgataatggctgaaaacaggaagtcctccataatcattaggatgagagatgcagttttatttgaaaagtaaagtgagtacattttcttcctcctcctcctactgtcctccccatcctcccactcttcctctttctctattctatctttaatttatgagaccagaggaggaaggcgctatggtgttgtaaaattgaattctgagttaggacaggatttgattactaactaaccatgtcagcttgagtatattacttcacctcctagatttaatttttttttgttcaaaaaatgaaaggattagatttacaaaatcacttctacctctatgaccctgaaaataagatttttaaaatattattttatatttaacaaggagatgggaagtctaagcattccttttggtcttggcttcttattctgcagggtgaccatggtccttgggccctaacatctggacgaagccttgtaaaacagaaatactgaggtgttttaatcctcagaaacatttagattgggacacaaatcttattttttactcttaaatttttcacattttgggggacatggtctatatttttctcagatttctgatatgttgtcttttaaaaatgtgtaaaagttacagttccttttctatagtttattttaaaatgtgggtcaatagtcccactgcttagaataagaggcacacaggatttcaatagaaattgcatgcctttttagatgtgcgaatgtttcattaagcgtatgaatatttgaagagatgtatgacactttaaaaactgtttcctctactgtgttggtggccaggtattaagactgttaataataacaatttagctctccaaatatcctgcatcacaggtgttaaagaggactggaaacaccttagttcttgtattcttgaggatgatttgccatattgtgtctagtatcacggcaaaactccaagtagcattttaaatagtatttatttgggttggaattatttctatgcattgactcatcttcctgggtttcattagctgtacgcattgtactttcttccttaccactatttatctcgaattcttgagattaaagtacagatgaaatctaaactttatctggtaaakttattagttcttacaagtagcaagcaaacggtaaac

SEQ ID NO: 2816 - DNA, 1128 bp, Homo sapiens
atacctagtctattttattatttactaccataaaatataacaaaactattgcaaaagttaaaatttagtaaaacttatgtacacactcacagatcgtatatggtgctattctcagttgagagaagtgtatacaaacatcaagatgcagtattaaattgtaactgcataaatttaaccgtagtgcataccacagtacggtaataagttcatagcctcctcctgttgctgttgcaatgagctcaggtgttgcaagtatccacttaaaacgttctgtgatactcaacattccatcatgagcaggtcatccccagtgaattgcgcatcccagtaaaaagtgccctctccctgttcacrtgtatttttcatcctgtttcgcgctgtactgtaaaccttgaataacaccatgggatccacatgaagtggcactagtgatgctggaagtgctcccaacaagcagagaaaagtcatgacatttgacattacaagaaaaacttgatttgcttgatatgtaacagagactgaggtctgtagctggggttgcttccatttcagacagatgattcatcttgtaaacaggcggtgtaaacttactgtatggataaatacataacagtaccatagatgtattttctccttagaaacgtttccttttctctagcttactttattgtaagaatacagtatataatacatataacatacaaaatacatgttattaactgttgctggtcaacagcaggctatcagtagttaagtttgggggaatcagaattatacctggattttctactgtgtacggtcagtgtgccaagcccccaagttgttcaagggtcaactgtaatcctaaaagaatctaatacaatattgtacacagtaagtggtcagtaaataaggaattgaactaaataagaatacataaatctcagaatatgtgcaacctgatcgtagtacacagagatctctctctatatctcttttctcagttcatgccattatttcaggtagaaagcaccttattttgaattagttgtctttagagcaaaaatccgtctaagagtgcagtgtggtttcctatgcacaatctggaatagtccattgcttcatgcctaccctggacatgaagggccg

SEQ ID NO: 2817 - DNA, 1128 bp, Homo sapiens
atacctagtctattttattatttactaccataaaatataacaaaactattgcaaaagttaaaatttagtaaaacttatgtacacactcacagatcgtatatggtgctattctcagttgagagaagtgtatacaaacatcaagatgcagtattaaattgtaactgcataaatttaaccgtagtgcataccacagtacggtaataagttcatagcctcctcctgttgctgttgcaatgagctcaggtgttgcaagtatccacttaaaacgttctgtgatactcaacattccatcatgagcaggtcatccccagtgaattgcgcatcccagtaaaaagtgccctctccctgttcacgtgtatttttcrtcctgtttcgcgctgtactgtaaaccttgaataacaccatgggatccacatgaagtggcactagtgatgctggaagtgctcccaacaagcagagaaaagtcatgacatttgacattacaagaaaaacttgatttgcttgatatgtaacagagactgaggtctgtagctggggttgcttccatttcagacagatgattcatcttgtaaacaggcggtgtaaacttactgtatggataaatacataacagtaccatagatgtattttctccttagaaacgtttccttttctctagcttactttattgtaagaatacagtatataatacatataacatacaaaatacatgttattaactgttgctggtcaacagcaggctatcagtagttaagtttgggggaatcagaattatacctggattttctactgtgtacggtcagtgtgccaagcccccaagttgttcaagggtcaactgtaatcctaaaagaatctaatacaatattgtacacagtaagtggtcagtaaataaggaattgaactaaataagaatacataaatctcagaatatgtgcaacctgatcgtagtacacagagatctctctctatatctcttttctcagttcatgccattatttcaggtagaaagcaccttattttgaattagttgtctttagagcaaaaatccgtctaagagtgcagtgtggtttcctatgcacaatctggaatagtccattgcttcatgcctaccctggacatgaagggccg

SEQ ID NO: 2818 - DNA, 1128 bp, Homo sapiens
atacctagtctattttattatttactaccataaaatataacaaaactattgcaaaagttaaaatttagtaaaacttatgtacacactcacagatcgtatatggtgctattctcagttgagagaagtgtatacaaacatcaagatgcagtattaaattgtaactgcataaatttaaccgtagtgcataccacagtacggtaataagttcatagcctcctcctgttgctgttgcaatgagctcaggtgttgcaagtatccacttaaaacgttctgtgatactcaacattccatcatgagcaggtcatccccagtgaattgcgcatcccagtaaaaagtgccctctccctgttcacgtgtatttttcatcctgtttcgygctgtactgtaaaccttgaataacaccatgggatccacatgaagtggcactagtgatgctggaagtgctcccaacaagcagagaaaagtcatgacatttgacattacaagaaaaacttgatttgcttgatatgtaacagagactgaggtctgtagctggggttgcttccatttcagacagatgattcatcttgtaaacaggcggtgtaaacttactgtatggataaatacataacagtaccatagatgtattttctccttagaaacgtttccttttctctagcttactttattgtaagaatacagtatataatacatataacatacaaaatacatgttattaactgttgctggtcaacagcaggctatcagtagttaagtttgggggaatcagaattatacctggattttctactgtgtacggtcagtgtgccaagcccccaagttgttcaagggtcaactgtaatcctaaaagaatctaatacaatattgtacacagtaagtggtcagtaaataaggaattgaactaaataagaatacataaatctcagaatatgtgcaacctgatcgtagtacacagagatctctctctatatctcttttctcagttcatgccattatttcaggtagaaagcaccttattttgaattagttgtctttagagcaaaaatccgtctaagagtgcagtgtggtttcctatgcacaatctggaatagtccattgcttcatgcctaccctggacatgaagggccg

SEQ ID NO: 2819 - DNA, 400 bp, Homo sapiens
gctattaataattaaactgaccttatgaaaattcttggagagtgaaaactttgaaactcatgtgctaggtacatcattaaaatatatcattcaggcgacacctgatgactcacatctataaccccagtaatttgggagatgaagataggaggctcccttaagcccaggagtttgagaccagccctggctatatagcgagagcctgtttctacaaaaaaaaaaaaaattattattaattagccaggcatggtggcatgcacctgtagttccagctactcaggaggctaaggtcagaggakagcttgagcatgaaagttcaagactgtagtgagccatggtcatgccactgcactccagcctgggaaacagggtaaaaccatgtctcaataaacaaacaaat

SEQ ID NO: 2820 - DNA, 849 bp, Homo sapiens
agattagttgaagaggtaaattgaacatggactatatgtcagacttttttttccaaattatattcttaaatatatagtaaaacatatgctagagacagttttttaataacaaacaatatttgaattgagatcctgaagaaaaataaattaactgtgtaaaaatgtattactaaatatctgcattttctagagatgtatccttaagtatgtaggtataaaattacactctgagatatatttttaaaataatttggcaagaagagaacagggataccttaagcagaaacaacaaaattatgataattgttgaatatgtgtgatggttgtatgttaatgtattgattattttgtgtgggtatgaaaacatgataataaaatcaaattacaaaaaaataaaaaatacctcttgcttttttagcagcttattacattgtttataacagtgtctayagcgctatgattggtcagagccagagactataacatttaataaaacgagtcctctagaagctcatgggagttcatttacggcagcaaagacctatattaaatggactgaatatttaaggagtaattatgttgagtaatgtgtttatttatagttttaattatacattatcttttttggttatctttaaaatatattaagcttatgcaaataggatatgcatcataacccaggatctattatctgaattgcttatatacttataataacataactttaaaagaaagaatcaaaccatattgctagcttacaggttggatctttctagacaatagttatttacctgaatgtttatttttgttttgcatcttcatcagttaaaaccaacagttacaatacaa

SEQ ID NO: 2821 - DNA, 849 bp, Homo sapiens
agattagttgaagaggtaaattgaacatggactatatgtcagacttttttttccaaattatattcttaaatatatagtaaaacatatgctagagacagttttttaataacaaacaatatttgaattgagatcctgaagaaaaataaattaactgtgtaaaaatgtattactaaatatctgcattttctagagatgtatccttaagtatgtaggtataaaattacactctgagatatatttttaaaataatttggcaagaagagaacagggataccttaagcagaaacaacaaaattatgataattgttgaatatgtgtgatggttgtatgttaatgtattgattattttgtgtgggtatgaaaacatgataataaaatcaaattacaaaaaaataaaaaatacctcttgcttttttagcagcttattacattgtttataacagtgtctacagcgctatgattggtcagagccagagactataacatttaataaaacgagtcctctagaagctcatgggagttcatttacggcagcaaagacctatattaaatggactgaatatttaaggagtaattatgttgagtaatgtgtttatttatagttttaattatacattatcttttttggttatctttaaaatatattaagcttatgcaaataggatatgcatcataacccaggatctattatctgaattgcttatatacttataataacataactttaaaagaaagaatcaaaccatattgctagcttacaggttggatctttctagamaatagttatttacctgaatgtttatttttgttttgcatcttcatcagttaaaaccaacagttacaatacaa

SEQ ID NO: 2822 - DNA, 962 bp, Homo sapiens
catatgaaaatatttcctatcagttggcagttaccacctcttatagtggcatggaacctcttgagttaaaccaagactcagtgagattgggtgatttaggtagtgtcattttatgaacaaggggtaccctactcagttcttttattttattatacttctctttgacattcactccagtgaaagaactctttcaaaagacatcatgcctggtctcacagagattcaaaggtgtttgagtccttccttattatgcccttggaagatgctttgaggaccccagtgatgaatcccaagaactctgtctccattatccctggaatagggcacctcatcactctggtgttawccctgaagggccttcataataatgtgcttaaaagagtcccctattatgtccttcaggatggagcttgacttgcccaaattgctatgtacatgttaaagagaggctggaactgaagttggtcatttctcactggatcagtcaacaaggtttgactttctgtgtgctctgcatcattctgagtacagaataaggcatggctcctgccttcaaggagtatggaatttaatagacgatgacaacatacatgattgtaaatctatctacatgagagtgaataattgtgagattcctaataaacggcaagatatgttctgaaaatgtgaaacataaatgaggttgaagaaattgtgaaaggtttagcagaggaggaataattcgtcaggttctttaaatacaagtaaaggggaaaggaaggaccatttttaagtttagatattccaagggttagtggtgaggtggattatggtatgtcttctcgttgatgagggtggagactggcgaatagtggaaaataaagttaaatagttagggctggggccaattatgggttttataaaagcagacatagaaatttagattggggtgtagacaatgaaggcttaaacgtttttaagcc

SEQ ID NO: 2823 - DNA, 593 bp, Homo sapiens
agttgtatgcttttttattaactagccttagaggtcgcatagcatcatttctaccatagtacatgtgtagaagaagtcataagtccagccaaaatgaagtcaagatgtagagacacctctcaatgggaagaaatctaaagaatatgccacagttttttaaaactaccctacacttcatctcaattaaagcaaaagccaaaattttctcaatggtctgcaatgggaaattgtagcaaatttgaccactgcttgctttttaaatcaagttggattagaacagtcacatgtattkgtttacatacaatgatggcttttgtattataatgccaaagttgagtagttgtgacagagataatgtggcctgcaaagctgaacctgtttataatctggccccttagaaggcaagtttactaacccctgatctgcagttttgaacacacacaccctgctcccctatttgctctgtgaattcatctctctagtactctgttcctcactgtatagtttagcatatgtgccaccttgctgttccctctgcctagcatgcttttccttcagatatccagctggctcatttctgcatctctttcatg

SEQ ID NO: 2824 - DNA, 1638 bp, Homo sapiens
  misc_feature (1)...(1638): n = A,T,C or G
tttaaaaaatatattcttactcagtggcccacaattgttaaaaaygctactaatggagctgggtatggtgacatacacctgtcatcccagctacttgggagactgaggcaggggtattgcttaaacttgggaatgtgaaaccagcctgggcaacatagtgagatctcaatctcaaaaatcaatcaatcattaaaaaataaaataaaacactactaatagctttttaaaaaatagttcttaaccaattttcctaacaccttcctttcctcactgaagtatagaaatatgtggtcaggcactgtggctcacacttataatcccaataatttgggaagccaaggcatgagggtcagttgattccaggagttcaagactagccagggtgacataaggatacttggtctctaacaaaaatttttttgttctttaattaccagggcatgatggtacatgcttgtagcccagctacttggaagactgaggtaagagaatcacttgagcccaggaggtcaaggctgcagtgagccatggttgcaccactgcacttcatacctgggtgacagagtgagacacagtatcaaaaacaaacaaaaaacaacaaaaagtatttgttttagaaaaaaacatttggtgaggttggggcttaaaaatatattattctaaaatattcataaatattctctagtaatgataagattaaagtgacaaagacaaacttttttcctgtacagttccatctctcaccttcccgtaatttgtctgtcccatccagcttccaaaggaaattattacanaaataatgtctgcatcctgggtctatatatctattgcctatgaggagagcgtttaagatctgagccatcttcaagtcttatactttgtgtatagctctcatgtttttgcaggttaagtaagtttgtataccctttcttttattaatctgtgtatggtcagttcatttcgggtaatcttcagagggtgaaaggggaagcttttcacttcactcctactgtgacaactaactaccttcttacttattcaattttttagtctatatcaacactttcatatacatttacttttaaacaaaattttccatcattacacttaaaattttatttaccttttaaaaaggaaattaaaaataaaattaaaaattataaaattttacataataaaaataaaataaatgatttatataaaaattaatctgacctgtgaaaaacactatccagaggccaggcgcggtggttaacgcttgtaatcccagcactttgggaggccgaggtgggtggatcacgaggtcaggcgatctagaccacgatgaaacccctctctaccaaaaatacaaaaaattagccgggtgtagtggcgggctcctgtagtcccagccactcaaagaggctgaggcaggagaatggcgtgaatccaggaggcggagcttgcagtgagccgagatcgtgccactgcaatccagcctgggtgacagagccagactctgtcaaaaaaaaaaaaaaaagaaaaagaaaaacactatcgagagaataaaaagacaaatcacagactgggagtaaaaatttacaaaagctatatctggtgaagatacatttgttatccaaaatatacaaagaactctca

SEQ ID NO: 2825 - DNA, 1638 bp, Homo sapiens
  misc_feature (1)...(1638): n = A,T,C or G
tttaaaaaatatattcttactcagtggcccacaattgttaaaaatgctactaatggagctgggtatggtgacatacacctgtcatcccagctacttgggagactgaggcaggggtattgcttaaacttgggaatgtgaaaccagcctgggcaacatagtgagatcycaatctcaaaaatcaatcaatcattaaaaaataaaataaaacactactaatagctttttaaaaaatagttcttaaccaattttcctaacaccttcctttcctcactgaagtatagaaatatgtggtcaggcactgtggctcacacttataatcccaataatttgggaagccaaggcatgagggtcagttgattccaggagttcaagactagccagggtgacataaggatacttggtctctaacaaaaatttttttgttctttaattaccagggcatgatggtacatgcttgtagcccagctacttggaagactgaggtaagagaatcacttgagcccaggaggtcaaggctgcagtgagccatggttgcaccactgcacttcatacctgggtgacagagtgagacacagtatcaaaaacaaacaaaaaacaacaaaaagtatttgttttagaaaaaaacatttggtgaggttggggcttaaaaatatattattctaaaatattcataaatattctctagtaatgataagattaaagtgacaaagacaaacttttttcctgtacagttccatctctcaccttcccgtaatttgtctgtcccatccagcttccaaaggaaattattacanaaataatgtctgcatcctgggtctatatatctattgcctatgaggagagcgtttaagatctgagccatcttcaagtcttatactttgtgtatagctctcatgtttttgcaggttaagtaagtttgtataccctttcttttattaatctgtgtatggtcagttcatttcgggtaatcttcagagggtgaaaggggaagcttttcacttcactcctactgtgacaactaactaccttcttacttattcaattttttagtctatatcaacactttcatatacatttacttttaaacaaaattttccatcattacacttaaaattttatttaccttttaaaaaggaaattaaaaataaaattaaaaattataaaattttacataataaaaataaaataaatgatttatataaaaattaatctgacctgtgaaaaacactatccagaggccaggcgcggtggttaacgcttgtaatcccagcactttgggaggccgaggtgggtggatcacgaggtcaggcgatctagaccacgatgaaacccctctctaccaaaaatacaaaaaattagccgggtgtagtggcgggctcctgtagtcccagccactcaaagaggctgaggcaggagaatggcgtgaatccaggaggcggagcttgcagtgagccgagatcgtgccactgcaatccagcctgggtgacagagccagactctgtcaaaaaaaaaaaaaaaagaaaaagaaaaacactatcgagagaataaaaagacaaatcacagactgggagtaaaaatttacaaaagctatatctggtgaagatacatttgttatccaaaatatacaaagaactctca

SEQ ID NO: 2826 - DNA, 1638 bp, Homo sapiens
  misc_feature (1)...(1638): n = A,T,C or G
tttaaaaaatatattcttactcagtggcccacaattgttaaaaatgctactaatggagctgggtatggtgacatacacctgtcatcccagctacttgggagactgaggcaggggtattgcttaaacttgggaatgtgaaaccagcctgggcaacatagtgagatctcaatctcaaaaatcaatcaatcattaaaaaataaaataaaacactactaatagctttttaaaaaatagttcttaaccaattttcctaacaccttcctttcctcactgaagtatagaaatatgtggtcaggcactgtggctcacacytataatcccaataatttgggaagccaaggcatgagggtcagttgattccaggagttcaagactagccagggtgacataaggatacttggtctctaacaaaaatttttttgttctttaattaccagggcatgatggtacatgcttgtagcccagctacttggaagactgaggtaagagaatcacttgagcccaggaggtcaaggctgcagtgagccatggttgcaccactgcacttcatacctgggtgacagagtgagacacagtatcaaaaacaaacaaaaaacaacaaaaagtatttgttttagaaaaaaacatttggtgaggttggggcttaaaaatatattattctaaaatattcataaatattctctagtaatgataagattaaagtgacaaagacaaacttttttcctgtacagttccatctctcaccttcccgtaatttgtctgtcccatccagcttccaaaggaaattattacanaaataatgtctgcatcctgggtctatatatctattgcctatgaggagagcgtttaagatctgagccatcttcaagtcttatactttgtgtatagctctcatgtttttgcaggttaagtaagtttgtataccctttcttttattaatctgtgtatggtcagttcatttcgggtaatcttcagagggtgaaaggggaagcttttcacttcactcctactgtgacaactaactaccttcttacttattcaattttttagtctatatcaacactttcatatacatttacttttaaacaaaattttccatcattacacttaaaattttatttaccttttaaaaaggaaattaaaaataaaattaaaaattataaaattttacataataaaaataaaataaatgatttatataaaaattaatctgacctgtgaaaaacactatccagaggccaggcgcggtggttaacgcttgtaatcccagcactttgggaggccgaggtgggtggatcacgaggtcaggcgatctagaccacgatgaaacccctctctaccaaaaatacaaaaaattagccgggtgtagtggcgggctcctgtagtcccagccactcaaagaggctgaggcaggagaatggcgtgaatccaggaggcggagcttgcagtgagccgagatcgtgccactgcaatccagcctgggtgacagagccagactctgtcaaaaaaaaaaaaaaaagaaaaagaaaaacactatcgagagaataaaaagacaaatcacagactgggagtaaaaatttacaaaagctatatctggtgaagatacatttgttatccaaaatatacaaagaactctca

SEQ ID NO: 2827 - DNA, 727 bp, Homo sapiens
aaaggtaaaataaacaatattatttgttaagaataataatgccactctgaaattctcaaccaagaaaaatattcatcaacctatggctaaataacatatttagagacaaaaaacaaaacaccaccagcagaattccactaaagaaactaaaaagaaactctgaaaacatgcttcagaaagattgaagttctgaaatcaaagaatgaacacagagaaaaatatattgtaaacatacagatagatctaaataaaaaattaggtgttgaaacaaaaagatatttaaaattagataagcactgcaatatgtatgttaggaagcaaattattagggctgaagtattcaaagaccccttaattgtctgacaagagcagaaaggtatgactttgcaatttttttttttttttttgagaaggagtctcactcactctttctcccaggctggagtgcggtggcgccatctcggctcactgcaacctctgcctcccaggttcaagcaattctcctgcctcagcctcctgagtagcggggattacagccacgtgccaccatgcctggctaatttttgtatttttagtatagacggggtttcaccatgttggtcaggctagtctccaactcctgacctcgtgatccacacgyctcggcctcctgaagtgttgagattacaggtgtgagccactgcgcgcgaccgactttggaactttaataaattgactggacattatg

SEQ ID NO: 2828 - DNA, 727 bp, Homo sapiens
aaaggtaaaataaacaatattatttgttaagaataataatgccactctgaaattctcaaccaagaaaaatattcatcaacctatggctaaataacatatttagagacaaaaaacaaaacaccaccagcagaattccactaaagaaactaaaaagaaactctgaaaacatgcttcagaaagattgaagttctgaaatcaaagaatgaacacagagaaaaatatattgtaaacatacagatagatctaaataaaaaattaggtgttgaaacaaaaagatatttaaaattagataagcactgcaatatgtatgttaggaagcaaattattagggctgaagtattcaaagaccccttaattgtctgacaagagcagaaaggtatgactttgcaatttttttttttttttttgagaaggagtctcactcactctttctcccaggctggagtgcggtggcgccatctcggctcactgcaacctctgcctcccaggttcaagcaattctcctgcctcagcctcctgagtagcggggattacagccacgtgccaccatgcctggctaatttttgtatttttagtatagacggggtttcaccatgttggtcaggctagtctccaactcctgacctcgtgatccacacgcctcggcctcctgaagtgttsagattacaggtgtgagccactgcgcgcgaccgactttggaactttaataaattgactggacattatg

SEQ ID NO: 2829 - DNA, 727 bp, Homo sapiens
aaaggtaaaataaacaatattatttgttaagaataataatgccactctgaaattctcaaccaagaaaaatattcatcaacctatggctaaataacatatttagagacaaaaaacaaaacaccaccagcagaattccactaaagaaactaaaaagaaactctgaaaacatgcttcagaaagattgaagttctgaaatcaaagaatgaacacagagaaaaatatattgtaaacatacagatagatctaaataaaaaattaggtgttgaaacaaaaagatatttaaaattagataagcactgcaatatgtatgttaggaagcaaattattagggctgaagtattcaaagaccccttaattgtctgacaagagcagaaaggtatgactttgcaatttttttttttttttttgagaaggagtctcactcactctttctcccaggctggagtgcggtggcgccatctcggctcactgcaacctctgcctcccaggttcaagcaattctcctgcctcagcctcctgagtagcggggattacagccacgtgccaccatgcctggctaatttttgtatttttagtatagacggggtttcaccatgttggtcaggctagtctccaactcctgacctcgtgatccacacgcctcggcctcctgaagtgttgagattacaggtgtgagccactgcgcgcgaccgactttggaamtttaataaattgactggacattatg

SEQ ID NO: 2830 - DNA, 414 bp, Homo sapiens
ttttttttttagacagagtctcactctgtcacccagactggagtgcagtggcacggtctcagctcactgcaacctccgcctcccgggttctagcaactctcgtgcctcagtctcctgagtagctgggaccacgcctacctaatttttgtgccaccaygcctacctaatttttgtattttgggtagggacggagttttgccatattggccgggctggtctcgaactcctgacctcaggtgatccgcccacctcggcctcccaaagtgctgggattacaggcatgagccactgcgcctggccagaaaacctttttttgtttgtttaaactactgtgttctgctacatgtacccactataaaagtctgaatgtcctacatgtttcatagcatgtatttcaacagtaatgagtttaaa

SEQ ID NO: 2831 - DNA, 1194 bp, Homo sapiens
atagtaagtaagtacaatataagttaagcagctctgaatatactatactctggaattattttctctattatgtttgattagggcaatgacgactttcttttgctgttgaatttttatcacttatattctcttaagttgagaaataaaatactggaattttttacaacacatatgcaagcaattacacattctgtaaaatttgatgtttggaattccattttctgtgctatttggttatactgttcgcggggggtactggggttggattggagttggggacttttttgcatcaagcatcacattccttacatttatgtcaattactattaagaaaaattatctgctcatttttcaaaaacacctacagagtaattataactatttgggaatgtcttttaaaatatggcttatttcatgtaccttgtgaaacagtcctttcatttattcacatattcaattatttccatactttattaaagtactttattcattttaacataaattaacaaagaaagtggtattaaaggttttaaattaaagttggttgttttggtgggggaggggagtaaactgttctttctagagtcaaattttcaatttctattgtaatttttctgtgtttttctcctcctgttttcttctactttctattcaattatttttgccacccttccaaacaacacatgcttttcatgccattacaaagaaactcaaaagttttcaccttttataaattacctcatattttaaaaacataaaaygtaacataaaaagctccaagtcttagaaagtgccccctctatgggactcctgacagattgttggatattcatttacaaattcgtattttcactttttaagctttttagaacttctgatctctagattaattttataaactttttgaaaccaaaaacacacagaagcagatatttgttctaaaaatatagatatatacatagtatatatacatatatacctgtatgtatgtgtctatatatgaaagtaatagaaaaggttaatgaatgtccaaagttttaaaagcttgagtttgatgttacatggttgagttgatgaaaatctacagtggcttattttaaaggagtacatgtctgtatttgaaattgcaaccctcaagattaaagatttaatagaggaatcaatttaaatattttcttatatactacaacagct

SEQ ID NO: 2832 - DNA, 1300 bp, Homo sapiens
gcaataaccagatgaatattgtcctacttattataaatccatattggttgataatgagaatcttattagtccccatcatctagtgtcatcatggttgaggatctgaatattgaaatacttattttattttaaattccttttaaatttcttattagaacaatatagggattaattagattatattgttcttatgtaattagaacaatatagggatttaaaattagktatgtgtgtaagttatatgttctgaaaatttcatgatagtacaagaatgttaaaaaaatattttttataaagaagactgagccagacagggcttagattcactgttttagagaactagtcggtgaaccataaatgctgtttctcttcgtgatcagttttaaagtttcagccaaccccacaaatacagcaggcaatcatcttatacttttgtacaagtgactaaaaaaactttgtcctgataaaaagttggtaaactagtgtgtatgtgtgtgtgtgtgtgcatgtatgtgtgtgtatctgtctgtgtgtgtgtttgtttataatggaaggaccaagaaaactaaaagctttcagagaaaaaaactgaaggtagggtttggacaggtggtgtcctttcttcctttgttgcttacatttggtgctgctaatatttttcttttcaactggaaggctagatgggaacaactctaaaggaatgaaatcatttcaaattatttgtatgtaatcttatttaaggagtcagcatttggaaactggacaagcgttattattttgaaattttcttttgaatttgtagctcattagaagctgagattaagtcatttaacaaattcttagaaagtaatattgataaaacaataatagaaaataattatttatattttcatcaagattgccataactatgatgtgtatgctcttggttttcatattttaggatttgagaaatttaaactttcctacctctctgtatttgaaatagcttacctcttcttccagctaccttttagatggtctgtttagtctgttgccatagcagtcactactgtgcttcctaatatttggctggaagaccaaatttctgctgtaggtgatagacatggcaattttgccccagcaactggccaaaataaaagatggtgtgaatggatgggaggatcattacactctaccccaaattctgtgtgagtgtgagctacacgtattacaagttgaaagaacaggaaatctaatctgggtcatgaagccaaataaataaagcagttgctgactttaggtttgagaccaagaacgag

SEQ ID NO: 2833 - DNA, 568 bp, Homo sapiens
  misc_feature (1)...(568): n = A,T,C or G
aggmttnnnnnnnnnnnnnnnnnnnnnnnnnnnnnnnnnnnnnnnnnnnnnnnnnnnnnnnnnnnnnnnnnnnnnnnnnnnnnnnnnnnnnnnnnnnnnnnnnnnntttgtataataacaaccatttttgccattcattcatgctataaactttcactgtgaattcggcactctattcaatgatggggatgggaggaagcaaggtgatgtggcgatgaagagcccagattcacagtcaagactacagaactatttaacagatgtgcacatgggcatacagtcacttcccattccctcacaaagcatttattgagcaacaaggaggtgccaggcactgggctcaggtattgggaataaaaagtgcaatcagacacagtcctttctttcaaaaagagacagacccaaaataatcacaatgtagtgcattaaaggtgtgtaaggagccacaggagtacagttcaatccataaaacattcattgtattcctaatatgtgcctaggaccatgataaatgatgtgaacatttgctgattttggtggcctaccctcctattttctttccaacagc

SEQ ID NO: 2834 - DNA, 325 bp, Homo sapiens
actcctgacttcaggcaatctgcccgcgtcatcctcccaaagtgctgggattacaggcatgagccaccatgcctggccataatttttaaacactctgcaggtgatttttaagtggaaccaaagtttgagagcccatattttgatgcaaacattttttgcaagcattaaaacactataccttttgggatgatcaagagttccattagatctcagaagagtcactgaagtcataattgccaatgactgtgattattagatctttcaacttatttttcactaggatcatttttcctgcaaaaaggaattagccaargagagtataatg

SEQ ID NO: 2835 - DNA, 405 bp, Homo sapiens
gaaagaaaaagagaagaaaagaaagaaagaaagaaaraaagaaagaaagaaagaaagagaaagaaagaaagaaagaaagaaagaaagaaagaaagaaagaaagaaagaaagaaagggagggaaggataaatctctttgctgtgtaataaacagaggagaaacataggtaaaaacactaaaatctgatttggtggaattttgtacactgcagatatatgtcagattgtgaagaaaaagtggaaaaaaagaagcatgtgtatcggagatactgaacagagaatagagtgggtggagtaagcctgtaagtaccatttcaatggcattagccggtttgtgtctctgctgattctacctggtcttagaatggaaaagcttgatttactggactgttaaggaacctaaaaa

SEQ ID NO: 2836 - DNA, 405 bp, Homo sapiens
gaaagaaaaagagaagaaaagaaagaaagaaagaaaaaaagaaagaaagaaagaaagagaaagaaagaaagaaagaaagaaagaaagaaagaaagaaagaaagaaagaaagaaagggagggaaggataaatctctttgctgtgtartaaacagaggagaaacataggtaaaaacactaaaatctgatttggtggaattttgtacactgcagatatatgtcagattgtgaagaaaaagtggaaaaaaagaagcatgtgtatcggagatactgaacagagaatagagtgggtggagtaagcctgtaagtaccatttcaatggcattagccggtttgtgtctctgctgattctacctggtcttagaatggaaaagcttgatttactggactgttaaggaacctaaaaa

SEQ ID NO: 2837 - DNA, 581 bp, Homo sapiens
ttcacaatagcatataatatccccacatatgggtttttaggtcatcaatgaagctgaatgaaaccattctcttgctaagtacagaatttagaaaccaagctgctgcaagttgaaacatcagtcacagtctctcaaaacattatgttacaaaggctgtgatgaagttgcagctctgcccatatttccaaaagtaatgacacttcatcttaaaggcccactcagttatgtcacatttatatttgcatcctataatgtgaatgtattagccccaaattgtttggtaataaatcatcatcaaagaaatatgttcatttttacttttagtattcatgactcgcatgatcctagaacaacatatatttagtacttcagagcaatgaatccataactttgagagaaattgcyttatagatcattaagacctatgttgctttaacagttaatcacattttcactaataatatgacataagtcctttacctaaagagtgaaaaatgaatgactcttttgcttgcactaaaaagtcttctacttgacctttactaggggcagagggaaatccagtataatcactgaacgct

SEQ ID NO: 2838 - DNA, 1298 bp, Homo sapiens
cctaggtgatgggttgataggtgcggcaaaccaccatgacacatgtttacctacrtaacaaaactgcatgtcctgcacatgtatcctagaacttaaaatatttttttttaaaaaaaagagcataaattggtcctgagaccaaaaaagtttaagagcctctgatgtaaaacaaagtatgtattttcaatttccaggcaaatgacttgcatgataaactgaactttcttactccttataaactcccagttcttcaggggcaaaaaagagaaaaagccttagagaatctagtgattcctatctggctcctttaaagataggaagatcttcaacattaattcccattcattcattaatggaattaataattattgagcgtctgtcctgtgttgacattgtgtttaagcactaaggttagaaaaatgagcaataacgactgttcttacaagtctccattttacattagaaaagaaaaattaataatatcgtgaatattagcaaattaactcttatcgtatcagattattttaacgagttttaatgcacgaaagttattcctcccattggaactgtaagagaagacttcttcttcatctctttctcagactcttttggttactaacaaagacttgctctttttaggactttatcattataaagcaaaacagtttgtaggaaactataaagacaaaacactgattggtagtctgggtctaggggtagtggtgggcaagcttcaattgtaaagggccaggaggaaactttttaggataaggaacctcttctgtgtctaggttatggtggtggctacatgattttgtacagttaccaaaatccatcaaaagaataccttaggatgggtgcagtggctcaagcctgtaatcccagcactttgggaggcctaggaggggatcacctgaggtcaagagttcgagaccagcctggccaacacggcgaaaccccatctctactaaaaatacaaaattagccaggtgtggtgctgcacgcctgtaatcccagctagtcaggaggctgcagcaagagaatcacttgaacctgggaggtggaggttgcagtgagccgagatcacaccactgcactccagcctgggtgacaagaacgagactctgtctcaaaaaaaaaaaaagaaaaaaaaaagaacaccttaataaacaaaataatagaggggaaagcaggtctcaactttactagcagaaatggagaaagggaaaaatagattttactttttaaaaattaagtaaggagcatgggacatttttctttgacaggctcagtggtct

SEQ ID NO: 2839 - DNA, 724 bp, Homo sapiens
ggatcttaatgctaacacagcagagcaaatggaacatgtgactatctccagggatctgggctgcctgggactcaggtctctgcactggcraagtgggcagctacctggtcttcaatgtccccacttgagtgaccctggaggagtcttcagttgactcagttatggaggagccccatctcccctatacaaacccacacctctccttgaaaccacggtgatagggaggctgccccaagctgtacctctgaggagatacaggtaagtagaggctgggacagagccagacccagacaatgattggccatttgctgccacttggatttcagtagcctgagttgctttggcaggctgttccctggctctgtggggtccctcaagcaagcacagccctctcacctcctgcttttgggcacctctgggaccaggtgcaggatttggccctcaagcattgtgctgggtggatagctgcttcctgccagtggcaatgcaggcctcattccttgtcaaggacaggcaagggcagaaagcagaagtcacatatggttgagagactctctaacttcaactaaatccacaccatttttgagcaaaatgggggcttgtgttcatgtatgagtttcccaccaatctctatccatgtggcaattccatctgcaaaacccaagaaatagtggtgcatgttggtcccggggaactgggaactggagtgagctcagcaagagcc

SEQ ID NO: 2840 - DNA, 724 bp, Homo sapiens
ggatcttaatgctaacacagcagagcaaatggaacatgtgactatctccagggatctgggctgcctgggactcaggtctctgcactggcgaagtgggcagctacctggtcttcaatgtccccacttgagtgaccctggaggagtcttcagttgactcagttatggaggagccccatctcccctatacaaacccacacctctccttgaaaccacggtgatagggaggctgccccaagctgtacctctgaggagatacaggtaagtagaggctgggacagagccagacccagacaatgattggccatttgctgccacttggatttcagtagcctgagttgctttgrcaggctgttccctggctctgtggggtccctcaagcaagcacagccctctcacctcctgcttttgggcacctctgggaccaggtgcaggatttggccctcaagcattgtgctgggtggatagctgcttcctgccagtggcaatgcaggcctcattccttgtcaaggacaggcaagggcagaaagcagaagtcacatatggttgagagactctctaacttcaactaaatccacaccatttttgagcaaaatgggggcttgtgttcatgtatgagtttcccaccaatctctatccatgtggcaattccatctgcaaaacccaagaaatagtggtgcatgttggtcccggggaactgggaactggagtgagctcagcaagagcc

SEQ ID NO: 2841 - DNA, 1419 bp, Homo sapiens
tgcatagtttctgatgctccaacagaccaaattattcccttgctgaaggacacagaaagcatgcccacgtgattagaagctttggccaggatatcacatttgtggcagcaaagtgaaaataaaacaaagcttcaaaatatttgagggaaaagagagagatgtgttaaaagtccagaaactttcctctgcttctagtagggaagggatgcctttttttgaaacaaaatactacactctgggcccgtgctcttgatgagattagcacataatgctgataagatctgagctacattgtcgttctgtttttattttttgtaggcattacgctcatgtataaatgtttgaaaaagaaaaaagctactcattttgaaatgttatgtctgtgaataaaatatgtacatgtatttgagactcggtttgacactacaacagtatatttaagataaactatttatcttccacaaacacatttcactgttttaacacatccatttgtttctggaatgaaggcagaggcatgagggtgggagggaggaaggaggcaggaaggagaaaaaaaaaacagggagctttgtgttgtgatatttcagcttttctcttgatggcaaaattctaactggaataaggttttgttatcccggatgtcagttcacaaatcatgaattaagaagctcaagccaagtggcacctagcagtaaaactggcatttctcaaaatattggcagatcgagcaagcaactgttgattttaaatgtttaatgagcaatatgttacttattccggtaatattgttgtgtttgcctaacctttctcagactgcctccttctgctttattgctggaaagcttccaaaatggaaggggcgagttagggaggggagagagtgtggacagttcttatgaagaaaaactataagaagaaagaattcattaatattgctctcctgatgatgaagaactatccgtgtcttctcagaatcataactcagggacttagatggcattttagaatcccaacatatttttcctcacacatgtatgatcacaatggataagagaagaatataggaagaaaaaaatagaatgaaagaggggtagataaacctgctgaggggtggttgtaacaagaattctagaataactagaaagcgctggatgaggagatcttaagagtaaaatcatgatgacagaaacctgggtgaagtcactgcacatggttgtgatggcagagttgacccagagaatgaacctgtggcagaattttaatagaaatcaaatcagtggagyaaaagagtaagatagaaatcaatagtaacctcgtactcagtggcagacagtgcttggcttcttggtcccattttacagttaaacactaccaatacacactcatttcttagcaggactggttggtgagtctgaa

SEQ ID NO: 2842 - DNA, 525 bp, Homo sapiens
caaccctggccaaatgaggggaaaaatgatcagctttattaatagctgggygagcatctaagcaatacctcctccctccccctgccacacacataccatagccgaaccctacccagttcagagattctctggtaagggtcaccaatgagaagcttaatcttggaatcataagcgaggcttcttattccttccccatcagctagccttcatacctaaatgtctaggactgcatttacccatcactgacagaagaaaggagtgggaatagatacaaccccaaagggcaggccttgctcagaatgtgtttccaaggaggacaagaagttctccatgcatgggcacattggaacttaggaacccatgttcagggcatagaaatcctgcacttatgaatcatgaccataaaaaaaagaagccctcttccctcaaatttgaaagtcctttcactgaggataacaatgtgcggaccacatgttaaaatagtaaaagctgcataccatgagaccaattttaaaaaatgaggag

SEQ ID NO: 2843 - DNA, 1210 bp, Homo sapiens
tttgatcaactggaagaaagggtatcagtgattgaagatcaaatgaatgaaatgaagcgagaagagaagtttagagaaaaaagagtaaaaagaaacaaacaaagcctccaagaaatatggagctatgtgaaaagaccaaatctacgtctgattggtgtacctgaaagtgatggggagaatggaaccaagttggaaaacactctgcaggatattatctaggagaacttccccaatctaggaagacaggccaacattcaaattcaagaaatacagagaatgccacaaagatactcctcgagaagggcaaccacaagacacataattgtcagattcaccaaagttgaaatgaaggaaaaaatgttaagggcagccagagagaaaggttgggttacccacaaagggacgcccrtcagactaacagtggatctctcagcagaaactctacaagccagaagagagtgggggccaatattcaacattcttaaagacaagaattttcaacccagaatttcatatccagccaaactaagcttcataagtgaaggagaaataaaatcctttatagacaagcaaatgctgagagattttattctatgtattttatatgtttacttatattctacttattttacttatccatcctgttcattttctttttcttccttctagaatgtaatttccacgatggcaaagttttttgttttttgttttttaatatttcctaagtgctgtatatacgtaacaattttaacagtgccaagtgctcaaaaatatttgttgaatgaatgattaagtgcatgtctgttggactcttcttttcatcagcttttagccttgtgtacatcggtcacccagcacattcaaccagcacatctgacctcttgaaggtacatttcatttaactgcgatatcaaattaacatgaaaaatcagaatccagcagtgcagagaacacatgagaataataattattattatcatttaggtcaacaaaatgtctaacataataactgtgtactgaacctatcaagattttgtatgttggaatacgatctcatgcaaaatgaaagcactgattcacttagtacgtaatgttattaccaagactggctcatttatgtgaatattttacccccttgactacttcacttcaagctggtgcgggagatgtggggtgggcagtgtagagtccttcttagcatttgcacaca

SEQ ID NO: 2844 - DNA, 1238 bp, Homo sapiens
taaaatagtacagaattgctgaaaggcagggtattagtccattttcatgctgatgacaaagacatacccgagactgggtaatttataaggataaagcggtttaatggagttcacgtggctggggaggctcacaatcatggctgaaggcaaaaggcacatctcacatggcagcagacaagagaagagaatgacagcccagcaaaaggggtttccccttataaaaccatgagatctcgtgagacttattcactaccatgagaacagtagagagaaaccgctcccatgattcaattatctcccaccaggtccctcccacaacacaagagaattatgggaactacaattcaagatgagatttgggtggagacacagccaaaccatatcaggcagcttgggagtcttctgacattcttgagccgctgaatttaggtaaccaaccatctatctgcaaatctctagagaagaaaataaaccctaataatttttttaatctcaatatagatacccccatctccatccaaattcataccttgtgaattcaggaaccaaatagactcagagtttgggtaaatccctcattatctgaactctcgctacacagcatccaaaatttagaaattgaaacatattatatttactattaatattattcaaacattacattcttttgaaccatttaaacttacagtcaawtttttttttttttttttttttttttttttgagacaaagtttcattctgccacccagaccggagtgcagaggtgcaatctaagctcactgcagcctccacctcctgggttaaagctgttctcctgcatccacctcttgagtagctgggactacaggcacctaccaccacacctggctaattttttgtgtttttaatagagatggggtttcaccatgttcaccaggctggtctcaaactcctgacctcaggtgatccgcctaccttggcctcgcaaagtgctgcgattataggcatgagccactgcgcccagccttacagtgaatatttttaaatgccaacttaaaaatgtacaatggggaggtggtgtaaatttttgaaaaaatcttttaaagcaaaaatttttgaagaaagcagtcttaacatgcctcttttgaaatatattcttcaagcagaccaaaaataagcaaacaaaaatccataggagtttatgtacacaattaacaagactaaacaactaacgttctctgtttccgaaagcagagaat

SEQ ID NO: 2845 - DNA, 706 bp, Homo sapiens
gtgccttttcctaagacctggaggcaattttctcctgcctcagatgtgaaagagcacaagaaacatttaaccccacacaccacccgactgcctgcactaagtgaactgggccagagggtacatctttttttgtaaaattayatttctaggtacatcttccaaaaaagaagtttactctgattaacctggttcccagccaagagtgactcagggcatcttccagtgcaaaaagctagcctctcctgaaaactgctccaaaactttcccaaactttcccttccgatctacaggttgcagctaatgtttaagtgtctgcagtataattagaagttgctaaactatcaaaccacagcttgctcggcctcccaactaaatcactgggttcaaacttactattgtgtcttcagagctaattgatgtatttaaatggttcaggaagaaaagttctttggaccgtacttacaacatttctgtaaggttgtaattgtttcaaaataattttaaaaagttaaaatactcacctagttgttgactttttaaacattaaaatattttaaactttaaaatatacacctagccttagcagctatggtaaggacttgggttttgattggtaagagggaaagccgtggtgggaatttgagcgtagctggacgttatctcttaggctggtgtgttaagacttgactgtatgagagggaaaacc

SEQ ID NO: 2846 - DNA, 1043 bp, Homo sapiens
tatttgtctctttttttttttgcatttttcctcaatcccattacatgtgctacagtgaattattgattacaatttttcatcccttccagtatccacaattgctgctatgtaacttttcatttcctcttataagtgctgactttgaccatgggacttgttttgcccaacggtatattattaacagacaaaatatgagcaacagatttaaatggacatgcataattgagcttgttctctcatacttctgccatagtcatgagaaaaacgtgcctcaactaaccacctgttccagagaaggatgagagacacaaagcaaccccagccaactcacaaacctgcagcctgaagcagggcttccccagctgaacagcagagcatgatcaagaaattaatacttattttttctgcctctgaaattttgaggtsatttggcaggcagctatagtttactaacataatatgctagcttctattccagaaaacatcaggatctatattgaaaaacagaacagaaaagaaagtactctttaccttcaaagatttcatagtaagagagaggagaaataagttataattcaagccaaaataaaaataagggtgccaaaagaagtactaataatatgctatggaaacataaaagtaaactgaggctatccagatgttcttgaccatgaagatagaattatggctggtttttttgtatgtttgtttgtttgtttgtttttgagacggagtctcactctgtcgcccaggctggagtgcagtggcgcgatcccggctcactgcaagctccacctcccgggttcacaccattctcctgcctcagcctcccgagtagctgggactgcaggtgcccaccaccacgcccggctaattttctttttttatttttagtagagacggggtttcaccgtgttagccaggatggtctcggcctcccaaagtgctgggattacaggcgtgagccaacgcgcccagccaaattatggctggtttttaaaggattatactagaagtggaatcaagaagaaagacattccagg

SEQ ID NO: 2847 - DNA, 1043 bp, Homo sapiens
tatttgtctctttttttttttgcatttttcctcaatcccattacatgtgctacagtgaattattgattacaatttttcatcccttccagtatccacaattgctgctatgtaacttttcatttcctcttataagtgctgactttgaccatgggacttgttttgcccaacggtatattattaacagacaaaatatgagcaacagatttaaatggacatgcataattgagcttgttctctcatacttctgccatagtcatgagaaaaacgtgcctcaactaaccacctgttccagagaaggatgagagacacaaagcaaccccagccaactcacaaacctgcagcctgaagcagggcttccccagctgaacagcagagcatgatcaagaaattaatacttattttttctgcctctgaaattttgaggtcatttggcaggcagctatagtttactaacataatatgcyagcttctattccagaaaacatcaggatctatattgaaaaacagaacagaaaagaaagtactctttaccttcaaagatttcatagtaagagagaggagaaataagttataattcaagccaaaataaaaataagggtgccaaaagaagtactaataatatgctatggaaacataaaagtaaactgaggctatccagatgttcttgaccatgaagatagaattatggctggtttttttgtatgtttgtttgtttgtttgtttttgagacggagtctcactctgtcgcccaggctggagtgcagtggcgcgatcccggctcactgcaagctccacctcccgggttcacaccattctcctgcctcagcctcccgagtagctgggactgcaggtgcccaccaccacgcccggctaattttctttttttatttttagtagagacggggtttcaccgtgttagccaggatggtctcggcctcccaaagtgctgggattacaggcgtgagccaacgcgcccagccaaattatggctggtttttaaaggattatactagaagtggaatcaagaagaaagacattccagg

SEQ ID NO: 2848 - DNA, 988 bp, Homo sapiens
tatagctaaagtctgccwcaacagcaaagggtccaaattctggagacatcagatgggaattacaattatcctctgtagagacagaaaggggtgatccttttcctccctaacataagggtaatcactgacaccactatgacaaagaacagattacaagagaaaagcataacaatctcctttacctgcatgagcatggaagccatacaaaaaaatataaaaacttgaataaaggccaggtggttgaagcttaaatacttttttcttagagagagagaagtgatagaggagctgtaaatgagtacagccacccctaagacaagaaaacagtttgtaaatgattctctttggaatttgaatgagccccaggggcagacattattttgtgaaaaagtctatccaggtgtggttacattgctcaatcttcttttctgttcagggaggggatggaaggcaattggtgagtcaagccttaaggtagaaaaataacttcagagtaaagttttttctagcacctgctgcccttcaagggccttcaatttaagataatccacattccaaagtcccatattagggggaaaattctccaggattccttacctccctctgtaacaatacaaattccctgtaagatcaagacccaccaatatagggtgtttattacctaacacaaaacaccttagaagcagggcccaaaatgaaatctcagctggggtttttataccctgctggtcacttaggaatattatggtacaacggcaaggcacatattatcagggacaatcaccatgaaagacgaaatgtaatctgatacattaataatttacttaattttacccagaactgtgaaatagaaaataaaataaccaaaataccaaattactatgtttcatagtgtctgtatatattatcaaaatgaagtcttttgcaagtccatcttacatattaatttgttaatattttttcaatatttgatataagacattgtgat

SEQ ID NO: 2849 - DNA, 581 bp, Homo sapiens
ataacacgtatggagctctcagctatgataacaatgccttcttctggatatctccggcaggacctgcctgagactgttttattggtagcatttttttttataagtagaaggagtacactctaatatattgataagaagtacaaaacagtaaatactaggcaataggaaattttagtagctccattataatcttatgacaccaccattgtacatacagtctgtcgttgactgaaacttcatcatgtggcacaggactgcatttgtttttactatgttatgtatttttagaaatrgtcttaaatttttttgtggaataagattgagaatgaactgtttttaatacagttatactaacagtttttgcagctgcaatacttggcatttaagtatttttatttaatagacaaaagttttcacatggttttattgttttcatttgcattcttttgattttcagtgattttattttttatttgtttttctttttatttgagcttttggtttatgctcttttataattcagttgttatatatactagataggtaggtaggtaggtagaataaagaaagatatggctaat

SEQ ID NO: 2850 - DNA, 646 bp, Homo sapiens
tgttctgactttactttaaatactttcatatccctaggcaaacaaaaatatcatttcatttctagactatatgcaaagtttcaattgagttacattaacaaaaacagtatattgggagctcttatcaccaccaaaaatttctggaaatctaggtaagctattgaaagtttttccatccagttatttttggcagtcccaacagggtgtctcatatttgttaccaataacctctccattaaatagtgttatatgcaaactctgttcttttgttctgactgttgtaaagatatactttctgcagaaccatcaatcaagaggggagacagtcaattcagatactgcttccaccacctttagcatcccaaatctcatgtcgaatcataaatcacaatgttggggagggacctggtgggaggtgattggatcatgggggcttgtttctcctttgctgttctcatgatagtgagtgagttrccatgagatctggttgtttaaaagtgtgtaccacttccccctttgctctctctctctctctctctatcctgctgccatgtgaagacatgcctactttcccttcaccctttcctcatgattgtaaatttcctgagggccccgcagccatgcttcctgtacagcctgtggaaat

SEQ ID NO: 2851 - DNA, 629 bp, Homo sapiens
gcctaaaacacgaaatgaaatggctatgtatagcacgtttataaagttctgaatattatcacacagccacaatcttgttcattccacttaggaaacacatcagttgttttaaaaaattctttgttctgttgagaaacaatttatcatgattcttgtgcttctgtwtaaaatggcccagcctagtaaatatctgatgatgggtatgaaaaacaaagatgatattttcatacatttttttctctttcctaaggaacaaaactgcagagcttgtatttctcagacacctaggtcatgagactttatccagtgacaccttcccagtgggagctgttctctctaaaatgagctaagtttagtcgggttctcagatggaacttgaatgcagagaaactcacagctaatagaaatagaaaaccgcagatgaattccacaccgctggcaaagagcaactgaaatcaccagtgcaacatcctgagaaattgaacttgccacctccttacacctgggggaaaatgtcaaatgtcctctgttacaatatctgaacagcttgtgcaattttatcaatagagaacagtctgcaatcggtttttttctagtttcctttctgttagctatttaagtgaattcat

SEQ ID NO: 2852 - DNA, 576 bp, Homo sapiens
tattttaaaccaaatcctagatatgacgtcactcataaatattttaatatatatgataaaagaggacatcttagaaaaagaaaaacccacaatgccttgtcacattaacaacacatcaggtccatagatgactttctcagattgtctcaaaggtgtctttttacaaagtttgaaaatcaaaacaatgttcattgcatttggttgatatgctttaagtctcctttagtcttaacagttctccctacaaaaaagagaaaaagttgaaaaactgtatcatttattgatggaacattccacattctctggatttagcaagaagtgtcttaatggtgtcaatttcttcatccccccmccacctcgccatgttttctgtgaattagatctacaggcttgactaaaaccaggttctcccttccccacccctcacaggaatcctttgctggtggcatggtgtccttcccgctgtatcacagtcacactgtattgtctggttgttccagtttcactgatgtcacaattcatcagttctgttgctatcaggttgattcatccattataaaagtcctcttgctctta

SEQ ID NO: 2853 - DNA, 676 bp, Homo sapiens
ttctaaacatttgaaactaccttggggaaaaatagaccaaccagttgcaagtagacaatctggagaatgtatggtctgaggcaagtcctgcctaactcactcccttcaaggagagagaatagaaagactaaggctgagttggaggaagaatgagagttcagctaattgaaaagaacacagaccattcctaaagagatttacctcatctaataaaacatggctcagttaatgtctcagactcttaccagtctaattggagacgtgagtgagaaagaagcataaatgctcccacctccagttctctggaggagaagcaaaaatggacttttgcttctctaccaccgacagcaaaatccgaagtatcagcgaagactatctccctttctctcactctaaggcctttgcaaatgttaatgacagttcatgtttcttgagcacagcaccaaattgagcaatgtaagaaatacattttaatctaatccttatagcaaatcyctttttcagatgggtagacaaaagtataatgaggttaaataccttgtccaaggctagctagtcaaaagtggatctggccccaaagtctaacttcctaactaaaactttacagtggaacagctttctccttcttttttatctggtcaactcctgtgtacccttcaaagttctactgaaatat

SEQ ID NO: 2854 - DNA, 1330 bp, Homo sapiens
cttgcggttgcaccatgactgcctatttcctatggaacatttttctctttagatttatattttctttttaatgtgttctgccttagtagttaatttatgtaaaacaattattttaattctcttctatgagcaactggctttgatattcttttctgtgtctttaatgaagtgattattcttggggtctttattttaaattacctgctggtatgtggagtgccttattcaatgtgttttttgaactcttaaactttttattatcatcatatagaaagaaaaatttggctggatatgtatttattgaatcacataattttctccattaaaatgtagtagcatttatcttttatgttttgatttcttttgcagagaaaagctctgggatgcactagatttttgtttctttgaggttatacttttcattcttttatcctcctctatagaattttgtatccttgaaaaaaattatctttgaaaaaatcataaggacgtaattaggtgtaacactctattattgttacctggagccttgtgttctacagatgaatgtatggttctgctttataaaatgttattatataatttactaatctatattttggtatgtttcatttgagaaacactgctgtggttgtatcttacctgctaccttcagactcatcttttctgtctttctttccctctgctttctaagacaacttcttaattttgaattatttaccattagttctattttgtaatatgttatttatttatgttacagtatgggaattttaattcttctttttttttttttcctgagacagagtctcactctgtcgcccaggctgaagtgcggtgatgcaatcttggctcactgcaacctccgtctcccaggttcaagtgattcttgtgcttcagcctcccgagtagctgggattacaggcacgtgccaccacgccagggtaatttttgtatttttagtagagacagggtttcaccatgttggccaggctggtctcgaactcctgacctcaagtgayccacctgcctcgccctcccaaagtgctgtgattacaggcgtgagccaccattcctggccctaattctgctcttgaattttcaatattcttgtggtggtttcttcctctcagtcaagatgcctatcatctcagattattgactttttatggcttattggctttttatagcattctgatatctctttgtgatatatatctttatttcctatcataatgagatagcatcttaaattgccttttgttgcctgtaaagcatcatttacaagagtatgcatttcctctatgtctttagaataatattgtcatgt

SEQ ID NO: 2855 - DNA, 641 bp, Homo sapiens
taaatgtctaaagcacagaggtctggatgttttctctggtcctctcccctctgctctcaggtcccagtgtcacccagtccccgttagcrtctcaccccgcagctccagctccaccagaccgctttcatcctccagcccgtcaatgacctcacagcggtaacgcccatagtcctccagccgcagatcctggatctccagcgagacgtcatgctctttgtcctgccgcaggtgcacgcggccttggtagtccccaaaggagcggtgcctcagcccgatggccaccagcacgtccttctctggggccccgttctccgacagcttccaccatttgacacgcacacgccgcggggagaccagggccggctcgtagcggtagcggcagggcaggatcacactggccccttggtaggtgaacagggtctcctcgggtgtctccaccaccagcttcactccattaaggaggtcttgggggagagacagggtgcagatgagacctgctgaagcacatctgtacccctgcaagggccaccgcacaccctcatccacggctcctacaggctcagattgcaaaaatggccaccatgctccacccctccctgtatccacatgctctgcaatgtgactttgcatctccttccatc

SEQ ID NO: 2856 - DNA, 1138 bp, Homo sapiens
atcctcacactggagaaagtctggaaaatcccaaagttctgagaagtagcccctgtgtctccttagggatttttctacctagatgctgccttttaaagaaaagtctctggctgcaggctgtggcaccatgaggggctctggttcaagccccatgtgacgagttgcggctgggaaatagttccccagaaggcagagggcaaagtgtcttctccactctggggaggggtctagactttccggctcctctcttcccagagccttagggattcgtgttcagacacaaggcccgcctgttcttccctcagaacacccttcattgggaggttgtgtgtatgttttcggagctgtgtttcttccctcactctctgaacaagctggacattgtccgggggtgtaggagtgctctgtggggcttggacggcttgatttctctccctggcctaaaccaggaaatgggaaggaatgaaaagaggtggggaggagagtgggggtagggggataggggtggagtgggcagagaaactaattttatttcttttttttttttaaagacaaactttgggatagaaatatcgcaataaatatgctcttgtgtttgtgtgtgttttctcagctgtaaagaaaatagggagaaattccattctgtctggcttccaagtgtctccaggactcactgagccttttatgcgagaagactgactttggcagccctgagtcccagcacggccctgtcaacagggaggcctttctccatgggaagctgaattaggtgctgacagggcgacagcataggtgaggcagaggaaggggacggggagcctgaaatgaagtggagaggggagcttggggagcaggaaggggatgctgggtgaaggccgggtgagagtcatgtggtttgggttcatcaccagggaattgactttctcagagagcattatgtggagatttsgtaggggaaagtgaggtgcttttagcttgagctgaggctatgtgtctgtgtgagcatgcgtgcatgtgtccaggttgcagacaaggaaaccttcacctcctcatcagccagactctaccccatggttgtctacctggccaaggtcttggcctggattccatcaaattatgggattgaacaggcagctca

SEQ ID NO: 2857 - DNA, 511 bp, Homo sapiens
agacatgtcctttcattctttctcccmaatttaaaatatgattagtttgattaattatagaacaaaaagtaaccaaaatgtcaaggtaattaattattaaatttttcacatattttcatatggccatattcaaccaccacccctaccaaagagcctaacatcagattagtataacatttttttgagaccttttcccttacaggtttaataatttggctaagtcttgggaccatatatttatttcatgaaaatgattgattctgacctcattttctggcttaaaatatctcaaggtttttttatatgtataacaaattcagcatttaggctgaacagaagtttttaattggtgaattgttataatgtggtcattgttagcaaaatggttaaatgagatgtgtgggtaatcatggctagatttttactcagaaaggtactatcttaagtaaaatttttggccaggtgcggtgggtcacacctatagtcccagcactttgggagtccaaggcgg

SEQ ID NO: 2858 - DNA, 1186 bp, Homo sapiens
ttttgcttttgaatttaataaaaggtacaaatgagtcctgctttgatgtgctcatgaggaggctctgttactactgggttggacacagaaggatacaaatgccttaatatttagcattcagtgaaatcatgtttcagcttcgtgctttggctcaacccacctccgttgtctggcatttgccattctctcaagcgataaaattaatctgcagtaattcacttggagtatatcgggctctgaagatctatcagtgaataggatctatcaagtatcttcgcttccagtcagatgagggatccaggttgacctggcatgggcttcaaacaggcttgtgttccaaattcagctctcccatttattatttatttgtgacttgagtagttacttctttgagattccatttcctcatctaaaataaggtttactctgcagagttggtgtgtggctcagagataatacatgtttggcttatacaagttccttggtaaactgtcacacttaaaaaagtcaatttctcctgagaatgagagccccaaaataaggagatgctgtgtggactgaagggaacctcagtttatccttcatctatttcatgtccttgttttaatgtctaaatgcccattatgtatgtaagaggacagctctgtagccatctcagttcttaaagtacagatatttggggattctgaaagaggaagaggctgatttgcctgtgaacaatgagtgagataactgtactctgtactactgtgaacaatgagtgagataactgtactctgtactactaaagtggactcaccttccctttcaagaacagattctggcagagatattctgggacagggatgttgctgtggcccctctgcagcccctaactggactggacattgcacatgctgtttgcacactccgatcagaagaccagtcttacttttgtgatgaggtagagatgagatgtataggtaaatggtgaagtcaagagtgctggtraaggtcctctgtcacggttaacactatcctatctcctctgcctatcacctttaatattgcctttttacttttaaaagggagagcagggcttttctttcttagttagaagcaaggatgtaaataatttcatccagctaaaaattttaattctactccaacttctcctttttatgcccattgttcttcaaaggaataa

SEQ ID NO: 2859 - DNA, 1186 bp, Homo sapiens
ttttgcttttgaatttaataaaaggtacaaatgagtcctgctttgatgtgctcatgaggaggctctgttactactgggttggacacagaaggatacaaatgccttaatatttagcattcagtgaaatcatgtttcagcttcgtgctttggctcaacccacctccgttgtctggcatttgccattctctcaagcgataaaattaatctgcagtaattcacttggagtatatcgggctctgaagatctatcagtgaataggatctatcaagtatcttcgcttccagtcagatgagggatccaggttgacctggcatgggcttcaaacaggcttgtgttccaaattcagctctcccatttattatttatttgtgacttgagtagttacttctttgagattccatttcctcatctaaaataaggtttactctgcagagttggtgtgtggctcagagataatacatgtttggcttatacaagttccttggtaaactgtcacacttaaaaaagtcaatttctcctgagaatgagagccccaaaataaggagatgctgtgtggactgaagggaacctcagtttatccttcatctatttcatgtccttgttttaatgtctaaatgcccattatgtatgtaagaggacagctctgtagccatctcagttcttaaagtacagatatttggggattctgaaagaggaagaggctgatttgcctgtgaacaatgagtgagataactgtactctgtactactgtgaacaatgagtgagataactgtactctgtactactaaagtggactcaccttccctttcaagaacagattctggcagagatattctgggacagggatgttgctgtggcccctctgcagcccctaactggactggacattgcacatgctgtttgcacactccgatcagaagaccagtcttacttttgtgatgaggtagagatgagatgtataggtaaatggtgaagtcaagagtgctggtgaakgtcctctgtcacggttaacactatcctatctcctctgcctatcacctttaatattgcctttttacttttaaaagggagagcagggcttttctttcttagttagaagcaaggatgtaaataatttcatccagctaaaaattttaattctactccaacttctcctttttatgcccattgttcttcaaaggaataa

SEQ ID NO: 2860 - DNA, 1257 bp, Homo sapiens
gaacctgagcaattaaagagatccacagttaagtcacacttaactggcacttgtggaagccccgcaaggcctgaaggagagctgacataggcaccccagagagccagaatctggatcccatcttaataaggccatgaacaccagtggagaagaggcagaaacaccaatggataaggaacattcacatctttcttcccatgtgcctctaagtgccagtgcaggccccacaggccaagctacagggagaaaggagatgacgcaaaggaacctaactggactttaatcactagaagtgagaagagaaatctattggaacctcccaagataatgccaagggtcaaagggtgcgcagatacataaggtaagcccttcggtacttataaatttaaaaaaataaacagttgtggaatgaagtaccttagaaaggatgagttccctgtccctggtagtttgtaaatagttgatgcagmatggagtagtggggatgtggcccaagttaagtaacttaggtatcccagatggtcatgacatattctccgcttgagtcataactcatcccaatgtccagtttttcagccactctgcccagacttcaaggtggaaagaactcagcacttacccagtcccactacctgtttccgcataatatgccctctaattgttcagcatcagatttaatatcacccaaagagtaagaagatgcctgcacaagactgtccatgtgtgggtaatttaacagctaagaatcatcgtcatcctgcagtgaaagctgtccttggagctcccatcttatacttttcttttgattccacagcccagctaaaattagtattagcaaatattgctggtgccctgccttaaatggagaaatatggagttatctgtgtagaagttataaaattatagggaagaaaagcccagccatttcaaaatcaccagttattttatcatttgacagatactttctactaggatgttgaaatgtcttctgagcttaaatagcatccacttttaagattcgtagaaagtcagatagcaaatattttgggttttgtggtccatacatcctctatcacaatgacatgactatgccatattagtgaaaaagcagccataaacaatacataaatgaatgagaacagctgtaattctagtaaaactttatttacaaaagcaggtaccaggttggatttgactcctgcgctatagtttctgagtcctatactagagaatttggtaactggaatgtttaaagac

SEQ ID NO: 2861 - DNA, 904 bp, Homo sapiens
cagaatcctgagcataaattgcagtttacctccacgaggcttgtgtgttctgtgccatttttcccccttcctttttggagaatgatgaatcagactcatcatggtattcaattaatttcacacagctgactcctgagggagtttgtatccaatgccctctaaccgatgatcaatcatgctcttgtggttggcacccaaggcagcgggaagcaggcccatgacgtgatccaggttgtcgaagagaatgtgtccycatccaagcaggaaaggttttggtgacctttgatggcatttgagataagtcatttgctctggcttttctgaggccatattgatcttgcccaggattcaattttagacaaacaggcgacataatttatgtaaactgggcaggtaattaaactcttctcccaggcaaaaaggtcagagcagaatatttaaagtttcatttctaagtggaagcagttagctaaaaaaaagagaaagaaatctcactgggattgtcatgttgccaactgttaccctataaattatttggtccggattatcttgctaggaataggtttgagttctctttgctgaaagagctacaaaaggtgagatactcattaagcacaaagtttcatgtttaaaatgactgtggagtagaatacttagtgttagactgtgaaaaaaagttcaataactttttcagagtgattttaagataatatcagacttaaaccatttgagagtaatttactaacatgatgatgtcctatcaccctcaaataattcagtgttcattttctataaacaaaaacattctcctgtgtaatcactaaacaactatcaagatcagaagttaacattactatcatctaatcctcagaccccatttaaatttaagtgttgtaataatgtc

SEQ ID NO: 2862 - DNA, 1141 bp, Homo sapiens
tcttaataggtgcatttatctatctgtatattgaaaatcccaagcttacatcaattcctccaattccacttcagtgccacagggttcattctggttttctctttttttctatttctatctcccttttccaatttctagaatcctgactcccatgatccttaattcatttacttatttgagcattcctcttgtatatgaccagtcccttgtcacaggtctgctcacatttgcagagaccactggctcaccctgcatgggttgtcaattctcccctgggcctctcataccactgatctcaaactaccactgccaaccccatgatcactcatgaacaccctcctcaaccctcccaggctctgacacacttgcccgccaccattgctgcccgttccccactgcacagatgcmctcctctcctcacttgggctccaacactccaggctgggttgctgctgctcttgctgctgggttttccattccctacacggatgccttctccactgtgcccaggctctggtaacctgcatcaggctgctcccttctccccatgtagaaactttccttaacttctcaggttcttataccatgctgggataccctctacataaatgccttaaatgccttttcatctttcttgggctctaataccccataccagatagtcctatgtgcatgttctccttatcctgctgaagctccaataaccctgcggtttgacagtgccacacaaaggtcttccagatgccactctggctctgacactctatagcagctgttttcctccccctaggatgccttccagcatcccgcttaggctataaccctttgcactggactctcctgccatgtagacaccctctttctgagctcagcctcccattcttacacagggctacatccctctgctccttccacccacaggctcctgctttgatcagccccatcttatcaccaatatattgaattttttgggaaagaaacagaaagagaaacagtttgataatttttagaagttgttgttattatttttaaaaattttaactggaaaaatgaatgcaatcttctttgtgtggatatgtgtgtctaccaaacaaaatgcggactatctacataatgaaatactattctgccacataaagaa

SEQ ID NO: 2863 - DNA, 1124 bp, Homo sapiens
atacatgaccaaacagaagtaacagatgtcctcaggtaatttatgatgtcttgaaaagacctcataactaaaaaagagaaaaatgaaaaaccaaatatttgtatttaaaaaatgttaagatacattcattaaatggaaactaatacagagttcttgaagtttactgaattggaatcacggaagcagattttctcaacatcagcattgttgacatttggggtcaggtaattctttgttgtgaggagttgtcttactctttaaaagactttgggcaagcttcttaacctctagaacattagcatctctaactgtacctgttgataataatatctgctacatgaagttattctgaaagttccactggaaaatagatatagaaaagttcctaatgcaagtattagcacaaaattagtacttgttaaatgtttgctaaatttaaataactttagaagttagtaagtaaaggattagcaagaatttttgttatgggggaaaacacacaggaggtgtaaaccttgagctaaattataaattgttataatttcaaactgtttcttgccttgaaataggcaacattttaatttgcagttgtttgtwcatgaagaaatgctacagttctgtctggtgagtggcctcaggtgactatcctaagaatacatttgtgtatgggttaggggcattctgaaatataattctatctatggacatacagggcttcagtcagagagagaaataaagacctggtaactgggtatacaatggaagccaaatttcaatgataaactgttgatcactcagaaaaaaatccttcagtgcttaaggggcaaaactagcaaaatggatttagcagctcaatgcaaacattagagggagtgggagtcttggtgctgtttcagtgcagtgactataatatttaaacaaccaggttggaaaggtacttgcatatgggaagaaaatggtttcaaatcactctgaaggtctgagcaatcctgttgtgggaccttctttgaaaagaaaatcatgggagcaaaaagtatttccttacaagagaagaaagagcacaacattgtctgagcagcagtagctctggagtgagccaatgcaagaggctgggtctgcaaaga

SEQ ID NO: 2864 - DNA, 1300 bp, Homo sapiens
gagcagattgagcctagaagaattggaactaagttgacgatggtaacaaaactaataagtagaagtggggtcaataaacctatgcttatctagctacaatgctgaattgtcttcaattaaatcacagtaacttccacactgggaaaaacttggttttccagcaactggaaagcagcataatatagttcttacatatatgagacaatattgtctttgcagtattgtgaaaattaagtgacatagtaaaaataaaacactttgcatactgggcmtataatattcactttgtattacattttctctagtatttccattgctggcacagagcctagtacagagatagtgttcagtaaatgcttgttaaataattgatggcatatgttttgcatttggggagcatcacagaaaatgtctacttccaccttacggttgtgagtgaatgtttgtcctgtctctttccaatctgttctcaaggctacatgtcaccagtttcctcaccttcctcccagctgtttttcatgtctttagacagaggtcacatggagtggctgccggggtcattgtgggaaaaacccaaaggagaaagtcacaggcctgttccaagtcctgactcctcccaccccctggtcaccaaacctcattttcatttcccaaatgaggcacactttataagatactactctgattttcccctctcttttaagaagagacaactttaaagatttaaaccgaaagatttaacctgggtgaggccacggcgtggaaacatttgatgagcaggtaacacctagaatgcaacctaagcaccgtgcatatgcaatgggaagtgggttttcagatctcctcagaagagctgcctccttcaaagtctttggtcttaataagatattaacctgcttttactcttcagcttcatttctctagcctgagacctgttaacccaaattactctttttcttccaataaaagaaaaagttgacattgtgattacatatcagtagcatgacaaattacatcaggggtaacaatattcccaaaggagagtgggaggttattatttctgtaattctagcacacttgcaagaagtgcaagacaagcaagaaagtatcaaagagtagtcgctcaataactgggtggagggaagccagggaatgctacctggatcccaaggccaggcaacttgtcctcggtgctttctagggcttggataccagtggaggctgacatgcctttggttgtagaatgaaatcacacttctccatattgagaaaaaatctgctttgcagaatctgggatgca

SEQ ID NO: 2865 - DNA, 1300 bp, Homo sapiens
gagcagattgagcctagaagaattggaactaagttgacgatggtaacaaaactaataagtagaagtggggtcaataaacctatgcttatctagctacaatgctgaattgtcttcaattaaatcacagtaacttccacactgggaaaaacttggttttccagcaactggaaagcagcataatatagttcttacatatatgagacaatattgtctttgcagtattgtgaaaattaagtgacatagtaaaaataaaacactttgcatactgggcatataatattcactttgtattacattttctctagtatttccattgctggcacagagcctagtacagagatagtgttcagtaaatgcttgytaaataattgatggcatatgttttgcatttggggagcatcacagaaaatgtctacttccaccttacggttgtgagtgaatgtttgtcctgtctctttccaatctgttctcaaggctacatgtcaccagtttcctcaccttcctcccagctgtttttcatgtctttagacagaggtcacatggagtggctgccggggtcattgtgggaaaaacccaaaggagaaagtcacaggcctgttccaagtcctgactcctcccaccccctggtcaccaaacctcattttcatttcccaaatgaggcacactttataagatactactctgattttcccctctcttttaagaagagacaactttaaagatttaaaccgaaagatttaacctgggtgaggccacggcgtggaaacatttgatgagcaggtaacacctagaatgcaacctaagcaccgtgcatatgcaatgggaagtgggttttcagatctcctcagaagagctgcctccttcaaagtctttggtcttaataagatattaacctgcttttactcttcagcttcatttctctagcctgagacctgttaacccaaattactctttttcttccaataaaagaaaaagttgacattgtgattacatatcagtagcatgacaaattacatcaggggtaacaatattcccaaaggagagtgggaggttattatttctgtaattctagcacacttgcaagaagtgcaagacaagcaagaaagtatcaaagagtagtcgctcaataactgggtggagggaagccagggaatgctacctggatcccaaggccaggcaacttgtcctcggtgctttctagggcttggataccagtggaggctgacatgcctttggttgtagaatgaaatcacacttctccatattgagaaaaaatctgctttgcagaatctgggatgca

SEQ ID NO: 2866 - DNA, 1245 bp, Homo sapiens
ggataaataacttttctgctgtcatacaacttgtaagtggcagagccaagatgaaaattcagaagccagccccagagccccttcttttatcctctccacgaaaccatctcttgatgtgagagcccttagggtcttcatcatctaatccttggctctgctatcactgtctgggatgctaaacctgttgggtttagggttctagccagtgaagagatgaggctctcatgagccctggagcagtgggtcagaacctgagctgtcccctgtgattcctggaccaaaacaatcagtgcctcagatccagacaagactcgagaaaaataayaatatttgttgccacttattgagcatttttatgtaccaggtgctgtgctaagtgctttacatacaatatctcatttaatccctaagacaagtgagaaaaacacattgttgcaggtacaaatattctcatttccaaatgagagaccttggctcagaaaatatagtggccttttttagagtcacacaactagtaagtggccgaactaagattcggaccccggctggcatcacagactgtgtcatctttgaaggaggaaagaaaatgcaaatgcctctctctgaatttttttaagtcctccttttctttctaagaggaaacagtaaagaaaaacaaaacccaaccacttcttagaagtgtgtgtgtctctcccacaatcccctcccctgcaccaaatgctgaagataagaagacttttgtctgaggctaagggtgttcatttttgttgagagccttttccagctgtcttactggtctagaaattaataaagatttcctttcagttctgtagaagcagggactatccagccgcccctcctgtttgggcacgtagccatggggaaagatcggcaatgaggccaggatttgagagctcagggcacagtccagcttcactgacagatatcactacacacacacagacacacacacacacacacacacgcccacacacctatacccctcttctcctgcagtaagacattgttaaggaatctgagcacatcttccaggctctttgcctgctctggtctttaagactcaggaccacctgctaggttggccaacgatacttccttggcagggacactcagctgtgttcactgttctgccctagacagagaggtgtagtcaggctgcccctgcacccagcctcgccagctctccaagtagaggcaagagtggagagggaattgaaggcattc

SEQ ID NO: 2867 - DNA, 1245 bp, Homo sapiens
ggataaataacttttctgctgtcatacaacttgtaagtggcagagccaagatgaaaattcagaagccagccccagagccccttcttttatcctctccacgaaaccatctcttgatgtgagagcccttagggtcttcatcatctaatccttggctctgctatcactgtctgggatgctaaacctgttgggtttagggttctagccagtgaagagatgaggctctcatgagccctggagcagtgggtcagaacctgagctgtcccctgtgattcctggaccaaaacaatcagtgcctcagatccagacaagactcgagaaaaataataatatttgttgccacttattgagcatttttatgtaccaggtgctgtgctaagtgctttacatacaatatctcatttaatccctaagacaagtgagaaaaacacattgttgcaggtacaaatattctcatttccaaatgagagaccttggctcagaaaatatagtggccttttttagagtcacacaactagtaagtggccgaactaagattcggaccccggctggcatcacagactgtgtcatctttgaaggaggaaagaaaatgcaaatgcctctctctgaatttttttaagtcctccttttctttctaagaggaaacagtaaagaaaaacaaaacccaaccacttcttagaagtgtgtgtgtctctcccacaatcccctcccctgcaccaaatgctgaagataagaagacttttgtctgaggctaagggtgttcatttttgttgagagccttttccagctgtcttactggtctagaaattaataaagatttcctttcagttctgtagaagcagggactatccagccgcccctcctgtttgggcacgtagccatggggaaagatcggcaatgaggccaggatttgagagctcagggcacagtccagcttcactgacagatatcactacacacacacagacacacacacacacacacacacgcccacacacctatacccctcttctcctgcagtaagacattgttaaggaatctgagcacatcttccaggctctttgcctgctctggtctttmagactcaggaccacctgctaggttggccaacgatacttccttggcagggacactcagctgtgttcactgttctgccctagacagagaggtgtagtcaggctgcccctgcacccagcctcgccagctctccaagtagaggcaagagtggagagggaattgaaggcattc

SEQ ID NO: 2868 - DNA, 556 bp, Homo sapiens
ggggatagctttccaacaaaatctgaccctttggggctcgcagaacctggccacatcctaagaaaagaagaaaagattgggacataaaaatggaggtcaataggaaagagactagagaaggtctcaacgagactttgagcacatgccacacccctgagaacaggatgaatagggaaaaggaagaaggaaattaatgtttctcaagcagctggcaatgtgccaggcaatttacatagattaattcatttaatccacccaacagcttgggaagggaagtggtgtcctcacaattttccagctgggaaaacagatagatgatcagagagttaaataaataacttgtctagccgctaagtgacggagcaaagactcaaacctaactgtgtttgaatgtaaagttcgagccaccctatcatccttcctctccaggcctgacaratgccagcctgctgcccctaccttaaaaggctcagaaagtagaccctccccacagctctactcactttcctccaccatccaggcaggaaatcaaggcattaatttattctatgagtag

SEQ ID NO: 2869 - DNA, 1184 bp, Homo sapiens
tctatatcaggaagctcataggcaaaaatagagctgtgtaaacgaatctgaaacttagaagctgtaactttggaaagtgagacgtgaagaggtggcgagcacacacggtgggtggggagcacgtggcgagcagagacactggacaaagagttggtgggtcagtccattaagccttatcctggtctctaccagttgcaaacattctagatctccctagtaaatgggctcctcagtggagagtccattgaaatccaacatgtaacccacccccaagtaatgcccacctccagcacttgctccctttccattccttctcaggtatctcaagcagggaaggggctgccctaggaaagtaacagaaatatttgaaattgacattctgaactactaatacatcacttataagatttacttaaatttggccaggtgcggtggctcacatctgtaatcccagcactttgagaggctgaggcgggtgaatcacttgaggtcaggagttcgagaccagcctgaccaacatggtgaaaccctgtctctatgaacaatacaaaaattagccaggtgtgctggcaggcctgtaatcccagctactcaggaggctgaggcaggaggattgcttgaacccaggaggcagaggttgcagtgagctgagattgtgtcactgcactccagcctgggtgacagagcgagactccacctcaaaaaaaaaaaaaaaaaagttttaaaattagccaggcatggtggtgcatacctgtggtccctgctactccacaagctgaggtgggaggatcgcttgacccgggaggtcaaggacagtgagctgtgatcacgctactgttctccggcctgggcaagagagtgagaccccggccactccaaaaaaaaaaaaraaacattccatgatggggacaaaaaattaaataaaataagaacaacccccccgcccccagaaatcttcacattcccttagtcctaggaaaaccaggacagttggtcaccctaaatgaaaaaccaccacggagaatgattagaaaatcgcaaagcagtacatataaataatcagggctgaattaaggcctggtagatatttgttcatgaattaagcaaggatttattaaaaacggagattgagttgctcagcactaagcttcacaatggaccctacctaaaggggttcccacttt

SEQ ID NO: 2870 - DNA, 1352 bp, Homo sapiens
tgcatgtgggacagtggcaagattttatcaacgtgtcacaggcagaatggcattccccacccaagatgtccatgtcctcatatctagaacctatgggtatgtgaccgtacataacaaaggggaattcaggttgcagatggccttgagatgggaagatcaccctggattatttaggtgggctctgtatcatcacaggggtcctgaaaagtgggagagggaggcaaaggagagtgatgtgatgcgaaaacaactcacctttgctggctttgaaatagagggagggaggggccaccaccaaggaatgcaggtggcctgtagaatctgggcaaggcaaggaaacagatcctcccagagcccacagaaatgaacgcagccctgccagcaccttgggtttggcctggtgagctctgcatcagagttctgacctacagaattgtaagataatgcctgtgtgtctaagccactcggcagcaayagaaaactcataatattttagaagatgagtcatggccatcagataagggctgcctggagatgacaagcagaaccagcatggggactggactctctctcaaggggtcccttattcaagataaacatgtggccctttcaacatacgatacttggtaaatgacgactcaaggaataaagatgtcgtgcatttgtaagctctctcacacacatgccagaattctcatgtattctcacagggttccaggaatgctataagtatctataacagtagaatgaattactccaacatttagtggcttaaaacaatgacaatcatttattacttctcagagtttctgtgggtcaggaatactgacaaggctcagaggggccagcttgtttcattccaccgtatctagggtatcagctgggagaccctaagcataagagatggaatcatctgaaggatcttttatttacatacaggctttccatgtggcttgggcttcctcacaacatggtggcctagggcaagtgggtgggcgtaggggagaagaaacaagtagaagctgtagagctttttatgagccagcctcagaaatcctgcctcattacttttgctgcattctgtggttggagaaattacacatatagaaaacatggacaccacctttctattgcttcccataaaaaaaaaaaaaaggagtaaaactgatctggattcaaatcctagctcagtcatttctttgctgtgtgaattaggaaagttgactagagctctttgaacagtaataatagaatgttttaggtgtaataatttatcttttgcacataataaaatggaggcttaaagagcttcttggctccctgctggaataacatcttcagctgacaaagca

SEQ ID NO: 2871 - DNA, 1120 bp, Homo sapiens
tagtgtctcatctgtcaaacctgaacattaattaaaccccaactgaaagtatccgtgtgcttcaggtgtagctcacactcccttttcatttccctgcatttgctttggaaaagctaaaaattaaaatgtattattttacttagagtattaaattccctttgtaaaatagaatagaaaaaagtaaaaaatagaataggaatagtatcatttggtaaaatgataaaatgtagagatgcaaagtattaacttccaagaataattctgtatctcacctctttcctaagggtattccatttaatgaacgaaacggcatgagcagtttatataaaattaaggtatttatatttrtaattatttaaaatccagttatagactgctgtaaattcgtctcatctttctctttttcttttcttttcattttcttttgaagggaggtgtgaatgttcccagttacccagggccacccggtcctcctgtaagtacagttgtttatcatcaaacacactttagctgaacaaccacaatgaaaaacaaacaataaaaacctcttaagttcactgaaaaacgcatgttatgaatacagccaaattttacagcagaaggaaataagtaaaaccaattataataaaattgagaaaatgtatgcagccaaaataatggaaaacagcatttttcatggtggtgtcacttttttcattgcaaatctaagaactaagtcaatgtccaagcaatcatttttatgaaatttccatcaagttatatttattcatcttattcttcaaattcaaactgtaattaaagcaaaacttgctaatattcgtatgtgtattaaggcaaattggacaacagtgtttcttattctgtaactgctttggtcattatttgaaaaatgactttccatgtttctcttacagggcccaaaaggcgatcctggcccagtggtatgaatgttcccatgttttgtgtcatttagaatattggtctttgttaaattttgaaagaaaagcatcgggcaaaatggcctgccttcttaggtgttcatcaattaacatgctggtggtgacaagcaggccacaatataaatgccagcaatatgttctctgtttctgagatgcattag

SEQ ID NO: 2872 - DNA, 1285 bp, Homo sapiens
ctagctactcaggaggctgaggtgggaggatcgcttgagctggggaagttgaggctgcagtgaactgagattataccagttcactccagcctgggggacagtgtgagatcctgccaaaaaaaaaagagggagtccgggcgcggtggctcacacctgtaatcccagcactttgagaggccaaggcaggtggatcacgaggtcaggagatcgagaccatcctggctaacacggtgaaaccctgtctctactaaaaatacaaaaaattagccgggcctggtggcgggcrcctgtagtcccagctactcgggaggctgaggcaggagaatggcatgaacctgggaggtggaggttgcagtgacccgagactgcgccactgcactccagcctgggcgacagaacgagactctgtctcaaaaaaaaaaacaaaaacaaaaaagagaagaaaaggaaagaaagaacaaaaagtaactattagctatggttattatttatattactatataaatgctatattacttgcaataaatataactacataactattaaaagtgtttgcccatatgtactccaagagttacttcttaggatcaccagtggcactttgggaaatagctcccccactccctgaaatgctcttctccttggtttccacgcgagcttaagtatcactgtcttcaggtttttctgcagcatctctggattctttctctggctcctcatcctatgatgttctcatttatatggattcaattttatacgctttctcaggacagtttcctccacttccatggccttagcataagtagacctagatttttttttcttcaacttttaagttcaggggtacatgtgcaggatgtgcaggtttgttacataggtagatgtgtgccatggtggtttgctacacagatcgtcctatcacctatgtattaagcccagcatccattagctcttcttcctgatgctctctctccctctaccccaccctgacaggcccgagtgtgttgtccccaccacgtgtccatgtgttgtcatcattcagctcctacttgtaagtgagaacataccgtatttggttttctgttcctgcattagtttgctgaggataatggcttccagctctatccatgtgtctgcaaaggacatgatcttgttcctttttatgactgcatagtattccatggtgtataggtaccacattttctttatccagtctatcatcaatgggcatttaggatgattccatgtccttgctattgtgaatagtgctgcagtggagatacgc

SEQ ID NO: 2873 - DNA, 1285 bp, Homo sapiens
ctagctactcaggaggctgaggtgggaggatcgcttgagctggggaagttgaggctgcagtgaactgagattataccagttcactccagcctgggggacagtgtgagatcctgccaaaaaaaaaagagggagtccgggcgcggtggctcacacctgtaatcccagcactttgagaggccaaggcaggtggatcacgaggtcaggagatcgagaccatcctggctaacacggtgaaaccctgtctctactaaaaatacaaaaaattagccgggcctggtggcgggcgcctgtagtcccagctactcgggaggctgaggcaggagaatggyatgaacctgggaggtggaggttgcagtgacccgagactgcgccactgcactccagcctgggcgacagaacgagactctgtctcaaaaaaaaaaacaaaaacaaaaaagagaagaaaaggaaagaaagaacaaaaagtaactattagctatggttattatttatattactatataaatgctatattacttgcaataaatataactacataactattaaaagtgtttgcccatatgtactccaagagttacttcttaggatcaccagtggcactttgggaaatagctcccccactccctgaaatgctcttctccttggtttccacgcgagcttaagtatcactgtcttcaggtttttctgcagcatctctggattctttctctggctcctcatcctatgatgttctcatttatatggattcaattttatacgctttctcaggacagtttcctccacttccatggccttagcataagtagacctagatttttttttcttcaacttttaagttcaggggtacatgtgcaggatgtgcaggtttgttacataggtagatgtgtgccatggtggtttgctacacagatcgtcctatcacctatgtattaagcccagcatccattagctcttcttcctgatgctctctctccctctaccccaccctgacaggcccgagtgtgttgtccccaccacgtgtccatgtgttgtcatcattcagctcctacttgtaagtgagaacataccgtatttggttttctgttcctgcattagtttgctgaggataatggcttccagctctatccatgtgtctgcaaaggacatgatcttgttcctttttatgactgcatagtattccatggtgtataggtaccacattttctttatccagtctatcatcaatgggcatttaggatgattccatgtccttgctattgtgaatagtgctgcagtggagatacgc

SEQ ID NO: 2874 - DNA, 1285 bp, Homo sapiens
ctagctactcaggaggctgaggtgggaggatcgcttgagctggggaagttgaggctgcagtgaactgagattataccagttcactccagcctgggggacagtgtgagatcctgccaaaaaaaaaagagggagtccgggcgcggtggctcacacctgtaatcccagcactttgagaggccaaggcaggtggatcacgaggtcaggagatcgagaccatcctggctaacacggtgaaaccctgtctctactaaaaatacaaaaaattagccgggcctggtggcgggcgcctgtagtcccagctactcgggaggctgaggcaggagaatggcrtgaacctgggaggtggaggttgcagtgacccgagactgcgccactgcactccagcctgggcgacagaacgagactctgtctcaaaaaaaaaaacaaaaacaaaaaagagaagaaaaggaaagaaagaacaaaaagtaactattagctatggttattatttatattactatataaatgctatattacttgcaataaatataactacataactattaaaagtgtttgcccatatgtactccaagagttacttcttaggatcaccagtggcactttgggaaatagctcccccactccctgaaatgctcttctccttggtttccacgcgagcttaagtatcactgtcttcaggtttttctgcagcatctctggattctttctctggctcctcatcctatgatgttctcatttatatggattcaattttatacgctttctcaggacagtttcctccacttccatggccttagcataagtagacctagatttttttttcttcaacttttaagttcaggggtacatgtgcaggatgtgcaggtttgttacataggtagatgtgtgccatggtggtttgctacacagatcgtcctatcacctatgtattaagcccagcatccattagctcttcttcctgatgctctctctccctctaccccaccctgacaggcccgagtgtgttgtccccaccacgtgtccatgtgttgtcatcattcagctcctacttgtaagtgagaacataccgtatttggttttctgttcctgcattagtttgctgaggataatggcttccagctctatccatgtgtctgcaaaggacatgatcttgttcctttttatgactgcatagtattccatggtgtataggtaccacattttctttatccagtctatcatcaatgggcatttaggatgattccatgtccttgctattgtgaatagtgctgcagtggagatacgc

SEQ ID NO: 2875 - DNA, 584 bp, Homo sapiens
caccatggtacactacatagtgtgaggggcctttctactgtacttgaagacagggaaacatccatgggaccaaaaaaaaaaaagtgcaacagaagcagtgaccagtaagcacatatgaaaggcagggtcctgtctgagagcatatgttgataacattattttaaaaagggaagatgagctgatgaatccttgatgaaaaagaggacctgaaagggtcctaaagtggttctaggtaggtagcataccctggctcctggcaaagtcatatgataatactcttttaaggaaaatatccaaaatgtaggtgctcaggtttttttgcagattcagagcaactacatatgtgctcgttaaaaaaaacaaaaaacaaacaaacaaaaaaaacagcgctgaaggaaataaaccacaatgcatgaggatgaataaaaacaacaaacaacagatttagacacgaaggcctttagatagcagattatagactatatatgaaaacatatagaaataygcaacaatatactaatcacagtaatctagcagatttaaaaacaaattgaaatttccatttcttgccagaattaccctcc

SEQ ID NO: 2876 - DNA, 1283 bp, Homo sapiens
cctttccccactgtcagagccacatacccatgaatgcaaactcactgcagttgagcagccctattacctcattagggaagcttcaccgcttcagcgctgggaaggcataggcactggtttcaagtctacagacagtatcaggcttaggaaaggaaaggcgtgacagtcacactgtcacattttttgctcatttacttgagtagtaaagagttgggatagcacaacgggtgactgtagtcaataataacttaattgtacatttttaaatgactagagaagtataattggattgtctgtaacaaaggataaatgcttgaggggctgaataccccattctccatgatgtgattattacacatttgcatgcctgtatcaaaatatctcatgtaacccataaatatatacacctactatgtacccacaaaaattaaaaattaaaaaaatttttaaagaaacagttgttaggccaagggaccaagagaaagcagagagagtggaatatgaatggccgtaagagtgacttgttctcacctgctcgatgattcagcagctcagggaaacatagacatctctgaagacctaagctatgtctcaggacactttcaggtcttactcgccatccacacrtgggatctagaggacaaaggactatattaggcaagtgacaactcagccctctaatcctttagaggatcagatagagtggcataatccaaagaacagctcttatttcaactaaagggaggagaaacagcaatagccctgaaaaaaaaaaaaaacagacaaaaaaaccgaatccataaccaaagatgacagcttctgttcagtacccactagttctgtggaatgagttcccatgcttcctatgaagggcggagggaaggattcagtgacatggacatggctgtcactgaagcagcacatacaattctctggcattgacaggggcttgttacatgtttattgaatgaatctctctgaaaagaaaacaaatgcagaatctcaggctccacaaaatcagaatctgcatttaaaaagatctccaggtgattttgtatgcgcattagagcttgagaagcagtgatctaggaaattcaggttacagcctacattgtcatttcatctggccacccagtaatgttgagcactcttcctatctatgtgagagaattccctcctttgtgcatgtgtacctccccataggagaagccagaaacttgctttccaggtttacatttcagcaagggcagtcctgtgaccttaggctttgccagtcaaatgca

SEQ ID NO: 2877 - DNA, 608 bp, Homo sapiens
ggactttgtgtcgtggagttaacctcatgttcatgacttttcctccatagagaaatattcatttatacatccagaaacaagaagaaagggcagagaatgtcttgctttatgtttttgtattgatagtgatgagagctgccatttttgagccagcatgcatgccagcactgtgctaagtgacttacatggatcacatatgtaagtcatagttactaatcttaaaaaaaaagaaaaaaaaaataggaaaacacagataaggataaagaaaacaaaatacgtactcgtaagtcttctagccaaagataactactgttaacattttggcaaatatttcttcagacatattgcagtacttacatatttatttctatatatattaatattttcagcaactttgaaaagstgagttatctttattttatggtcaggtcaagataagtcaattaggtcatagctaaagaaatggtagtctgtcatttcactccagagttttctatttaagtttctcagtaccagctcatcattaatttccagtggtttgatccagagctggggacacagtgtcttaacatctctgaaggatgtctgatcaaaaggaatgctgagta

SEQ ID NO: 2878 - DNA, 566 bp, Homo sapiens
gtccttgagatgaaggattctggagaggatcaggaaaagagacagattcagtagttatcatccagatttaatgacaggcttgcctgagaactccattcattgctgtgccagatatcaatttattgtctatcagctctaaatctacctttgtggactttgtgatagtaaacctggatcctgtaacaagaacttgactgactggcccagtgttcrgctttgccaatagagggagctggagagacactgtaagaagatagaagtagaaatgcactttctggattctgatcttcttaggattattcagtgtaggcacccagcagctcacttggtcatctgtagccacattctcagggaatgctttctccacacaatggccatttctgcatttggtcaagatgcaacctctggcaactatatccctaccaggcatttgcttctatggtccagccccagcctgcccacaccctccagcaaggacatatggcttctcgtaagccagctttggccatctgacaagtttcatagccactgcagactgcatgttcctgtggcagccacaccttcaa

SEQ ID NO: 2879 - DNA, 523 bp, Homo sapiens
gcctgtaatcccagcatgtaaggagtctgagatgggaggatcacttgagcccaaaagttcgagaccagcctgggcaacatagtggtgatacggaaatgctggtaaaggaagagcatagtcctatttatttatttatttatttatgagacagagtcttgctctgtcgcccaggctggagtgcaatggcgcaatctctgctcaccgcaacctctgcctcctgggttcaagcaattctgcctcagcctcccgaatagctgggattactggcgcccgccaccacgyccagctaaggttttgcatttttagtagagatggggtttcaccttgttggccaggctggtctcaaactcctgacctcgtgatccacccgcctcggcctcccaaagtgctgagattacaggcgtgagccaccgcgccctgcccgagcatagtcacttttaaatgatacggaaaagggggagggaagtgctggtagaggagggtgtggtccctggctagggctccatccccatgaacgaggatg

SEQ ID NO: 2880 - DNA, 586 bp, Homo sapiens
aaacagatcagttcctcactgtgtttctcgagcactgcaaggcgcaggtctgcagtggtgaggaatggatgtccgctttgctctgtgatgtttacacagagcgtgcacagctcagcgcattcacagcaagatttgattcaagcgcctccctcgtacttgaaccatgaaatggagataaaaactgacgagggagaaaatcactcaacccagagtacacctgaagggacattttactactgcagtgagaaataggcgagcaaagatgtgagtttgtgattggaagacatgctatcttcaygagcttgttttttctttttccttctctttcttttttcttttttttgaggcagggtctggctctgtcgctcaggctggaatgcaatggaatgcagtgatctcactgcaacctctgcctcctgggctcaagcaatcctaactcagcctcctgagtagctgggactacaggcgcacatcacaatgcctgcttatttttttttattttttaaatttatttatagaaatggagtttcaccatgttgcccaggctggtcttggacacttgagctcaagcgatccacttgcctca

SEQ ID NO: 2881 - DNA, 586 bp, Homo sapiens
aaacagatcagttcctcactgtgtttctcgagcactgcaaggcgcaggtctgcagtggtgaggaatggatgtccgctttgctctgtgatgtttacacagagcgtgcacagctcagcgcattcacagcaagatttgattcaagcgcctccctcgtacttgaaccatgaaatggagataaaaactgacgagggagaaaatcactcaacccagagtacacctgaagggacattttactactgcagtgagaaataggcgagcaaagatgtgagtttgtgattggaagacatgctatcttcacgagcttgttttttctttttccttctctttcttttttcttttttttgaggcagggtctggctctgtcrctcaggctggaatgcaatggaatgcagtgatctcactgcaacctctgcctcctgggctcaagcaatcctaactcagcctcctgagtagctgggactacaggcgcacatcacaatgcctgcttatttttttttattttttaaatttatttatagaaatggagtttcaccatgttgcccaggctggtcttggacacttgagctcaagcgatccacttgcctca

SEQ ID NO: 2882 - DNA, 586 bp, Homo sapiens
aaacagatcagttcctcactgtgtttctcgagcactgcaaggcgcaggtctgcagtggtgaggaatggatgtccgctttgctctgtgatgtttacacagagcgtgcacagctcagcgcattcacagcaagatttgattcaagcgcctccctcgtacttgaaccatgaaatggagataaaaactgacgagggagaaaatcactcaacccagagtacacctgaagggacattttactactgcagtgagaaataggcgagcaaagatgtgagtttgtgattggaagacatgctatcttcacgagcttgttttttctttttccttctctttcttttttcttttttttgaggcagggtctggctctgtcgctcaggctggaatgcaatggaatgcagtgatctcactgcaacctctgcctcctgggctcaagcaatcctaactcagcctcctgagtagctgggactacaggcgcacatcacaatgcctgcttatttttttttattttttaaatttatttatagaaatggagtttcaccatgttgcccaggctggtcttgracacttgagctcaagcgatccacttgcctca

SEQ ID NO: 2883 - DNA, 1189 bp, Homo sapiens
ttttatacctggaagctatccctctgtgtggtcaggctatcattattcccgttgtgcaaaggaaaacaaaaggagctcagagaagtgcagtgacttgctaaaggccacacagccaggcacctgcagattctcaatgaataactctgcaattgtttgaaagtcttccaggagcccccgcacccccgttctcaaccagaggagtgctcttccccctaggggatatctggcaatgtctggggacatttttggttgtcacactgtgtgtgtctgtgtgygtgtgtgcgtgtgtgtgtgttaccagcatctggtggggagagagcagggatactgtttaacatcttataatgcacagggcagactcccataataaagaattaaacatcccaaaatgtcaatagcatcaaggtagagaattcctgatctagatgcttctctgcttgtctagccaactccctcccttattatcaccacctctccatcaaaaatcccccagatggtgcttctgaggctcaactcagcagagaacaaatcctcttttattataagcacatctcactattaggttcatagcctagttattcagttattctcaattacagctcccttcaaaaaatagatgtaattaagtttagtagtttggtctcatttcccaatatctggttgaaggggtgaattctgtcaattgcattaagtggctgcagcatcattagtctcaagcaataataacctccacacagcttcctacgtgggcaagaagatttgaactttgagatcctctctttgctttcttcgtttggattttattaaacttgccaatgcaagccttaaagcaatggaaaactgttgaaagggaaggggaaaaaatatatgaaaatccaggccttatcataacagagaaggcaaacgacatttacagcaattaaaccgatacagaaacttctgcttaacaatcaaagcacctattaagatgtctccatagctgaacaaaagcttcttttctactctaattttctgataacaagtcatgcagacacagaggcagaattttgtgcatccctggtgcctatggtctcaggagtagaataatagacatttctccgtagatattttcatttctagtgcatagaaagagaaagaggtggaaggagggaggattcttctccccttgcacaggtcttgctgttgatgt

SEQ ID NO: 2884 - DNA, 683 bp, Homo sapiens
gggtcctacccccagagtttctcattcagtaggtctgggaggggcctgggaatatgcactttaacaatgtttaacagtcatcccaggtgatacggatgctgcaggtctggggaccccactttgagaaccagcagctttgttaggggaaagaaaaagctgagaagagaagaggacgcagcattcctgcaaggaagactgataggaacaagagaattgaggaaaaccaggaagagggtattgtcatggaagcttgggacactcagtgtccagcaaggggagtggtcagcagcttagaggctggtgttgaaaggacaaatgggatgcaactagaaaaacgtccctcagaattcttgcagccttaacatcttgttaggctgtggttttaccactgcatgcagacttcctttattcacctgcccagtgacatttgacatctcaacctgtaatttgataattcaacctgtaattgcataccatgtacatttccagtgtagggctagggttcagttgggagtggagctcttcaccckctgaaccaggttagtgggactatttcagttatcggagtcatcggagggatcaaggacagaactggaagatcctttcccagcaacagttcccagcaaggagagagctaaaattcaccagaatggcagtgtggggtcgctgagacaggaaatgca

SEQ ID NO: 2885 - DNA, 654 bp, Homo sapiens
tataaatgctatatatatctcctagtactttgggaggtcgaggcacgaggatcacctgaagccaggagttcaagaccaactgggacaacatagtgagacccagtctctataaaaaacttagccaggctactcgagaggctgaggcaggaggatcactcctggactcgagctcaggagttggatgctacagtgagctatgattgtaccacygcattctagcctgggtgacagaacaagaccctgtctctaaaaaaaaaaaaaaaaatacaccttgcctgtcacttcaaaggacccaatagttgttgtagtggcagatatgatggcctcctttgcttctgtttgtgcagagaccacctctgggcacagggagtgctttggatgtctacttacagggatgccagatgccatgcagcttccttactggcctggagagaaactgcttagtggctgttatgaactgaatgcttgtgtcccggtgcccaaatttgtatgtggaaaccctaacccccagtgtgatggcatttggagatggggcctttggaaggtaattaaagttagatgagatcgtggggtggagccttatgatgggattagggcccttataagtagagacactgcagagcttgaccttgccctctcttcttaccatgtgag

SEQ ID NO: 2886 - DNA, 544 bp, Homo sapiens
aaatgcctcagggcctctgttctggctccagcaacatgtggcaagaagactaacagaggtcagcgttgaaaagtggagtccccacattggactgagtcacagacggacttatatctcatacataagacaaacagacagagggctgggccttgccttatatgttcaccacagtactctcagcaccgtgcacatggcctgtgacatagmtagcatttaataaacatttattgaatggattgctgaattatccatggttgtagtaccctacagtttcactttttaacctagaaatacaacatgggaattaagtcaaaataaattatacatttaaactttttctttatgcaaacatgaagcctcattctcaaacaggaaaatataacagttctgaggtggagcaagatggctgaatagaagcctccaccaatcatgcccctgtgcaggaataccacattttaacaactacctacacataaaaaagcaccatcataagaactaaccatcaggtaagcaatcacagtacctggttttgacttcctctcac

SEQ ID NO: 2887 - DNA, 558 bp, Homo sapiens
ttgggagtcaatataactggattcaaaggccagccctgccctccccttaaatcccagcacatctttgccaacattggtttatcaaacttttaatgttttccaacaaagaggtgataaatgttatcccattcttttaatttacattccaatgacattttaatagaactataaaacaccagagttgaaagagacctcagtgatcaagtactcaaatgccttcgtttaaagaatttttaaattgagtataagtaatacattgacacattatcatggtaaaattatatatatattatatatatatatakagagagagagagagagagagagcaatctattgaatagaaaatgaaaattccactttgcaccttcctctgactctcttactgagggtaaattgatgttcatcattgctacatgatgggtaatttgctacatatctacttgcatatgtaaatgcataaaagtatagtgagttgtggtattttacataaaagatatatagccgtatatctttttttgtaattattattttctaacaacacattctaagggtgtctt

SEQ ID NO: 2888 - DNA, 621 bp, Homo sapiens
catttcattttagtgctgaatgatattctattgtctgtatataccaccatttatttatccatttgcccactgaagggcatctggattgcttctaagttttggccattatcaaaaaaaatgctataaacatttctgtgcacgtttgcacatattgtgtagacataaattttcaactcatttgtgctggagagtcctattccacctttctgctccactggcctgtaattctgtgacattatctacgctgagaggatcttgtcttagttttacagatgagacctaagattatctgtgtataacatgacctccccaggtatgccaatcatttaacttctttccttcctcctttcagaggtctgcttttttgaaaacctcatttgtaaaaaaaaatttgaatttttatagtgctatatagatctgtttattgactacttgggcagtgttacacttttataattatcctaactttacaatacatatcagaagaattctatggtcccatattatatagaaatatgacatcaataacctgtagaataaagataattttcaaaactttctgtcacttatctggattaagaaaatgtggcacatatacaccatggaatactatgcakccat

SEQ ID NO: 2889 - DNA, 645 bp, Homo sapiens
caatagataacacctctgaaatcaggaggttaccaaatattaaaaggactttgacttgattaaaaaaaaatgaaaacaatctaggggtgtccctccaatccatggtatacaattccgtggtaataaatcctagtacagtggaggatggatatccctgtatatttctgcacagcactctcccttctgcacatctcatggaaaagacatttgccagtttgataaagaccagtctttcttcagggctcagttccagatttcccaagccataggccaaacagaatctgcttataaaagcctgattctctcaaatgagtttcagtggttgaattgcaggtcctacagagatgactggtaagcagagaacattaatcctttttcccactgtgtgctagttctgggaacccaaataagtgctctcccagtgttgattggacttagagcattttcttctgtgcctgggaasccgtgaccaacctttagtgccagttggcccacagtgagttgagcagcctgtttataatcggagactttggtcagctgattttgaaatctcctcttcaggaactgtggaaattctaaatccctcactgcaatcttaaatacatttagaaacttggtgggttagaatgggataaagcacactgt

SEQ ID NO: 2890 - DNA, 737 bp, Homo sapiens
ctccttctgtacaattattaaccacttatcaatctggttcccagaacatttttagagtcttcactccatctaatctctagagcctcttgaaaaagtaagttggttttggagtttcccactgaatttrgatctgtcattggggatggtagcagaatttggacatactaattcatccccctaagaatacctgtctccaaagttattccccctcaaaacctaaaaacaccatgaaagccattgcaggatctaacagtagcctatgtaattgtagatttttttttttttttgagatggattcttgctctgttgcccagactggactgcaatggcaccatctcagctcactgcaacctccacctcccaagttcaagtaattctcccacctcagcctcctgagtagctgggattacaggtgcataccaccatacttggctatttttttttttttatttttagtagagactgggtttcaccatattggtcaggctggtctcgaactcctgacctcaagtgatccacctgcctctacctcccaaagtgctaggattacagttgtgagccactgtgcccagccgtaaattctttttataataatggatggatccacaactagaaatgacttcttgaaccttgggatcaattactgactgaacctgaggaactgccttggaaatctgaaagggactgaggtcccctgggtgtggctttcttcctcagttcattttactgcctgctat

SEQ ID NO: 2891 - DNA, 1021 bp, Homo sapiens
ataaaatagagagaatgagaagtaaacaagacagtttttctaagactctgtattattttacttatcaaaggatgacacaggattcttaaagcctaattcattttcagttttctttgattgggaaaatatatatttgtcatgcaaattgccaaatagcattgcatagcaagcaaaagagtaaagcacaaacatcaaggttataggcagactggtcaagacttttggagttactacatcaccacaggtttgcctatccaataattaccagctaaacaaaacagattatcccaacttcaagttgtttctcctccatggtatttcttatctccctgaatggtagtcaatactttaaaaaattatggtagacttgtgtttcctaggtattcctcaaagaaatgcaaaatgaagaacagcatttatacttaagtcaactcatggcttcacacagctatagttgtttgttgtaaataaaattttaagacctgagcaatcatcataattaaaatttagggaggaggtagataaagttttttcattgtgacaaggaagtcaactcactagaatagagctcaattatgttccctatgcaaccccctgttaaactaaataaataatttgttttccaaagtttatgtagacgttaacacaccaagttcaagctaatctctgttgtaaagagaactcagaaaaattaaactatgcttaggctagactgcaaacatctttactttagcagttttaaaaattttatgcaatacttttcccagaggtgaaaccagagaaatgactcagattcatttgttgtaaccttttcctgccatttaatttcataacacatatttctgacacaaaacagagattattttcatcatttaccataaatgyttcattgatcttcatttagaacagccaaaaactcattagctgttttaccatactctatttccttccagtgttgttgagaatcctaatattttaaatggcaatgatatttgtagatgatggcaatagaaaacacatc

SEQ ID NO: 2892 - DNA, 1014 bp, Homo sapiens
ttcctctgaaggagaggcttcctctgaaaaagaggcttcctcaggatgcacattcatttcatgacaagagccaagtccatcaggcacttcagcaccttgtccaaaatgtctgctgatagcaccatcctgtgtgcgatgctgccaagctcctgggctttggggcagccccaggaggagggcgtcatttcttgttctgagaagtggtggtcaggcccaggtgacaccaggagtccaggccctgactcctttgtgtctcagcttgaccccttgagaccacccccttccttggaggtttatgccagcggtgagctgacatcctacctcctatatcctggtgggtcacaaatactaactttaaaagaagcaacgacacccccaccagacacccactcctgtcaatatggaaatatggcccgggaacctcactgccgggaatactcaccgggttatactcctcatatgccaggaggatgtggagtagttcccgctgcctaggaaacagagaaagggggctttggtttgttttgtgcagatgttgttaatttcactttgtctacaaagcctaacagcaaatcccatttcaggttcagatgtttcaccagataagcagtgagctcttcagggcctgagactcttgaagaaatgtttcagtaaaatccacatctgtgacatgcaaatagcccagttgtacagtgacttgcctgatccttttcactctgaatgatttttttttttttttcagtttgcacacacgccagttcagtctgtgkgtgtacagttcctccacggttccaaaccgatgtgcagagtctcccggccaccgctccagcccctcctggggcgactccttcatcctccaagtctccagggtggcccctatgcacccagcctctccccgatccgtcagcccctggccacccagactgcttctcagtccctgtggtttggccttttccagaatggcctaggaatgggaatcctacggtggtagcttattgggtctggcttctgtcc

SEQ ID NO: 2893 - DNA, 1014 bp, Homo sapiens
ttcctctgaaggagaggcttcctctgaaaaagaggcttcctcaggatgcacattcatttcatgacaagagccaagtccatcaggcacttcagcaccttgtccaaaatgtctgctgatagcaccatcctgtgtgcgatgctgccaagctcctgggctttggggcagccccaggaggagggcgtcatttcttgttctgagaagtggtggtcaggcccaggtgacaccaggagtccaggccctgactcctttgtgtctcagcttgaccccttgagaccacccccttccttggaggtttatgccagcggtgagctgacatcctacctcctatatcctggtgggtcacaaatactaactttaaaagaagcaacgacacccccaccagacacccactcctgtcaatatggaaatatggcccgggaacctcactgccgggaatactcaccgggttatactcctcatatgccaggaggatgtggagtagttcccgctgcctaggaaacagagaaagggggctttggtttgttttgtgcagatgttgttaatttcactttgtctacaaagcctaacagcaaatcccatttcaggttcagatgtttcaccagataagcagtgagctcttcagggcctgagactcttgaagaaatgtttcagtaaaatccacatctgtgacatgcaaatagcccagttgtacagtgacttgcctgatccttttcactctgaatgatttttttttttttttcagtttgcacacacgccagttcagtctgtgggtgtacagttcctccacggttccaaaccgatgtgcagagtctcccggccaccgctccagcccctcctggggcgactccttcatcctccaagtctccagggtggcccctatgcacccagcctctccccgatccgtcagcccctggccacccagactgcttctcagtccctgtggtttggccttttccagaatggcctaggaatgggaatcctackgtggtagcttattgggtctggcttctgtcc

SEQ ID NO: 2894 - DNA, 1141 bp, Homo sapiens
acctctaaggacatatgccttcagatggccccaatctcaggagcaaggatcactactttacaactaacgtaaatgaaacctggctgggcacagtggctcatgtctgtaataccactttgggaagccaaggcgggcggatcacctgaggtcaggagtttgagaccagcctggccaacatggtgaaaccccatctctactaaaaatacaaaaaattaaccaagtgtggtggtggacatctgtaatcccagctactcgggaggctgaggcagaagaattgcttgaacccaggaggtggaggttgcagtgagcctagatcgtgccactgcactccagcctgggtgaaagagtgagactcagtctcaaaaactaaataaataaaaaataaacaaagtaaatgaaacccaaagggttgaaccctcaccctagagtagataacatatggaaatagaaagcaggaaaattaattttttaaggtccagcttacttcctctatgatgcgttcccagaccactgtagatcacagggattcaatcatttttgtttatcaatttaacaaatgttgctttcctttcaagtgtcagggactatgctatgatggaaaataagacagtccctcacccccaggatcaaccattgtggatgaatgggcatccaatgatattatcatcaccacaatggctgtgagttaccagacacttaccgtaacccaggtacttgctaaggtgttaagtacatacttcagttatcttcaaaatacccagagaayatggaaataagtataaccaagatattctgatttgtcattttgggtaacaaaataaggacacttctcttttaatattcaaactgatatttcagagttctcctgaagatcccacccttttgcgatgagttccacagcccactcactcccaggggtcagtcctcacagagaagggttgcttgctgctgtccctcccatgcaggatcaccactgaaagtgttctgtcctgcctggtcggacccttccccgtctttgatggctgattcctggagtgcagccagctctgtaggcagtcactttatggatctctctcctcactgtcatgctcacctaagtagccagatgctactatagactagactcctggtgtttgcttac

SEQ ID NO: 2895 - DNA, 1049 bp, Homo sapiens
attctttcaatcaaatatcagggaatagttttgggtgaaatcaggccccatttgtgtgtaaagttgctatagacactctacaagatattagtatatcaggctgagcacagtggctcactcctgtaatcccagcaccttaggaagccaaggcaagtggatcacttgaggtgaggagttcgagacaagcctggccaacatggtgagaccccatctctactaaaaatacaaaaattatccaggcatggtggcgcatgcctgtagttccagctactcaggaggctgaggcataagaatctcttgaacctgggaggcggaggttgcagtgagccaatatcgtgccactgcactccggcctgggctgcagagcaatactcagtctaaaaaaaaaaaaaaaaaaaaacagttattagtgtatccaaagagggaaagacaaaaggagattcatcagagggaaggtggacaacatgaactacaggttctgctatgcggatcttgtattgtctgtgcgttgtacgtacactagcccgtgwcttccttctgcagtcccaggggccatactcctatcctagatgtccctcatcagactctcagaaactaatgccagtggatatgtggactgtcatttcccttactctgattcatgctcagcatgcactcttgtcattataatttgatttctcctataggatgagaacccactaactattacagtccacgtgtcagtcgcgtttctcatcgtgattaacaccccagccattgatttgctcttcagtgtctagtgagcaaggctactgtgaatctttcctcaggaggactgatggagtcacatttctgagcctacagagctgagggcaagacctgagaatggtgatgtcaaaatgccaaccagcgagacctcttggtggccaggtattcagccagccttttcttgggccattccacaatcttgattgagactttttaagatgtcaccttgagataagctgtgtgaatatccaatttaaaaaggtgcagaaggatactctgtgtgtatatatgtgtgtgtgtgc

SEQ ID NO: 2896 - DNA, 1145 bp, Homo sapiens
aatctctcacagagtagtttgagtggtgacacagaatttattgtctttatccatgcttttaataacactaacagacaattcagtgagagctggtgcaattcccaatgtacagacagaataaatgaggcaaatcacaattcatcatcaagaattagatgagccagaaaaatgcctttggtgaaacaagtttcttgcactgacctgtgagaggtttgactgtgaaattttgtcttcttaaaaaagtgaatttgcaatgaaggagtatctgtagaataaaaccagtgaagagctataggaagcagcacagagattgctacatgacacccctattgctctagtgggaggcagcccaatagaaagggaagactgggagctgggagacctgggttccagttctggtttgcagcaactttctgactaatcattggcaagtcactttactactctggctcacagtttttatacctataaaatgaggaaaataaattatgtatggctccaaatgtgaaattgctgcttggttgcatcagaaggcccagggactttttaaaatgcagattcctggctgctttccaagacttaacaaatcagaacctttaggagaagagtcagaacttgggaatcaatatttttaatagctgcatagatgattcttgcaaattaatgaaatacagcttgaatactttcagccacagattgtaagctctggctccttcattcaacaacctaatcacaatccatatctccagggcagcartggagactgtggtggtgtctctggttttgacttagcacaactgttcatcaggatgtatcgcctgggatggttaatgtgtacaaaaaataggtagaaagaataagtaataactactattgatagcataacaggttgactatagtcaataataacttaatcttacattttaaataactaaaagagtataattggaaggtttgtaacacaaagaataaatgcttgagggaatatatatcccatttcctatgatgtgactatttcacattgcatgtctgtatcaaaacatctcatataccccacaattatatgcacctcatatgtacccacaaaaattaaaaatttgaaaaaatttgaaaaagatgtactgcttggattttctaggcaatgc

SEQ ID NO: 2897 - DNA, 1015 bp, Homo sapiens
agcatataacgtttcagaaatttatttgaccacatcacacccattaactatttcagaaatggtattcagcgaaacatcatttggagagtgttggcttatatccagaggccttcttcagtgaaccatctttattttattttattaatgttattattattattactgtttttagagacagggtctcgctctgttgcccaggctggagtgtgttggtgtgatcatagctcactgcaacctcgacttcctggcctcaagtgagcctccctctttggtctcccaaagtgctggtgttataggcataagccaccatgcctggcccactgcaccatctttaaaagaaagtccagagctattggtgagaaaaaaaaggaagaaaataggaacttgaaaggttaggttctggaaacttaattctctgagtgagtagtgtgggtttgtggaaaaggtaaattattattagaaattattggaaattagaatattattatagaattattagaaattattagaaaactatgagttgggtaagtgccaagcttcagggggggaaaaaatacaaaaaaaccctagagatttaaagaagtagggttcctaagtcaaactagtgacaagatacccaattgtacttgtttttaatacatttttaacccttcatagttatatatgaaagtggctttaactactgtttttcttgcctaatcaatgaccttcaaaccactacctcaatgttatcatctcttaagactctgyctctctcttccaactttagccacaggaaatcattgctgtccttcaaacacgctgatcacactctggcctcagagtccttgtgtcatttttttttttttccctatgtctgaaaaacagttccctaaatacaacttcttattctgctctcccaaagggcactccctcaaagattccttctctatctaaaatatcctgccaatactgtctcttaatcttctttacttttcttcacagtgcttactacggcttgaaatattacatatat

SEQ ID NO: 2898 - DNA, 1015 bp, Homo sapiens
agcatataacgtttcagaaatttatttgaccacatcacacccattaactatttcagaaatggtattcagcgaaacatcatttggagagtgttggcttatatccagaggccttcttcagtgaaccatctttattttattttattaatgttattattattattactgtttttagagacagggtctcgctctgttgcccaggctggagtgtgttggtgtgatcatagctcactgcaacctcgacttcctggcctcaagtgagcctccctctttggtctcccaaagtgctggtgttataggcataagccaccatgcctggcccactgcaccatctttaaaagaaagtccagagctattggtgagaaaaaaaaggaagaaaataggaacttgaaaggttaggttctggaaacttaattctctgagtgagtagtgtgggtttgtggaaaaggtaaattattattagaaattattggaaattagaatattattatagaattattagaaattattagaaaactatgagttgggtaagtgccaagcttcagggggggaaaaaatacaaaaaaaccctagagatttaaagaagtagggttcctaagtcaaactagtgacaagatacccaattgtacttgtttttaatacatttttaacccttcatagttatatatgaaagtggctttaactactgtttttcttgcctaatcaatgaccttcaaaccactacctcaatgttatcatctcttaagactctgtctctctcttccaactttagccacaggaaatcattgctgtccttcaaacacgctgatcacactctggcctcagagtccttgtgtcatttttttttttttccctatgtctgaaaaacarttccctaaatacaacttcttattctgctctcccaaagggcactccctcaaagattccttctctatctaaaatatcctgccaatactgtctcttaatcttctttacttttcttcacagtgcttactacggcttgaaatattacatatat

SEQ ID NO: 2899 - DNA, 1285 bp, Homo sapiens
gctagacatagagctgtacacaatgattaggtgagatactgtcatttacccaggcattgtaggaaagcaaactgaggctcatgaagatcaggtaccttgtctcagtcacacagctaggaagtagaagcttctggacttgaaaccagattttgactggctttaactcttgtagctttcagccacaacataactccttccagggttggtaatcaatcatccctctcccctttctcatcagagaaaacgtttcagcaaatatttaatcaatactaacaatatgggattctgcaagtaattcattaccacttattttcattttattttacagcttgatcataacaaaaatagaacagacagagggctgttgtgctggtgctgagagaggctctgaacaggcaggagagattgagcaaaactggataactctagcagacagcagatgctgaatgggattggctgtctaggctcaatcccagggaactgataagacagaaccgtgtgttcagggagagtgataagaaagaactgggtcaatctcagaaacatttgcagagttcaggtgttgaagaaagagacatgagctctcccttttgtattagtggactgttgaagtgaagcccctgaaaccaattttgcactgcacagtgtgaccttggagcaggcatagccctatggtgactgcagagaagaggatatgagaatctcattgtaaatataatcaccctgtcctgtacttggtagctcctggtcttctaaggttgcatctctttctcctcttccttctcatttctgcaccgcctttcagtcctgctcactccaccttccccaccagcagttccagccaccatggaagtgagccccactgcaaggaatactcagtagaaagacagtgtttggaccagagacgtggtatttttttctcttactatcctgaaccctctggcaagcaggaagaaaagatgaaaagagaagaagaaggcagcaaggttgtggctgaggtggttttcagcatccatctgaattggagaggctaatctgtgtagcctgtgatcaacctctccaccaatactgtcagcaccaggtagggggaggtgaaaatactggaatttcagcacaagaagaagctctgtctccatgttagtaatgcaaaaatgaagcagaacataaccatagatcatggaatctttaggaccctcagagacctgaggaccaccttaccatgactcatcaggttgggagactgggggacmgtgcattgtcagagagcccacattcagaggtggga

SEQ ID NO: 2900 - DNA, 600 bp, Homo sapiens
gagtatgtttggtataatctgattttcattaacaatgacaattgttaacaagttactataattactaatcatgaggcatatataatctctccaacaattgtttgtctctcttttgtatctattggtctccttcagattatgggacatttacctgatagtaatatcaaccagagttaaagacagcctttacaaaaaataaaaaaatggccggccgcggtggctcacgcctgtaatcccagcactttgggaggccaaggtgggcagatcacgaggtcaggagatcgagaccatactggctaacacggtgaaaccccrtctctactaaaaatacaaaaaattagccaggcgtggtggtgggcgcctgtagtcccagctactctggaggctgaggcaggagaatggcgtgaacccgggaggcggagcttgtagtgagccgagatcgcgccactgcactccagcctgggcgacagagcgagactctgtctcaaaaaaaataaaaataaaaataaataaataaataaataaaaataaaaaagtaaattatttgggcatggtggcacatgtctgtgatctcagctactttggaggctgaagttggag

SEQ ID NO: 2901 - DNA, 600 bp, Homo sapiens
gagtatgtttggtataatctgattttcattaacaatgacaattgttaacaagttactataattactaatcatgaggcatatataatctctccaacaattgtttgtctctcttttgtatctattggtctccttcagattatgggacatttacctgatagtaatatcaaccagagttaaagacagcctttacaaaaaataaaaaaatggccggccgcggtggctcacgcctgtaatcccagcactttgggaggccaaggtgggcagatcacgaggtcaggagatcgagaccatactggctaacacggtgaaaccccgtctctactaaaaatacaaamaattagccaggcgtggtggtgggcgcctgtagtcccagctactctggaggctgaggcaggagaatggcgtgaacccgggaggcggagcttgtagtgagccgagatcgcgccactgcactccagcctgggcgacagagcgagactctgtctcaaaaaaaataaaaataaaaataaataaataaataaataaaaataaaaaagtaaattatttgggcatggtggcacatgtctgtgatctcagctactttggaggctgaagttggag

SEQ ID NO: 2902 - DNA, 683 bp, Homo sapiens
tgatctaatccactttcttttttgagtaggtttccctgacttcttaaaccccttccaatctgttacttcttagtatatgaatgttggacaaaaaccagcccaataaaatgtaataggaatacatttaagtatcaacaaattgtatttaagctccaaaaagtcaataatatagaatgaagcatacctgatttgacagcaattccaatgaaaaagagttaatacaggccaagaatgtctctactgcttccctccaagtgctctgggctgtgacccagtgaacatttccagatcacagcccatgtttctttctggttgctcactctctgctgagaccctgctccacctcagatcttcacttttgaggcagttgctcgtcatttccagcccaaccctaatgccaccagctttgtggggccatctataagactaycagctggctttgctctcccctccttttgaaacaaccacatttcaccttacctaggaattactgaagttatcaaattgctatgcaaactccttgagtcagggaccagccattccttatattcatggtttctggatccacattagttccttttgtgttgcaggtttttaacaaacattgattgaataaataattggataatatgaggttagcactgcttagaacagatatctttgaccaaatttatgaaaacaca

SEQ ID NO: 2903 - DNA, 567 bp, Homo sapiens
ggcctcccctgagacctgctatatcagactttgctctttaaccatatccccaggagactcacaagcacattaaagtttgagaagtgttgctccccagcagggagaaaaaaaaaaaaagatacaccttcactttttgagttaagctcaggccaagtcctgagctcatgtcaccgcctatggcagatcacactgaaggatgtgccrgtgatctgacccaaatggacttgtctcctttaaacactaaggccactcggataatctgcagaatagaatccctggagcccagtggatgccttatagaatccatacaactcatttgtctgttttgtttccttgctgaaattctgatttacttactgactactgaggggtaaaatgggggaaaggttgagtaataaaagtacttctttatggaagatcaaagatatcctcccccactttcttttcctaaagtggttctccacaagaattgtgggtaaaggaactcagcacgtgcttcatgccaggattaagaatgcaggtacgggagacagccttcctgggagcaaggcagaactctgcttgctg

SEQ ID NO: 2904 - DNA, 950 bp, Homo sapiens
acacccccaagaagaggaagcatatttgtagctctgcttatttccttcaaatagattcctggaagtagaattaatgaatgaagggatattaacttttcaaaggcttggcagaggctgccaagttgtttaccaaaaagggtgcgtagtcctttttaactagacgaccacatttagattttatgaagatcaatatttggctagatctaggggccacgactcttacagttctgtcttaccctagtatagacactttcctctttttcagaaagkcatttgaccgtgtacttatggctaaagtaaatcctgcttctcattcttgcatttataacctttactgagccagtctcacattcatcatggtggtgggcatgcgatgtattcatcagggttcatccccggctgccagctctcctccactctacactccccttggtgacttcctctactcacatgggtttagctacaaatcagatgttcattattcctaagtgtgaacccctagccctggctttccttgcaagttcagacctacacagaagacgatcacagctgacgggtccactgttgatctggtctcaccagctggaatcacagtatcttcttccctgtttctaatcctgtgtgtctgttcaccacaccctaccacatttatcccccagtgtttctggaattacttcctccttctccataaagtgaccatccaagctcactttatttcaagccctcatcatctgttgctggacatcaccatgacctcaggcgatgccagggtcttcatgagcatggaaccaaatcaacatggaagaacaggtcatgaggagccaggtcacctcagccatggagctccccacagactcccacgcatgcccacaacatctctaacaacagcgattacaggaaacagcaactattaacattgcacagctcttctacaaagaactttcacatgc

SEQ ID NO: 2905 - DNA, 950 bp, Homo sapiens
acacccccaagaagaggaagcatatttgtagctctgcttatttccttcaaatagattcctggaagtagaattaatgaatgaagggatattaacttttcaaaggcttggcagaggctgccaagttgtttaccaaaaagggtgcgtagtcctttttaactagacgaccacatttagattttatgaagatcaatatttggctagatctaggggccacgactcttacagttctgtcttaccctagtatagacactttcctctttttcagaaagtcatttgacygtgtacttatggctaaagtaaatcctgcttctcattcttgcatttataacctttactgagccagtctcacattcatcatggtggtgggcatgcgatgtattcatcagggttcatccccggctgccagctctcctccactctacactccccttggtgacttcctctactcacatgggtttagctacaaatcagatgttcattattcctaagtgtgaacccctagccctggctttccttgcaagttcagacctacacagaagacgatcacagctgacgggtccactgttgatctggtctcaccagctggaatcacagtatcttcttccctgtttctaatcctgtgtgtctgttcaccacaccctaccacatttatcccccagtgtttctggaattacttcctccttctccataaagtgaccatccaagctcactttatttcaagccctcatcatctgttgctggacatcaccatgacctcaggcgatgccagggtcttcatgagcatggaaccaaatcaacatggaagaacaggtcatgaggagccaggtcacctcagccatggagctccccacagactcccacgcatgcccacaacatctctaacaacagcgattacaggaaacagcaactattaacattgcacagctcttctacaaagaactttcacatgc

SEQ ID NO: 2906 - DNA, 950 bp, Homo sapiens
acacccccaagaagaggaagcatatttgtagctctgcttatttccttcaaatagattcctggaagtagaattaatgaatgaagggatattaacttttcaaaggcttggcagaggctgccaagttgtttaccaaaaagggtgcgtagtcctttttaactagacgaccacatttagattttatgaagatcaatatttggctagatctaggggccacgactcttacagttctgtcttaccctagtatagacactttcctctttttcagaaagtcatttgaccgtgtacttatggctaaagtaaatcctgcttctcattcttgcatttataacctttactgagccagtctcacattcatcatggtggtgggcatgcgatgtattcatcagggttcatccccggctgccagmtctcctccactctacactccccttggtgacttcctctactcacatgggtttagctacaaatcagatgttcattattcctaagtgtgaacccctagccctggctttccttgcaagttcagacctacacagaagacgatcacagctgacgggtccactgttgatctggtctcaccagctggaatcacagtatcttcttccctgtttctaatcctgtgtgtctgttcaccacaccctaccacatttatcccccagtgtttctggaattacttcctccttctccataaagtgaccatccaagctcactttatttcaagccctcatcatctgttgctggacatcaccatgacctcaggcgatgccagggtcttcatgagcatggaaccaaatcaacatggaagaacaggtcatgaggagccaggtcacctcagccatggagctccccacagactcccacgcatgcccacaacatctctaacaacagcgattacaggaaacagcaactattaacattgcacagctcttctacaaagaactttcacatgc

SEQ ID NO: 2907 - DNA, 1233 bp, Homo sapiens
tgggactgcaggcatgagtcaccatgcccggccagatgatgaattttaaaatcaagttttattatggggaaactgaagacccacagatattggggtgctggcctagggtcccacagacagtggtagagagaatgctggcttcaagtctcccagtgcaaaatactttaactaccgtcccctttcacttcactagtcagcagcttcgcaaactgcattttcaatgccatgccccacatgggacttatgtgtcctgcttgttttctaattcagtcagtgaagagcaggcggccccagcagctggaaacaatgtgagcttgatggttaaggacatggaccctgaggtcagaagccagggctcaaattctggctccattgcttaccagctggataactgctgggcaatctaacctctctgaacatcagttatctcatctttrtcatggggacaataacacacagggactccatagataggatatagtgagatgtataatgcttagtatagcacctggcacaaacagaatgctcaataaacattagctattacagtatcccccctcccttatccattaggggtacatcccatgacccccaggggatgcctgaaaccaaggatagtacctaaccctatatacaccacgttttttcctatatatgcatacctatggtaaagtttaatttataaattaggcacaagaagatatcaaccacaataattaataataaaatagaacaactctaacaatatactataataaaagttatgtgaacgtctctctctcaaaatagcttaccatgctgtatgcacccttcttcttgtgatgatgtaagatgataaaacgcctacgtgacgagaagtgaggcggatgatgcaggcatcgtgacatagcacttggctattattggcctcgagctcaagccctctgctacttgacagttgacctgataaccaagccaggtactaagtgactgatggcaggcggtgtgtacggtgtggccacactggacaaagcagggttcatgtcccgggtgagacggtgcaagatttcatcatgctactcagaatggcgggcaatttaaaacgtatgaactgtttgtttctggtattttccatttagtattttcggactgtggttgactacgggaaatggaaaccatggaaagtgaaaccgtgggtggcggggtggaagctactgtgttacttcccttgctcaccgcaccaccttcaaatct

SEQ ID NO: 2908 - DNA, 1233 bp, Homo sapiens
tgggactgcaggcatgagtcaccatgcccggccagatgatgaattttaaaatcaagttttattatggggaaactgaagacccacagatattggggtgctggcctagggtcccacagacagtggtagagagaatgctggcttcaagtctcccagtgcaaaatactttaactaccgtcccctttcacttcactagtcagcagcttcgcaaactgcattttcaatgccatgccccacatgggacttatgtgtcctgcttgttttctaattcagtcagtgaagagcaggcggccccagcagctggaaacaatgtgagcttgatggttaaggacatggaccctgaggtcagaagccagggctcaaattctggctccattgcttaccagctggataactgctgggcaatctaacctctctgaacatcagttatctcatctttatcatggggacaataacacacagggactccatagataggatatagtgagatgtataatgcttagtatagcacctggcacaaacagaatgctcaataaacattagctattacagtatcccccctcccttatccattaggggtacatcccatgacccccaggggatgcctgaaaccaaggatagtacctaaccctatatacaccacgttttttcctatatatgcatacctatggtaaagtttaatttataaattaggcacaagaagatatcaaccacaataattaataataaaatagaacaactctaacaatatactataataaaagttatgtgaacgtctctctctcaaaatagcttaccatgctgtatgcacccttcttcttgtgatgatgtaagatgataaaacgcctacgtgacgagaagtgaggyggatgatgcaggcatcgtgacatagcacttggctattattggcctcgagctcaagccctctgctacttgacagttgacctgataaccaagccaggtactaagtgactgatggcaggcggtgtgtacggtgtggccacactggacaaagcagggttcatgtcccgggtgagacggtgcaagatttcatcatgctactcagaatggcgggcaatttaaaacgtatgaactgtttgtttctggtattttccatttagtattttcggactgtggttgactacgggaaatggaaaccatggaaagtgaaaccgtgggtggcggggtggaagctactgtgttacttcccttgctcaccgcaccaccttcaaatct

SEQ ID NO: 2909 - DNA, 573 bp, Homo sapiens
gcggtgcgtgcttcctcttcaccttctgccatgattgtaagtttcctaaggcttacccagaagcagaaacctgtacagcttgcagaattataagccttaaatatctcttctctataacttacccagtctcagatatgtcttctagcagtgtgagaacagactaatacagtggatatatatttattatataatacaatrcatattttatatataatatataaaatatataatatataatatatagatatatattatgattttttatccattcatctgttttttaacatcaaaattcataattttaatgaattgaaaacattaaatctatggaaatccgtgaatctacagaagaaaatgcttatttgacatcatttaaggtgactcttaaatcacctccttactttgaaaactggtatttaaaggtgtaaagaattaagcctttgcactacttgatgaatgcctttacaaaaaaagaaaaaagaatgaagcctttgttctgacttcctagcactgattattttgaggaattttaaattgtattgtatgtgatattgtttcagttgagaggtaaat

(The sequence listing continues in the following parts.)

1. A SNP probe consisting of an oligonucleotide that is complementary to a SNP nucleic acid selected from the SNP nucleic acids shown in SEQ ID NOS: 375,636-1,335,663.
